United States Patent Application Publication US 2005/0228172 A9 - sequence listing, part 91

SEQ ID NO: 413240 - DNA, 713 bp, Homo sapiens
ggttgtggacactatggaaattgagaagctacaacatttttttaagctaaagtgtagtccagagaaatgccctaactctcttcaaatctacgaaggctgagaaaggtgaggtggctgaagaaaagtaggaatctagcagaggtcacttcatgagatttagtggaagaagccatccctataacaaaaaagtacgaggtaaagcagcaagtgctggtaaagaaccagtagcaaattatccaaaagatctagctaagatcattgatgaaggtggctacaccaaacaacagatgttccacctagawaaaacagtcttctattggagtaagatgctatctatgactttcatgctagaaaggagaagtcaacggctggctccaaacttcaaaagaccggctgactctcttgttaagggcttatgcagctggttactttaagttaagccaatgctcttttaccattttgaaaaacctaagacccttaagaattatgctaaatctattttgcctgtgctttataaatggaacaacaaagcctggatgacagcacatttgtttacagcatggttttctaaatattttaagcttgctgttgagatttactgctcgggaaaaaaatattcttttctaaatactactactcattgacagtgctcttagtcacccaagagctctcatggaaatataaaaagagattaatgttttcatgcctgctaa

SEQ ID NO: 413241 - DNA, 713 bp, Homo sapiens
ggttgtggacactatggaaattgagaagctacaacatttttttaagctaaagtgtagtccagagaaatgccctaactctcttcaaatctacgaaggctgagaaaggtgaggtggctgaagaaaagtaggaatctagcagaggtcacttcatgagatttagtggaagaagccatccctataacaaaaaagtacgaggtaaagcagcaagtgctggtaaagaaccagtagcaaattatccaaaagatctagctaagatcattgatgaaggtggctacaccaaacaacagatgttccacctagaaaaaacagtcttctattggagtaagatgctatctatgactttcatgctagaaaggagaagtcaacggctggctccaaacttcaaaagaccggcygactctcttgttaagggcttatgcagctggttactttaagttaagccaatgctcttttaccattttgaaaaacctaagacccttaagaattatgctaaatctattttgcctgtgctttataaatggaacaacaaagcctggatgacagcacatttgtttacagcatggttttctaaatattttaagcttgctgttgagatttactgctcgggaaaaaaatattcttttctaaatactactactcattgacagtgctcttagtcacccaagagctctcatggaaatataaaaagagattaatgttttcatgcctgctaa

SEQ ID NO: 413242 - DNA, 387 bp, Homo sapiens
tttagcttctaatttttcttcttcccttactaacggtttagtgccctttgctgttatttttcttctactcattccttgaatgttgatgtttctagattatctgctcctttcattacccacactctccctaggtaatcacatctactctgacaaatagagcaatcacatctattaagaagggtcaacgttaggataatatgacaatgagaccctacaaaactcaattacttaaagaacaaatacctttaaaaaattcacaaaacagttcaagatgagtactttaggctggtgggaggctttgttccagtgacycaggtttccttcaaatcacttcttcaccattctgtagggcattgctgtggctccgtgatcaatggtggattgttc

SEQ ID NO: 413243 - DNA, 543 bp, Homo sapiens
ctattaataaatagctatatccctgtatctgcatgtagcagtgtgaaagaatcatgtaggcctttatttagaaatttcccccttgtttggctgccattttttggtggcttgaatttttttttttttttttaataataggatatagctagcaaggtcttctacaatgtcagttcaattaatgttttcaaaaatggaatctattgtgcctgccctattgttttcacatagaaatgggtagcttagccttggtatcttggcccaaatgctacattattttttcaaaakattcagctccaattcgacttgaaaagttgcctatgtcgttgacattgccaattacattttatcaaagtctgtacttcgttggctttccaaaataagcagaggagaattctgatttttagtaggtggtccagtaattgcaggccttgaaaaatttcagataaattttaatttttatgtaaaccaatacccttattaaaattctgtcaatataaaaattttatccccataagctccatcagcttatgtgaagcagcattc

SEQ ID NO: 413244 - DNA, 540 bp, Homo sapiens
cactatggaagggctggtactggattccaatacaaagttccacaatcactgcactctccctccctcaagcacacagattctttctctatgcaatgtggctgctcctgggggacgggggaggggtggtattagcaatttaagactgtcttttctaccatttgccgtgcctctttccttgatttgatgttaaaaaaaggtactgtgatcacttacctgattttttttatgaaggtgctttcttgcatggatagttgtaaaatgtggtgttcctgcaggaagtgtcaaacactggagggttctatttagccatcttactccacttctctctctagagttgatatatatatatatatatatatatatakagagagagagagagagagagagagagagagagatattatatatatatatatctgtagagatatatatatattatatatatatagagagagagagagaaagagaaagagagagacattagaagtacaaaatgggaaaacatacataaaggataataaattcatcaaaaagatattt

SEQ ID NO: 413245 - DNA, 566 bp, Homo sapiens
ttgttgtaagatacatatctattctggatacaagttctttagcatatatgtattttgcaaatattttctcccagactataatttgttttttcattttcttaataatgaattttgaagaatatctttttcaaaataaatgaatacacaaaagtgcaaacatttagtgataagcagataattaaaataggttgctgtgatggaggacaaatgagtggccacattagattggatggttaatgtaggcctctctgttgaaatgacatttttaaacttaggtgtgaatcaggggaaagagtattccagttaatagtaacagaaggccctaagatggcatgatgkttaattttaggtgtcaacttgtctgggttaagggatacttatagagctggtaaacttatttctggatgtgtctgtgagggtgattctgtaggagactgacatatgagtaaatggtctgagtggggaagacacaccctcccaaggtgaggcagcttccagttggctgagggtctggattgaacaaaaaggcagaggaaaggcaaatattttctcacctagagctgaga

SEQ ID NO: 413246 - DNA, 534 bp, Homo sapiens
aagcctgctgcagaaatttgcataaataatgaggagctgaakgttactcaccaagacaatggggaaaatgtctccagggcatgtcagaaaccttcacagcagcccctcacatcacaggcctggagacctaggaaggaaaaatggtttcctgggttaggtccagggctcccttgggactttgtattctgcatcccagccactccaagccatggctaaaaggggccaaggtacagctcaggccatggcttcagagtgtgcaaaccccaagccttggcagcttccacgtggtgttgagcctgctggtgcacagaagtcaagaattgaggtttgggaacctccacctagatttcagaggatatatggaaatgcctggatgtccatgcagaagttagctgcaggggcagagccctcatggagaacatctgctagggcaggaagaagggaaatgtggggttgggtccctcacacagaatccctactggggcactgcctagtggagctgtgaggagaaggccagtgtcctccacaccccag

SEQ ID NO: 413247 - DNA, 534 bp, Homo sapiens
aagcctgctgcagaaatttgcataaataatgaggagctgaatkttactcaccaagacaatggggaaaatgtctccagggcatgtcagaaaccttcacagcagcccctcacatcacaggcctggagacctaggaaggaaaaatggtttcctgggttaggtccagggctcccttgggactttgtattctgcatcccagccactccaagccatggctaaaaggggccaaggtacagctcaggccatggcttcagagtgtgcaaaccccaagccttggcagcttccacgtggtgttgagcctgctggtgcacagaagtcaagaattgaggtttgggaacctccacctagatttcagaggatatatggaaatgcctggatgtccatgcagaagttagctgcaggggcagagccctcatggagaacatctgctagggcaggaagaagggaaatgtggggttgggtccctcacacagaatccctactggggcactgcctagtggagctgtgaggagaaggccagtgtcctccacaccccag

SEQ ID NO: 413248 - DNA, 534 bp, Homo sapiens
aagcctgctgcagaaatttgcataaataatgaggagctgaatgttactcaccaagacaatggggaaaatgtctccagggcatgtcagaaaccttcacagcagcccctcacatcacaggcctggagacctaggaaggaaaaatggtttcctgggttaggtccagggctcccttgggactttgtattctgcatcccagccactccaagccatggctaaaaggggccaaggtacagctcargccatggcttcagagtgtgcaaaccccaagccttggcagcttccacgtggtgttgagcctgctggtgcacagaagtcaagaattgaggtttgggaacctccacctagatttcagaggatatatggaaatgcctggatgtccatgcagaagttagctgcaggggcagagccctcatggagaacatctgctagggcaggaagaagggaaatgtggggttgggtccctcacacagaatccctactggggcactgcctagtggagctgtgaggagaaggccagtgtcctccacaccccag

SEQ ID NO: 413249 - DNA, 643 bp, Homo sapiens
catggacacctaccttgctcagttcatcaaatatccttggactcattattttcagaaagggtaaggaagaagatagaggcaaaaaagatttttgaagaracttcaaatggaataaagagggcttgatcaggagagactttgtttaaatcaaggtttattatctttctccccagactaacactttcttctttttctatctgttgtagcattctcataatcttaaactctggtgaaaacagaaaattattgtcagtgaacgtctactaaatacaggttagaaaataatttttgtgagaagttttccaagccatgggagtttcttccttatcctaagtaccttgaaataattttctttggagttgtaaaggcttgggaacatataatgaaaaagaaacacttcttactaaaatgtcgtaagaatgccaacttctcctgtgtctttggcccctggggtgggaaggcaacttttcatgttgaacaaggattatatcctggcatcacaaatctgtttaaaccttggaaatcaaacgtactgattcctcttccaaaaactgtcattaattcattgtttcattagacaggtcctggactttggtttctcttctggtaaagtgagaacagtgtctcccattagccaaaataa

SEQ ID NO: 413250 - DNA, 643 bp, Homo sapiens
catggacacctaccttgctcagttcatcaaatatccttggactcattattttcagaaagggtaaggaagaagatagaggcaaaaaagatttttgaagagacttcaaatggaataaagagggcttgatcaggagagactttgtttaaatcaaggtttattatctttctccccagactaacactttcttctttttctatctgttgtagcattctcataatcttaaactctggtgaaaacagaaaattattgtcagtgaacrtctactaaatacaggttagaaaataatttttgtgagaagttttccaagccatgggagtttcttccttatcctaagtaccttgaaataattttctttggagttgtaaaggcttgggaacatataatgaaaaagaaacacttcttactaaaatgtcgtaagaatgccaacttctcctgtgtctttggcccctggggtgggaaggcaacttttcatgttgaacaaggattatatcctggcatcacaaatctgtttaaaccttggaaatcaaacgtactgattcctcttccaaaaactgtcattaattcattgtttcattagacaggtcctggactttggtttctcttctggtaaagtgagaacagtgtctcccattagccaaaataa

SEQ ID NO: 413251 - DNA, 643 bp, Homo sapiens
catggacacctaccttgctcagttcatcaaatatccttggactcattattttcagaaagggtaaggaagaagatagaggcaaaaaagatttttgaagagacttcaaatggaataaagagggcttgatcaggagagactttgtttaaatcaaggtttattatctttctccccagactaacactttcttctttttctatctgttgtagcattctcataatcttaaactctggtgaaaacagaaaattattgtcagtgaacgtctactaaatacaggttagaaaataatttttgtgagaagttttccaagccatgggagtttcttccttatcctaagtaccttgaaataattttctttggagttgtaaaggcttgggawcatataatgaaaaagaaacacttcttactaaaatgtcgtaagaatgccaacttctcctgtgtctttggcccctggggtgggaaggcaacttttcatgttgaacaaggattatatcctggcatcacaaatctgtttaaaccttggaaatcaaacgtactgattcctcttccaaaaactgtcattaattcattgtttcattagacaggtcctggactttggtttctcttctggtaaagtgagaacagtgtctcccattagccaaaataa

SEQ ID NO: 413252 - DNA, 567 bp, Homo sapiens
ttttctggcattttgtatgtttctttatcattggggcctattactggagaattactgtgttcttttggaggcatcatgtttcctggctttttcatgtttatatgtttctagtttgatttcaatgcatctggtgaaatagtcacctcttccaattttatggagtaggttttgtagagaaacatttattcatatgaatgggacttgggggtgtcagttagatggggtgcattgcctctggttctaggtagatgcaatagtgtagtctctacctaagtttttcagccataagtcacactaatgacatatgggagtttctcagtggcttgggctgcaagggcttgtggcagcaggcatgtggctctgctgatgatggactcgccaggtttcttaggacaggtgcacatggtgggtcagctgacttggggtttggatctctggggttgtggtcctggggttatttctctggccaggagcatggatgcacagttgctcagctggcctgggggtgtttcagttgtgagtggcctgtgaggttrtttcttagacctgggatggggtgcaaggttg

SEQ ID NO: 413253 - DNA, 595 bp, Homo sapiens
ttatggcaagatgtgtagtgtagtgtttaagygtggcaattttaatgaagagagctgggagtgcttttgcaaaagatgactaagtagaaaacaatgtgtgatatctcacattttcaaatagtgttgtcattaaaagtaaagggtctgaactcaagctgattgagttccaatataggttctactaattcccagctatgaaactttggtcaagttattttacctcccttagcctcagttttctcatgttgtaaaacaaagttttcaccttcctccaaaggttgttatgaggataaaatggcataaagtagtcaaagcccttgtgggccagagcctaacaggaagtaagtggttaataaatatattatcatcattattattatcattcaaatggtgttaaagtccagcagttcttcctgaaatgtgaaaaactccggagatcttttctccttggctattagtttatggtcacaaataatgtctttagatttttctgtatctgttcataaagttaggcaaaaacatatcatgggattattatgtgattaaaataagatagtctatgtacagtgcctagcaaagtaccttgtgcttgata

SEQ ID NO: 413254 - DNA, 557 bp, Homo sapiens
cgtggctggcacgcctgtaatcccagcactttgggagcctgaggtgggcagattgcttgagcccaggagttcaagaccagcctgagcaacataacaygaccctcatgtctacaaaaaataaaaaattagctggatgtggtggtgtgcgcctgtggtcccagctacttgggaagctcaggcgggaggatcacttgagcctaggaggtcgaggctgcagtgacccgagatggtgccattgcactccagcctgggtgacagacagagaccctgtctcaaaacaaacccacaagcaaaaatcacagaaaaagtagcttcatctgtttctcctggctgtttttggctatggcttctaggaaatctaaaatcgcatgcttgcgtggctcacacctgtttccttgggcaggactgctgcagcgatgttttcacgccccctttctttgcctctgtttatttgtaaaactgcaaggctgcagcaggcaaaatacaggaccctcgtgctctaagcttgtcaggttccagcctggagttggtcagagatcttgaaccgactcaacttg

SEQ ID NO: 413255 - DNA, 555 bp, Homo sapiens
ctcttgggctggtttcagtaccccctttctatttatcaattcctcaatcatgaggaatccagttgtcaatccttctgggtacttcatgttgaggaggggtgttgtcagaagctccataccatggttgaccatgtagccacccaggaatcaaaggttaatctaatatagagttttcttctgacatacaatatttctcttcagtccaccacttccaccaaagacaaatcaaagaaggaccaatctacttgaaaaattakctttagtcccatatacttggcttgattacccacaaaaaatgtgacaagaattattgtccatatatactctccctaattggctttactgaaacatctcaaaggtcattttggtcagagccctgagaaaataaccagttccttcaaatgtgtctcattacaaaagaaaacttgtggttattaactgtatgcaaacaaacacaataccatgaattaagacgtttcacaaatagtttacaaattctggagaaattgggcaaagaaagagaaacatgactcaaattatgtttacgaaactata

SEQ ID NO: 413256 - DNA, 559 bp, Homo sapiens
ggactcttgggctggtttcagtaccccctttctatttatcaattcctcaatcatgaggaatccagttgtcaatccttctgggtacttcatgttgaggaggggtgttgtcagaagctccataccatggttgaccatgtagccacccaggaatcaaaggttaatctaatatagagttttcttctgacatacaatatttctcttcagtccaccacttccaccaaagacaaatcaaagaaggaccaatctacttgaaaaattagctttagtcccatatacttggcttgattacccacaaaaaatgtgacaagaatyattgtccatatatactctccctaattggctttactgaaacatctcaaaggtcattttggtcagagccctgagaaaataaccagttccttcaaatgtgtctcattacaaaagaaaacttgtggttattaactgtatgcaaacaaacacaataccatgaattaagacgtttcacaaatagtttacaaattctggagaaattgggcaaagaaagagaaacatgactcaaattatgtttacgaaactatac

SEQ ID NO: 413257 - DNA, 585 bp, Homo sapiens
aaaaaccacatatgacttacacagactatccacaacatgtctgggctttccattcagtcccagattttttccttcttcttaaataactagtcattttatcctaggtcaaaaaattaaccatayaatgtcttttatcatataaaattatctttttttataaattttctctccaaaaatgcattttcatatacattactttcctcacatctctctcccctacttactagttccttactactatgtttcataaataaccttttaaagtctataatttaaattaactttaatataacttctgaattagataacataattctttgtcccactaataacacatctttaggtatattttatatatataactatatattaactataattcttatccttggtaaccttaaattttagtgaaaaccaaggaagtaagatttagtgaaaaccaagaaagcaagaaatcctaagctgcctatcaggtattagcattttatgaatgtgaagaattccacattttttagaacatgtttctaaccttttctgaattagaaatgatgtaaccatttgataaaaatattttaaattgcacaa

SEQ ID NO: 413258 - DNA, 581 bp, Homo sapiens
ataacattaaatattatatacgtgtttcatttatttgtgtctaatatctcataaaaatgaaattttaaaattcattccaggatgcataatgcttacaaaaaggttatgttagcagctttccagtgctttctgctactaaaataactcttgttttctccataaattgtgaaactaaatagctgaaatctgtagttaagcctgtctcaccagatgccttctgaaatgatctttttgataatctagagaaagcagacatgtaattccactctttaaaaaatcatgataattacttttaaaattaaacktcgaaaattatggtcttgatttacattttctaagtaaacaaaatagtgctactgcaaagtctgcccaagtaaatgttatttctgctgatattttggtttaaaagtcctggaaggacataaaggtcatttctgcgcattaccattcccccaaagcaatggcaacccttattttctattaaacagatacatattttaaggggtttatccacttacacatatttaagggttttattcatttttctagacctactattaaaacgtacctccatttgggta

SEQ ID NO: 413259 - DNA, 642 bp, Homo sapiens
ttttttaaaggtacgttgatcagaataagctaaattttgctttgatcataaactactcccaattctcatctgcttataaaaactaatgtgtgtcatttaagttaaatggtcattgtgggtcagttttgctctataccacattgccttaattccatmtctgtaataggcagacagctcatatctataatattgttggtgttgaggaaaaagaaacacagaaaacaagtgagttcttaaaacatcagctctgaagtggccaaaaagttatctgaccactcctaggtccaagagcatagggaagtaaaatcctcctgcaagtagagacactaacaagcccgccataatttctttttcagggacagaaagcaaataattaaatattttgatcaataactttaaaacactgtgtttggcatataatcttggattcttagtagatatatgtgtgtataggattctgtaaatatgtgggcaacaatttgatagcaaatctaattgggggtaggagagggatataagaaacaatgaaataatcacctaggtcagaatatggttgcttctgataaaaggtttttgaaaaatgtcagcatatagaataacttgcaaatgttatggtacacaaaagagacaggttcaaagaaa

SEQ ID NO: 413260 - DNA, 593 bp, Homo sapiens
ctttgtatctgatatcatatttcatatatccttttgcaattttttccagttagactcgttttgaggtgtatccatgttgttccacgtagtgaagttttttttaaatattcattttagctgattctaccagtttaattttttattcttctgtttattgacacttaacctagtcttttaaaatttttgagatcaatactgtagtgaacattcatgggcatatctctttatrcatatgcatgaacatttctcagtgttatcaagttgggagtgaaaaaattgtgttacagaatgtgtacatcttcaactttatttaaggtgtcctataaggttttatatgttgcttcagtatttggcgatttttttctattggcccagattttagtttaccttaaaataattttttgctatctgctttttcacaacaaatatagtatttatgtgatttccaggggagtaatgaatgtcttacattttctccctttagcataattctgctgttttattgaattaaaattaaaaacatgatgtattattttgaaattactctacttaataaatgtaaattagtatgactgcattacaagaaatatata

SEQ ID NO: 413261 - DNA, 513 bp, Homo sapiens
ggggttgtggggtaaggggagggagagcattaggagaaataacttatgcatgcggggcttaaaacctagatgatgggttgacgggtgcagcaaataaccatggcacatgtatacctacacgtcctgcatatatatcccataactgaaagtattataaataaatttttaaaattcttttttctttgtttttgtcagattgggttaattctaaagtcttgtctttgagtactcaagttctttcttctacttgtttaattatattgttgaaactttccagtataatttgcatttctctaagtgtgtctttcatttccagacattgtgattgtcttttctttataatatatatttctatggagacttttacaaaccatattctgtattgtttttcaaaatttatttgttggttttcacctttctctggtatctctttgagtrgcttaacaatcaaccttttgaatttttttatctggcatttcagaaatttcttattggtttcgatccattgctgga

SEQ ID NO: 413262 - DNA, 588 bp, Homo sapiens
acctccacctaaatttcagaggatgtatggaaattcctggatgcccagaaagaagtttgctgtgggagtggaaccctcatggagaacttctgctacagcagtgtgaaagggaaatgtggggtcagagcccccacacacagtcctcactagggcacgacctagtggagctgtgagaagagggcaaatgtcctccagatctcagaatggtagattcaytgacagtttgcactctgcttgcaccatgcacttcgaaaagctgcagacactcaatgtcagcccatagaagcaaccaggatgggggatgtaccctgaaaagccacaggggtggagttgtccaaggctgtgggaacccaccacttgcatcagtataaactggatgtgagacatggagtcaaagcagatcatttcaaagctttaacatttgactgccttgctggatttaggacttgcatgggcctgtagccccttcattttggccaatttctcccatttaaagagggtgtatttacccaatgcctgtatctccattgtatctggaagtaactaatttgcttttggttttacaggctcacaggcagaagggacttg

SEQ ID NO: 413263 - DNA, 588 bp, Homo sapiens
acctccacctaaatttcagaggatgtatggaaattcctggatgcccagaaagaagtttgctgtgggagtggaaccctcatggagaacttctgctacagcagtgtgaaagggaaatgtggggtcagagcccccacacacagtcctcactagggcacgacctagtggagctgtgagaagagggcaaatgtcctccagatctcagaatggtagattcattgacagtttgcactctgcttgcaccatgcacttcgaaaagctgcagacactcaatgtcagcccatagaagcaaccaggatgggggatgtaccctgaaaagccacaggggtggagttgtccaaggctgtgggaacccaccacttgcatcagtataaactggatgtgagacatggagtcaaagcagatcatttcaaagctttaacatttgactgccttgctggatttaggacttgcrtgggcctgtagccccttcattttggccaatttctcccatttaaagagggtgtatttacccaatgcctgtatctccattgtatctggaagtaactaatttgcttttggttttacaggctcacaggcagaagggacttg

SEQ ID NO: 413264 - DNA, 592 bp, Homo sapiens
aaaaacacaggggaaaagctccatagcatttgtctgggcaatgggattagataaaataaaaaaattttgcacagcaaaggaaacaatctacagagtttgagacaacccaaggaatgacaaaatatatttgcaaatcatatagctgataagtggttaaattccaaggtatgtaaggaattaaaacaattaaagagtgagaaaacaaataagctgcttaaaaagaaatggacctgaatagatgttgcaccaaagaagacatacaaatggccacaggtgtatgaaaaaatgcccaatatcagaaatcatcagggaatcgtacatgaaaaccacaatgggatatcacctcatacctcttaggatggctattataaaaaagacaatatataatgtattagtcaggggtctctagagggacagaactaacaggatatatattatatattatgtatatattatatatattatatattttatatataaattatacatatattagatayacacacacacacacacacacacatatatgtaaaggggagtttattaatcacaaggtcccacaataggctgtctgcaagcttgaggagcaagg

SEQ ID NO: 413265 - DNA, 507 bp, Homo sapiens
gattaacctaatgtgtgtgtgtttatgtcttagtttttaacaaaaacatttagaaagtaaatttttaaaaatacaataaatttaaaatagataaaagcttgcagaataagattatgaagatagaaatatttttgtacagctgtacgatttgtgttttgaaccatgtcattacaaagcagtcaaaaggatgatcaaaattaaaagtttatacagtaaaaatttatagcaagctgttaaggtattattgaagaamgaaaattttaatataaatttagatttgcataagtgagtgtgtataaagtgtacagcagtggacagtaatgttctaaaccttcacactctctcatcactcactgacatccagagcaactttcagtcctgcaaactaaatttatggtaagtgccctatgtagatgtatcctgttttttatcttatataccatatgtttactgtatcattgctgtttagattatttagatacacaaacactttccactgtgttacaa

SEQ ID NO: 413266 - DNA, 507 bp, Homo sapiens
gattaacctaatgtgtgtgtgtttatgtcttagtttttaacaaaaacatttagaaagtaaatttttaaaaatacaataaatttaaaatagataaaagcttgcagaataagattatgaagatagaaatatttttgtacagctgtacgatttgtgttttgaaccatgtcattacaaagcagtcaaaaggatgatcaaaattaaaagtttatacagtaaaaatttatagcaagctgttaaggtattattgaagaaagaaaattttaatataaatttagatttgcataagtgagtgtgtataaagtgtacagcagtggacagtaatgttctaaaccttcacactctctcatcactcactgacatccagagcaactttcagtcctgcaaactaaatttatggtaagtgccctatgtagatgtatcctgttttttatcttatataccatatgtttactgtatyattgctgtttagattatttagatacacaaacactttccactgtgttacaa

SEQ ID NO: 413267 - DNA, 586 bp, Homo sapiens
tgtgtgtgtgtatagatatatatatatatgtctatataaacatcatgttatatattaaaataatacacataatttttctgtcaatttaaaraattagaaagtacatatagaataaataactgtataactttaaaagcagtattgttataatggttgacattatttcacagttttatggtagatattttagttctgagatggaaacagatccaaagggacatttgacatttagcatctttctttgggctctccttacaaatgatgttatcctgacatcttgtcagctttttaaggaacccactaaaatgtttattctattattttcatatgaaagatcttttcttctggtaacatatagatcctcagtcttgtttatagatacagttggctttggaatttctaatttgtttacatccttatatctttttccatagctaagctgttagttttgacaatttccttcagtcaaacagtattatcattgttgtgccagttaacaagatctgatgtgtagtaaacactaacgaatttcaaatgtcacttgtaaaaatattttgtgacccactataccacttagctgtctgat

SEQ ID NO: 413268 - DNA, 634 bp, Homo sapiens
taactccccagggaaaggagttacctcttcccattgattagtaaagtaggtttgtgatcaataaatatagaatacaaacaagggtattcaatgaacaaagtgtatgcttagtaaataataatgtggctattttgccattattactaaagaagcagcatgaccttaaagtacatatgaagccttcctaaaagagcacaaaagaaagatttgacaaatacatttgcttttccattgtcaagaacgtttcccatgccgtctgtcatcaggagttattcacatttaaagatggaagtaagctattgttattcctaatgaacacactgaaatctatgctgcctgattttaacatttgatactaagactccctcccccacatgaagaagttttttttttttcaaagttgtcttttggggtaataaagtgggatttagaaagagtagttgcttgtactgaaaataaaaatcttcagtgattayatctgctagaagagaatttttgtcaatgtatacagtgatttttttttaaaaaagttaatgtgttataaagaaacccaactgaaaaatactactaaatttaatatttaatatctcaaaatttaaaaaactaaacaagtaaatcagagtaacacactatg

SEQ ID NO: 413269 - DNA, 553 bp, Homo sapiens
aagtatttaaaaactacctataatcctaccacccagagaaaaccattattaaaatatttagtactttcctctattaatgcacatatccagttccatgccaatattcatattttattcttgtggccatgtccggtaaaataagaagaatgacacaaatgttattgagcccacaatatgtctaaagtattattctcaaatctctctgtgtattttctcatagagtcctcacaaaactatttsttatatattattattacattttacacatgaggaactcagaaaaagattaagtgatctaccgcagtcacgcagcttgtcaagtgatggagccacattcaaactcaagcttcaaagcccaagccataaggaacatgctttgtttctatgtattcacaagtaaatatacataggggcagtagaacgttttattttatttatttatttatttttttataattccatctttgtttttttttcttttattattatactttaagttttagggtacatgtgctcattgtgcaggttagttacatatgtatacatgtgccac

SEQ ID NO: 413270 - DNA, 625 bp, Homo sapiens
taggctcttgggtggcatttctagacctatcctaggctagaagggagcccattgcccggaatggtgagtcctaggcctggcagcattcacaagctgagagaagagcccctgggctttaagctaacattggcagtggcctggcagaaccccccataaaccagtagtggttctggccacaggaagaggctcctctgcctgtagaaaggggaagaaaaagtgagaaaaactttgtaatgtggtttgagtgccagcttacccagttgtatcgaatttctaacatttttgactccaaattctgggtcccacacagcatctctagatatgcctgtgacctggggaawcttgccaccctgaagggggaagggctctgggcaaggcctagtgctgtgctggcctcacatctgactaagcatagtcccactggtgggggaaacagggttgcttgcatcatcacatccccagttccaggcagctcagcacagaaagaaaactctgtattattattattgttatttttattgttattttggaaaaagtaagagaaaagaacatgagtctcttccagatcttttccaagaccaccaaaataatacctctacaagtctgcaaaaaccacagcattatt

SEQ ID NO: 413271 - DNA, 625 bp, Homo sapiens
taggctcttgggtggcatttctagacctatcctaggctagaagggagcccattgcccggaatggtgagtcctaggcctggcagcattcacaagctgagagaagagcccctgggctttaagctaacattggcagtggcctggcagaaccccccataaaccagtagtggttctggccacaggaagaggctcctctgcctgtagaaaggggaagaaaaagtgagaaaaactttgtaatgtggtttgagtgccagcttacccagttgtatcgaatttctaacatttttgactccaaattctgggtcccacacagcatctctagatatgcctgtgacctggggaaacttgccaccctgaagggggaagggctctgggcaaggcctagtgctgtgctggcctcacatctgactaagcatagtcccactggtgggggaaacagggttgcttgcatcatcacatccccagttccaggcagctcagcacagaaakaaaactctgtattattattattgttatttttattgttattttggaaaaagtaagagaaaagaacatgagtctcttccagatcttttccaagaccaccaaaataatacctctacaagtctgcaaaaaccacagcattatt

SEQ ID NO: 413272 - DNA, 597 bp, Homo sapiens
cagtagggtgctgtctggtaggcagcacccctattattgggcagatttgatgctaagctgtactgagataccaaatctccctcacaatcagcctgttggtaacttctccccacttgtgaaccaattctctgtttcaatcagctatggttaaagttgcaggattcttttcaatttctctatgagttacagtagtttataaaggaaagaaattgttaatgccacttccttaaagagtgattctgtgtatggcaacttgggctttgtgwgcttttcttttggcttcttgaatatattcaggaatagcggacatccagcagtgtagcaaagcacatgaaacaagagtagtatgtttcagaagtaagaaaacaggccctcagtataattttctagtaagctcactatcacttcttcgtaaaatccagtagcacgtgttttttacgatagtggaggaaaaaatgattatacaaaacatacataaattatgttcttatataaaaaagtagactattcaatttgcttgcttttaatatattcataaaattaaagaaaatgagtacaacaaatgctgagttgttagcttccatttaaaagacttaa

SEQ ID NO: 413273 - DNA, 536 bp, Homo sapiens
  misc_feature (1)...(536): n = A,T,C or G
nnnnnnnnnnnnnnnnnnnnnnnnnnnnnnnnnnnnnnttactaattaatgccctttattttcggcttgaagctgaatttcattagcaattcttgtaaggcagttctaatggtaataaacgtcctcttttgtttctgttttgtttttctgggaatgtgtttatcttttcttcattttgaaggacagattttccaggaaaggtattcttggttggcagtttttttttttttttttttttcattcagcactttgactgtatcatcctactgtttctggacctgcaaaatttctcctgaraaatctactctacccttgtggaatttctcttatataacataattttcttttctcttctgctttgaacattgtctttgatttttgatagtttgattaatatatctccatgaatttttgagggggttgaatctatactggacctatgagcttcagaagtacctgaatatcaatatatctcctcagatttgggaagtgttcagccattatttctttggataatctttgtgcctccttttctc

SEQ ID NO: 413274 - DNA, 568 bp, Homo sapiens
ttgacctatttattttgtttaagttttgttcgtgtttctaatatcattgacttgtcggtctgttttcttgtatcttgctgagtttctttaaaacatttattttgcatcctttgtcaggtaatttgtatatctctgtttggggctagttactggaaaattattgtgttctgttgatgatgtcatgttttcttggcatttcatgtttcttattgctttgtgtagatgtctgaacatttgatagagcagtcacctcttcaagaatttatagatyggtttcattggagaaagacctttacctataggtgggtgtgaggatgctggctggataaggtgtagcaatcctggctctagtaggggtgcagagacatagtctgcatgaagtttcattcactgagatcagcattgtcaaaggttacaggtcccaggctgtggatgtatgcagcagagagtgttgttggaatatttggtggcaaagcctgctgggatcctcttgatatccttttctcccacagaggaaattgtggccaagagtttctctcttagcatggctcaagctcgctcctgggtg

SEQ ID NO: 413275 - DNA, 648 bp, Homo sapiens
acagatgtacaaggtacattagcatacattaggcacccattccagaaaccttgacatgttaacatccaataaaaataygggttgccacagtgctgttctatcctgtgtggtcttcaggcagcaatgagctttgaaggtatctgccttctggtttaacctaatacctagagatgatacaaatctcatttttgtttgttatattttggtgttgtaggtgggttgaaaatagattttagagaatatttgaagagtcccaaatatatctaatatttttaaagtctcattctgtgaaaggaatccttttcactatttaaatagaattctttggaggaagaacagaggcgtgacctaaagcctggcttgctgagaagtactcttcaaaactattcttggattcaccaagtttgcagtaaaaataatgtgtgtgtgtgtgtgtgtgtgtttatgtgtgtgtgtggaggaatagggcatgtaaccttcctttcacgaagggtcaagatgagcctcttatgtctggtggaatcctctctctgtgcaggtggcctccggagcagtgatatttcttccaggggaactttggagtgttgtgatgggccttactagtctgggggcatattgcacccaattctccttctttgaattgtcatc

SEQ ID NO: 413276 - DNA, 648 bp, Homo sapiens
acagatgtacaaggtacattagcatacattaggcacccattccagaaaccttgacatgttaacatccaataaaaatacgggttgccacagtgctgttctatcctgtgtggtcttcaggcagcaatgagctttgaaggtatctgccttctggtttaacctaatacctagagatgatacaaatctcatttttgtttgttatattttggtgttgtaggtgggttgaaaatagattttagagaatatttgaagagtcccaaatatatctaatatttttaaagtctcattctgtgaaaggaatccttttcactatttaaatagaattctttggaggaagaacagaggcgtgacctaaagcctggcttgctgagaagtactcttcaaaactattcttggattcaccaagtttgcagtaaaaataatgtgtgtgtgtgtgtgtgtgtgtttatgtgtgtgtgtggaggaatagggcatgtaaccttcctttcacgaagggtcaagatgagcytcttatgtctggtggaatcctctctctgtgcaggtggcctccggagcagtgatatttcttccaggggaactttggagtgttgtgatgggccttactagtctgggggcatattgcacccaattctccttctttgaattgtcatc

SEQ ID NO: 413277 - DNA, 472 bp, Homo sapiens
gttggtttgggcaaactccttcatcgatacagagggctacaccacaggatctctgtcaattcttctcagttccataattctctttctgggagagatgaaaatgcaaacacacaaagatagtagttatacatttarggaaaataaaatgacctaatttgttaaaaatatgttcattgcagtaggttcttgagagtgttgttgaaaatattatacagaaataatttttcttattatgtgttgactccaaattatatatgccattaagacaaatggtgctcattgcattcaaaacggctataatgctcattttcatctctaacagaatcttgtacactgtgtaattttatattttctatatactaggaaataaaaagccaggttctgcccaattccaaactaactctctggttgtaaattgggagtttaagtggcccctcaatctttctaaatagtaatataacattttacataa

SEQ ID NO: 413278 - DNA, 605 bp, Homo sapiens
caagctaaatgttcatcgacagataattagacaaagaaaatgtggtacatacacacagtaaagtactattcagcctttaaaaaggaaattctgtcgtttgcgacaatatgaaagaacctgaaggacattagttaagcgtagtaagccaggcacagaaaaaaatactgcatgaccactttcatatgtcgactgtacaaaagttgagctcatagaaacagaggctggaggttgggtgaattaagcagatgctggtcaaaggacacaaaatttcacttagaatcagtgaatctcttgaataagttcaagagatttattgtacatcatggtgactacattgaataataatataccgtattcttgaaaattcctaagacagtagattttaagtgctcttaccacaaaaatttaaaagtacataaggtaatatgtaygtaaaatagcttcatttagctatccatatagcagggaaatcactctgagagaaccaggcaactttctccactccaaggtctagaataatggagcagagactgtgccctgagaaaatggcagtcaattagacaggaaactttaaagtttcccccaaagaactaactttatttgaa

SEQ ID NO: 413279 - DNA, 612 bp, Homo sapiens
ttctgcagctgtcatagcaacttgagatgactaccctatattaaaagccccataaggctgaatactcagagtaatgtcatcttagaagaaaattcgccaagtggtgttataattattccccaaagtaattacaaattaaatttacatactaccagttaaagttggctgcatcctttagagtaaagaagttgagtgatacatgtaaggaatgcttatttwaaaaacccatatatggttagggtagaaaaagatgcatattttgattctttaattcatttggtagatagacaggatgtgctagtttttaataacacatatttttcagcagagtatataaagtgacctttctcataacccagaggcactaatactagaaatattaggttaataaatcaaaagaagtataagacttaaaaaataggagacaaggcacctgctcctaaaatatattaacatttgtctaagcagaatatattcacaaaaagaccatatgtgtcacggcatacctgtcaacttttgcatcaccattttggaatttgcctgtcttcatgatgttcctcaagttctctatgacgccttcccttatccgtcaaccaatgggaatatctctct

SEQ ID NO: 413280 - DNA, 425 bp, Homo sapiens
aaaacgaaactccaggtttggtagttttactagtgaactctaccaaaacacttaaagaagaagtaataccaacttgacatgttttccagaaaatgggacacaaaacacttaagtcatttttgaggcattactgataccaaaactaaaaacaagaaaacaataacaaacaaaaaaaaattaaagaccaatattcctcataaatataaaggcaaaaattctcaayaaaatattagcaaatcaaattcaataaaatgcccaaagatctacgaacaagtaaggtttatccagagaaaataagactgacttaattgtcaaaattcaatcaatgaaaaaaaacataattggagaaaactgcttgaaaagaaaacaaaaactcagtgctctggggagtgttctaagggaatacagcaaacgaaaaactattt

SEQ ID NO: 413281 - DNA, 609 bp, Homo sapiens
cattcccaaactcaacatcaaccttgcatgtaaatggatactttaaaatttctatctcatccctcaccccatactttattctttccatttatattgcttcaaaagggaaatcaacagtcacacttatgattccgagctctaaaaattcctaatattaagcatgacactaaatatgttcaactttgaaccttaaattcaagttggcctccctcgtgaactgattttaactgagtactttttaccatttcgccaagaactaagggttcaaagcagtgtacttaattatgaggaattgcccaaacgattttaaaaggagtgggattctctgaccaagacttttatgaaaatgaaacaaaatatgttgcactcagtcttccggatgttgaaaagtgaagatgtctccaaggattygaaggaagttgatgtttaggttccctctgagagggtggtacccttaatgtaagacttttgtggtagtaataccgtacctacaggcctggaataaatataaggtctaaaaccttggaaatactttgtataaaagaaaactccaattctcttttgctaaggaccacagttaccaagagttatcagctttcacccggacag

SEQ ID NO: 413282 - DNA, 630 bp, Homo sapiens
attaccttgagtattttactggaagagatagaacaacaaacattttcataataaatgtgtgggttaggagtgttaggagaaaatacactgatactattactttcaatatttgatactacttactttgactctcactgaacacctatttgtttaggatgaattcactttaagccrggttgaagaacaagcctttaattgtcctattatttgtgccaaatctattataaatttgttaaaaaatttttaatacctaccttagagggtactctaggtatttaatgagctagcatttgttaaaggcttgtatagtaagaattcttatagtaagagttcttaccaatagatggtatattttttaaattgtcctgttgcatcaaaaagttcatctttattggtaatgttgattaagtttgcccatttggtagtttggtttcttttaactatcttactagattttcttacttttacctgaaaagtagtccttactaataggcacatgttttgtatatttccaaaatatgtattatgttaaattctctgtacactttatttaaaaattacagacgttgagggaaaaaaaataccctattaagggaagaatgagtttgtgtataacttgtagaagaagga

SEQ ID NO: 413283 - DNA, 537 bp, Homo sapiens
tggttggcacagaagtaacagaatggtttgattcacaaaaccttttttaaaaaaacattaattaagaacatagtatggcataggaattaagaacttggactctaaagcaatacaaatatgtgtgtttggatcctgactttgcctgttagcaagaacttctccaagtctcrgtttccttttctgtaaaaataggagtaataatatattggctaccttatacattggctgctgttgctgttacttttttaaaattacaaaatagcacaggtaaattatacaaatttttaaaaatacacttgaagaaaaattacctataatgctatcagaaataattgctaaaattctaattttatgctttaaatatttttattgaaaaatacacaattatttaaatcttctaggtcatacagacatattttccatcaaaaagtttgtaccagtttttactgtaatcaccactctccatgccaacaagaataccagcaattacatttaagtctttgctaatagacaagcttattgttttcatgtacatac

SEQ ID NO: 413284 - DNA, 576 bp, Homo sapiens
aatttaaaagtacaggttcttagggatagactttataagaaattagatatttgcatttttgacacattttgaggcagtaattttaagatatgtctgtatagctgatcgatgcttattttacatgaatgtgttgaaggttacaaactcttaaatttaacattaaactacttttattattcctgtaaagctgtgtttactaaccaccttcatgtagtggcacatagagaaaattgtatataatattacacactgtggtaagtgaatcagcctacggttcttgatctcaagtaattggcctagggacctaccacctctttaccttcatgctctgcttcccctccctacttactccctcctcccattttgagagggcaggtagatacccaggcatatctgtaactcatggatgtataatcagtgtgagaaagtagactaaaatgtgtgttgtctggagttaactattcrataaacataaatatctgatgaaaaatgttttaagtgttttgtttgacaatattcacattatggattgttctaagtcatgcatttatgttggccagcatcttatatttgcag

SEQ ID NO: 413285 - DNA, 572 bp, Homo sapiens
gtggctgacagtgcaagaccctgtctctaaaaataactaataagtgccaaatttgtaagaagacagaattgacataactcatggatttggtgaatctaatttttgtaaatatgtgaattatatgatattcatgactatgktttttattccttgtggaaccatatgtataaataattcgatactgaatttaatcatttcataaacattattacttataagcaaggcagtgtgcatatttgttgtacgttttgaagtgctgattaaagtccacattttcattatcagcagtctattggccagtttaaacaaatattaatgtaaagaaattggttcattgatattttttccctgagcagttctgtatttacctgatgctctaaaattaagttttctgtcgttactcaaatgtacagttggcaacacattttgttatcaatagacaattatgtttactatagagtaaactattagtaattatttatgaccttatgattgggagaccttttcacaaatttaagtatttcataacatttctaataacatttctataaatggctttggatcaaatagtt

SEQ ID NO: 413286 - DNA, 593 bp, Homo sapiens
tgttctgggtaattcagtaagtggtgtgtgaatgtaaaggcttaggacattacagtatactactgtggacattggaaacactgtacacttaggctacactaaatttatttaaaaattttcattctcgaataatgagttaaccttagcttaccgtaacttttttactttataacctttttaattttttaaaatcttttggactctttaatacttgacttaaacacgtacagctgtacaaaaatattttcttcccttatattcatacttagcttttttctatttgaatttttttgtttttttactttttagatgtttttgttttgttgaaaactgatacacacactcatgtatttgcttaggtctatcaagrcatcactaggcaataggaatttttcagcttgtttataatcttacgggaccaccgttgtatatatggtccatcattgactgaaatgtcatgctgcacatgactgtcgtttattaaaatttttatttaccaaattaactttttaacatacgttgtaaccagtaatttcaatgtatttcgatataattgacatatcctctttgaaatttatagaaattgattttta

SEQ ID NO: 413287 - DNA, 366 bp, Homo sapiens
atagcaagtgttggtgaggctgtggagaaaaggaaacccttgtgcattgttgttggcaatgtaaattggtatagccattatggaaaatagtatggagccttctcaaaaaaaaaaaaaaaaaaaaaaaaaaacagaaatagaactaccatatgattcagcaattccacttctgggtatgtatccaaaggaaatgaaatcagtatgttaagaggtatgtgcacycccatgttcactgcagcattattcacaatagccaagatgtggaatcaacatagtgcccatcaatggatgaatggaaaaaatgtgatacacacacacacacacacacacacacacaatggaatattagccagccttaaaaaagga

SEQ ID NO: 413288 - DNA, 503 bp, Homo sapiens
ctctgaacctaaaataaaagttttttaaatgttatcaaataacgtcatrtgttgcagagaaatcttgtatgacaagataagtcaatcaatgtgacaacctccagtgttgtcagattttaagaaattgccatagccaccccaaccttcagcaatcatccccctgatagtcaacacacatcaacatctaggcaagatactccaccagcaaaatgtttatgacttgttgaatgctcaaatgattcttagcattttttaacaataaagtattttaattaatgagtgtacattgtttttggagacattgctattgcatactttataaactatagtatagtgtaatataacttttcacacacagggaaaccaatgaatttgtgtgacttgctttttgcaatattagttttattgccgtggtccggacccacagtatttctgaggtttgcctgtctaccatactgtagagattgaaccgcttttcaaaggtgttaagactattttatccc

SEQ ID NO: 413289 - DNA, 503 bp, Homo sapiens
ctctgaacctaaaataaaagttttttaaatgttatcaaataacgtcatgtgttgcagagaaatcttgtatgacaagataagtcaatcaatgtgacaacctycagtgttgtcagattttaagaaattgccatagccaccccaaccttcagcaatcatccccctgatagtcaacacacatcaacatctaggcaagatactccaccagcaaaatgtttatgacttgttgaatgctcaaatgattcttagcattttttaacaataaagtattttaattaatgagtgtacattgtttttggagacattgctattgcatactttataaactatagtatagtgtaatataacttttcacacacagggaaaccaatgaatttgtgtgacttgctttttgcaatattagttttattgccgtggtccggacccacagtatttctgaggtttgcctgtctaccatactgtagagattgaaccgcttttcaaaggtgttaagactattttatccc

SEQ ID NO: 413290 - DNA, 503 bp, Homo sapiens
ctctgaacctaaaataaaagttttttaaatgttatcaaataacgtcatgtgttgcagagaaatcttgtatgacaagataagtcaatcaatgtgacaacctccagtgttgtcagattttaagaaattgccatagccaccccaaccttcagcaatcatccccctgatagtcaacacacatcaacatctaggcaagatactccaccagcaaaatgtttatgacttgttgaatgctcaaatgattcttagcattttttaacaataaagtattttaattaatgagtgtrcattgtttttggagacattgctattgcatactttataaactatagtatagtgtaatataacttttcacacacagggaaaccaatgaatttgtgtgacttgctttttgcaatattagttttattgccgtggtccggacccacagtatttctgaggtttgcctgtctaccatactgtagagattgaaccgcttttcaaaggtgttaagactattttatccc

SEQ ID NO: 413291 - DNA, 578 bp, Homo sapiens
tttagttgtgccactaattcttgtttctaaaattattaacccctcagggcctttgcctctctgttattgttgttttggttttctttggaactcagctstaggggtttaactgccaatttcaatagataacacgcaacatctttatttgtctagcttttatccataaaaagccctaggacattgacttctatatttgcttatggctccatgactacatttaagatgaatctagcctaaatactaccagctaggcattgcagcatctatgggacaggttgctaaaagagcccacttctcacaaacttgccctcaaaatcagctttcgttcacagcaatgcgacaccagatctggtgaaaaccagtcttcactaatcataattattataggtaaatataattttataatatataaatttgtagatgccagaaaggaatcctgctttagcctgttttagggcaaatttacatgctaagactttatcacaaataaatattaaggcagaaagagtcagtaaagtgaggcaaggaaggaggaaacacaaatacattgttgtgtcttactaagctagtcacacggt

SEQ ID NO: 413292 - DNA, 578 bp, Homo sapiens
tttagttgtgccactaattcttgtttctaaaattattaacccctcagggcctttgcctctctgttattgttgttttggttttctttggaactcagctgtaggggtttaactgccaatttcaatagataacacgcaacatctttatttgtctagcttttatccataaaaagccctaggacattgacttctatatttgcttatggctccatgactacatttaagatgaatctagcctaaatactaccagctaggcattgcagcatctatgggacaggttgctaaaagagcccacttctcacaaacttgccctcaaaatcagctttcgttcacagcaatgcgacaccagatctggtgaaaaccagtcttcactaatcataattattataggtaaatataattttataatatataaatttgtagatgccagaaaggaatcctgctttagcctgttttagggcaaatttacatgctaagactttatcacaaataaatattaaggcagaaagartcagtaaagtgaggcaaggaaggaggaaacacaaatacattgttgtgtcttactaagctagtcacacggt

SEQ ID NO: 413293 - DNA, 615 bp, Homo sapiens
ttaaattttatatagtcatatcatgttattctattgatgaatatattttatgttttttaaacctctatgtaattttsttattaattatatcatatgcatatttttctaataatcacctttggaatgatagtttcaaaatacattttctttctatttttaaaagtttaatattgcaattgtaggtaaactttgatataaatatttgataaagactaaagggctgattaaaatgtgttgatagtatctgctgcctgttacgtccaaactagaggccaccttctccatctgaatagccccttgatgtcatggtattaaaaaccaatcagacaaaacacagccccacaaaaatataataaaacactagcaaatcttcaactctagaaaaaatatgatgtatctttattagagttttatacattaacaataaaatgtggcatgacaagaatatggctttgttcataaaaccaacttcagtggaggttctttttatggcttaagaaagatatatgaacagtttgaagaaaattacaggaataaatctggctacccctaaagctctgcagatagttaaaaacaagaacacattaggggaaaaaaacgttatgaattgccttg

SEQ ID NO: 413294 - DNA, 575 bp, Homo sapiens
actccttggtatttaccaatgtaccaaggagtatatatccttataaaaaccggaacttaaatgtttatgacgtctttatttataattgcaaaaacttttagcaactcagatgtccttcaataggtgaaaggataaactgtggtatatacagaaagtaatggaacattattcaacgataaaaataaatgaacaattaatcccaaaatgacatggagaaatttagcaatatatgcatrttgctaagagaaaaaaataccaatctaaaaacgtgacatactgtatgactccaactgtgtcatattctgaacaaagcaaaactagagagacaacaaaaaggtcagtgactgccaaagtttagacatgatggagggattaattggcacaacacagaaaattgttatggcagtgaaattgtctgtttcatattttagtggtagatacatttcattatgtatttgtcgaaatccacagaatgtacaacacatagagtaaactcaaaccatggccttaagttaataataaacacatttatagtcattaattaatgtaacaacaacaacacactaaataaaaat

SEQ ID NO: 413295 - DNA, 575 bp, Homo sapiens
actccttggtatttaccaatgtaccaaggagtatatatccttataaaaaccggaacttaaatgtttatgacgtctttatttataattgcaaaaacttttagcaactcagatgtccttcaataggtgaaaggataaactgtggtatatacagaaagtaatggaacattattcaacgataaaaataaatgaacaattaatcccaaaatgacatggagaaatttagcaatatatgcatattgctaagagaaaaaaataccaatctaaaaacgtgacatactgtatgactccaactgtgtcayattctgaacaaagcaaaactagagagacaacaaaaaggtcagtgactgccaaagtttagacatgatggagggattaattggcacaacacagaaaattgttatggcagtgaaattgtctgtttcatattttagtggtagatacatttcattatgtatttgtcgaaatccacagaatgtacaacacatagagtaaactcaaaccatggccttaagttaataataaacacatttatagtcattaattaatgtaacaacaacaacacactaaataaaaat

SEQ ID NO: 413296 - DNA, 575 bp, Homo sapiens
actccttggtatttaccaatgtaccaaggagtatatatccttataaaaaccggaacttaaatgtttatgacgtctttatttataattgcaaaaacttttagcaactcagatgtccttcaataggtgaaaggataaactgtggtatatacagaaagtaatggaacattattcaacgataaaaataaatgaacaattaatcccaaaatgacatggagaaatttagcaatatatgcatattgctaagagaaaaaaataccaatctaaaaacgtgacatactgtatgactccaactgtgtcatattctgaacaaagcaaaactagagagacaacaaaaaggtcagtgactgccaaagtttagacatgatggagggattaattggcacaacacagaaaattgttatggcagtgaaattgtctgtttcayattttagtggtagatacatttcattatgtatttgtcgaaatccacagaatgtacaacacatagagtaaactcaaaccatggccttaagttaataataaacacatttatagtcattaattaatgtaacaacaacaacacactaaataaaaat

SEQ ID NO: 413297 - DNA, 575 bp, Homo sapiens
actccttggtatttaccaatgtaccaaggagtatatatccttataaaaaccggaacttaaatgtttatgacgtctttatttataattgcaaaaacttttagcaactcagatgtccttcaataggtgaaaggataaactgtggtatatacagaaagtaatggaacattattcaacgataaaaataaatgaacaattaatcccaaaatgacatggagaaatttagcaatatatgcatattgctaagagaaaaaaataccaatctaaaaacgtgacatactgtatgactccaactgtgtcatattctgaacaaagcaaaactagagagacaacaaaaaggtcagtgactgccaaagtttagacatgatggagggattaattggcacaacacagaaaattgttatggcagtgaaattgtctgtttcatattttartggtagatacatttcattatgtatttgtcgaaatccacagaatgtacaacacatagagtaaactcaaaccatggccttaagttaataataaacacatttatagtcattaattaatgtaacaacaacaacacactaaataaaaat

SEQ ID NO: 413298 - DNA, 608 bp, Homo sapiens
gcataagcaaatatataattatataaataaactgactagaaaaaaatctaaacactctttgaattgtctagatgactattcctatctgttgacatagaaaattgaaggcgtcgtctgttttaagctttgccaaacatgcaaacctttgtaaaaatgaacataaaatttgaaaaaaggatttcccacttcctttatmtttttaagagaatgtgtaggtgtattacaaaagttcttaaggctggtcagggttatagtagacccagatgccctagcagtcccaacatcatgagaacagttgtggggtacaaagaagacccaatacatctacaagggagacataacacccacacaagtcatgcaaagcatatatattactcacaaatgggtggcaataaatagaagcaccttagttcatgtgagctgctataataaaatatcttagcctgggtaacttataaatgatagaaatttatggttcacagttctggatggtaggaagtccaagatgaagatagcagaagatgtaacatcctgtgagcgctcactctctgtttcaaagatggtgacttttctgtgtgtcttcacatagtgaaaacaggtaaacaagc

SEQ ID NO: 413299 - DNA, 608 bp, Homo sapiens
gcataagcaaatatataattatataaataaactgactagaaaaaaatctaaacactctttgaattgtctagatgactattcctatctgttgacatagaaaattgaaggcgtcgtctgttttaagctttgccaaacatgcaaacctttgtaaaaatgaacataaaatttgaaaaaaggatttcccacttcctttatatttttaagagaatgtgtaggtgtattacaaaagttcttaaggctggtcagggttatagtagacccagatgccctagcagtcccaacatcatgagaacagttgtggggtacaaagaagacccaatacatctacaagggagacataacacccacacaagtcatgcaaagcatatatattactcacaaatgggtggcaataaatagaagcaccttagttcatgtgagctgctataataaaatatcttagcctgggtaacttataaatgatagaaatttatggttcacagttctggatggtaggaagtccaagatgaagatagcagaagatgtaacatcctgtgagcgctcactctctgtttcaaagatggtracttttctgtgtgtcttcacatagtgaaaacaggtaaacaagc

SEQ ID NO: 413300 - DNA, 566 bp, Homo sapiens
gtcagttttaatgttacatacttcaccagttcgtcaaacagtgattaattggatgctacagaacctaacatagtagaaatttgtaattgaagaggaccactttcgttttagtcatgtgagcacctgtaagcataatacatagttttcaagattatatagctttcagtatgtgttgaccacagccaatctgtaccaaaacttatttttgccatcaaaataaataatattagtttagtgttaccactagtactacagatagctaggtatgtaggaacaaatacacatatatacttatataatgtaatatatatttatatatatataacatacwaactcatgtgtaattaaatattatacagaaaaatactaatgcttatagagcctttagtaatgtcaaatacatgttcattctacatggtttcttactctatctgtctgagatgatcataagattgagcaaatgacttctgagctctagggaataaccaggccacaagatcaaaggagaatatatgaatattgacatgaaagctggcccccaaacagaaacatctgtattggatttc

SEQ ID NO: 413301 - DNA, 566 bp, Homo sapiens
gtcagttttaatgttacatacttcaccagttcgtcaaacagtgattaattggatgctacagaacctaacatagtagaaatttgtaattgaagaggaccactttcgttttagtcatgtgagcacctgtaagcataatacatagttttcaagattatatagctttcagtatgtgttgaccacagccaatctgtaccaaaacttatttttgccatcaaaataaataatattagtttagtgttaccactagtactacagatagctaggtatgtaggaacaaatacacatatatacttatataatgtaatatatatttatatatatataacatactaactcatgtgyaattaaatattatacagaaaaatactaatgcttatagagcctttagtaatgtcaaatacatgttcattctacatggtttcttactctatctgtctgagatgatcataagattgagcaaatgacttctgagctctagggaataaccaggccacaagatcaaaggagaatatatgaatattgacatgaaagctggcccccaaacagaaacatctgtattggatttc

SEQ ID NO: 413302 - DNA, 567 bp, Homo sapiens
tatgctttggtaatgttcctcttgtgtagtatgtcacaggtgctttctgaatttcttgtatttggatattgagctcacttacaagattagggaaatattcctgagttatttcctcaaatatgtttttcaggttgcttaattttctccttctctatgaggagtgccaataagttgtaggtttggttgttttacataatcccatatttcctgatggttttgcttttgaaaattatttttttctttatttttgtctgactgggttattttgagaggccagtcttcaagctctaaaaatctttcttttgcttgatctrgtctattgttaaatcttttaactgtatttggaaattctctaagtgaatttttttatttccaaaacttctgtttattttttctaaaaatacatatttatattattccttatttcctggactactttttagtttctttgtgttgattttcaaccatgtcttggatctcattgagctttcttgcaataaatattttgaattctttatctttcatctgagtttccatgttggctagggttcattgctagagaactac

SEQ ID NO: 413303 - DNA, 567 bp, Homo sapiens
tatgctttggtaatgttcctcttgtgtagtatgtcacaggtgctttctgaatttcttgtatttggatattgagctcacttacaagattagggaaatattcctgagttatttcctcaaatatgtttttcaggttgcttaattttctccttctctatgaggagtgccaataagttgtaggtttggttgttttacataatcccatatttcctgatggttttgcttttgaaaattatttttttctttatttttgtctgactgggttattttgagaggccagtcttcaagctctaaaaatctttcttttgcttgatctggtctattgttaaatcttttaactgtatttggaaattctctaagtgaatttttttatttccaaaacttctgtttattttttctaaaaatayatatttatattattccttatttcctggactactttttagtttctttgtgttgattttcaaccatgtcttggatctcattgagctttcttgcaataaatattttgaattctttatctttcatctgagtttccatgttggctagggttcattgctagagaactac

SEQ ID NO: 413304 - DNA, 483 bp, Homo sapiens
gatccaacatacacatgggaaatgacgtcagcatgtcagagatatgcctgactcccatgattattacaacttcattcacaaaagccaagatatggaaccaacctacgagtgtgtcagtggatgaactgatttaaaaaaaaattggtatgtatattcagtggaatattattcagccttaaaaaataaggaaattctgccatttgcaacaatgtaagtgaacctagaaaacattatgctaagtaaaataacccagacacagaaagacaaatactgcatgatcacacttatatgtataatctaaaaaagttaaaatcatagaagaagaaagtagaatggtggttgctaggggcttgagggtaagtggggagactttgctcagagtacraagtttcagttaggcaggatgaataaattctgtagatctattgtatggtaactatagttaatgacactgtattgtatacttaaaaattgttagcaaag

SEQ ID NO: 413305 - DNA, 545 bp, Homo sapiens
atctatgtgttgtgtgtgtgggtaaacagattataacagattatcatgattatttatgaaataaataattataacatagaagcccactcttagaggcaatatataagtaaaaaattattccacctttggctagaactagtcttgcacagtttgctgaaaaagtaatttcttattttcactaatatctttatttatttwtttttttttttttactctagattcctattctatcttttatagcaaagggacaaggtgtaaagtagtattatcccacacttctgattacattttcctttttatatatgtaaagtcaatagaactaataccaattattagttagtttattctctgatgttttattgtcactcatgtagcagttccacatgtatgtttatgtctgtttctttactctccctttttctatattattttacttgttgtatgtttaaattatcttttaagtaaattcacctacttgtttctagcctttaaaaatttgcctctcttcacttgtactacctaattctgtataaaaatttgagtca

SEQ ID NO: 413306 - DNA, 545 bp, Homo sapiens
atctatgtgttgtgtgtgtgggtaaacagattataacagattatcatgattatttatgaaataaataattataacatagaagcccactcttagaggcaatatataagtaaaaaattattccacctttggctagaactagtcttgcacagtttgctgaaaaagtaatttcttattttcactaatatctttatttatttawttttttttttttactctagattcctattctatcttttatagcaaagggacaaggtgtaaagtagtattatcccacacttctgattacattttcctttttatatatgtaaagtcaatagaactaataccaattattagttagtttattctctgatgttttattgtcactcatgtagcagttccacatgtatgtttatgtctgtttctttactctccctttttctatattattttacttgttgtatgtttaaattatcttttaagtaaattcacctacttgtttctagcctttaaaaatttgcctctcttcacttgtactacctaattctgtataaaaatttgagtca

SEQ ID NO: 413307 - DNA, 545 bp, Homo sapiens
atctatgtgttgtgtgtgtgggtaaacagattataacagattatcatgattatttatgaaataaataattataacatagaagcccactcttagaggcaatatataagtaaaaaattattccacctttggctagaactagtcttgcacagtttgctgaaaaagtaatttcttattttcactaatatctttatttatttatttttttttttttactctagattcctattctatcttttatagcaaagggacaaggtgtaaagtagtattatcccacacttctgattacattttcctttttatatatgtaaagtcaatagaactaataccaattattagttagtttattctctgatgttttattgtcactcatgtagcagttccacatrtatgtttatgtctgtttctttactctccctttttctatattattttacttgttgtatgtttaaattatcttttaagtaaattcacctacttgtttctagcctttaaaaatttgcctctcttcacttgtactacctaattctgtataaaaatttgagtca

SEQ ID NO: 413308 - DNA, 608 bp, Homo sapiens
ttcttttttgatacaggcattcattgctatacacctcctgttagaattgcttttggtgcatcctaaatttgggtatgatgtattttcatgtttatttatctcaaagtacttttagtttctttttaaatttctctattgaccaatttgttgtttaggagcatgttgtttcatttccattatttttgaattttctgaagttcttcctgttagtttctagctttacactttttaatattatggtcagaaaagatacttaatgtgatttcagtctcttaaattgcttaagacttgctttgtgcttaacagattatctatcctggagaattttctttgtatgcttgagaaaaatatatatcctgcaactgttggatgaaatattctgtgtatgtcttttaggtttattttgtctagagcatagttkaaatttaatgtttctttattaattttctgtctgaatgatctgtccatggctgaaagtatagtgctggagtcccctagtcttattgcattgcagtctacaactcctttcatatctattaatacttgttttttatatttaggtgctccagtgttagttgtatatatgtgtacagttacattcttgctac

SEQ ID NO: 413309 - DNA, 544 bp, Homo sapiens
tgctgcagctgaaggttttctggagtcaaggccattatagtcaacaagtggcaatgcagactgaagattgagtccatcttacagaggttatgggtttctgcctggtgctggggaagccttggagacttagtccatgaatactgtcctggagtcagggaccttggatgtctgcttagtgctgagttttattctggcatgtctggtgttagggtctaaggaaaagtcttatactcattctcttcttttttttcttaatcagaaggtatctctgccctttgctgcctaaggytggggagaagtgacgcaggtaatttgaaactgttcaatatgtcctttattatttttgtataaactggaactgttacttctcacttagtttccttagttcttgtgaatgtaattgtgtgcatgaacagtttttcaagttaatgtttctgtcaggggatgaccactggaatgtcctattcatctatcttgctccatcttcttttctttccattttttacatgtttgtttggatttctttacttgtatgatatttcta

SEQ ID NO: 413310 - DNA, 655 bp, Homo sapiens
gcacatattttcagcatttagataaaataaagcaattatttgtagaccacaaactaccaaacattaataataagtagataatacaaatagtttcatagcaattaatggaattaaatttccagtaaaactcttctaaaaacaatcctctgtcccagatgatttaactgttaaactatccaaaatatttaaaaataaataataccaattctgtatgatcatttccagaaaatagaagataaggaaatacttctagactgttttatagggccaacattatacacattctaaaatayataaacacaattaaaaacataaaaaacttcacacaaatcttttgtaagcacaaggatactcaaatattagcaattcactattatatatagtgttttatataatatgtatatatgtgtgcatatatataaatatatattttatatatgtgtgtgtgtgtatatatatatatagagagagagagagagagaaaaattatacactacatccaagagattttattacatgaatgccaggtggttaaatattaaaaaatcaactaatatatcatattgacaagccaaagataaaacaccacatgatcccatcaattgaaacaaaaatgtatttggcaaaattcaacatccagtcataacaaaaacta

SEQ ID NO: 413311 - DNA, 655 bp, Homo sapiens
gcacatattttcagcatttagataaaataaagcaattatttgtagaccacaaactaccaaacattaataataagtagataatacaaatagtttcatagcaattaatggaattaaatttccagtaaaactcttctaaaaacaatcctctgtcccagatgatttaactgttaaactatccaaaatatttaaaaataaataataccaattctgtatgatcatttccagaaaatagaagataaggaaatacttctagactgttttatagggccaacattatacacattctaaaatatataaacacaattaaaaacataaaaaacttcacacaaatcttttgtaagcacaaggatactcaaatattagcaattcactattatatayagtgttttatataatatgtatatatgtgtgcatatatataaatatatattttatatatgtgtgtgtgtgtatatatatatatagagagagagagagagagaaaaattatacactacatccaagagattttattacatgaatgccaggtggttaaatattaaaaaatcaactaatatatcatattgacaagccaaagataaaacaccacatgatcccatcaattgaaacaaaaatgtatttggcaaaattcaacatccagtcataacaaaaacta

SEQ ID NO: 413312 - DNA, 655 bp, Homo sapiens
gcacatattttcagcatttagataaaataaagcaattatttgtagaccacaaactaccaaacattaataataagtagataatacaaatagtttcatagcaattaatggaattaaatttccagtaaaactcttctaaaaacaatcctctgtcccagatgatttaactgttaaactatccaaaatatttaaaaataaataataccaattctgtatgatcatttccagaaaatagaagataaggaaatacttctagactgttttatagggccaacattatacacattctaaaatatataaacacaattaaaaacataaaaaacttcacacaaatcttttgtaagcacaaggatactcaaatattagcaattcactattatatatagtgttttayataatatgtatatatgtgtgcatatatataaatatatattttatatatgtgtgtgtgtgtatatatatatatagagagagagagagagagaaaaattatacactacatccaagagattttattacatgaatgccaggtggttaaatattaaaaaatcaactaatatatcatattgacaagccaaagataaaacaccacatgatcccatcaattgaaacaaaaatgtatttggcaaaattcaacatccagtcataacaaaaacta

SEQ ID NO: 413313 - DNA, 599 bp, Homo sapiens
taatgtagtataaaaataagaaaaatggccaggcccggtggctcacgcctgtaatcctaktactttgggaggcagaggcgggaggatcacttgagcccagtagttcaagatcagcctgggcaacatggtgaaaccctgtctctacaaaaaatacaaaacttagcagggaatgatggcgtgtgcctgcagtaaccttagctactcgggaggctaaggtgggaggattgcttgagcctgggaggttgaggctgtagtgaagtgtgatccagcctgggtgacagagagagaccctgtctgaaaaaagaaaagaagaaaaattagataagcctgggtcacttttaaagttttgctgctggctatctggatgaatgtcggcaagtcacctgtgttaccagactgtagcttcctggtctgtaaaatgacttccacggaccatcagctctaaaactgcacagctttaaatctagagaaagccaataaatcacagatggaaatactctttacacagtcacacagactctagagctggagagtcctctaagacactgcggcccctgcgccagcatctccgggggaagcttggtaacaacacagattcc

SEQ ID NO: 413314 - DNA, 599 bp, Homo sapiens
taatgtagtataaaaataagaaaaatggccaggcccggtggctcacgcctgtaatcctagtactttgggaggcagaggcgggaggatcacttgagcccagtagttcaagatcagcctgggcaacatggtgaaaccctgtctctacaaaaaatacaaaacttagcagggaatgatggcgtgtgcctgcagtaaccttagctactcgggaggctaaggtgggaggattgcttgagcctgggaggttgaggctgtagtgaagtgtgatccagcctgggtgacagagagagaccctgtctgaaaaaagaaaasaagaaaaattagataagcctgggtcacttttaaagttttgctgctggctatctggatgaatgtcggcaagtcacctgtgttaccagactgtagcttcctggtctgtaaaatgacttccacggaccatcagctctaaaactgcacagctttaaatctagagaaagccaataaatcacagatggaaatactctttacacagtcacacagactctagagctggagagtcctctaagacactgcggcccctgcgccagcatctccgggggaagcttggtaacaacacagattcc

SEQ ID NO: 413315 - DNA, 524 bp, Homo sapiens
catgcctgtaatcccagtgcttgagctcaggagttcaaaaccagcctgggtctctacaaaaaaatacaaaaacttagccgggcgtggtggcatgagcctgtagtcccagctactcgagaggctgaggtgggaggatggcttgagcccaggatgttaaggctgcagtggtgtgcgatcgtgccactgcactacagcctgggtgacagcctgggtgacasagtgagactgtctcaaaaataataataataaacttacgttttcagggtcaaacaaataagattataagagaagcatccttcaacaattttacactcttactcgggacattttcccactgttgacatacactgtattggagtggtgagatgcttactccccagggccccaagaactcccacaaacatgtacccattttgcttcagctgcctaactaaggtgttttattaagaaatacattatctcaaaaagtggatttcctccaatttatgttctccctcaaaaacaggtgtttacccacacgcacc

SEQ ID NO: 413316 - DNA, 548 bp, Homo sapiens
gtagatagctaattatgtgataaagtacctatagtaaaatgttaattgtagaatctaggtggtggttatttaagtgtccactgtaaattttttcaaaatttttgtatgtagaaaattttttataataaaatatttttaaaaaggrcattgtagttactactagaaagggcaatgactagaaagagaataaggaggtttgaggaatgctgggagtcttctgtttcttaatctgggtgctggttattgggagtgttgctttgtgaaaacttaccaaacagaatacttgtgatgttcaattgttttcgtacgtatgatatatactttaattaaaagttcagaaagaaaacaaaaaaatactagtgttattctggagactttgatagcaagtagcttagtggggaagtagcttagtggggaattgtaagtagcttacaattttaagtagcttaggggggaaataaatctcaaatgattggaaagccctggggcacagctgggttagatgaacttggaacatatggcattgcccagaatctatctgtatatcc

SEQ ID NO: 413317 - DNA, 548 bp, Homo sapiens
gtagatagctaattatgtgataaagtacctatagtaaaatgttaattgtagaatctaggtggtggttatttaagtgtccactgtaaattttttcaaaatttttgtatgtagaaaattttttataataaaatatttttaaaaagggcattgtagttactactagaaagggcaatgactagaaagagaataaggaggtttgaggaatgctgggagtcttctgtttcttaatctgggtgctggttattgggagtgttgctttgtgaaaacttaccaaacagaatacttgtgatgttcaattgttttcgtacgtatgatatatactttaattaaaagttcagaaagaaaacaaaaaaatactagtgttattctggagactttgatagcaagtagcttagtggggaagtagcttagtggggaattgtaagtagcttacaattttaagtagcttagkggggaaataaatctcaaatgattggaaagccctggggcacagctgggttagatgaacttggaacatatggcattgcccagaatctatctgtatatcc

SEQ ID NO: 413318 - DNA, 575 bp, Homo sapiens
gcattattaaatgtcagtttgtggaaatgaatctcttaataactattttgatttattacaaataaaaaataatatcatgtattgtaataataaactactgttcattaagagtagtgtttggtatatttgattttaaattatttttaattacaggataagtaatgtgtacatacagttctgttttatattagattttaaccaattttagaaatgcattatgataatttatgctacttattaacattatttgtcctgatccccaagtatagcatctttttgcatagccytctaataaaagacgttttcttcagattactatataagccattgaaaaactttactcattttcacctctttaactgtatgaattagtattaatttgattttatacaactcaaatatctatggaaaaacaaaggttgcttagattgatatgactgctacagtcaaccaaaatcttctttttcaattttaggtttagcaaaatagcttcattattcaccttggtagaaattataagttaatgtttaaatttataagataaatttattttaataatatactaccttttatag

SEQ ID NO: 413319 - DNA, 513 bp, Homo sapiens
aaaacaccaatctgagtctggggacttctcccaccactgtagaagtcctctcataaaaaaattctggcctcaacttttcctctcccatgcaattccctgagggcttagacccagagggttggggacagggagtgaaacagcagatcattgtgtcttctgctttccatggagtcccatggcccctaccttcctgaaaacaaaacaaaacaaaacaaaaaaaacgtgtgagcaatgctagagaaaggacaactattgaactagatatgcatgctattagaatcataaaatgtactgaatactgaattacaatttttttttttkggggggacaaggtctccctctgtcactcagattggagtatagtggcacaaacacagttcattgcagccttgatttcctggacttaagcaatcctcccacctcaggcttccaagcagctggaactacaagcatgcaccaccatgcgcagttttttattattattatttgtagaaatggggtcttgccattgtg

SEQ ID NO: 413320 - DNA, 559 bp, Homo sapiens
ctccctctgtcactcagattggagtatagtggcacaaacacagttcattgcagccttgatttcctggacttaagcaatcctcccacctcaggcttccaagcagctggaactacaagcatgcaccaccatgcgcagttttttattattattatttgtagaaatggggtcttgccattgtgcccaggctgctgaattaaatttcaataagtaaaattaatcagaaacttcaggaaagaggtatttcacagaggagrgataacaaagtgtttttagacacaataaacctggaactacatcatgttcattactaagtgccttgtgactcttcaataaacaggttagctataggtaagattatggtgtttatacattcatggaaactattctttttacaagttacttactacactgtttacagtggttggttacctctagggagcaggattgaagatggtattttatagggaaattttgatactttcaggttgtaagactactatattgttttgatcttttataacaaaataaattaatttgacaattgcagattaataaaaaa

SEQ ID NO: 413321 - DNA, 491 bp, Homo sapiens
gttaaaatggctttgtgagtgaatgacatttgctttgcgagtgaatgacatattcagtgaaatgaaaacagtgtctttaatgtctctttgcactaggacattcttttctagtggaggcagctgctctctccttctgtctcttattctattgactatctaggcttaactataatggcaaacacatctctcctcactgacttgtcttcttaacctctccatgtttgcttttatttcccrtcctttctttctcattgacttttcttatgtattagaaatatatgaattgttctatttttccctcatttccgtatagaaatataattaagtttcccccttggctttcctaggaacatataaaaaggccactttgtttccatttgctgtagtttaagaagaaatcccagccaactaattcttattcaacgctcaagtaagtgaatgtcctcactgcaaccaaatgccattttcaacaattaccatcatcaggatta

SEQ ID NO: 413322 - DNA, 491 bp, Homo sapiens
gttaaaatggctttgtgagtgaatgacatttgctttgcgagtgaatgacatattcagtgaaatgaaaacagtgtctttaatgtctctttgcactaggacattcttttctagtggaggcagctgctctctccttctgtctcttattctattgactatctaggcttaactataatggcaaacacatctctcctcactgacttgtcttcttaacctctccatgtttgcttttatttcccgtcctttctttctcattgacttttcttatgtattagaaatatatgaattgttctatttttccctcatttccgtatagaaatataattaagtttcccccttggctttcctaggaacatataaaaaggccactttgtttccatttgctgtagtttaagaaraaatcccagccaactaattcttattcaacgctcaagtaagtgaatgtcctcactgcaaccaaatgccattttcaacaattaccatcatcaggatta

SEQ ID NO: 413323 - DNA, 579 bp, Homo sapiens
agccaaggtttgttcgggttgaaaaaaaaaatagaaattccattcaaaaagggataggttggtgtgtgctttcttagtacaaatagactcctatggaacacaggggagaaagtgtgtccagacttcaaaggaattggaatgaaagcaaggcaaatctgaaagaaaagagttacaaaatacctttaatttctgacgttcttttcaggtcttctgcgttctccttgttcatctgattgactttcctttccacctttgcacgtggaccattataactactggggctgacatttaactatttttgcctttgctgaaagttgatcacacattgatcattcttctctgatggaaattatctgatagkttcatcccggcctctctgcttcaatctgttggtgacaaagtaacatagaattttgtgacaaccgtcatttccccttctgggaatatgtctatgattgggtggtttacaggccaagagatgtagtagtcttatatcagttcttaacccgttagaattgatgaaaatatcagagttttccctaatgtttactttagccctattcaagaactgcaatagcc

SEQ ID NO: 413324 - DNA, 551 bp, Homo sapiens
aaaatacaagcagaatgtattcctttttaagcaaataactacccaaatgtatgggcatcatcagtgggtcagatcaaaccaattgctatatcaatgaaagaacacagaccatgcaaagtttgaaaggatgcaagcagaataaaaagaatgccagaatatgatgcatctaaacaggattaaaaataaatcaaaattatgtatttggcacatagtgggcacaraaaaattatttattgaatgaataaacatagaaggtgaaaacatacataattgtttttctttcagtcactgaacaatatcaatgtgtctcttcagggactgaagcctacagattgtctctcaagaggcctcacaggggccctttattgccttagtgaatttcttatgatacaagacctactgatcaatgttgaggagtctgcagtctaattgttttaaaacacagagtgcgtgaatctctcagagaccaatcccactaaccaagataatcagacttccttacacaagtcagaatgctcatttactcatttgaaatgagatatttcgtcact

SEQ ID NO: 413325 - DNA, 628 bp, Homo sapiens
ttaccaacaaacacaccaaacaacaaaaaaaatactctcactatggttgctattgttttggtattcctcataaatataaacaatacgtattttactggagcttttatgatggacatgaagagagaatttacattatacaacactgaaatgtttaagaaagtctatgtagacatctttctcaattttcaattctcattctgaaaccacagtctcttatctttctttcctttacaggtcttacatttcctaatccttgtctgatcctttctgtccctcctctctcttatttacacacagtaatttagctccatacccacccttaccaaccatacctacatccttcactgtgctcatcaaaatgatcagaacaacatgccttaaaacatacttgtcaggccaggcacagtagctaatgcctgtattccagcactttgagaggctgaaacggatgatcacttgaacgcaggagttcaaaacaaacctgggcaacagaacgagacctcatctctaaaattaaaaaaaaaaaattagctaggcatggtgtgtgtgctggtagtctcagatattcaggaggctgtgatggatygcttgagcccaggagattgaggctgcaatgagctgtgattgc

SEQ ID NO: 413326 - DNA, 498 bp, Homo sapiens
ggccatggcgactgtggaggctgcaaaggccctgagctccgggagcccacgctatttattggtaatccaacagagaaacgtggtgagaatgtggcggtcaaaagggcaggcgcatgcatgatctacagctgtgatgatttagcatttataaggaacatgttctgctacttgagataatgggaaaacaattgatctaggagcctaggagcactagaagcaaggagccagcaagtctagacacattccrgagaacattatgcaagccctgcctcagctttcttcccaaccctcagcttttttccccaacccattctgctccatccagtggctactaggtggctgtttttcacagctaccatggttatatgtctgcttatttcccagggtgccatggagctggggagaggagggtgtgatttcagcaagttaaaatgcaacggtactcattgctcttactgaaattcagcttttttttttcttagtaaaactcgacattgt

SEQ ID NO: 413327 - DNA, 541 bp, Homo sapiens
tataaggggtgtagaaagaattatgggagatgaagctggaatggaaaatggtgacaattctcactggagtctgaagaagaaaattaaaggaaagcaacatgctgaaggtcaggcctggattcctcagaccagggatgggaggagcaagatttgggtagaatattaggaaggatcatcatgggcctgaatttctgctgctgctgctagttctctgcatgctgaccaaaatttatgaytatgttgtctctaaaaacatgtatagtctcatgttcatattacatccaatttagtcttgtttgaaaagaaagtacagaaaagtcttctatcaaggaaagaaaaatgagtacactggcagcatttttctacagtatattcctcagagacctagtcccctgagatgttccttgaggaaaaatagtctgttggaaagtaagcctgagaaacattgcaaactatcaaattatatatattttcctacttcacagggttatttcaaggaacaaaatgtggttatttagagatgtcacatcagcaggacaaa

SEQ ID NO: 413328 - DNA, 452 bp, Homo sapiens
attcagttattgcctttcttctttcttcaactgtgactatggagccctgctgaagaaaaataacacacatttaaacattagtgctatgataaatccgtgtcctccgacctcagctagactccaggactgtccagtaactccttttttctgggtagggtattatccagtggcatttccaaatcatgtccactcttctcaaatactcaaccccttcattatggatgtttgtctctttcttaacagaaaagcaggaatgccacacaagatataaccagagttttgcaactatacaatgacttacaggtaattttaatcctaacagaattttaattcwtctgttccccccactttaaactgatatagtagaaaagatgatgtcacaaatataaaaagtaacctgtgctaccaacgtcctcatgtctgcttcttcagtgatctaaacctgcagatta

SEQ ID NO: 413329 - DNA, 631 bp, Homo sapiens
  misc_feature (1)...(631): n = A,T,C or G
actagcttttcaggttactttggaatgtccttatccaagaagagagtcccatttagtcaacaggggtttagaaatttattntagttatatatgaaaaaagaagattttcaatcctgagccatatttctcagtcaatcaatccctgcaggaaccctgttctttactctggagataaacactagttttcttttctatggaataacaccacatttcaaaatgaggggaaacatcttgcaattaagtgstacagccttattaaatttgatttggtttccattgtaattaatttaatcacatgtgttctagagtttgtcctcagtcttcccctagtttaggcccatgatctgttgaatttgctcagctccctgctcaacagcaggaaatcagaatcatttaaaatcatcattgtgtctgggagtgatggctcatgcctgtaatcccagcaatttgggaggccaaggtgggcagatcacttgttgtcaggggtttgagaccagcctggccgacagtgaaacaccatctctactaaagatacaaatattagctgggtgtggtgattcacgcctgtaatcccggctacttgggagactgaggcaggagaattgcttgaacccgggaggggcaggtttca

SEQ ID NO: 413330 - DNA, 580 bp, Homo sapiens
acatattgtttataaatattaagggtaccaacagtagagaaattatgtttaattgtatgtcattcagttgacaattgcctattatttccaagacattatattatgtaaagggagtaaataaagatgaataggaaattactcctgccctcaaggaacttacattaaaaataataatattaatttaccayaaaatagctttctgaaatgaatgcattttcaagttacataccttgaaaaataatggcctaaaagtaatatattcaataccatctatattgttttactatccttctatttataaaatattgagaattataaaacaaaacatttttacgtaagcattatatagacttctgtaataggtaagaggcatggtttgttgggttacctgaatttgtttaagttcctggctcaatggattaacatggatattatatagaacttcatatgttcattcattcattaactcattattccatttatttaacatttgtgcatataatataaatattgtgtaaaaaatacttgattaaggcctgggcatacaattttaatgcaaccataaacaacaaacaagaaa

SEQ ID NO: 413331 - DNA, 631 bp, Homo sapiens
  misc_feature (1)...(631): n = A,T,C or G
actagcttttcaggttactttggaatgtccttatccaagaagagagtcccatttagtcaacaggggtttagaaatttattntagttatatatgaaaaaagaagattttcaatcctgagccatatttctcagtcaatcaatccctgcaggaaccctgttctttactctggagataaacactagttttcttttctatggaataacaccacatttcaaaatgaggggaaacatcttgcaattaagtggtacagccttattaaatttgatttggtttccattgtaattaatttaatcacatgtgttctagagtttgtcctcagtcttcccctagtttaggcccatgatctgttgaatttgctcagctccctgctcaacagcaggaaatcagaatcatttaaaatcatcattgtgkctgggagtgatggctcatgcctgtaatcccagcaatttgggaggccaaggtgggcagatcacttgttgtcaggggtttgagaccagcctggccgacagtgaaacaccatctctactaaagatacaaatattagctgggtgtggtgattcacgcctgtaatcccggctacttgggagactgaggcaggagaattgcttgaacccgggaggggcaggtttca

SEQ ID NO: 413332 - DNA, 631 bp, Homo sapiens
  misc_feature (1)...(631): n = A,T,C or G
actagcttttcaggttactttggaatgtccttatccaagaagagagtcccatttagtcaacaggggtttagaaatttattntagttatatatgaaaaaagaagattttcaatcctgagccatatttctcagtcaatcaatccctgcaggaaccctgttctttactctggagataaacactagttttcttttctatggaataacaccacatttcaaaatgaggggaaacatcttgcaattaagtggtacagccttattaaatttgatttggtttccattgtaattaatttaatcacatgtgttctagagtttgtcctcagtcttcccctagtttaggcccatgatctgttgaatttgctcagctccctgctcaacagcaggaaatcagaatcatttaaaatcatcattgtgtctgggagtgatggctcatgyctgtaatcccagcaatttgggaggccaaggtgggcagatcacttgttgtcaggggtttgagaccagcctggccgacagtgaaacaccatctctactaaagatacaaatattagctgggtgtggtgattcacgcctgtaatcccggctacttgggagactgaggcaggagaattgcttgaacccgggaggggcaggtttca

SEQ ID NO: 413333 - DNA, 565 bp, Homo sapiens
actcttatgaatggattaatgctacaaaatgggctagagagaatgggttctctctcttctgcttttgtatgtgaggactcagtcctctcttgccattccacctcttgccatgtgaggatgtcacaagaaggtcattatcagatattggtgatttgatcttgaacttcttaatctttagaactatgacaggataagtttctgttctttataaattaccctgtctcagatattttgttatagccacacaaaacagactaggacagctgtttatcaaaacatctgagataaaagatttactttttattagcttgaaaaatttgatcaagtctctacctttataggtcttaatttcttcatctataaaatgaacttattacattgcctgtgcmtaaggtagcttccaactctatttgaaaaaatctctaaattttggctgtgtcattaatttacaaatgtttggaaattttacaattaaaatagttccaaaacttggagattttagagcaaataacttccctccacaccactaagtactgtagcattttaaaaattcttggctttccta

SEQ ID NO: 413334 - DNA, 565 bp, Homo sapiens
actcttatgaatggattaatgctacaaaatgggctagagagaatgggttctctctcttctgcttttgtatgtgaggactcagtcctctcttgccattccacctcttgccatgtgaggatgtcacaagaaggtcattatcagatattggtgatttgatcttgaacttcttaatctttagaactatgacaggataagtttctgttctttataaattaccctgtctcagatattttgttatagccacacaaaacagactaggacagctgtttatcaaaacatctgagataaaagatttactttttattagcttgaaaaatttgatcaagtctctacctttataggtcttaatttcttcatctataaaatgaacttattacattgcctgtgcctaaggtagcttccaactctatttgaaaaaatctctaaattttggctgtgtcattaatttacaaatgtttggaaattttacaattaaaatagttccaaaacttgragattttagagcaaataacttccctccacaccactaagtactgtagcattttaaaaattcttggctttccta

SEQ ID NO: 413335 - DNA, 516 bp, Homo sapiens
aataatatttggataattttaaatatagttagctatagaaattgtctaacataattgggcatgtgagtttgggaaggaatactgttagtgcatgtgaattttacctttagactcgtgaatctgttacactgtggatttcacagtagcatttcctgtcttcttgccttcatttagggtgacactttgatcaaaggtggtaaagcatgaaattatgaccagatgtaagagtgtcacatgctatttcaaagtcccactgcagttggaaaattttctgattatctgaacccacccacatgggaattaaaattcagtgtgcctgacattacagcatgttttaacaagagcacaattatattcctaccctgttccaatatagagttgcctagtcagaattgttagacaagtccatagaggatagaaactgtcaccaagcattagctcacatgggagagtaaaatgaagccaactatttcttcctttataagaatcacyaattgtatgttatttaaaaatatg

SEQ ID NO: 413336 - DNA, 392 bp, Homo sapiens
  misc_feature (1)...(392): n = A,T,C or G
actgtttacaaactgctaaatcaaaagaaagtttcagctctgtgatatgaatgcacgcatcacaaagaagtttctcagaaatcttctgtttagtgtttatctgaagatatttcctttttcaccataggccycaaagcgctccaaatatgcatttccagattctataaaaagtctgtttccaaactgctcaatgaaaagaaaggttcgactctgtgagatgaaagcacatatcaccaagaagtttctcagagtgtttctttctactttttttgtgaagatatttcctttttcactataggcctcaaagcgctctaaatatccatttgcagattctgcaaaaagactgtttacaaagtgctcagttcanagataggtgcaactctgtgagttga

SEQ ID NO: 413337 - DNA, 392 bp, Homo sapiens
  misc_feature (1)...(392): n = A,T,C or G
actgtttacaaactgctaaatcaaaagaaagtttcagctctgtgatatgaatgcacgcatcacaaagaagtttctcagaaatcttctgtttagtgtttatctgaagatatttcctttttcaccataggcctcaaagcgctccaaatatgcatttccagattctataaaaagtctgtttccaaactgctcaatgaaaagaaaggttcgactctgtgagatgaaagcacatatcacmaagaagtttctcagagtgtttctttctactttttttgtgaagatatttcctttttcactataggcctcaaagcgctctaaatatccatttgcagattctgcaaaaagactgtttacaaagtgctcagttcanagataggtgcaactctgtgagttga

SEQ ID NO: 413338 - DNA, 510 bp, Homo sapiens
gaaatggataacacggctgggcgctgtgactcacgcctgtaatcccagcactttgggaggctgaggcaggcagatcacgaggtcaagagattgagaccatcctggccaacatggtgaaactccgtctctacttaaaaaaatacaaaagttagccgggcgtggtggcacacrcctgtagtcccagctactcgggaggctgaggcaagagaatcgcttgaacctgggaggcggaggttgcagtgagccgagattgcaccactgcactccagcctggcgacagaatgagattccgccacacacacacacacacaaataaataaaaacaaaaataaatggataacagctccaaaagactcttttcctagtaatctctgcttattttacttccattgcctcagacaccaccatttttccttaggatgagaatttaaagtggttactctgaatctgttttatttttcatgtgtaaagtttgagacaaagcaaatcttgcagcttgtgttgtaatta

SEQ ID NO: 413339 - DNA, 510 bp, Homo sapiens
gaaatggataacacggctgggcgctgtgactcacgcctgtaatcccagcactttgggaggctgaggcaggcagatcacgaggtcaagagattgagaccatcctggccaacatggtgaaactccgtctctacttaaaaaaatacaaaagttagccgggcgtggtggcacacacctgtagtcccagctactcgggaggctgaggcaagagaatcgcttgaacctgggaggcggaggttgcagtgagccgagattgcaccactgcactccagcctggygacagaatgagattccgccacacacacacacacacaaataaataaaaacaaaaataaatggataacagctccaaaagactcttttcctagtaatctctgcttattttacttccattgcctcagacaccaccatttttccttaggatgagaatttaaagtggttactctgaatctgttttatttttcatgtgtaaagtttgagacaaagcaaatcttgcagcttgtgttgtaatta

SEQ ID NO: 413340 - DNA, 610 bp, Homo sapiens
ctgctacttttgcacctagaatgagtcaagcctacatcaagacgaggtgttctggctcctggtaaattatttatagctctcagagttcctgggtacccttgtagaggtccctctggagaacacaatggaagtgtagtttaggggagatgyatggtgaaatcaggaccgtttcttccagtgcttactaataatttgtcaggactattggagagacaataatggagaaatttctccaaatgatcatgtcaaaaacttaatgaaactgtttcgagatgaatggcaactaacaaaatgtgcccaggactcaaagcatcggaatgctgttctctatttgtaaaatcccatatttttgtagttgaaacacgtttcttcttttctaacctttaaaacagacgcttgatcaagggaatagatctttattttgcgaataatcagttgacaacatgttactttggagagattatcactttttgccaaagtctacaccatctgttccacactctaattaccaataaaagaaaggacctaattcacaattgcatgataaaaaagttaaatgtgatttaaatgtatttgtttgttttttatttaaagaagtttcaatgatgca

SEQ ID NO: 413341 - DNA, 552 bp, Homo sapiens
tatttttgtagttgaaacacgtttcttcttttctaacctttaaaacagacgcttgatcaagggaatagatctttattttgcgaataatcagttgacaacatgttactttggagagattatcactttttgccaaagtctacaccatctgttccacactctaattaccaataaaagaaaggacctaattcacaattgcatgataaaaaagttaaatgtgatttaaatgtatttgtttgttttttatttaaagaagtttcaatgatgcatctgttactcatttttcaatattttgacacagatcataagaaaatactggaataaggatatagcaaacaaatatgcaaactttctagagggacaatttctatcagtayatagaccctaaaacctgcattattaattagccattaagctagtgattgaataaatgagtttattatagaatgattgggtttttaaaaatagtatttagttttaaaaattcacatcgcctgggaaattatattggtaaatttataaactactatatctaaacaagaatcaatcacttta

SEQ ID NO: 413342 - DNA, 552 bp, Homo sapiens
tatttttgtagttgaaacacgtttcttcttttctaacctttaaaacagacgcttgatcaagggaatagatctttattttgcgaataatcagttgacaacatgttactttggagagattatcactttttgccaaagtctacaccatctgttccacactctaattaccaataaaagaaaggacctaattcacaattgcatgataaaaaagttaaatgtgatttaaatgtatttgtttgttttttatttaaagaagtttcaatgatgcatctgttactcatttttcaatattttgacacagatcataagaaaatactggaataaggatatagcaaacaaatatgcaaactttctagagggacaatttctatcagtacatagaccctaaaacctgcattattaattagccattaagctagtgattgaataaatgagtttattayagaatgattgggtttttaaaaatagtatttagttttaaaaattcacatcgcctgggaaattatattggtaaatttataaactactatatctaaacaagaatcaatcacttta

SEQ ID NO: 413343 - DNA, 656 bp, Homo sapiens
acaatactatcaaaatgcacatttgtaaaatgaaactggaagttgggttatttttacctacccagcaccaatactatcagtgttttgttttccctcttgtggaactgctttttcctctacggtctatggctttttttatgggattggtggccatacctatcaaaatgttcagtctgctcacaattaactagatatgctattaaaattagataaatggcagcagaccctgaaccttcttctagaaacattgggaaaaagaacctctccctactggttttgcttatctgtgaatatgtgagtttggagccttctggggccatctttgtatgatgaggaaaacagagtcaagtggtcaagaaaatcaaatttctgatgccatttaaacttttggactaaactgtgcttgagactaaatttccyctggacttattaattatatgattcagtggttttattaattatgccgattttattttagtcctttatcttccaactgaatgagtttttgttaatcttaaatttagtgagaacacatcaattcagtattcaagtgtttttcagatgttcatataaaaaatatatactgacagccctgtatccaccatcaattttatgacatttgcatcaaatatattttaaaacacaaacagaaacta

SEQ ID NO: 413344 - DNA, 656 bp, Homo sapiens
acaatactatcaaaatgcacatttgtaaaatgaaactggaagttgggttatttttacctacccagcaccaatactatcagtgttttgttttccctcttgtggaactgctttttcctctacggtctatggctttttttatgggattggtggccatacctatcaaaatgttcagtctgctcacaattaactagatatgctattaaaattagataaatggcagcagaccctgaaccttcttctagaaacattgggaaaaagaacctctccctactggttttgcttatctgtgaatatgtgagtttggagccttctggggccatctttgtatgatgaggaaaacagagtcaagtggtcaagaaaatcaaatttctgatgccatttaaacttttggactaaactgtgcttgagactaaatttcctctggacttattaattatatrattcagtggttttattaattatgccgattttattttagtcctttatcttccaactgaatgagtttttgttaatcttaaatttagtgagaacacatcaattcagtattcaagtgtttttcagatgttcatataaaaaatatatactgacagccctgtatccaccatcaattttatgacatttgcatcaaatatattttaaaacacaaacagaaacta

SEQ ID NO: 413345 - DNA, 608 bp, Homo sapiens
ctgatctaaatgcaaaagcaaagctacaaagattctataacataacattggagattatttttctgacctctaagtcatggaatgacttcttaaagtaaaatttagaaaactcttaccagaaataaaaaaaagtggatgaataaaaattgaaattaagtatatatttgctttataaaaatctattgaagaaatggggtaataagccaagaaatggaaaaacatatttacaacacatgcatccatgatatcactactacttttctattacaaagaacagaaaaattggtaactgaagtaatgatttttgtcttatgtttgtctgccttttgagacagaggagtttagctcctgtcatccagtgcaatggcgcaatctgggctcgctgcaacctctgcctcctgagttcagcaattctcctgcctcagcctcctaagtagcttggattacaggcagctgccacmatgcccagctaatttttgcatttttagtagagacggagtttcaccatgttggccaggctggtctcaaaaagaaaagatatcaaaatgttcaataaacatatgaaaagtagttcaaaatcattagtacaaaggaaaatgaaagttaaa

SEQ ID NO: 413346 - DNA, 629 bp, Homo sapiens
aacactgccctaaacagtagtccctgacgaatgcatacagtgaggtcagtttctgataaagattgaaagaggatgttcattgaactatctattcaatcagtagacaaagttacaagtttgaataaagatgggcatggtgaacttatctataaaggacaaagtgtagtccattgttaaaatgtagattcctggagaatcaatctttgagggtttggggtcttgggatatgtattttataagcctctgatgytctgaaaatatgccctagttgagcagggatctgcaatgccactctctggactctttaaatgacttttctgggtaactgtaaagcaatgaaggaggtgcctatcctttctgtataagattaaaaaaaaaagacaataggaccagttataagtctcatataagatccctgttttagcaaataacccaaatcctaaaagtgactattatccagatacactcatcactatgtataagggccagtagatgggcttgtgcttggggaatttaataggagaatctaaggacatgtgaagggataataaaattctaaaacactgccaggtcacattgcctcgatcctcctacatatatttggttattattaattgcaaggggctttg

SEQ ID NO: 413347 - DNA, 491 bp, Homo sapiens
caatgtaatgtgattcctagtagcttcagaataaattgtttttaaaatttcaatgtcaatgtaaagagaaaactttctccacattttaattaatatttcatttctaaattcaatcaaaagtccaccatcagacaaaaatttccctctgcaatccctgtgacctatcttttggggtctctagtactctattagagaacagaacacacagaaagaaaaggaggggattgaagacmgaggacaaaaatgacctcagtcactctgtaccaaattattatggaaaatgacacctcaatgaaattttctcaccagatgacttaagtcttttcaaaatgccatcaagccagtgatcggaagcacagtctatgacaacatgtttcatcaatggttatttttacagtacttgcactatcattttggtggctctatatgaatgagatttaatatactaactatagcatatattaatgaccagttttctcaaacagcatcac

SEQ ID NO: 413348 - DNA, 576 bp, Homo sapiens
tgtgctgaactctaggtagaatatgtatttccttaatgctatgggttaataattttgaaaatacattttatgtataatttgtaaaagcaaatgaattgattatattgaggatgataggagccaggtttctctttactggtaaagggagttacaagtttttgttttcattttattaaaatatcttgaaaaattatttggaagagggtgacttgcgtgttcagcagcaaaggcaaaaaatacagtagctacatagcactgatggccaagaaatcggcattaggggaagacaaaaaagactaagsagaagtgagaagagaaagcccaagagaagaggtggcccaatcgcatgagattggagaactacaagaaacacctgcagtggtccagcggctaaaggggctgagcactgctcgaccaggctggatctaaggagtagagggtagcatagaaacagcaaaggtccagaaataccaggaatcattctgggaaaatgcacctgaattgctatttagacttgtaaactttcagaggtctactagagagagaaaactcaaagaggacctatgggcctataat

SEQ ID NO: 413349 - DNA, 500 bp, Homo sapiens
cagtgtgttcagttcgtcaaaaagatacaaatagataacgctgtcttggagtatgagagaaatgacatctgccctcacacagccacacaactatacctgcacacactgaggtgctgtggttacataaacacaagcatacttttaaacatggattaaaatgaagaactcttttgacattaagaatatatcagcaaaaatagcaatataggtgtatgtattgttccttcaaaattcatggaaagcacggtaaaattctcattagtacatattaaaatgaattgatataagaaaaggcactaaatctacattaaacatctttaagtaaatacagacagagacacttttctgcttgtgtgagtgtgtttgtgtgtacatgcacatgcccatgcgtgttaaggagaaagaagagaagcaacgtacattaaatatttctrttccaagtactgtggtatgcactttcctgagaacaattgtgtgaaataaaatgtgttacctgcatt

SEQ ID NO: 413350 - DNA, 610 bp, Homo sapiens
ggtttttgagtaccttgatacttaaaaatatcaatcagaatattttgaaagcttctaattttttaacccaattaacatatagagttgattaagtgaagtaaatagtaaccttgtttatgtattgrgggacttggatttttacctgtgtaaaaatcctagcagtaaggacaagctttgggaaatgagtttactggttttggcgagaaatggagattaacaaatgtcttaggaaatactccccaggcaccaccagggaataatggcaaccaccaggataaaagacacaaagaggccaagaaacggttaagagaggtcaaaactaacagtcttctccacggcagtattagaaaaaaaaaggtcggggaaaggtatgctgaactaaatgaaaaacaagaattgtaagtggaggctgattacaggttttttaaaaaaaaacaacaacatacaaacgggcaaagaaaaaatgttatagtggcatttttgggaaaaaaaattggatgtttttaacagctgaatgttacagtattcacatttatcgtaaatgaagaatcagaagtcaaataccagtaccatgctgttttggttacagtagccttgtagtatggtttga

SEQ ID NO: 413351 - DNA, 610 bp, Homo sapiens
ggtttttgagtaccttgatacttaaaaatatcaatcagaatattttgaaagcttctaattttttaacccaattaacatatagagttgattaagtgaagtaaatagtaaccttgtttatgtattgagggacttggatttttacctgtgtaaaaatcctagcagtaaggacaagctttgggaaatgagtttactggttttggcgagaaatggagattaacaaatgtcttakgaaatactccccaggcaccaccagggaataatggcaaccaccaggataaaagacacaaagaggccaagaaacggttaagagaggtcaaaactaacagtcttctccacggcagtattagaaaaaaaaaggtcggggaaaggtatgctgaactaaatgaaaaacaagaattgtaagtggaggctgattacaggttttttaaaaaaaaacaacaacatacaaacgggcaaagaaaaaatgttatagtggcatttttgggaaaaaaaattggatgtttttaacagctgaatgttacagtattcacatttatcgtaaatgaagaatcagaagtcaaataccagtaccatgctgttttggttacagtagccttgtagtatggtttga

SEQ ID NO: 413352 - DNA, 610 bp, Homo sapiens
ggtttttgagtaccttgatacttaaaaatatcaatcagaatattttgaaagcttctaattttttaacccaattaacatatagagttgattaagtgaagtaaatagtaaccttgtttatgtattgagggacttggatttttacctgtgtaaaaatcctagcagtaaggacaagctttgggaaatgagtttactggttttggcgagaaatggagattaacaaatgtcttaggaaatactccccaggcaccaccagggaataatggcaaccaccaggataaaagacacaaagaggccaagaaacggttaagagaggtcaaaactaacagtcttctccacggcagtattagaaaaaaaaaggtcggggaaaggtatgctgaactaaatgaaaaacaagaattgtaagtggaggctgattacaggtttttwaaaaaaaaacaacaacatacaaacgggcaaagaaaaaatgttatagtggcatttttgggaaaaaaaattggatgtttttaacagctgaatgttacagtattcacatttatcgtaaatgaagaatcagaagtcaaataccagtaccatgctgttttggttacagtagccttgtagtatggtttga

SEQ ID NO: 413353 - DNA, 371 bp, Homo sapiens
ctcggctcactgcaacctttgtctctttggttcaaggaattctgcctcagcctcttgagtagctgggattatgggtgtgcgccaccatgcctggctaatttttgtatttttagtagagacaggctttcaccatgttggtcaggctggtctcgaactcctgatgtcaaatgatctgcccaccttggcctcccaaagtgctggaattacaggcctgagccagtgcacctagctctagacccccagtcttaatcataagcaaatacccaaggattaccagttatttgaggaaagcatccarcatcaaaggtgggtggtgggaattaagcaaaacaaaaaagcaacttggaagaaatacagactttgcaggggaa

SEQ ID NO: 413354 - DNA, 607 bp, Homo sapiens
ccttctctggataaggcagaggatagtgaagggaggatttagtaagtaccatttttatgagcctctgcaccaaccyactgatgcatggtgtgacacagcacctgacaagaataagtacaactattacggctgcgagggaagtaagaattgaggctattattgttttccatttaccgaaccacctttctagccatcctgtaaaggagtcatttacccctgagttgttggctaactcactggacagagcagtcagaccttgcaatggctttgttatagttccatcaggggtggtgttgtttgggatgaaggtacaacattgagttttaatcatgacacaaactcctcctctttctgttaatatcatgtctaaggctattctgttttcccaagccatctggtggtagccgtaattgctcagctattcctttaacagcatctctaccatagttaataaatcattgttggttgtagtagatgtaggttatccaatctacatttttatggtcacccaccaaaatattgactcaaatcctgtagctgtttgattttgggctttaaattgatctgatattccccaagggactccaattgcatttaaatggatgtg

SEQ ID NO: 413355 - DNA, 592 bp, Homo sapiens
atttgtgttataccaacacaatgcagactaagacaggttcctattattttttcctatttgattgtgctgctgtaacatttttcatgtttttaacatgtgaatttaatccttaatgttctgcagtttcattgtgagagatataagtaaagatttttatcaatttatcaggatacattgtcaagatacattcaaatggagaaagttttatttttaaaataaactgttgaaaactcttagccattagttcttcacatactacgtcttcaattactctagtcagtacatttagacacatgcaggagcctctcaatttgcctcaatgcctcttgacatcataaacatatttttatctatttatctctctgggatgcttataatctttctatttcatctttatatttcaattgactrtctcactctgtgagtgtctagatgaaattttgttacatttaagtttttcttctaagttggtgagtacattttcactaatcaataatgtaacttattattggactgctttatttaataatttttcacattagaattatgaatattatacatctttttatattttagcatctgtatgtcttat

SEQ ID NO: 413356 - DNA, 623 bp, Homo sapiens
agcttctgagacctgaagaagaaagtgagttttgagcttcttttttcagtttaagcacctgaggctgtttttcctgctcctgggttctctgagctacacctactactcctttacctgggccagtttcagcaggtttctttgcctggtgagcagacaaccctagattaagacagcttcagattctgagtctgtgaggatgggactgggtgtcaggggtggggtaaagggctgtagggttggtgygggggcaccatggacagatggtgactgtggcatcagagtgtggatgggctacacctttgggctctgtgttcagtgactttggcgaatctggaaattttcccagattcttccaatcacactgttagtcttagatcttgggaggtagtacaagagttaggctttttctgtattcttcaacattttcatggtaagaagggagaggctatatctagaattgcttttggaagccattttaagaggatgcctcaggctcagacttgaaacagaaaagcctgttcacaaaaagcacacaatcaccttttccttttattttgcaatgattaagagaggatttgaaaacccgccctgcttttcatagatctttattttaaaagtattgt

SEQ ID NO: 413357 - DNA, 575 bp, Homo sapiens
tattagttttattgatctttttgaaggattggcttttggtttcattgacttattttccaattgttttcaatgccaattatttctgctttaattttaatctttttctcttgcattttttgatttaattttatatgtttttctatttccatatatatattaaatctccctaatatatgcatttaatgctgtttctctctaaaataactgctttttgtgcatctcacatattttgataagtaatatttttatttaatttagtttagaatatttttaaaatttctctagagaattctttgacccatgtgttagttagaagtggkttgtttaacttccaaatattttgggattttttttttttttacctatttcattgatttctagtttaatcccattgtattcttacagcacactttttatgatttctattcttttaaatgtgttgtgtgttataagatgccctctatcttggtgaatgttccatgtgagcttgagaagaataagcattctgatgttgatgaagtattctacaaatgtcaaataaacaccacagattgatagtgttgttcagttcaact

SEQ ID NO: 413358 - DNA, 439 bp, Homo sapiens
ttatagacctccccccaggaatgcattcctttcccagggtattaatattaatattccttgctaggaaaagaattaagcaatatctttcctacttgcatgtcgcaagaagaaaaatatggctctttttgcccaaccccacaggaaatcagaccttatggttgtcttcccttgttccataaaaattgctattattctgtcctttttcaaggtgcactgatttcatattgttcaaacatacatgttttacaatcaatttgcacagttaacacaattattacagtggtcctgaggtgacatacatcctcagcttacgaagataacagaattaagagattaaagtaaagacaggcataataaattataaargtattatttgggaactgataactgtccatattaatatgaaatcttcacaatttatgttcctctgctgcagctc

SEQ ID NO: 413359 - DNA, 610 bp, Homo sapiens
gccagcacacccagcctattgattttattacaatgcttcataatgtaactgtaatctgtacatacacatgcatcaactatacaaaaaaaatttaaaaaaagaataatacttcagaataataccttataattgtattagtctgttctcacactgctataaagacattyctgagactgggtaatttatgaaaaaagaggtttaattgactcacagttctgcaggctgtatagaaagtatggctggggaggactcaagaaacttgcaatcgtggtagaagatgaaggggaagcagtcacatattcacttggctggtaggagaaagagagagaatggggaggtgctacatgctgtcaagcaaccagatcttgtgagaactcaatcatgagaatagcaaagggtaagtccgcccccttgattcaatcacttcccaccaggctcctcctccaatactgggaattacaattcaacatgatattggagtagggacacagagccaaactatatcaatgaccaactagcatttatccaaggaatacataaatggtttaacattaggacactgatttatgagaattaattatttattgaaaaataaagctaaaacgtgatt

SEQ ID NO: 413360 - DNA, 510 bp, Homo sapiens
aaagagctcaaagcctttaggaagtgttgaactccatggtagagtcaagtcctccatggctcccaagatccccactctccaacctccaacagtgtgtacctccagtattttcccctcccctgagtatgggggcagccgctgaatatcacaggtgtccctccttcgattagattacttatatggcaaaagtgacaggattctgcagatgtgattaaggtccccaatcaattgattctgagttaattaaaagagagatgatcctgagtagacctgtcctaatcaggttctttaaaatactgtctctcctcctggccttgaagctgatatgcattctgtggaagtgagaaacaaatttgacsaacaatgcctttgggagcaaaccctaaacatcagatgagacctcagctctagctgtcaccttgattgtagccttacaagaccctgatcggagggccttgctaagctgttcctagactgttaacacctggtgatagagacaggaggcaggga

SEQ ID NO: 413361 - DNA, 510 bp, Homo sapiens
aaagagctcaaagcctttaggaagtgttgaactccatggtagagtcaagtcctccatggctcccaagatccccactctccaacctccaacagtgtgtacctccagtattttcccctcccctgagtatgggggcagccgctgaatatcacaggtgtccctccttcgattagattacttatatggcaaaagtgacaggattctgcagatgtgattaaggtccccaatcaattgattctgagttaattaaaagagagatgatcctgagtagacctgtcctaatcaggttctttaaaatactgtctctcctcctggccttgaagctgatatgcattctgtggaagtgagaaacaaatttgacgaacaatgcctttgggagcaaaccctaaacatcagwtgagacctcagctctagctgtcaccttgattgtagccttacaagaccctgatcggagggccttgctaagctgttcctagactgttaacacctggtgatagagacaggaggcaggga

SEQ ID NO: 413362 - DNA, 590 bp, Homo sapiens
caaatcacttaccctcactcgttctcatctcttttgtttgtattgtagggacaataatggtaccaggataaagtgagaatattgatttgatattagaatattgatttgaaagtgcttggcatagagaggaacaaaaatatgtcagattcttacccctttgccctgaagaagtcagtataccttgaatcaaattatacacacacacacacacgcacacacacacacacacacacacaaagaagaaaagaaaagaaaaagaaaaagaaaactccagtactgggccagtccacacgctatgacgtttcatgaaagctataagctgccccattaatcagatctttggaggatctgattcatggagaaataaaaataaaagtgggctggatgccatctcaaagatgtccatgcccaaatctctggaagctgtgaatgtgtgttacgtagcgaaakaaactttgtggaagtaatgaaggtacgggccttagaatgggaagaggatcctgggttatccatatgggactgttctaatgacatgaactcttaaaaagccaggaactttctctggctggagtcagatggaggaggcaaaa

SEQ ID NO: 413363 - DNA, 468 bp, Homo sapiens
taataattgtacacattcatgaatacataccgatggtgtaacacacgtatacaaatcagctgagggtaattggtatgcccatcarttcaagcatttatcatttctttgtgttgggaccattcaatgtcctctttctagctatttgaaacttaacctctgtatttagctacttattctggtcattgcatccatattttcaagtgttaagtttatcatgttcttttacatttattaattttaaatattttattgagttcataacatgataaatatttatttagaccttcaccatacccttctttaacttttcagatagttaaccactatttttagttaaattaataaaagttattgagcaattttagttaagtcaataaacaacattccttcacttattcctatataaatactgttcactatagaacctagtcagatacagctttttgttttcccttgaattaataattg

SEQ ID NO: 413364 - DNA, 468 bp, Homo sapiens
taataattgtacacattcatgaatacataccgatggtgtaacacacgtatacaaatcagctgagggtaattggtatgcccatcaattcaagcatttatcatttctttgtgttgggaccattcaatgtcctctttctagctatttgaaacttaacctctgtatttagctacttattctggtcattgcatccatattttcaagtgttaagtttatcatgttcttttacatttattaattttaaatattttattgagttcataacatgataaatatttatttagaccttcaycatacccttctttaacttttcagatagttaaccactatttttagttaaattaataaaagttattgagcaattttagttaagtcaataaacaacattccttcacttattcctatataaatactgttcactatagaacctagtcagatacagctttttgttttcccttgaattaataattg

SEQ ID NO: 413365 - DNA, 598 bp, Homo sapiens
atttctgaagtctgcatgtggcagagctgagtcttctgaaggcatgaacacaatctcaagtgcatgtgagccaaattggttttccctgctgtttcccagcgaaaaacgctggtgctggtggtggcatatggggaagttgactactgtagggcactagacaggtggatgagaataggtagaaatattccactgcaaatcttctctggcttgtattttatagagtaaaaaagagctcaagagacaagactagtaggatttagatgccttagtcgactcctattaaagtactgagccttacattatgttataagaggatattaaattggtctctttcaaagactggagtttgaggtaaagacaagaaatggtctatcttggatttaaattatttaaaaaaataaggtataattcattttatgcgtcctcattcatcttcttctctcacatcctacgtgagagaaaagcaccagcttaaagaagaaaattgctccttaacctccctccagccaccatgccatctgcccctttgggagtcattcaatrtagaggaaaaatgccaagtggaaagtgagagcaaggcatcgcaattctagttttg

SEQ ID NO: 413366 - DNA, 538 bp, Homo sapiens
gctttacaaagtggaaatgcttccagtcggttttatgacctgcagccacctgccggaggaagcttctgacaaccaggctttcaaaaaggcaggattggtttgtttgtttgtcctgtgggatcctcctctctcctattaatctccaatcagctaatggcatcamaagatcgccctgggtaggaagcaatgtgataaaggacaggtgaaggaagtcaaggagagaaatgatgtggaaggctggaggggaggctcccacccacagacacaggggccacagtcggccctggacacacagaacacctttaagaaggcataagaactggaaacctgaaattactttcttctgacattgtctctttctggatctgctcagctggaaagcccaatgcagagcgatttgtctttgttctgacttctgttgtattccatgtaaagccatcaccccaggagactcgaatttcctgtggatgttgatgtgcccatatctgcagtgacaaatcagcgagtaacttatttttagagatcttgtgttcaccct

SEQ ID NO: 413367 - DNA, 538 bp, Homo sapiens
gctttacaaagtggaaatgcttccagtcggttttatgacctgcagccacctgccggaggaagcttctgacaaccaggctttcaaaaaggcaggattggtttgtttgtttgtcctgtgggatcctcctctctcctattaatctccaatcagctaatggcatcaaaagatcgccctgggtaggaagcaatgtgataaaggacaggtgaaggaagtcaaggagagaaatgatgtggaaggctggaggggaggctcccacccacagacacaggggccacagtcggccctggacacacagaacacctttaagaaggcataagaactggaaacctgaaattactttcttctgacattgtctctttctggatctgctcagctggaaagcccaatgcagagcgatttgtctttgttctgacttctgttgtattccatgtaaagccaycaccccaggagactcgaatttcctgtggatgttgatgtgcccatatctgcagtgacaaatcagcgagtaacttatttttagagatcttgtgttcaccct

SEQ ID NO: 413368 - DNA, 538 bp, Homo sapiens
gctttacaaagtggaaatgcttccagtcggttttatgacctgcagccacctgccggaggaagcttctgacaaccaggctttcaaaaaggcaggattggtttgtttgtttgtcctgtgggatcctcctctctcctattaatctccaatcagctaatggcatcaaaagatcgccctgggtaggaagcaatgtgataaaggacaggtgaaggaagtcaaggagagaaatgatgtggaaggctggaggggaggctcccacccacagacacaggggccacagtcggccctggacacacagaacacctttaagaaggcataagaactggaaacctgaaattactttcttctgacattgtctctttctggatctgctcagctggaaagcccaatgcagagcgatttgtctttgttctgacttctgttgtattccatgtaaagccatcaccccaggagactcgaatttcctgtggatgttgatgtgcccatatctgcagtgacaaatcagygagtaacttatttttagagatcttgtgttcaccct

SEQ ID NO: 413369 - DNA, 629 bp, Homo sapiens
cccctttaagccttctgaaagtttcctggggatggacactttgtccccaaatcacacagccctctctcctgagccctcacctgtgtggccacttccactgggaccatyccatgtgtgctttgacatgtccaaggccgactcccttcatgtgcatctcattttccttagtccatgtcctgcctcatgcagaaaactaatgtcccactgctgcttccccctccttccctccttagcttcagtctccggtctggagcattctagctccttagcaacaactccgctcctttaatgcaagttctcaggctgtgctctagcactaaatagccttcgatctgacttccagaccctagatacggctccccttacttccttctctcaacgttcccacaaggatattcataaaacgtaagccttgtatgtctcccacccagcttagaatccttgaataattctctagtgccctaagatgaaatgaaaactttttagcatatcttagagtcatgtttgtcaaaatgctataagcaacggtgatgtgggtcataaaattcatttagtgagtcaggactattatcttataaaaaccatgacaaactggaataggaaatattaaaatgcattgcaaatcagtc

SEQ ID NO: 413370 - DNA, 629 bp, Homo sapiens
cccctttaagccttctgaaagtttcctggggatggacactttgtccccaaatcacacagccctctctcctgagccctcacctgtgtggccacttccactgggaccatcccatgtgtgctttgacatgtccaaggccgactcccttcatgtgcatctcattttccttagtccatgtcctgcctcatgcagaaaactaatgtcccactgctgcttccccctccttccctccttagcttcagtctccggtctggagcattctagctccttagcaacaactccgctcctttaatgcaagttctcaggctgtgctctagcactaaatagccttcgatctgacttccagaccctagatacggctccccttacttccttctctcaacgttcccacaaggatattcataaaacgtaagccttgtatgtctcccacccagcttagaatccttgaataattctctagtgccctaagatgaaatgaaaactttttagcatatcttagagtcatgtttgtcaaaatgctataagcaacgktgatgtgggtcataaaattcatttagtgagtcaggactattatcttataaaaaccatgacaaactggaataggaaatattaaaatgcattgcaaatcagtc

SEQ ID NO: 413371 - DNA, 593 bp, Homo sapiens
tcactgtcttccacctccacatcctgtcccacggaaggactctaggggcaataacacacacgaagctcttgtctcctgtgacggcagtgtcttcttctggaatcttcctgaaggacccgcctgaggttgttttacaggtaacttttttttttttttaattaggagtacatgctaaaataatgataaaaaggatagtacactaaatatataaaccaggcccatagttgtttattgtcattatcaaggattatatactgtacataattgcatgtgctggactttcatatgactggcagtacagtagggttgtttacrcgagtatcaccacaatcacatgagtaattcattgcactaagatggtacggtggctacaatgtcactaggtgataggaatttttcaggtccgttataatcttttgggaccactgtcatatttgaggttcatagttgaccaaaatgtcattacatggtgcacaactgtattgatgacggaagggggagggcttagagacttccatgtggccttccccactgtgatagctcttacctcacatggcaaggagttggtgtgtggtttctgccaactgtcacat

SEQ ID NO: 413372 - DNA, 610 bp, Homo sapiens
tccaacagttctcttgtcttcccttatctcagactgtcatccccctaactactacccccaccagctcctaaacttacacaattggaacagaaataagtctgtggctcctgtcctctatgtgcttatactctagcggtagaaacagccacatgaactcatcatttcaagaaatggtgctaggtgatgagataagggtttgtgttgcggggcaaattcctgaaaagacaaaagacaaaaggcatttcctcctttacatgttacgctagctttcatttatgtatatttttacttacagtgattaatgagagggagacttcctctttgagggcatgttgacccacacacaaatatccagatatctgccttaggcaagcagaccagacaaattccaggggcttctacagaggagtctgtgacttctagaacaacatggggcccattccgattggctcagaggcagacagtactacgtttgcaggctgaagacctcagtcccgtgtctgggtaagcagggctggtctgaactgacaagtgctaattactgctcrtttgtttgtcattctgaacagacaccaaacagaagacaagactctgcacacccagaaatctt

SEQ ID NO: 413373 - DNA, 557 bp, Homo sapiens
ccatgactgccttgcccagttagcatgacattctgtggcctcatcaccctttctagctctggatgacacccataaatatgatttatrtaagaccaccctgcagttatttgccaaacagacagcaaatgatgtccttggcccagtcttcctctcccagccaccacacatgcatcaattataggggctccatgcaatgggaaggcatcttgcctctgtgcttccacagatgggagttagacttaacaaaaaaaaaaaaagtgttctcttcctgtcactcccaatttctaatgaagctcctttctataatccttcccagaagataatgcaaatcttctcactttcccttctatcgtgtcatatgcagcttgatttatgagggctggtttttgctaaatgaaagctaagcacgaaagtgtggcaaactgagtcaataacaaccataacaatgggggtggataattcttatgtactattcattgaatatgcatgtctgcaagaccctagaacatcgtgtagttctacatcaaatctgcacatataccatactatgaccatac

SEQ ID NO: 413374 - DNA, 557 bp, Homo sapiens
ccatgactgccttgcccagttagcatgacattctgtggcctcatcaccctttctagctctggatgacacccataaatatgatttatatragaccaccctgcagttatttgccaaacagacagcaaatgatgtccttggcccagtcttcctctcccagccaccacacatgcatcaattataggggctccatgcaatgggaaggcatcttgcctctgtgcttccacagatgggagttagacttaacaaaaaaaaaaaaagtgttctcttcctgtcactcccaatttctaatgaagctcctttctataatccttcccagaagataatgcaaatcttctcactttcccttctatcgtgtcatatgcagcttgatttatgagggctggtttttgctaaatgaaagctaagcacgaaagtgtggcaaactgagtcaataacaaccataacaatgggggtggataattcttatgtactattcattgaatatgcatgtctgcaagaccctagaacatcgtgtagttctacatcaaatctgcacatataccatactatgaccatac

SEQ ID NO: 413375 - DNA, 627 bp, Homo sapiens
tacaatcatggcagaaggtgaaagggaagcaggcacatcttaccttggagcaggagagaaagagggcgagcagaggggaatgccagacatttatcaaacaaccagatctcatgagaactcactcactatcacaaaaacagcaaaagggagatctgccaccatgatccaatcacctcccaccaggccccacctccaacactggggattacaattcaacatgagattcaggtgggtacacaaatccaaaccatatcaccaccacaaccagagacctctgctagctggcttacaatgagccaatgattcagttgcctgtggatgagagaagctgagggcatgttaacagtccagagagaagaaataatgactttaaacattccagcacctctccctcatgtagaaaagctcaacatgtatacagatgggtctacagtttcccctttgcaagggaatgaggatgcagagtcacctctgccagtgttccatcatcattgtgtgcatcattcagcttacatgtaacatgcccagtgctgcakgataatgtgaggaagggcggagggtagaagggaaggaggcaggaaggaaggaaggagggaagtgatggtttttgtaacacagaatgaaaaa

SEQ ID NO: 413376 - DNA, 592 bp, Homo sapiens
atttgtgttataccaacacaatgcagactaagacaggttcctattattttttcctatttgattgtgctgctgtaacatttttcatgtttttaacaygtgaatttaatccttaatgttctgcagtttcattgtgagagatataagtaaagatttttatcaatttatcaggatacattgtcaagatacattcaaatggagaaagttttatttttaaaataaactgttgaaaactcttagccattagttcttcacatactacgtcttcaattactctagtcagtacatttagacacatgcaggagcctctcaatttgcctcaatgcctcttgacatcataaacatatttttatctatttatctctctgggatgcttataatctttctatttcatctttatatttcaattgactgtctcactctgtgagtgtctagatgaaattttgttacatttaagtttttcttctaagttggtgagtacattttcactaatcaataatgtaacttattattggactgctttatttaataatttttcacattagaattatgaatattatacatctttttatattttagcatctgtatgtcttat

SEQ ID NO: 413377 - DNA, 592 bp, Homo sapiens
atttgtgttataccaacacaatgcagactaagacaggttcctattattttttcctatttgattgtgctgctgtaacatttttcatgtttttaacatgtgaatttaatccttaatgttctgcagtttcattgtgagagatataagtaaagatttttatcaatttrtcaggatacattgtcaagatacattcaaatggagaaagttttatttttaaaataaactgttgaaaactcttagccattagttcttcacatactacgtcttcaattactctagtcagtacatttagacacatgcaggagcctctcaatttgcctcaatgcctcttgacatcataaacatatttttatctatttatctctctgggatgcttataatctttctatttcatctttatatttcaattgactgtctcactctgtgagtgtctagatgaaattttgttacatttaagtttttcttctaagttggtgagtacattttcactaatcaataatgtaacttattattggactgctttatttaataatttttcacattagaattatgaatattatacatctttttatattttagcatctgtatgtcttat

SEQ ID NO: 413378 - DNA, 633 bp, Homo sapiens
cattcattcatttatgccttaactcattcaatagatacttaaagagctagtgttgagtgtcaatagttttttttaagctctagggatatgaaagacattatgtgacttgatcatccactttccctcccagctgcagtcattataaacttctagatcatggtgtatcactcagagaaggttttgacatctagcttacagtcttgctctccacctcatatttgtttacaggacaagttttcttccctctggggaaggaaaagaaggcagataacctggtctaatttcctcttcaaatggacctctgggtaaatagactaatatttgctagtagtctttatatatacaaaggccttagcaagatgtctttggttaaggattactgataataaataaatctaatatcagttatgtgaggcatggctgcctggagaatgtcaggcaacytgtataattatcagcattatagaattagccacataaatacactctgctatgtgaggtaattatctcctcacttggaggtcccattttttacccagaaccagagagcacaaaagcaacaaaggaagaaagtgccagtgtaaccatgtgagatgtctcagacacctctcttatttgtctctgtttcttgat

SEQ ID NO: 413379 - DNA, 539 bp, Homo sapiens
tgcctagcattacctacctgcatacttactctggtgttgattacttaccttgcttctttgactcagctggacctaatgattgcttgtatcatccccagggttataaatctaccatcgccaccatcaccatctaaggagacccccatacatgatgccactttaagaggagaggccccctctccatgccttacctggaatgtatgcttgaagtcttagacttattcagaagcttcctgaaacagctgctttacacaaactggaagtgtgggggagttaaaatgttgttggatttcacacccattagaataactactattraaaaaaccccacaaaataactcttggcaaggatgtgtagaaattggaacacttatgcactgttggtaggaatgtaaaattgtgcatcttctatggaaaacattatggtgatttctcaaaaaattaaaaatagaattatcatatgatctagcaattctgtttctggtatgtataaaaaataattgagaatgggtctcaaagagatatttgcacacctgtgtt

SEQ ID NO: 413380 - DNA, 539 bp, Homo sapiens
tgcctagcattacctacctgcatacttactctggtgttgattacttaccttgcttctttgactcagctggacctaatgattgcttgtatcatccccagggttataaatctaccatcgccaccatcaccatctaaggagacccccatacatgatgccactttaagaggagaggccccctctccatgccttacctggaatgtatgcttgaagtcttagacttattcagaagcttcctgaaacagctgctttacacaaactggaagtgtgggggagttaaaatgttgttggatttcacacccattagaataactactattaaaaaaaccccacaaaataactcttggcaaggatgtgtagaaattggaacacttatgcactgttggtaggaatgtaaaattgtgcatcttctatggaaaacattatggtgatttctcaaaaaattaaaaatagaattatcatatgatctagcaattctgtttctggtatrtataaaaaataattgagaatgggtctcaaagagatatttgcacacctgtgtt

SEQ ID NO: 413381 - DNA, 495 bp, Homo sapiens
gatcgctcagggcctgtgggcatgataagaactctgaattttattctaaatgatgtgaaacccctggagggagcttacatcatctgagctacagctataaaaagatttttktggccgtaataataataaaaaaggatcagtgaggatgtggagaaattggtatctttgtacagtgctagtgaaaacaacatttagctgctgtggaaaactggcatttcctcaaaagctaaaccctatgacccagcaattccactctcaggtataactcaaaagaattcaaaacagatatataaaaacatatttatagctctattcataattgtcaacaggcagaaagaacccaaatttccatcaactgatgaagggataaacaaaatgtggtatatacatacaatggaatatcattcaaccataaaaaatcatgaagtacagattcatgctgcaacatagatgaactttgaaaatatgctgagtgaaaacaaccagatacaaaag

SEQ ID NO: 413382 - DNA, 510 bp, Homo sapiens
aggactgggacagataatatcaatcattttgaacttctgcaaaacaaagtatggttaaaaccacaagaaaggcttgaattgttcttcrtttctttgagttttattagcaaaaatttaaaaatagataaagcttatctttttcaagtaattaaatccttttgtttaaagaaaccaataccagataatttgcattcagcagttgctatggcttgaatatgtaccccaaaaagcatgtgttaaaaacttaattctcacggcaacagtgttgtgaagtggggtctaatgggaggtgtttagataatgagggctccagcttcatgaatggattactgttaattataaaagggcctgagtgcaagtttgatatctctctcattctctctcatgctctctctctccttctctctctgtctgctttctctggcatatgtgtcctctcgctcttctgtcttccactgtgggatgatgcagcaggaaggcccttaccaggtgccgagcagatgccacagc

SEQ ID NO: 413383 - DNA, 510 bp, Homo sapiens
aggactgggacagataatatcaatcattttgaacttctgcaaaacaaagtatggttaaaaccacaagaaaggcttgaattgttcttcgtttctttgagttttattagcaaaaatttaaaaatagataaagcttatctttttcaagtaattaaatccttttgtttaaagaaaccaataccagataatttgcattcagcagttgctatggcttgaatatgtaccccaaaaagcatgtgttaaaaacttaattctcacrgcaacagtgttgtgaagtggggtctaatgggaggtgtttagataatgagggctccagcttcatgaatggattactgttaattataaaagggcctgagtgcaagtttgatatctctctcattctctctcatgctctctctctccttctctctctgtctgctttctctggcatatgtgtcctctcgctcttctgtcttccactgtgggatgatgcagcaggaaggcccttaccaggtgccgagcagatgccacagc

SEQ ID NO: 413384 - DNA, 543 bp, Homo sapiens
gaaaatcccaaatgaatgaatgtaaattactttggaaagtggagatggctaatgacaattaagttatcgcttttctaaaccataagccctaactatgcagaayccagcctgtacaggtgctgtctctccacctcccactttgttctattttgcactgtttacagtttgtcaccatagaataaaagataatttgattcactctagagagacgatatgcaaaagagaattgcgtggaagtatatttcccatgggtatctgtcttgggatgtctcttagatggaatgtgaccccatctaaagaaaaagcttgaggcttgagaaaataattatccttttcttccaaattgctacagcctttctggaaggcaatttattaaggagtttatcataagccttaaaagcttgtatatcctttgacccagtaatttcattcctggagacatattttgaagaaataagcagagatgggctcaaacatttattgtggtggtatttataacttaaaaagacaaaatatggaaataatataaatactcaacaagaa

SEQ ID NO: 413385 - DNA, 543 bp, Homo sapiens
gaaaatcccaaatgaatgaatgtaaattactttggaaagtggagatggctaatgacaattaagttatcgcttttctaaaccataagccctaactatgcagaacccagcctgtacaggtgctgtctctccacctcccactttrttctattttgcactgtttacagtttgtcaccatagaataaaagataatttgattcactctagagagacgatatgcaaaagagaattgcgtggaagtatatttcccatgggtatctgtcttgggatgtctcttagatggaatgtgaccccatctaaagaaaaagcttgaggcttgagaaaataattatccttttcttccaaattgctacagcctttctggaaggcaatttattaaggagtttatcataagccttaaaagcttgtatatcctttgacccagtaatttcattcctggagacatattttgaagaaataagcagagatgggctcaaacatttattgtggtggtatttataacttaaaaagacaaaatatggaaataatataaatactcaacaagaa

SEQ ID NO: 413386 - DNA, 543 bp, Homo sapiens
gaaaatcccaaatgaatgaatgtaaattactttggaaagtggagatggctaatgacaattaagttatcgcttttctaaaccataagccctaactatgcagaacccagcctgtacaggtgctgtctctccacctcccactttgttctattttgcactgtttacagtttgtcaccatagaataaaagataatttgattcactctagagagamgatatgcaaaagagaattgcgtggaagtatatttcccatgggtatctgtcttgggatgtctcttagatggaatgtgaccccatctaaagaaaaagcttgaggcttgagaaaataattatccttttcttccaaattgctacagcctttctggaaggcaatttattaaggagtttatcataagccttaaaagcttgtatatcctttgacccagtaatttcattcctggagacatattttgaagaaataagcagagatgggctcaaacatttattgtggtggtatttataacttaaaaagacaaaatatggaaataatataaatactcaacaagaa

SEQ ID NO: 413387 - DNA, 555 bp, Homo sapiens
tcgaatattgtataagcaatttatgctggaggtggcaatcacattttaaaatttaggtgataatgttttgaagatatcactttgtgtcttctggatttttgaagggaccaaaggcaatttgtagttcaatgtgctttatgggtcaggtcagagttattggaagtgctgttgacaacctggtgaaggtgtatcaaatattccagtatttttttttggggggggcactcccccaaacaggttaaggctcctgagcattgctcatgtttgttcaggttttgtggtacactgctttgactgagagcagtgtaatttaayagcttattaaactaaggcgtgctataaactcctatcagactgcctggatgcccttttgtcatctcagaggaatccagaaaacttatcaatttgccactcaagtggtaatgatctgagatcaaagtataaacaaaaaaaaaatgatgttagagatttttgttaaaccacatactaaacacaaataaaattacttcatatgccctagtatacagaatgtacgaaagggtatacttttatttt

SEQ ID NO: 413388 - DNA, 511 bp, Homo sapiens
cagcagcatcaaagactgaagctcaataaactcacaaaaatggaaaagaatccatgaaaaaatgctgaaaactcaaaaagccagagtgcctcttctcctccaaatgattgcaacacctctttaacaagggcacagtactgggcagaggctaagacagttgcattcatagaagtaggcttcagaagttgggtaataatgaatttcattgagctaaaggaacatgttctaacccagtacaaagaagccaagaactatgataaaacatcacaggagctgttaaccagaataaccagtttagagaggaacataaatgacctgatggagctgaaaaacacaacacgagaactacacagtgcaaccacaagtatcaataaccaaatagaccaagcagagaaaagaatttcagagcytgaagactatcttgctgaaatgagacaggcagacaagattagagaaaaaggaataaaaaggaatgaacaaaacctttgagaactatgggactgtgtaaaga

SEQ ID NO: 413389 - DNA, 593 bp, Homo sapiens
cattttatcaatattgattcctccaattcatgaacatgaaattttttttttggtgtcctcttcaatttcccttatcagagttttatagtttttattacagagatctttcatttctttggttaattactaggtacttaattttatgtgtgactattgtaactgggatttctttatattactttttcagattgtttgctgttggcatctagaaatactacttatttttgtatgttgattttgtatcccacaacctaactgaatttgtttatcaattctaatagttttcttgtggagcctttcagtttttttaaatacaagatcatatcatctgcaaaaaggataataatttggcttcttcctttccaatttggatgccctttatatctttctgttgttggaatgctcgaggtaggacttccagtattaggttgaatatcactggtgaaagtgarcatccttgttgtgttccagatcttagaggaaaggctttccatttttccccactcattatgatactagctgtgggtatgtcatatacagtttttattatgttgaggtatgtttcttctatccccaattttttgagggttttc

SEQ ID NO: 413390 - DNA, 518 bp, Homo sapiens
gctttataatataatttgaaatcaggtaatgtgattcctcaagatttgttcattttgttgagagttttaatcataaagggatgctggattttgttgaatgatttttatgcatctattgagatgaccatgtaatttttgtttttaattctatttatgtggtgtatcgcatttattgatgttataatatatatgtggtgtatcacatttattggtatgtgttgatatatgttgatatttgctaatatatgtcgatatgtgttgatatatgtttatgtggtatatcacattatattgatattaatgttaaaccatccctgcgtacctggtataaaacccacttgatcgtggtggattatctttttgatatgtttttggattttgttagctagtattttgttaagrattttagcatctgtgttcatcagagatattggtctgtaattttcttcatcagagatattggtctgtaatgacctttcttggttttagcattagggtgatataggcttcactgaatg

SEQ ID NO: 413391 - DNA, 660 bp, Homo sapiens
ctctttctttatcttgtggaatagtgtctatagaattggtaccaattcttctgtgagtgtctggtagaattctgctgtgactccatctggtcctggacttttctgtgttggtaacttttttatcacagtttcaatctcactgcttgttattggtctcttcatggtatctaattcttcctgatttaaactagaagtgtggtatctttccaggaatttatccacctcttctacgttttccagtttatacacataaaggtgcattggcatacaagggacacacctcaatataataaaagccatccatgacaaacccacagccattgtaatactgaatgtggaaaagttgaaatcattccccctgagaactagaacaagacaaggatgcccactytaaccactcctcttcaaaattgtactggaaatccaagccaaagcaatcccacaagagaaagaaataaggggcatccaaattggtaaagaggaagtcaaactgttgctgtttgctgatatgattgttaacctggaaaaccctaaagacttttccagaaagctcctagaactgataaattcagtagtttccagataaaaaattaatgtacacaaatcagtagctcttctatacactaagagtgacaaagctgagaaccaaatcaagaactc

SEQ ID NO: 413392 - DNA, 568 bp, Homo sapiens
aatgtatattctgtagcttttggatgaaatgttctgtaaatatgtattagaatcacttgttctgtagtgcacattaagtctgatgcttcttagatgattttctgtctgtaaaatctgtccaatgctgaaagtagggtgttgaagtctccagctattattgtactggtacctgtgttagtctgttttcatgtgctgataaagacataccccagactgggtaatktataaagaaaaagaggtttaatagactcacagctacacatggctggggaggggcctcacaatcatggcagaaggttaaaggcacattttatatggctgcagaaaagggagagaactagtgcagggaaactccccattataaaaccataagatctcataagacttattcactatattgagagcagcatgggaaagacctgcccccatgattcaattacctcccactgggtccctcccattacacatgggaattgtggaagctacaattcaagatgagatttgggtggggacacagtgaaactatatcagggtctgtctctctctttagcacgaataacatttgctt

SEQ ID NO: 413393 - DNA, 659 bp, Homo sapiens
ttaccccagtcaggatggccattattaaaaagtcaaaaaataatagatattggcatggatgttgtgaaaaaggagcacatacactgatgattggaatgcaaattagcacaacctctctggaaaactacggagatttcttaagaactaaaagtagatctrtcattcaatttagcaatcgcactactgggtatctaaccaaaagaaaagaagtcagtaaataaaaaagatatctgcacatgtttatcacagcacagttcacaattgcaaaaatatggaaccaacctaagttcccatcaactgatgagtaaagaaaatgtgatatatatacaacatggtatactattcagccataagaaagaatgaaataatgtattttgcagcaacttggttggagttggagaccattattttaagtgaagtaactcaggaattgaaaactaaatactctatgttctcacttataagtgggagctgaactatgaatatgcagagtcatacagagtgatataatgaaacttggagactcggaaaggggatggtgggagtcaggtgagggataaaaagctacatactggttacaacgtacactgctcagtgatgactgcattaaaatctcagactttactaaacaattcatcaatgtaacaaaaaaacacccc

SEQ ID NO: 413394 - DNA, 622 bp, Homo sapiens
agttaaaaaaaattttaagtgaaatacagatgcctaatctcaaaaatggcaccaaacacaccaggggtgctgtgactctctgggttcagaaacttcttgtactcttaaaaattattaaagacctcagataacttttatgtgggctatatctatcactatttaattaaaaattaaaactgatcattttatttttatatattctattaaaggtaaaaccacatgtgttaacataaataacattattttaaattatatagtgaaaagtgacattgctttaaatttttgtaaattcctttaatgtctggtttgatagaagacacctggattctctacctgcttctgtggtcattgtgttgttacaaatccattatacacatgagtgaatgagaacgataaagataactaatgcatgtcttagaaacattatgaaaataattttgattcacagactctcaaaaagatccctaaatcacattttgaaaatcactgattcaaaaaaatccaagaaaatgcttcatgtagaaaaatatatatattttacaatggaaatatcactgtctattgactgagtacatatttatacccaaatcrtaatttgaaatgaaaataacatttaagctaa

SEQ ID NO: 413395 - DNA, 606 bp, Homo sapiens
acaatctactctgatgcaacaattttctgataaaaactcttataatttgatttgttatttttcttccttttgccttgtagcatcactgcatacattcggtgctattttttggttgttgttattattcatctttgatgagatgaattcctcctggaccattggatggaggtttttgtcaaacaggggctatggtcagtattctttcttagcaatawtttttcttatgatgaagctttagatgtgagtgcttttaatatttatgtttgcagccaacagagatgaacaccacagaggtgaccacaaggtggactctttcccttcctctcattcatactaatagtttgctgcaaatatgacttgtgatttgcatcttctcttaatcctgccttctctgcctcttgcaacttcacgtaaaactgaatccagggaaggtcttgcattatcctttccatctatttcatatttaaccaacaggggattattggttttaagcctcagattgtcccattacttaagagaacagatatatgtcagtgttgtctgaggtctacagccacagccatcctctctagtacattctgacacctttcttctcgtttaatttta

SEQ ID NO: 413396 - DNA, 592 bp, Homo sapiens
ctacataccaaagacaaataaaaacattttataatgataaaagggtcaatccttttggaagatataacaatcataaatgtatatactcctaccaagaagccccaaaatacatcaggcaaaaactgaaaacaactgaagggagaaataaacaattcgasaaagatagctgaaggctttaataggtcaataaaaactttccagtatgaaattcagagaaaaaaaaatgaaaataaccaaaccaaatatccaataggtgggggacaaggtcaaaaggtgtaacatgcaaatttagcataccagaaagaaaaaagatggataatggaacacaaggaatatttgaagtaataatggcaaagaatgttccaaatttaacaatagacattaaactaaagatacagaaagctcaaagaacactaagtggaataaatatcaaaaactaaacataggcacatcatgttcaaactgcagaaaaccaaagataaagggaaaatcttgaaagactctaaagagaaaaaagcactttacttatagaagaacaaggatacttaaaacaaaattctcatcagaaaccatgaaaggacagagtacagtg

SEQ ID NO: 413397 - DNA, 541 bp, Homo sapiens
ggataggcgtacagaaaggaagaacatcagagaaaaaaatcaacacaattaaaacaaatgttttaaaattattaactgatctaaaagataactgtttmaataaataataacaacaatatattgagtgatcatggcatacaccttttgaccttttcccccacatcttggatattttgtttgattatttttattttttctttgaatttcatattggaaagtttctatgaatgacagtaatgttgtaaggactaggaaggacaaattgggaatacttcgtcatacggtacttgtgctacatatgaagcagtatgatattatttgaaggaggattcatcttagtcacaaatgtattctgaaaactatatggcaaaatataaaaaataagtttaaatatcattcctatgctaagagacaaaattaaattatattaaatgctcagttaggcctgaaacacaaaaaggacaataaattaaattagagcagacacaagtgaaattgaaaacaagaaaacaatagataaaaatcaataaaaccaaaagct

SEQ ID NO: 413398 - DNA, 520 bp, Homo sapiens
atatatgtcaaaaacttggataggcgtacagaaaggaagaacatcagagaaaaaaatcaacacaattaaaacaaatgttttaaaattattaactgatctaaaagataactgtttcaataaataataacaacaatatattgagtgatcatggcatacaccttttgaccttttcccccacatcttggatattttgtttgattatttttattttttctttgaatttcatattggaaagtttctatgaatgacagtaatgttgtaaggactaggaaggacaaattgggaatacttcgtcatacggtacttgtgctacatatgaagcagtatgatattatttgaaggaggattcatcttagtcasaaatgtattctgaaaactatatggcaaaatataaaaaataagtttaaatatcattcctatgctaagagacaaaattaaattatattaaatgctcagttaggcctgaaacacaaaaaggacaataaattaaattagagcagacacaagtgaaattgaaaac

SEQ ID NO: 413399 - DNA, 541 bp, Homo sapiens
ggataggcgtacagaaaggaagaacatcagagaaaaaaatcaacacaattaaaacaaatgttttaaaattattaactgatctaaaagataactgtttcaataaataataacaacaatatattgagtgatcatggcatacaccttttgaccttttcccccacatcttggatattttgtttgattatttttattttttctttgaatttcatattggaaagtttctatgaatgacagtaatgttgtaaggactaggaaggacaaattgggaatacttcgtcatacggtacttgtgctacatatgaagcagtatgatattatttgaaggaggattcatcttagtcacaaatgtattctgaaaactatatggcaaaatmtaaaaaataagtttaaatatcattcctatgctaagagacaaaattaaattatattaaatgctcagttaggcctgaaacacaaaaaggacaataaattaaattagagcagacacaagtgaaattgaaaacaagaaaacaatagataaaaatcaataaaaccaaaagct

SEQ ID NO: 413400 - DNA, 561 bp, Homo sapiens
atggtaggaggtggtgcagaagtaactgttcttttgcacaagctggagcttgcgtagtttgaatttcccatctgctccaaagraaggaacacccaggctttattagcacttgaccaaacaaatatggaacagaaggggcagggagaggaataaaactcaatgctatcacaagtcaaacatccaaaaatgaagtcagattcttttttacaactcagtcctgattgactgatgtctgagacatgccatcatcagttaaaccaaattttggtacatatccaagctatttctgcagagtggctttaaaacaaatgtatgaaaaaaactaagctaaattttaactaattataaaaagataatttatcatgaccaagtttggcttattccaggaattcaaaaatttattaatgtattgcctttaccaattagagaagaaaaccaaataattatttaaatagctactaaaaacatttgataaaacacaacatcaactcaaggtattttttattgatttagaaatagaagaaaaaaattaatgtgctaaatatatatgcaaagcaatcc

SEQ ID NO: 413401 - DNA, 336 bp, Homo sapiens
ctgccctctggagtcatggtttatcttacctcttcctttcttctcctactctctgygggttggagagtaagatgagacaatttattaagcacagtggtggttaaacaaagatttgttttttctagggatgaatttaattatctaagaggctttggaaacaagatctattcttatctaaggaagtagcatcctaaatagcaatttaatcctaagaaggtatattaaattacaaacaagaagattagatcttggatgcatttagctttttaatagtcctaatatatgaatttggtaaacaggaatcaggcttagggggcggcggcagggggctataag

SEQ ID NO: 413402 - DNA, 336 bp, Homo sapiens
ctgccctctggagtcatggtttatcttacctcttcctttcttctcctactctctgcgggttggagagtaagatgagacaatttattaagcacagtggtggttaaacaaagatttgttttttctagggatgaatttaattatctaagaggctttggaaacaagatctattcttawctaaggaagtagcatcctaaatagcaatttaatcctaagaaggtatattaaattacaaacaagaagattagatcttggatgcatttagctttttaatagtcctaatatatgaatttggtaaacaggaatcaggcttagggggcggcggcagggggctataag

SEQ ID NO: 413403 - DNA, 526 bp, Homo sapiens
attaaattacaaacaagaagattagatcttggatgcatttagctttttaatagtcctaatatatgaatttggtaaacaggaatcaggcttagggggcggcggcagggggctataagtgactctctcaagagatttcacaataagcctgtgacaaatccaaaaataagagactagatgtttttcacttcaaagccaaagagccaaacatgtcactgctaatttcaaaatcctgagtctccatagaatacagtctcaattagtttattgtttccgtttgcgtaaaggattcatgccttgactaaaaccaattcattgttgcctagaaaaatggaaaggattagaaagggcaaagaaaaaagatgaaaagttgtcattctactttaaccacaaactatttttgtgattagaacacaaattaatagtttatccttcagccccaagcawctagaaaagtagataagttcttcaatgaataaaattaatcagtgacttttttcactgttggacagacttgctttcagacaga

SEQ ID NO: 413404 - DNA, 610 bp, Homo sapiens
gtggcagtgtcccgattttcctggtacagtctgtcacggcttcccttggctaggaaagggaaatccccccaccccttgtgcttccccggtaaggcaatgccccaccctgctttggctcaccctccatgggctgcaccaactgtccaaccagtcctaatgagatgaaccaggtacctcagttggaaatgcagaaatcacccgtcttctgcatcaatcatgctgggagctgcagaccagagctgttcctattcggccatcttgtaacggacctatatttcttaattgtttaaggcagtctgagttttctgatacctaatgccatcaacagattcttggaaactgtggctatagcatgggacgctgatttgggggggttgcccttgacacagtgcccctctgrcacctggccagaacctcccagggcgaaggtcaggggctgacaggcatggggttaatggggcagtgaaggacggatccctaagtgcagggtgcacacagggagcagagacatggaggcagcagcatcgcacccccagggctctgcccagcaagccacctgcagcccagaaaggcctgttgtaaggaaaactaacaaacagaaaggaatagc

SEQ ID NO: 413405 - DNA, 610 bp, Homo sapiens
gtggcagtgtcccgattttcctggtacagtctgtcacggcttcccttggctaggaaagggaaatccccccaccccttgtgcttccccggtaaggcaatgccccaccctgctttggctcaccctccatgggctgcaccaactgtccaaccagtcctaatgagatgaaccaggtacctcagttggaaatgcagaaatcacccgtcttctgcatcaatcatgctgggagctgcagaccagagctgttcctattcggccatcttgtaacggacctatatttcttaattgtttaaggcagtctgagttttctgatacctaatgccatcaacagattcttggaaactgtggctatagcatgggacgctgatttgggggggttgcccttgacacagtgcccctctgacacctggccagaacctcccagggcgaaggtcaggggctgasaggcatggggttaatggggcagtgaaggacggatccctaagtgcagggtgcacacagggagcagagacatggaggcagcagcatcgcacccccagggctctgcccagcaagccacctgcagcccagaaaggcctgttgtaaggaaaactaacaaacagaaaggaatagc

SEQ ID NO: 413406 - DNA, 602 bp, Homo sapiens
tttctgacccatgctttctgactacaagggaaagggcatgacaaatgtatacacaagtatatgtgtatgtgtatatgtgtgtgttaatgcatatgtaagtgtgtttctatatatgcatttccaattatctttcttcttatctaatttaggtaaagaatcttgataaaaggatcttataaagactttagtaaatactgtatttgctaattgtgtatgttttgtatgcgtgttgtgtgtgagagagagacaaatgaagaatccaagttcatcaagcccacttaagattaatggatttacttaaagatttttaatgtaatgagttcacaaatttttacgtccaaaacactgcacaagcaataataggttttataaattctattatatagasagaaggaaaaaatgagtaaattgagcaaggaaaatgaaaatacaacaacgaatgcagactccatgaaatgattacaagtttattaagattttaaatagaataaatttatcaagttactaaggtaataagactgtctgtcatatcagctttggacttgtatgtctacaaaagcccaaaattgacctacatttctttcttgcatattaaatattta

SEQ ID NO: 413407 - DNA, 493 bp, Homo sapiens
aggatccaaacaaggtccacccattgcttttggctgatataactcaagtcccatttaatttgtaaatattmtctttcttttttgtgtgggggggtacatgaggcaaattaatacatttatataatttgtaaaggtcaaatcagtgtaactgggatatctatcaactgaaatatttgtcttttttatgttagaaacattcttattactttttcttcttctctttttctccctctctccttttttttctatttcttttttcttttgccatttatttgttaaagaaatcaggtcatttgtcctataacagtttttctctatttggattttggtggatgcaatccatggtgttatttaacaagctcctttcttccatgcatttgctataaacaggtatttaaatctaaagccgtgattggattcagttttaatatttggggcatggatgctttgtaggtggtattgtatgcttccatcaggagacctataatgcttg

SEQ ID NO: 413408 - DNA, 493 bp, Homo sapiens
aggatccaaacaaggtccacccattgcttttggctgatataactcaagtcccatttaatttgtaaatattatctttcttttttgtgtgggggggtacatgaggcaaattaatacatttatataatttgtaaaggtcaaatcagtgtaactgggatatctaycaactgaaatatttgtcttttttatgttagaaacattcttattactttttcttcttctctttttctccctctctccttttttttctatttcttttttcttttgccatttatttgttaaagaaatcaggtcatttgtcctataacagtttttctctatttggattttggtggatgcaatccatggtgttatttaacaagctcctttcttccatgcatttgctataaacaggtatttaaatctaaagccgtgattggattcagttttaatatttggggcatggatgctttgtaggtggtattgtatgcttccatcaggagacctataatgcttg

SEQ ID NO: 413409 - DNA, 493 bp, Homo sapiens
aggatccaaacaaggtccacccattgcttttggctgatataactcaagtcccatttaatttgtaaatattatctttcttttttgtgtgggggggtacatgaggcaaattaatacatttatataatttgtaaaggtcaaatcagtgtaactgggatatctatcaactgaaatatttgtcttttttatgttagaaacattcttattackttttcttcttctctttttctccctctctccttttttttctatttcttttttcttttgccatttatttgttaaagaaatcaggtcatttgtcctataacagtttttctctatttggattttggtggatgcaatccatggtgttatttaacaagctcctttcttccatgcatttgctataaacaggtatttaaatctaaagccgtgattggattcagttttaatatttggggcatggatgctttgtaggtggtattgtatgcttccatcaggagacctataatgcttg

SEQ ID NO: 413410 - DNA, 568 bp, Homo sapiens
accctgggggatatattaggtcaggccctccgcaagtaatacagggtcttctcttaactgtggatcgtggtcattttagtgaagttgttcagagrccattccatccccactgcagagggaaagaatgagaattcttgggagtgaatgcacgtgggttagaagaattggaaagctggaatgagtttgttgcttcaggagccttgaggactgcactgggctggggctttggataagggacaagtcaaatgagtaggacattgatgtaactttccaaggtgtcttcatccttagagctaatctttccagctgagttatctgggggatgtgtcttcatgtcagagtaaacaactgagacattctgggatggaaagaagatagaagaacttatcctctagaaatgtcctggaggtattgccttctccttttttacccaactgaatagtcaggatctcagaatataccaagtctccccctgcaccctttagaatgcataattccataaaacatctacagctccaccacggcagggcagcgcagatggaatgagaggacttcctggaccaccagt

SEQ ID NO: 413411 - DNA, 548 bp, Homo sapiens
ctgtggggttgtgaaggagcacgtatatgggaactctgaattttctactcrgttttggtgtgaacctaaaactgctataaaaaaaagtctatttaaaacaaacaaatgaaacctcatgtgtgctattttcctctccgatatggtttgactctctgtccccacccaaatctcatgttgaattgtgatccccaatgttggaggtggggcctggtggaatgtgattggatcacggaggtggtttctagtggttgaggatcatccccctaattctgtcttgtgatagggttctcatgagatcgggttgtttaaaagtgtatggcacctcccctctctcttccttttgctctggccgtgtaagaacacttgagcccaggtgtttgagatcagcctaggatacatggtgagactcctcatctctaataaataaataaataaatgtcttttaaaaaagaaatgttctgtaaatatatattgagttcattgggcctacagtgccgattaagtctgatatttctttgttaaatacctgtcaggatgatttgtccaat

SEQ ID NO: 413412 - DNA, 548 bp, Homo sapiens
ctgtggggttgtgaaggagcacgtatatgggaactctgaattttctactcggttttggtgtgaacctaaaactgctataaaaaaaagtctatttaaaacaaacaaatgaaacctcatgtgtgctattttcctctccgatatggtttgactctctgtccccacccaaatctcatgttgaattgtgatccccaatgttggaggtggggcctggtggaatgtgattggatcayggaggtggtttctagtggttgaggatcatccccctaattctgtcttgtgatagggttctcatgagatcgggttgtttaaaagtgtatggcacctcccctctctcttccttttgctctggccgtgtaagaacacttgagcccaggtgtttgagatcagcctaggatacatggtgagactcctcatctctaataaataaataaataaatgtcttttaaaaaagaaatgttctgtaaatatatattgagttcattgggcctacagtgccgattaagtctgatatttctttgttaaatacctgtcaggatgatttgtccaat

SEQ ID NO: 413413 - DNA, 423 bp, Homo sapiens
atcacggaggtggtttctagtggttgaggatcatccccctaattctgtcttgtgatagggttctcatgagatygggttgtttaaaagtgtatggcacctcccctctctcttccttttgctctggccgtgtaagaacacttgagcccaggtgtttgagatcagcctaggatacatggtgagactcctcatctctaataaataaataaataaatgtcttttaaaaaagaaatgttctgtaaatatatattgagttcattgggcctacagtgccgattaagtctgatatttctttgttaaatacctgtcaggatgatttgtccaatgctgaaagtgcggtattgaagtctccacacattattttactacagtctatctctgtctaaatttagctttaacaatatttgctttattaatctgggtact

SEQ ID NO: 413414 - DNA, 518 bp, Homo sapiens
gataaaaagtatagctactcctactctttttttttctttttggtttccatttgcatggaatattttttccatccttttattttcagtctrtgtatgtctttagaggtgaagtatgtttcttgtaggcaacagagatcattgggtctgtttttttataatccattcagccactgtgtcttttgattggagagtttagtctatttacatttaatgttattacggattagtaaggacctcctcctgacattttgttgtttttcagttgttttgtagtcttctcttccttcctgtctttttcctgtctttctttttctgaaggtgattttctctggtggtatgtttttttctttttattttctgtatatctgtggttttttgacttaaggttaccataaagcttgcaaatagcatcttataacccaacattttaaattaacaacaacttaacaatgattgcataaacaaataaacaaacaaccaaagaaaaaactcataagaactctacactttaacctcat

SEQ ID NO: 413415 - DNA, 518 bp, Homo sapiens
gataaaaagtatagctactcctactctttttttttctttttggtttccatttgcatggaatattttttccatccttttattttcagtctatgtatgtctttagaggtgaagtatgtttcttgtaggcaacagagatcattgggtctgtttttttataatccattcagccactgtgtcttttgattggagagtttagtctatttacatttaatgttattayggattagtaaggacctcctcctgacattttgttgtttttcagttgttttgtagtcttctcttccttcctgtctttttcctgtctttctttttctgaaggtgattttctctggtggtatgtttttttctttttattttctgtatatctgtggttttttgacttaaggttaccataaagcttgcaaatagcatcttataacccaacattttaaattaacaacaacttaacaatgattgcataaacaaataaacaaacaaccaaagaaaaaactcataagaactctacactttaacctcat

SEQ ID NO: 413416 - DNA, 518 bp, Homo sapiens
gataaaaagtatagctactcctactctttttttttctttttggtttccatttgcatggaatattttttccatccttttattttcagtctatgtatgtctttagaggtgaagtatgtttcttgtaggcaacagagatcattgggtctgtttttttataatccattcagccactgtgtcttttgattggagagtttagtctatttacatttaatgttattackgattagtaaggacctcctcctgacattttgttgtttttcagttgttttgtagtcttctcttccttcctgtctttttcctgtctttctttttctgaaggtgattttctctggtggtatgtttttttctttttattttctgtatatctgtggttttttgacttaaggttaccataaagcttgcaaatagcatcttataacccaacattttaaattaacaacaacttaacaatgattgcataaacaaataaacaaacaaccaaagaaaaaactcataagaactctacactttaacctcat

SEQ ID NO: 413417 - DNA, 610 bp, Homo sapiens
tttatatcttcttatactatctctggcttgaaaagttgcagttactatttttgatcaggtcatcttttagtctttgtactcaagatatgagtagtttacacatcacaattacagtgttataatattctgtgttttttctgtgtacttatattactagtgagttttgtaccatcacattatttcttatttctcattaacatctttttttttcagatggaagaactccctttagcatttcttgtaggacaggtctgatattgatgaaattcctcggtttttgtttttctgggaaagtctttatttctccttcatgtttgaaggatattctcaatgaatacactattctaggataaaagggttgctgtttttgttttttcttctgtgcttgtaatatgctacractctctctctgctgacctgtaaggtttccactgaaaagtctgctgccagatgtatcggaactcctttgtatgttttttttctctctctctctctctctttctgcttgtagaatcgtttctttgtccttaacctttgggagtttgattattaaatgttttaaggtagtcttaatttggctaaatttggttggtattctataatgttctta

SEQ ID NO: 413418 - DNA, 610 bp, Homo sapiens
tttatatcttcttatactatctctggcttgaaaagttgcagttactatttttgatcaggtcatcttttagtctttgtactcaagatatgagtagtttacacatcacaattacagtgttataatattctgtgttttttctgtgtacttatattactagtgagttttgtaccatcacattatttcttatttctcattaacatctttttttttcagatggaagaactccctttagcatttcttgtaggacaggtctgatattgatgaaattcctcggtttttgtttttctgggaaagtctttatttctccttcatgtttgaaggatattctcaatgaatacactattctaggataaaagggttgctgtttttgttttttcttctgtgcttgtaatatgctacaactctstctctgctgacctgtaaggtttccactgaaaagtctgctgccagatgtatcggaactcctttgtatgttttttttctctctctctctctctctttctgcttgtagaatcgtttctttgtccttaacctttgggagtttgattattaaatgttttaaggtagtcttaatttggctaaatttggttggtattctataatgttctta

SEQ ID NO: 413419 - DNA, 610 bp, Homo sapiens
tttatatcttcttatactatctctggcttgaaaagttgcagttactatttttgatcaggtcatcttttagtctttgtactcaagatatgagtagtttacacatcacaattacagtgttataatattctgtgttttttctgtgtacttatattactagtgagttttgtaccatcacattatttcttatttctcattaacatctttttttttcagatggaagaactccctttagcatttcttgtaggacaggtctgatattgatgaaattcctcggtttttgtttttctgggaaagtctttatttctccttcatgtttgaaggatattctcaatgaatacactattctaggataaaagggttgctgtttttgttttttcttctgtgcttgtaatatgctacaactctctctctgctgacctgtaaggtttccactgaaaagtctgctgccagatgtatyggaactcctttgtatgttttttttctctctctctctctctctttctgcttgtagaatcgtttctttgtccttaacctttgggagtttgattattaaatgttttaaggtagtcttaatttggctaaatttggttggtattctataatgttctta

SEQ ID NO: 413420 - DNA, 494 bp, Homo sapiens
ctgtgaatttgcaaatagcctgtcttcaagttcactaattctttttttctgcttgatgaattctgctgttaagaaactctgatgcattcttcagctccagaatttctccttaattctttttaattatttcaatctttttattaaatttgtctgatagaaatctgaattccttctcaatgtaatsttgaatttcattgagctacctcaaaacagctattttgaattctctgaaaggtcacttatctctgggatgggtcactaatgccttatttagcttatttggtgaggtcatgatttcctggatggttctgatgcttgtcaatgttcttctgtgtctggatgttgaacagttaggtatttattataagcttctcagtctggacttgtgtttacctggtcttcttgagaaggttttccaagtattcaaagggacttgggtgttgtgatctaaattgttaatcacttcagctttatctgcattgggggcaccccaa

SEQ ID NO: 413421 - DNA, 494 bp, Homo sapiens
ctgtgaatttgcaaatagcctgtcttcaagttcactaattctttttttctgcttgatgaattctgctgttaagaaactctgatgcattcttcagctccagaatttctccttaattctttttaattatttcaatctttttattaaatttgtctgatagaaatctgaattccttctcaatgtaatcttgaatttcattgagctacctcaaaacagctattttgaattctctgaaaggtcacttatctctgggatgggtcactaawgccttatttagcttatttggtgaggtcatgatttcctggatggttctgatgcttgtcaatgttcttctgtgtctggatgttgaacagttaggtatttattataagcttctcagtctggacttgtgtttacctggtcttcttgagaaggttttccaagtattcaaagggacttgggtgttgtgatctaaattgttaatcacttcagctttatctgcattgggggcaccccaa

SEQ ID NO: 413422 - DNA, 599 bp, Homo sapiens
ttttgttgatagcattttttatcgatacttataaagaatatcgatctacagttttctttccttgtgatttttaaatcaagataatgtattttttatatattaccatgacaaacttggtatcatagaataaattctacgattctatgaattctagagaattctatggtatctcatagaatccgttggaagtgttcccttcccttttaattttggaagagattgtgaagagttagtatgaarccttcttcaaacatttagtagaattgttcagtgatgtcagctggtcctgacattttttgggtggaaagtgttttgatttctaattcaatctttttacctatatgtctatccatatgttctatttcttcttgagtcagtattggttatttgcatatttctagaaatttgtctatttcttataggttatctaattagctgacaaattttttatagtatactgtatatataatttttgtttctataagcttaatagtaattaacatatcttttttcattctcaatgtagttacttgaatcttttctctctctatctttgtcaatctagttaaagattagtcaattttgttgaccttttcaaa

SEQ ID NO: 413423 - DNA, 599 bp, Homo sapiens
ttttgttgatagcattttttatcgatacttataaagaatatcgatctacagttttctttccttgtgatttttaaatcaagataatgtattttttatatattaccatgacaaacttggtatcatagaataaattctacgattctatgaattctagagaattctatggtatctcatagaatccgttggaagtgttcccttcccttttaattttggaagagattgtgaagagttagtatgaaaccttcttcaaacatttagtagaattgttcagtgatgtcagctggtcctgacattttttgggtggaaagtgttttgatttctaattcaatctttttacytatatgtctatccatatgttctatttcttcttgagtcagtattggttatttgcatatttctagaaatttgtctatttcttataggttatctaattagctgacaaattttttatagtatactgtatatataatttttgtttctataagcttaatagtaattaacatatcttttttcattctcaatgtagttacttgaatcttttctctctctatctttgtcaatctagttaaagattagtcaattttgttgaccttttcaaa

SEQ ID NO: 413424 - DNA, 583 bp, Homo sapiens
agatggctggtgcagcacaactttctttcacaggagcatcttgcagaatacagtatgagatacagaaaggctgcactgagtctttttaagggcccrggccttggtgcgggtggggaaggagctctccagatagcatctaatgagtaggaacattcaggtggctttttttttttccttattggcaaaactgtgtgtgcaccatgaatgaagctggactcccttatccatatcaaaactaaacccaaattaattggctaaattgggactcaacacctccaggagccacatggaagaaagccccaccacactttaaagtagcttacctcatcatatttgaggaaagcaaaacgcttatgaccagtatgctgctaatacaagtctacagataatgctgtatgaaaaattatttttcccaatcatggctggcatagtccacattttgcattacactttcccccctttttttaaatcttaagcacaggtctttttttcttctttttttaaattttaatttaattatacaagacggagtctcagtatgttgcccaggctggtcttggactcctgagctcaagtgatacat

SEQ ID NO: 413425 - DNA, 583 bp, Homo sapiens
agatggctggtgcagcacaactttctttcacaggagcatcttgcagaatacagtatgagatacagaaaggctgcactgagtctttttaagggcccgggccttggtgcgggtggggaaggagctctccagatagcatctaatgagtaggaacattcaggtggctttttttttttccttattggcaaaactgtgtgtgcaccatgaatgaagctggaytcccttatccatatcaaaactaaacccaaattaattggctaaattgggactcaacacctccaggagccacatggaagaaagccccaccacactttaaagtagcttacctcatcatatttgaggaaagcaaaacgcttatgaccagtatgctgctaatacaagtctacagataatgctgtatgaaaaattatttttcccaatcatggctggcatagtccacattttgcattacactttcccccctttttttaaatcttaagcacaggtctttttttcttctttttttaaattttaatttaattatacaagacggagtctcagtatgttgcccaggctggtcttggactcctgagctcaagtgatacat

SEQ ID NO: 413426 - DNA, 583 bp, Homo sapiens
agatggctggtgcagcacaactttctttcacaggagcatcttgcagaatacagtatgagatacagaaaggctgcactgagtctttttaagggcccgggccttggtgcgggtggggaaggagctctccagatagcatctaatgagtaggaacattcaggtggctttttttttttccttattggcaaaactgtgtgtgcaccatgaatgaagctggactcccttatccatatcaaaactaaacccaaattaattggctraattgggactcaacacctccaggagccacatggaagaaagccccaccacactttaaagtagcttacctcatcatatttgaggaaagcaaaacgcttatgaccagtatgctgctaatacaagtctacagataatgctgtatgaaaaattatttttcccaatcatggctggcatagtccacattttgcattacactttcccccctttttttaaatcttaagcacaggtctttttttcttctttttttaaattttaatttaattatacaagacggagtctcagtatgttgcccaggctggtcttggactcctgagctcaagtgatacat

SEQ ID NO: 413427 - DNA, 583 bp, Homo sapiens
agatggctggtgcagcacaactttctttcacaggagcatcttgcagaatacagtatgagatacagaaaggctgcactgagtctttttaagggcccgggccttggtgcgggtggggaaggagctctccagatagcatctaatgagtaggaacattcaggtggctttttttttttccttattggcaaaactgtgtgtgcaccatgaatgaagctggactcccttatccatatcaaaactaaacccaaattaattggctaaattgggactcaacacctccaggagccacatggaagaaagccccaccacactttaaagtagcttacctcatcatatttgaggaaagcaaaacgcttatgaccagtatgctgctaatacaagtctacagataatgctgtatgaaaaattatttttcccaatcatggctggcatagtccacattttgcattacactttcccccctttttttaaatcttaagcacaggtctttttytcttctttttttaaattttaatttaattatacaagacggagtctcagtatgttgcccaggctggtcttggactcctgagctcaagtgatacat

SEQ ID NO: 413428 - DNA, 525 bp, Homo sapiens
tgctccttatcttcatggagcttacaatttaataagagataaatatccatcaaacaaccccacaaataaatgtacaactgtaactgtaataaaagctaaaatgagtatggtgcactatgggcatacagtagggagatctgacctaatcagagagttaagacaagttaggggccttgtatcctattcctggagtcttgctcatcggcaaacaggtgaaggaagtatttgtaaggataatatatcctcctgtacatcccaaagtcccgtcctgtgcacagccactgactacgtacctctgcatccaaagcagactcagctttcagctggccttgctgagagtgagcccagcatatcatggaaaatgaattcaccacactgtggcacaaaccccrtatcatccaacagcttcttcaaccagagcagctcagtcttggtccttatccgtgaatgatggttgcagaaccacgctggctttacagggatctgggtaggatccattgcccccaccctgaatgtattcatagt

SEQ ID NO: 413429 - DNA, 596 bp, Homo sapiens
atccttctgtgtgctgctaataagcctatttagagtcaatgagaaagcctcattttgcaccaccaataacggccttcaagagtactactgaatcagaaaaaccgaaatgtttctatgtactccctgtcctcattttacatcagccagagaggtgacgctcagcaaaatatcggacacgatgacctccaagtttccttccttctctaatgtcctctggttctctgttggcgagtaggattcaaattttatttaaattatctcatattctgatggattcttgagccctttttcagttttagatagtctccctgaggtttgctgaattggcgtatcyggagtctaggatctctcttggcaaagaactgaatattgctcccatccaacggcttagctagcactgtctattttctttctgaaaaagatctgggtaggaggcaggtgtagagcatctttccacctcccacagaagggctagggaaagctttgttgtgcatgaaccatgaacaaaaggataattcaaaccagcaataatgtccttaataaaaaataatcatcattttcccaaatgaaaatctacagttctaaccatttgatca

SEQ ID NO: 413430 - DNA, 472 bp, Homo sapiens
tggaggcttaaaaatctggctttaaattccttttgcattttgtttgccttcacattcttgttctgccacttagtttgatgggaaaccttaggcaaatttcttaatctgagattcaatttcttttcttttttcttttttttttttgtgacrggatctcactctgtcacccaggctggagtgcagtcatgcagtcttggctcactacagcctctgcccccgtggcccaagcaatcctcccacctcagcctcctgagtagctgggaccacaagtgtgcaccaccacgcctggctaatttttgtattttttgtagagatggggttttgttatgttgcccaggctggtctcaaactcctgagatcaagtgatccttccacctcagcctcccaaagtgctggaattacaggtgtgagccaacacgcccggctgagattcagtttcttcatctgaaaaatgaggatacctatggacaac

SEQ ID NO: 413431 - DNA, 472 bp, Homo sapiens
tggaggcttaaaaatctggctttaaattccttttgcattttgtttgccttcacattcttgttctgccacttagtttgatgggaaaccttaggcaaatttcttaatctgagattcaatttcttttcttttttcttttttttttttgtgacaggatctcactctgtcacccaggctggagtgcagtcatgcagtcttggctcactacagcctctgcccccgtggcccaagcaatcctcccacctcagcctcctgagtagctgggaccacaagtgtgcaccaccacgcctggctaatttttgtattttttgtagagatggggttttgttatgttgcccaggctggtctcaaactcctgagatcaagtgatccttccacctcagcctcccaaagtgctggrattacaggtgtgagccaacacgcccggctgagattcagtttcttcatctgaaaaatgaggatacctatggacaac

SEQ ID NO: 413432 - DNA, 387 bp, Homo sapiens
taaagcttggcaattttttaaaaataatacagacagtgactcactatactgcctcctccaactcctggcctcaagcagtcctcccacctcaacctccaaaagtgctgggattataggtcgacagccaccatgcctgaaagcttggcaayttacatcaagcataataagaatgctcatgccctgtgactcacagtaatctcacttctggaaatatcatctttggatataattcaacctaaacaaaaggtcatatgcacaaacacagtgaaaatcttggggtattttttttctcttttttaaaaaaatatggaatgcttcacaaatttgcatgtcattcttgcacagaggccatgccaatctctctattgttccaactttagtatatgt

SEQ ID NO: 413433 - DNA, 387 bp, Homo sapiens
taaagcttggcaattttttaaaaataatacagacagtgactcactatactgcctcctccaactcctggcctcaagcagtcctcccacctcaacctccaaaagtgctgggattataggtcgacagccaccatgcctgaaagcttggcaatttacatcaagcataataagaatgctcatgccctgtgactcacagtaatctcacttctggaaatatcatctttggatataattcaacctaaacaaaaggtcatatgcacaaacacagtgaaaatcttggggtattttttttytcttttttaaaaaaatatggaatgcttcacaaatttgcatgtcattcttgcacagaggccatgccaatctctctattgttccaactttagtatatgt

SEQ ID NO: 413434 - DNA, 387 bp, Homo sapiens
taaagcttggcaattttttaaaaataatacagacagtgactcactatactgcctcctccaactcctggcctcaagcagtcctcccacctcaacctccaaaagtgctgggattataggtcgacagccaccatgcctgaaagcttggcaatttacatcaagcataataagaatgctcatgccctgtgactcacagtaatctcacttctggaaatatcatctttggatataattcaacctaaacaaaaggtcatatgcacaaacacagtgaaaatcttggggtattttttttctcttttttaaaaaaawatggaatgcttcacaaatttgcatgtcattcttgcacagaggccatgccaatctctctattgttccaactttagtatatgt

SEQ ID NO: 413435 - DNA, 514 bp, Homo sapiens
caacctttcagagaagattccagctcgcatgatctcatcaaccaagagaatgttggtggcaaccagtgctgaaagggggataaaaattagatagctcagatgattaggagccctaattcgactcaacttcccacttccaactaagctgcacacgttaacatccaattaaatttcccccttcccctctacacatcagagggctagttcggtttccatactttcagctgattacattattcatgggggaaaatgagcaactaaacagaaaacaccaaatgaagagtatgatgattctctaacagtttagttttcattttcccaaacttaccaggaatgaagaagctgtttctttacacaatcgttatcccataatgcctgcttctgctgctaccacgggctcacctaaaaggcaaccaaagtaarttcagtcaataagaaccaacaatattgtgtgtggctttgcttatcaccgatgactcatttcctccagtattaactatgggaattcaaagct

SEQ ID NO: 413436 - DNA, 636 bp, Homo sapiens
ccagcactgcagctgatcaccaaattggctagcttttgtgccttttgcacttgctttagtgccaacaggataaaactgtcaaggacaaaatctaaatgtttatttacgtggggatgagtcaggaagtagactttattttactgggctcagggccaacaacctcattcagtggcctccaaaactaaacactttgttgagggagaagagaaatcgctccacaagagatatagaaaggactggaatctccgcttacagagctgtggactgcccagaacttacagcagggtcagcaaattttttctgtaaaaggtaaaatagtaactttatggtctctgtggcaactactcagctctgtgattgtagcatgaaagcaactatagacaatacctaaacaaatgagcgtggctgtgcttcaatcagatcttacatacaaaagcaggcaacaggccagctttggtccacaggctgtagtytggtgactcctagtttagagtactgttactggcacatcacaggcacacaataaacatcaagtatatgattcaatgtacagtggcaagagaacaaactgtcatgctaaaatcatttcaaccttaaaaataattcagctttccctatcttttattgttactgatt

SEQ ID NO: 413437 - DNA, 636 bp, Homo sapiens
ccagcactgcagctgatcaccaaattggctagcttttgtgccttttgcacttgctttagtgccaacaggataaaactgtcaaggacaaaatctaaatgtttatttacgtggggatgagtcaggaagtagactttattttactgggctcagggccaacaacctcattcagtggcctccaaaactaaacactttgttgagggagaagagaaatcgctccacaagagatatagaaaggactggaatctccgcttacagagctgtggactgcccagaacttacagcagggtcagcaaattttttctgtaaaaggtaaaatagtaactttatggtctctgtggcaactactcagctctgtgattgtagcatgaaagcaactatagacaatacctaaacaaatgagcgtggctgtgcttcaatcagatcttacatacaaaagcaggcaacaggccagctttggtccacaggctgtagtctggtgactcctagttkagagtactgttactggcacatcacaggcacacaataaacatcaagtatatgattcaatgtacagtggcaagagaacaaactgtcatgctaaaatcatttcaaccttaaaaataattcagctttccctatcttttattgttactgatt

SEQ ID NO: 413438 - DNA, 636 bp, Homo sapiens
ccagcactgcagctgatcaccaaattggctagcttttgtgccttttgcacttgctttagtgccaacaggataaaactgtcaaggacaaaatctaaatgtttatttacgtggggatgagtcaggaagtagactttattttactgggctcagggccaacaacctcattcagtggcctccaaaactaaacactttgttgagggagaagagaaatcgctccacaagagatatagaaaggactggaatctccgcttacagagctgtggactgcccagaacttacagcagggtcagcaaattttttctgtaaaaggtaaaatagtaactttatggtctctgtggcaactactcagctctgtgattgtagcatgaaagcaactatagacaatacctaaacaaatgagcgtggctgtgcttcaatcagatcttacatacaaaagcaggcaacaggccagctttggtccacaggctgtagtctggtgactcctagtttagagtactgttactggcacatcacaggcacacaataaacatcaagtatatgattcaatgtacrgtggcaagagaacaaactgtcatgctaaaatcatttcaaccttaaaaataattcagctttccctatcttttattgttactgatt

SEQ ID NO: 413439 - DNA, 340 bp, Homo sapiens
ctaagatagtggtccccacctttttggcatctgggttcagyttcatggaagaaaccagagagggtagtgaagcagggtggttttagatgaaactgtccacctcagatcatcaggaattagactctcacaaggagcatgaaacctagatcccacacatgctcagttcacaatagggttcacactcctatgataatctaatgcagctgctgatctgacagcaggcagcactcaggcagtaatacttgctcatctaccactcacctcctgttgtgtggcctggttcctaacaagccatggaccaggactggtccacagcctgggggtttgagcctcctgaact

SEQ ID NO: 413440 - DNA, 557 bp, Homo sapiens
taagccatagtccttgtgatactaaagtccatgttcttagatcgatgttaaggtgggtggtatgtgaaactgtgggcatagagatctcccagggagagtttatagaatgagaggagtagagaatagaagacagcctgaaggagaatgaatccatcttggacttttcccatggctcttaatttgatatgagttactttatatatatataaaatatggggcttcagtgtgttgctcaggccrgccttgaactcctgagctcaaatgatcctcccacctcagcttcctgagtagctgggactttggtgtatggcattgcacctggctgatgtgcagtttttgtttttttgtttttggagttttttttttttttgagacaggggcccagtctgtcaccaggacggagtgtagtggcacaatcatggctcactgcagcctcaaactcctgggcacaagtgatcttcctccctcagcctcccaagtagatgggactataggcgtgcgccaccacacttggctaatttgttttttgtgtgttttgttttgagatagggtctcgt

SEQ ID NO: 413441 - DNA, 557 bp, Homo sapiens
taagccatagtccttgtgatactaaagtccatgttcttagatcgatgttaaggtgggtggtatgtgaaactgtgggcatagagatctcccagggagagtttatagaatgagaggagtagagaatagaagacagcctgaaggagaatgaatccatcttggacttttcccatggctcttaatttgatatgagttactttatatatatataaaatatggggcttcagtgtgttgctcaggccagccttgaactcctgagctcaaatgatcctcccacctcagcttcctgagtagctgggactttggtgtatggcaytgcacctggctgatgtgcagtttttgtttttttgtttttggagttttttttttttttgagacaggggcccagtctgtcaccaggacggagtgtagtggcacaatcatggctcactgcagcctcaaactcctgggcacaagtgatcttcctccctcagcctcccaagtagatgggactataggcgtgcgccaccacacttggctaatttgttttttgtgtgttttgttttgagatagggtctcgt

SEQ ID NO: 413442 - DNA, 557 bp, Homo sapiens
taagccatagtccttgtgatactaaagtccatgttcttagatcgatgttaaggtgggtggtatgtgaaactgtgggcatagagatctcccagggagagtttatagaatgagaggagtagagaatagaagacagcctgaaggagaatgaatccatcttggacttttcccatggctcttaatttgatatgagttactttatatatatataaaatatggggcttcagtgtgttgctcaggccagccttgaactcctgagctcaaatgatcctcccacctcagcttcctgagtagctgggactttggtgtatggcattgcacctggctgatgtgcagtttttgtttttttgtttttggagttttttttttttttgagacaggggcccagtctgtcaccaggacggagtgtagtggcacaatcatggctcactgcagcctcaaactcctgggcacaagtgatcttcctccctcagcctcccaagtagatgggactataggcrtgcgccaccacacttggctaatttgttttttgtgtgttttgttttgagatagggtctcgt

SEQ ID NO: 413443 - DNA, 547 bp, Homo sapiens
cagagtgagactccatctcaaaaaaaaaaacaaaaaacaagtagatacaaattgaaaagtgaaatactctttgctctctcctccccatccatcttaaaaggtaaccacttttaacagtaagwatatctgaagggctaggccaaaaataaaaaaaaattattctcatgaaaaaattgtatgctatataagtttatttgggaataaatcattactcttccttcaagtgaaagataagatagtgttttaaagataaatgtggccgggtgcagtggctcacgcctgtaatcccagcagtctgggtggctgaggcaggcggatcacctgtggtcaggagttcgagaccagcctgaccaacatggagaaaccctgtctctactaaaaatacaaaattagctgggtctgggggcggccacctctaatcccagctactcaggaggctgaggcaagagaatcgcttgaacctgggaggtggagtttgcagtgagccgagatggtaccattgcactctaggcaacaagagtgaaactctgtctaaaaaaaaaaaaga

SEQ ID NO: 413444 - DNA, 547 bp, Homo sapiens
cagagtgagactccatctcaaaaaaaaaaacaaaaaacaagtagatacaaattgaaaagtgaaatactctttgctctctcctccccatccatcttaaaaggtaaccacttttaacagtaagaatatctgaagggctaggccaaaaataaaaaaaaattattctcatgaaaaaattgtatgctatataagtttatttgggaataaatcattactcttccttcaagtgaaagataagatagtgttttaaagataartgtggccgggtgcagtggctcacgcctgtaatcccagcagtctgggtggctgaggcaggcggatcacctgtggtcaggagttcgagaccagcctgaccaacatggagaaaccctgtctctactaaaaatacaaaattagctgggtctgggggcggccacctctaatcccagctactcaggaggctgaggcaagagaatcgcttgaacctgggaggtggagtttgcagtgagccgagatggtaccattgcactctaggcaacaagagtgaaactctgtctaaaaaaaaaaaaga

SEQ ID NO: 413445 - DNA, 588 bp, Homo sapiens
aaaattaactttgctgttaatgttctctgtcaaaatacatccctttgtcctccttcttcccctttcatcccactttactttttagagtgcatttttacttcattttatgyaactggaagtggagtaatatcttcatgaggaaatgatatttttagctattctgtaattcagcttcaaagaaatgaaaattctttgaacaataattttctttccgaagagattcaaagccttctgtatgtgctcaatgttgttaaccagcagatggcactcttgctcctcggcagtgaacctggaggctttgaaacttgtcaagagtgtgggtcaaatatcttcctttgaaagaagtataataaagaaggcgccttcagcctgtatatctgaaccaatagagattctttatgtgcaggtgcaactaatcctttcaagatgtaatgaagctcaataaatcctccttttgcaatatcttcactggtctttcaggctgattctgctttttgtgagaagaaaagtgcagaacagctcagcacaatgctacatgtttaagcaataaggagactgacccattgtctcatgtcaagctgcctggga

SEQ ID NO: 413446 - DNA, 588 bp, Homo sapiens
aaaattaactttgctgttaatgttctctgtcaaaatacatccctttgtcctccttcttcccctttcatcccactttactttttagagtgcatttttacttcattttatgcaactggaagtggagtaatatcttcatgaggaaatgatatttttagctattctgtaattcagcttcaaagaaatgaaaattctttgaacaataattttctttccgaagagattcaaagccttctgtatgtgctcaatgttgttaaccagcagatggcactcttgctcctcggcagtgaacctggaggctttgaaacttgtcaagagtgtgggtcaaatatcttcctttgaaagaagtataataaagaaggcrccttcagcctgtatatctgaaccaatagagattctttatgtgcaggtgcaactaatcctttcaagatgtaatgaagctcaataaatcctccttttgcaatatcttcactggtctttcaggctgattctgctttttgtgagaagaaaagtgcagaacagctcagcacaatgctacatgtttaagcaataaggagactgacccattgtctcatgtcaagctgcctggga

SEQ ID NO: 413447 - DNA, 386 bp, Homo sapiens
tggctggtttgtagtgtaattttgacaccactggtactctatgttggcaaatattggaagaaaatcagtgagtagcagttttccgtggggggctaaacagggagcccagaacacaacaaagccactgcatcatatgcagtgatcggtgattcagtggatgagtacactctcctaatatgggcacatgaggagtcaacactgtgagtttgctcacccagggaacagattcccccaggggaacagagaaaaatctgtggatagggtrtgagttgtcttgggctatgaaccatcagggcaggcttaataagtatagacttgcctttgccttggctatcatgctaggcagtcacagtccttagggagaaggaagagaaagatggatttat

SEQ ID NO: 413448 - DNA, 534 bp, Homo sapiens
ttatgacattaatatcagatctggactgactgtactaattattctcctgaaagatgccaagctttgatcatgcaataacaatattttgctcccattgaaatgattttaaaaactgattccatcatactgtttcttttgcttattgtttgtktgtagtagaaaatggggtttgttttggtacaattttgggatgcatgacaaatgctcctttgaacagtgtataaacatgcatagaccatagagggattaactgttgaagactcaaagtctgttactcttggcttcttggtcttttcaaatttgtgtggtacaaggagcctccagctacctttattttgttgctactactactgccgaatacagcaaaactaagacacattgctttgagttatgtcctagtagtttgtgttagtgttataacttagtttctctattcagttcattctcatagctctgtggatatcttgatgttttccatattaatcatggtcataaatatcctatagaaaataattatgtacaatagttattgct

SEQ ID NO: 413449 - DNA, 617 bp, Homo sapiens
ataacttagtttctctattcagttcattctcatagctctgtggatatcttgatgttttccatattaatcatggtcataaatatcctatagaaaataattatgtacaatagttattgctctgtaattatgaaacagtttcattccatggctaagttttttttttttttgtaaacagtccttgaaatttaattatatgttaatcactcygataaaacagttaacagacgaaatacttttgaggttaagtgcaaccaactcatattaaacagtgatgtcttactctcacgctttccctgaacttccacatcagttaacaaacctggttgtttatcaaacttaatgcaatcgtgcttctcaattttaatgtttgtacaaaatacttggggatcttactaaaatgcaaattctgttttagaagggctagggtgtgacctgaaattctaattttcaaacagtgatactcatgctgccttttcaaggtctagattctacgcttattaaactgagaccagcaaaacaaaacaaacgaacaaaaaaccagtatctgtaatacggtaatttgtttctgacacttttcgaatatcctacaatactgtaataaatacctttatgcatca

SEQ ID NO: 413450 - DNA, 577 bp, Homo sapiens
ctcttaataaggagaataatgttttaaatattttttgtgtgacactaggatttttattacaatttaatataaatacttcattatgtacatcattaaattatgagactaatttattttgtatttagtgttcattaagtagaatattttacaaaaatagttttaataaaagattcatcatctcaacttagtagttaacattttacattttgcttaaaactcttaacctgagtatagcataacccttagcaaatgttaacaagttattatcaagttttaaaacatatttaaatgtttaatattytttctatacttcaaaatttcactccactaaagtataagctacttttatactggacatgtattttattttccattgaattcctgacatcaagctgaggttaggcattcaataaatgttaattgaatgagttttaaagttttataatataatatctttttcttatggaaataaaagacaaattatcattattttgtagtgtagactgaaatgggctaaagtcaccaatctaaaaacatattcaactttgaaaaaacataatgggacatattttaataa

SEQ ID NO: 413451 - DNA, 507 bp, Homo sapiens
ggcctgccaaaggctccacacaatatcccatattggctactgatacctaagcaccattggagctaataaattatatgctcaaaccatatcaggataatgctgacataacagatggtctagcctggaaaattctctatgtgcttataagaagaaagtgcattgtgtagctgttggaggaaatgttctgtaaacatctgttaagtccacatgatctgtggtgtagattaagtcctatgtttcttcattaatttcctatctagattatgtgtccaatgttgaaactggggtattaaagtctccacctattattgtattggggtctasctctctctttagccctaataatatttgctttacctgtctgtattaggtgcacatacatttatagttattatactctcttgctcagttgatctatcattatataataaccttcttcgtgtctttatgttttttatttaaagtctattttgtctgatgtaagtatagctactcctgcatgttttt

SEQ ID NO: 413452 - DNA, 553 bp, Homo sapiens
ttctagccgtttctcagctgaggccccttcaggagctctgctttctccatgacagcctcacacccacggggcacaggtggtggtgttattgttatcattgtgacccccgggtgttttctcttgaacataatttctacaggggccagagaagggtagacgtcatgagacgctgagggtggccctggggttgctaccagcacggatgccaaggacctaggacaagcctgggactgggaccagccaggtctagatggagcctgggccattctccaggggaacattgtcccgtcctctggttgtacccacttgcccctggaagcagggatgcctcttctctctcttccatcccgtctcctgyggacattcccccacatattctagcacaggctatgcgttaccctcaaccccttccaacaccttcaggttcctgccaacacccacagatgatccagtggcgaccagagcaagcagtcggcggctcactgccatagggatcaagagatcggggggctcaagaccagaaagtgttctccagtgggagcttccatcactc

SEQ ID NO: 413453 - DNA, 271 bp, Homo sapiens
ctctgctacaaaaatcaccagttgaaaatcaccaatctaaaaactgctttttatgtgttttaatgatataccaygcaacattattataaccaatcccttatttgaaaatttaggttgttttgggttttataattaaaatcacatgcttatggcatatatttgtgtatactcttaattatttccttacaataaattattagaagtggacatataatttctataagtgtaggtataaaatcctggcagtagaatttctaaaagtggaaagcat

SEQ ID NO: 413454 - DNA, 546 bp, Homo sapiens
cgtgtattagttctcatgcggctaacaaagatgtacccaagactgggtaatttattttaaaataggggtttaatcgactcacagttctgcatagctggggaggcctcataatcatggtggaaggcaaaggaggagcagagtcacgttttacatgacatgagagcttgtgcgagggaattcccatttattaaataatcactactacgagaacagtattggtggaaatcacctcacgattcaattatctccacctggccccacctttgacatgtggggattattgcaattcaagatkagatttggggtggggacacagccaaaccatttcaggtggcctgagtctcctaaggaaagcaagggtgggaaataatgagatcaggtagcagatggaaactgaacacgaagacatagtactgtgcctgaaataagcttctgtgaattttctgctaatgtagaaggtcattctaggtcctagacagccttgaatctagaggaagaaagagatgacagaagctagataaatggagtaaagaaaaacatccgttg

SEQ ID NO: 413455 - DNA, 475 bp, Homo sapiens
agacccacccagtaataatgccagtagtctgtttatatgacatgcacaatcattttaaaatcatacacatatatatataaaacaattgtctgtttaaacttaaagataatattgagatatattaaatgtacatttctgycctgtaattccttcacatgttatatgctatgggcaaagaaaacttaataaaggaaaaaaaaaaaacgccactttcagccttttcagttttctcttaggacaaaattgattttgcttttattgacattgtatagattgtgtcaaatttgcatagtaattctaagcctttccagttaattgacttttatatacaatacaaaaaagtccccccatgtcctgaacgtagtggtgaggcaagtcatttgagtgaacacctgcactcctgtatcaatatatatggttgttttgggaggttaatcaatcaatattttaaaataaaaaggtaaagaaaacaatg

SEQ ID NO: 413456 - DNA, 596 bp, Homo sapiens
ttgcttctaaagagtaagtcattcttttattttgcaatttaaatgtaccaacatcaatatgcttttactaaatgtgaagactctatttaaataagattactaatttccaatttggagagataactttgcctacaagtcgtcacatacctaagagtttcagaataattttgactttacataacagaaaatctaactctaaatttgacatctatagttaaaggtaaataagtaactgactttattttttatttttttattttttatttttttttaagacggagttttgctcttgtcgcccaggctggagtgcaatggcatgatctcggctcactgcaacctcctcttcccaggttcaagtgattctcctgcctcagcctcctgagtagctgagattaaaggtgccctccaccacacctggctaatttttagtagagatggggtttcaccatgttggccaggctggtcttgaactcctgacctcaggtaatccacccacctcagcctccctgcccagcccaagtaactgatttttagtgatagtgtgtgatgttctcatcccctrtcctctatatgtcttcatcttcaggctagcacct

SEQ ID NO: 413457 - DNA, 620 bp, Homo sapiens
gtaaataaaatttcagagctaatcaaaaacatgaaatgaatatattctttcctaggcttcacactcccacktccattcagcagaatctttcagcagaaaacacaattttaaaagccatttttaggagcttttgttccagaaatgattaattaataattgcagtctagaaggttggcatagatggttgaaggtcttctccaattgggacaatttatcagtctactatttcaagtaggtaattatcaaacaaaactatcagtgtacattatgttaacagtgtactttaatattgtggtttaacaatgaatctgaattaagccattggcagcatattttctaaatctgtacttttttttccaattttgcagcttaggcaaataatccctggatacgtgtagataataacaaacagatatcaaacatataaatttaaacaatatcaaagaattggaaatgggcatttattttcaattgctgttaatccaaatgcaaaagtagagctgtcttttcttctctggaccttttgacatgtgcagcaacacattttgcattttactctgtcatctgtgatactggaaatgaaacactgagtctgatcagaggcatcaagcatgaagcca

SEQ ID NO: 413458 - DNA, 546 bp, Homo sapiens
tcttagctgaaagggtaaactataaattaatagtttgctgaactataaagggctcctatccacagctaatagcctggtctagggtatcattctacaggaagaaacaagggaatgtgctttttgcttcactgcctgaagtcatttaagaccttttctatatttactcctatcttatcttttaaaaaattccatttctttacacagtcttcaatccctttttatttttaagccaaatgtgtgtggtaccacacaaatattatagtggagttttatttacttatctctcttccatatcaacccatgtaatttgacaggattactcatttgagcttttgaagatctaaaactcagacagcgcaaaggcatttcacttggaagttcactgacaattgcmgttttcagttgctcaccaaaataaatacatacataaatttaaaaattataaaatatagtatctaagagaatgttccacatcaaatgccagtttttcaatgcatattatttaagagtttattaaaacatttgataaagtgaaatagttaattt

SEQ ID NO: 413459 - DNA, 565 bp, Homo sapiens
atttttgtatttttagtagagacggggtttcatgatgttgtccaaaatggtcctgaactgatgacctcaggtgatccacctgcctcagcctcccaaagggcagggagtacaggtgtaagccatcacacccagccttgatagttctatatcacaggccagttctcccattgacaatgcatcaatttgggtttgtcttttgattcctcaggatgaaattcagggtaggtattttggcagaaatacacggtggtgaagcttcctcagatggggcaggatattaatttgttccatttatggtgatactaactttgatmacatgccagcttctctactgtggaaggtaccatttcttccctttacaattaagaattatttggggcggggggaggtacatttagaagatgtaaatattccattccctatcacattttaacctgctagttttctcagccagtatatttcttagcagcattgattatcactacaatgattgctatattttgatttcctgattccatcattacttctgcgctgactagttggtactcttctacaagaaaaagct

SEQ ID NO: 413460 - DNA, 565 bp, Homo sapiens
atttttgtatttttagtagagacggggtttcatgatgttgtccaaaatggtcctgaactgatgacctcaggtgatccacctgcctcagcctcccaaagggcagggagtacaggtgtaagccatcacacccagccttgatagttctatatcacaggccagttctcccattgacaatgcatcaatttgggtttgtcttttgattcctcaggatgaaattcagggtaggtattttggcagaaatacacggtggtgaagcttcctcagatggggcaggatattaatttgttccatttatggtgatactaactttgataacatgccagcttctctactgtggaaggtaccatttcttccctttacaattaagaattatttggggcggggggaggtacatttagaagatgtaaatattccattccctatcamattttaacctgctagttttctcagccagtatatttcttagcagcattgattatcactacaatgattgctatattttgatttcctgattccatcattacttctgcgctgactagttggtactcttctacaagaaaaagct

SEQ ID NO: 413461 - DNA, 565 bp, Homo sapiens
atttttgtatttttagtagagacggggtttcatgatgttgtccaaaatggtcctgaactgatgacctcaggtgatccacctgcctcagcctcccaaagggcagggagtacaggtgtaagccatcacacccagccttgatagttctatatcacaggccagttctcccattgacaatgcatcaatttgggtttgtcttttgattcctcaggatgaaattcagggtaggtattttggcagaaatacacggtggtgaagcttcctcagatggggcaggatattaatttgttccatttatggtgatactaactttgataacatgccagcttctctactgtggaaggtaccatttcttccctttacaattaagaattatttggggcggggggaggtacatttagaagatgtaaatattccattccctatcacattttaacctgctagttttctcagccagtatatttcttagcagcattgattatcrctacaatgattgctatattttgatttcctgattccatcattacttctgcgctgactagttggtactcttctacaagaaaaagct

SEQ ID NO: 413462 - DNA, 579 bp, Homo sapiens
aaatttaagctgatgacttatctcttaagctctaggtagaaggaagtctatagaatttgctgctagttgaagctctcattaatgttgggaactagattgataaatattctactagatgttgagttaagctattctatattttccctactaaaacaaaagccttatttttatctgaaatgatccatatttatatgtatttyctttcattcaattgaattgcaaattcaaaataaacagcttgaaaagtccactggctactaatgatacccttttgaagggaaattattaattcagcacaactccaagtgaaataaacaacacagttctacagccaaggtaaatgcacatatcggactaagtctggatgaaaactgtcggttgtcaaactgctaccatataataaccaccaattttgttagacattatatggcttgatttttgttcatgagtccttttctcaatcagacattaggtttttataaatctgatgttttataagcagaatggggaaaaatcggatgattatcagaacattgaccttagtgtttttgaattactcccactactaaatagtaagac

SEQ ID NO: 413463 - DNA, 661 bp, Homo sapiens
cagtgtttcaggagagatttttgttgtttttctaaatattgacataaaacctagcaacatgctaagcatatagttaattttcaagttgaaattgtttggtggcttttgttgagtattatttaagatcataaattttggattaacccatatccaattgtagatttaattcaagtgattttggtcaaggattctaattgttcttgcatttgaagccakagaacccaatagagatctgaaaatatagccatggtttaatggaatgcttgtttagatttttagattctttgtaaaactaacagctggctagaaaagtacctacaaagaaaatgtctttttagaaattgtttttctgatgaaattttgtcaacaagatgcaatgaggatgctctattaagtgttaaaattcaagacatactgctcaaatagttttgttttatggattacagaagtgtatggctatttttaaaaggcagtggtagtacgcagctcatttgagaaaaccaagaagagcacagcaggtaatcgtcacagaagaacatcccaatttttaaaacatgtaattgtccatgttatagactaaatattatccattatgtggattgctggtaccatctaaaggttacataaaattgtttcaatgcggaggaaatctttcagtata

SEQ ID NO: 413464 - DNA, 661 bp, Homo sapiens
cagtgtttcaggagagatttttgttgtttttctaaatattgacataaaacctagcaacatgctaagcatatagttaattttcaagttgaaattgtttggtggcttttgttgagtattatttaagatcataaattttggattaacccatatccaattgtagatttaattcaagtgattttggtcaaggattctaattgttcttgcatttgaagccagagaacccaatagagatctgaaaatatagccatggtttaatggaatrcttgtttagatttttagattctttgtaaaactaacagctggctagaaaagtacctacaaagaaaatgtctttttagaaattgtttttctgatgaaattttgtcaacaagatgcaatgaggatgctctattaagtgttaaaattcaagacatactgctcaaatagttttgttttatggattacagaagtgtatggctatttttaaaaggcagtggtagtacgcagctcatttgagaaaaccaagaagagcacagcaggtaatcgtcacagaagaacatcccaatttttaaaacatgtaattgtccatgttatagactaaatattatccattatgtggattgctggtaccatctaaaggttacataaaattgtttcaatgcggaggaaatctttcagtata

SEQ ID NO: 413465 - DNA, 628 bp, Homo sapiens
ctttcctcattcccggaaatttttcttccagctgttacaattccctgggggaacaaagatgctgggtatgaacaaggagggkatttggtttctctatgttatgcaaaaagtctcttattagcccgtttcctactcattcctataaacccacaaaaatgagttcacactaagcagaaaatttcaaatgcccccgttggacaagctttctaaaatgccctagacacttagtattttatataaaagaatatatgaagctttcacctctgtacacatttagtaacagaaattggtcaaaatattagctataatagtgcccgaatactgtcttattaattcataggcaatagtgttatgtgcaaactacaataaaggggtcatggaggtcatttaaaaattctcaaaaactgtttatttggttaccattttattgtagcagataaaattagtagagagacaaaagatttagctcttcaggagaatgtagctctttaaaaggaaaatttagcatttctggtaaggcccaaaaagaggtctaacataaattagaatctttggtcctatgtggtctagacattcatgaacagagtgtcatgttcacacatagtcttgctctcagcatagcatcatg

SEQ ID NO: 413466 - DNA, 560 bp, Homo sapiens
atgtactcttaccaaagcctagagctgacctcgttagcagttttaaatctaggatgtcccttcagtactggcctgtgttggggtgatgggactgaggcttttgtctccactttggccagtcactggatacaggttgccccaggaaacaagtagtagatgtaggacaaagtgactttttctcagccaaagaaatttggctaaaagggstaagaagttcttcagtcaggaagagatcttgtcagcacataacagtatccactggagactcctttaacacaaacaaacaaacaaacccacaaaaagctattatacatgatcagatcttgttttcttcatgattttaaatttccaaatctcatctcttgctgcccaaccaccaatctaggttaggagcttatagtgcctaacataggcacttatgaataagtaggacctcctaaatcagatctatccaatccatcccttatccatcgcatttttcaacctcatgaaatgcttccatgagcccataattagcccgtttagtaactcgttggctctccattggcaacagaataaaa

SEQ ID NO: 413467 - DNA, 584 bp, Homo sapiens
atgtagcataaaacgatcatctttcctatctttactaacgctcatgggaaggaggtattactctaagattttttttaaaagtagttctgctgatttttaccttctttaacatgaaactataacaatacacatataaaaggatttctgtttctaaatatgattatctaaaagatgctatgtactgtttatgctacacagtcattccataatattgattcatagcagaaaccctccaagggagatgtgtgtgtatataatagtaccatttctcagttggagtcttttgcttgatgtaacaccaaaaccttgaaatgaatagtgtttgctgagwgagtaaagggacaaatatacagctatcatcattcaagcagtaacaatacatttatgataaagcagtaatttcttcttagcgaactcttgtaaaggcattcagcaatgcataatcacttattcttcatgccattcacattgttaagttctaaatacacaaatcaccataacaacacggaagatttcaaaaaatgatcgtgttgagttttgttgttcaacgatctcagcatttttcttgattcattatgtgccca

SEQ ID NO: 413468 - DNA, 613 bp, Homo sapiens
tcattataaagtagtcaattcgataagatgatataataattataaatatatacacccaacataggaccacctaaatatataaagtaaatattaataaaatggaagcgataggctgaaatacactaagagtaagcgacttcatcacctcactttcagcaatggatagttcatccagactgaaaatcaacatrgaaacatcatgttgaaactgtcctactgactaaatgaatatagcaggtatacagacataagaacaagccatccaacagctgcagaatacacctccttcttacttgcacagggaatattctccaggatagatgctatattagaccatcaaacaagcctccacaagtttaagattaaagtcatatcacgtatcttttcagaccacagtgacataaaactagaaatcaataacagggggaacgttggaaaattcccaaataaatggaaataaaaagcatgtccctgaacaaacaatgggacaatgaaaaaatttaaaaatgaaatttaaaatattcttcagacaaatataaatgggaacacaacatattctgcgggatatagcaaaagtagttctaaaaaagaagtttatagcaataaatgccta

SEQ ID NO: 413469 - DNA, 622 bp, Homo sapiens
ttaactaaaacttgataattttgttgattgtatgcttataaaaagctcttggttccacattcagaaaaatattttatcccaagtactttccaaagagtatatcatcatatttgctgccattaatacttaacaaatacctgcgaaaagcaatggttttggagggtaacctgagggcagtataatctatctgttcttctagatactgtaaacaatttctagagtaagcttgtcagtagggagctgaatatctatctgcatcaaaagtgttggttactgctataaatttgtgtttactgagctgaggtttggcatttttccatggggctacattgaggaaaactgtaatgtatttcctatgaaatttgttgctgtttttatayggattttcttgaacacttcattctttatgtagcatagtttcttttatgtgaggatttgggaagtttctttctgggctcagtaccttgagtattatgcttctgcaagcaactggttagattttatttaagatgagccttgaaactaattctgtctgcatttatgtgatatgccagaaattttaaagccaaatttttagacaccctcctatgcaacaattgtttttggtttttcatatttttat

SEQ ID NO: 413470 - DNA, 551 bp, Homo sapiens
accctgcctcaaaaaatatatataatagatatttttaattctctattggttaattttattacatttaataatatacttacaaataggtctactcttctgtcaaattttggtaatataatttgactcttcacttggaagatgagtatattatttaccacattatttcttctacattttcgtatccatttctacctccaaacctctgcttcttaggttgtattttaacattgccaagattgataatgttagatttgtatttctgtttgtctaaatatttatttaacatrtcacaaaatggatagcatttatctaattattttcatcctttcttatggcttgacatgaaggataaagaaaaaattataggaggtttggaaagaagaataatatatttgagtaaaatttaaaatagatttctgatgctatattagattatcatctgaaaaaattgatttgtcaatatcttagaaattcaaatatgcatccattatataatccagaaattcttctcctaggcatttgtaacaaatgctcacagcaattttatttgt

SEQ ID NO: 413471 - DNA, 551 bp, Homo sapiens
accctgcctcaaaaaatatatataatagatatttttaattctctattggttaattttattacatttaataatatacttacaaataggtctactcttctgtcaaattttggtaatataatttgactcttcacttggaagatgagtatattatttaccacattatttcttctacattttcgtatccatttctacctccaaacctctgcttcttaggttgtattttaacattgccaagattgataatgttagatttgtatttctgtttgtctaaatatttatttaacatatcacaaaatggatagcatttatctaattattttcatcctttcttatggcttgacatgaaggataaagaaaaaattataggaggtttggaaagaagaataatatwtttgagtaaaatttaaaatagatttctgatgctatattagattatcatctgaaaaaattgatttgtcaatatcttagaaattcaaatatgcatccattatataatccagaaattcttctcctaggcatttgtaacaaatgctcacagcaattttatttgt

SEQ ID NO: 413472 - DNA, 561 bp, Homo sapiens
gccaatttctttccccctgcagtttcagccactctaaaatatctataatgtattaggtatgaaagatatgaagatttataaacctttacccacactttcaaggagcttatattctagtgtaagaggaaaaagaagaaaacagaaaaataaaaatgaaaacttccagggattttttaagggatctgtggaagtcttactggagttcaggatatcttccaaactgcctggaaatgtcttacatgataaaccagatacataaacctgagtatataggtaaaagacagggaagtaattccagggagaaaacagtgtaggttacactgtaagctagatatggtcagcgaattgtaagcrttttgagatataggtgaagatacagcagtgggaaggtgcagaagtgtgtcaattctgatattcggctggtatgcatcagcataaattaacccattggttatgacttgcatctgttttgattggatccacatcttactagttgttacatattttaaatctcacctctgagtaacataggaagtgattggcagattttaggccatgtag

SEQ ID NO: 413473 - DNA, 536 bp, Homo sapiens
cctcattttgagtaaaaccaaattatgataggatggtggtgtttgtagaaaagattacttcagacttttattagtgtagttcatrgagttaactcctgtttgatattcatgaacgtttcagctcttcatgagtcctggacattttttctctcttccaatgttacaattgtcaaagctataagaaacctgcatttgagaatatgtgttaaattcctatagcttgattttaaatcatcttttgaaaagaacaaagcaagacaacaattgtctgtgaatgacaaaatttccagggtagttaaaattaaaaacatgactgacagagaagtttagttatcttagtggtgtacaataacttaacataacaaccttcattataattaatagcacatactcagacaatagaattttataaatcccacacaattgtggagcatatattaatattattcactaaaatataacctgaataatgttaaacatcgttttggcaatctcacatacctgaacatgtcaaataaacccgtttacctttcttt

SEQ ID NO: 413474 - DNA, 536 bp, Homo sapiens
cctcattttgagtaaaaccaaattatgataggatggtggtgtttgtagaaaagattacttcagacttttattagtgtagttcatagagttaactcctgtttgatattcatgaacgtttcagctcttcatgagtcctggacattttttctctcttccartgttacaattgtcaaagctataagaaacctgcatttgagaatatgtgttaaattcctatagcttgattttaaatcatcttttgaaaagaacaaagcaagacaacaattgtctgtgaatgacaaaatttccagggtagttaaaattaaaaacatgactgacagagaagtttagttatcttagtggtgtacaataacttaacataacaaccttcattataattaatagcacatactcagacaatagaattttataaatcccacacaattgtggagcatatattaatattattcactaaaatataacctgaataatgttaaacatcgttttggcaatctcacatacctgaacatgtcaaataaacccgtttacctttcttt

SEQ ID NO: 413475 - DNA, 380 bp, Homo sapiens
gtctcttatttattccccagcactgtgcacttctgtcagcagagattgtattgggttgtttagttttacctccaggtcagtaggtggcacttgcagatatgagccagctgagcactgtgcagttgtgtgggcagtttaataagctgtgaaggttgacttccaaaccaatatgtggcatttccargagagagggagcagtgggatttttccttggattttgttcattacagaagctctgggtgtctcatgtaaggggtggggccatggaactcccaggactccctgtcctatgctctgctgctgcagtggttggatggggcaaagccaggcatggctgggtctgggaagtcctggaccaggctctccaaggctggtgcaag

SEQ ID NO: 413476 - DNA, 578 bp, Homo sapiens
tattgtatgcaaataatgacagtttaaaatttttcctagtcatttttatcaatggcacttatttcttttctttgccttattgcactggttagattctccagcacaatgtggaatatatgtaattayaatggatagttttgcattgttcctgactcccagagaaagtttttagtattttctcattaagaacgatgttggctgtagggtgtttgttaataggctttatcctactgaggaagttctattcctagttttcttaaactttttaaaaatcatgaacatatgttaaatcctatcaagttttttctctatttattgaattgatcatattttttctacttaattttgttcatgcagtgaattatatgaattgattttttttttttttttgagacaaggtctcactcagttgcccaggctggagggcagtgacacaatcaccaatcactgcagccttaacttcctgggctcaagcgatcctcccacctcagcctaccaagtagctggaactatggtgcatgccgccacacccgggtaattaaaaattttttggtatagatggggttctcaatatttgc

SEQ ID NO: 413477 - DNA, 525 bp, Homo sapiens
gtggcacctcccattttctgtggtgcaattgtccagggaagggtggggctgtgagctgttagcagcccagacacagcaggtggggcatgagttcacttaccaggcaaaaggcatttgagctggatgcaacagtgtccctaacactcggcatctcttgggagtcaccaaagttcagacccccatttattcacacttaaatcattataattacctcctggttgctcttctctttggaggcttgacccttcaatccattttccatactgtagctagagttatccttcccaaaacaaatccaactacatttcttgctagtttaaaagtactttcactattttctccatggtacttagtatttagttttaacagaattatgagaccctttttgatcttaccaagatcctactttacagctycatgtcttgtattttcccttttacaatctcggtatcctacaccagcacacaatgggggttcaataaataattgttgaattaatagataaattgataattacagtgatag

SEQ ID NO: 413478 - DNA, 499 bp, Homo sapiens
gacattggcctaggcaaaaaaattatgaccaagtcctcaaaattaaacacaacaaaaatagataaatgggacttaataaaattaaatagcttctgcacagcaaaataattaacagaataaacaatttaaaacttggagaaaatatttgcaaattaagcatctgacaaaaggatagtatcaagaacctacaaggaactcaaataagaaaaaataataataataatcccatttaatagtggacaaaggacataaacaggcatttttccaaaaaaaaaaagacatacaagcagccaacacacaagaaaaastgcttaacaccactgatcatcagagaaatataaattaaagccacaatgaaattccatcttacagcagtcagaatggctattattaaaaagtcaaaaacaacaggtaatatacactattgctaggaataaaattaataaaacctgcatgaaaaacagagggagatttatcaaagaactaaaagtagtactgc

SEQ ID NO: 413479 - DNA, 610 bp, Homo sapiens
aatgatctatttgctgagacatcattctgataattcttagacatagttttctttatttccttaaatatatttgaaataactaattgaaagtctttgtttagtatgtctgaagtctgggcttccccagaaacagtttctgccaactgtgttagtcccctatgtatgggccatactttcttgttttttccatgtattatatttttcttgttgttgaaaactggaatatacatatatatacatgcctatatataagcatacatgtgtgtgtgtgcrtgcgcacatgctcacacactatggtcaaaaagtttgtgtccttcccaaaattcatacgttaaaacttaatctccaatgtgaaggcatttggaggttggggctttgagtgatgattagatcatgaaattggagctctcacctataagataggcaccttatctaagagatcccccaagagagatctcttgctccttcccccatgatatattataacaagaagatgaccatctagaaccagaaagtggactctcaccagaccaaatctgctggtgccttgatcttacactttccaaatttcagaacttcaagaaacaaattcctattgtttataagtgac

SEQ ID NO: 413480 - DNA, 610 bp, Homo sapiens
aatgatctatttgctgagacatcattctgataattcttagacatagttttctttatttccttaaatatatttgaaataactaattgaaagtctttgtttagtatgtctgaagtctgggcttccccagaaacagtttctgccaactgtgttagtcccctatgtatgggccatactttcttgttttttccatgtattatatttttcttgttgttgaaaactggaatatacatatatatacatgcctatatataagcatacatgtgtgtgtgtgcgtgcrcacatgctcacacactatggtcaaaaagtttgtgtccttcccaaaattcatacgttaaaacttaatctccaatgtgaaggcatttggaggttggggctttgagtgatgattagatcatgaaattggagctctcacctataagataggcaccttatctaagagatcccccaagagagatctcttgctccttcccccatgatatattataacaagaagatgaccatctagaaccagaaagtggactctcaccagaccaaatctgctggtgccttgatcttacactttccaaatttcagaacttcaagaaacaaattcctattgtttataagtgac

SEQ ID NO: 413481 - DNA, 557 bp, Homo sapiens
tttttagttctatctatcttttgcagatgccaatatcagtaatcataagcagtttacctctaaattcatgctaaatattgtggaaaggtgtactataagttcaatctttcatttattcattcaaccaccaagtgttaattgaacacatacattgtgtcacaccaatcaaataagatagactcccaggcatcaccaagcatctactaactcaattcatctcaggatctataccaggggtcattttatcagaggactgaagtcttgatgctgtccaagaaatcaccttttcacaatgagtctcctacttctctaggtggaggtataactttttgggatatatcatggttgctgacttaacttttctattttttaaatatactcatgacaagtatcatataaaacctaaccagcaactttgcaccagcaaaagtttttcaacatttcaattcttacaaaatcaagtgatataatttcctatgtagcaaaaaattcacacatctgcaaagcttggtttcactaccacctgttaaaatyttacctttgggaagcttatttat

SEQ ID NO: 413482 - DNA, 632 bp, Homo sapiens
agtcaacagaaggtcttagtgcctgaaaggaaaaggaaaagagaatggacagaacaaactgaggttgaagggatggacagaagccaagccctgcagggcagtatagatcttggtaaggaatttgtatttcatttaaagttctttttaaaagaaagtaayggggacttatagtctagcatgtaaagagcttagaagtcaccactgtaccctaacaacaagtaaaaagctgaacaaactaaaatatcaacaattcatcttaaatccatcacagaagtgagctcacagcgcaaactgctgccctcaaaattgcagagatagacaggcagatagagagaatcacaccttctctgagcagaaacccacaagcagaaaccccacaagaacctgtgccaaggagggtagatataggtaggaaaaacctgaacttaattgatgaacttcttaatggagaaggctgaaaaataaaaactctaggggaatcagtcaaggtggggcagggcagagggtctctcaccttttgtgagttttaacttcatgatccctacctgatactcacagaagatgttaggaaaagacctgtccacatgttaaataaactttttacaaaatatatccaaacccacactaatggg

SEQ ID NO: 413483 - DNA, 632 bp, Homo sapiens
agtcaacagaaggtcttagtgcctgaaaggaaaaggaaaagagaatggacagaacaaactgaggttgaagggatggacagaagccaagccctgcagggcagtatagatcttggtaaggaatttgtatttcatttaaagttctttttaaaagaaagtaatggggacttatagtctagcatgtaaagagcttagaagtcaccactgtaccctaacaacaagtaaaaagctgaacaaactaaaatatcaacaattcatcttaaatccatcacagaagtgagctcacagcgcaaactgctgccctcaaaattgcagagatagacaggcagatagagagaatcacaccttcyctgagcagaaacccacaagcagaaaccccacaagaacctgtgccaaggagggtagatataggtaggaaaaacctgaacttaattgatgaacttcttaatggagaaggctgaaaaataaaaactctaggggaatcagtcaaggtggggcagggcagagggtctctcaccttttgtgagttttaacttcatgatccctacctgatactcacagaagatgttaggaaaagacctgtccacatgttaaataaactttttacaaaatatatccaaacccacactaatggg

SEQ ID NO: 413484 - DNA, 632 bp, Homo sapiens
agtcaacagaaggtcttagtgcctgaaaggaaaaggaaaagagaatggacagaacaaactgaggttgaagggatggacagaagccaagccctgcagggcagtatagatcttggtaaggaatttgtatttcatttaaagttctttttaaaagaaagtaatggggacttatagtctagcatgtaaagagcttagaagtcaccactgtaccctaacaacaagtaaaaagctgaacaaactaaaatatcaacaattcatcttaaatccatcacagaagtgagctcacagcgcaaactgctgccctcaaaattgcagagatagacaggcagatagagagaatcacaccttctctgagcagaaacccacaagcagaaaccccacaagaacctgtgccaaggagggtagatataggtaggaaaaayctgaacttaattgatgaacttcttaatggagaaggctgaaaaataaaaactctaggggaatcagtcaaggtggggcagggcagagggtctctcaccttttgtgagttttaacttcatgatccctacctgatactcacagaagatgttaggaaaagacctgtccacatgttaaataaactttttacaaaatatatccaaacccacactaatggg

SEQ ID NO: 413485 - DNA, 404 bp, Homo sapiens
aatttcttttttcacattgcaagattttcacattacttggmattcagtgactctttcttgacaaaagccaagtctttttccttggcaaaaaccaagtatttttcccctagggattgttctccagaagacaagtgttcatgtgaatttggtccaaatattctggttcatctgtaggaagcttacggtctttttaattgaaaatattgatgatgtaaaagtcatagactatgtctacacatataaatggaagactttttttcctgatagaataacctatgagatagataggttaaacattaaaatttctgcccaagctacagtatgtcttcaactggtatctagtcctctagatgggttgttttatttcatccacctttgtttgtaaaaatttgtagaagatctca

SEQ ID NO: 413486 - DNA, 404 bp, Homo sapiens
aatttcttttttcacattgcaagattttcacattacttggaattcagtkactctttcttgacaaaagccaagtctttttccttggcaaaaaccaagtatttttcccctagggattgttctccagaagacaagtgttcatgtgaatttggtccaaatattctggttcatctgtaggaagcttacggtctttttaattgaaaatattgatgatgtaaaagtcatagactatgtctacacatataaatggaagactttttttcctgatagaataacctatgagatagataggttaaacattaaaatttctgcccaagctacagtatgtcttcaactggtatctagtcctctagatgggttgttttatttcatccacctttgtttgtaaaaatttgtagaagatctca

SEQ ID NO: 413487 - DNA, 404 bp, Homo sapiens
aatttcttttttcacattgcaagattttcacattacttggaattcagtgactctttcttgacaaaagccaagtctttttccttggcaaraaccaagtatttttcccctagggattgttctccagaagacaagtgttcatgtgaatttggtccaaatattctggttcatctgtaggaagcttacggtctttttaattgaaaatattgatgatgtaaaagtcatagactatgtctacacatataaatggaagactttttttcctgatagaataacctatgagatagataggttaaacattaaaatttctgcccaagctacagtatgtcttcaactggtatctagtcctctagatgggttgttttatttcatccacctttgtttgtaaaaatttgtagaagatctca

SEQ ID NO: 413488 - DNA, 404 bp, Homo sapiens
aatttcttttttcacattgcaagattttcacattacttggaattcagtgactctttcttgacaaaagccaagtctttttccttggcaaaaaccaagtatttttcccctagggattgttctccagaagacaagtgttcatgtgaatttggtccaaatattctggttcatctgtaggaagcttacggtctttttaattgaaaatattgatgatgtaaaagtcatagactatgtstacacatataaatggaagactttttttcctgatagaataacctatgagatagataggttaaacattaaaatttctgcccaagctacagtatgtcttcaactggtatctagtcctctagatgggttgttttatttcatccacctttgtttgtaaaaatttgtagaagatctca

SEQ ID NO: 413489 - DNA, 622 bp, Homo sapiens
tcttcaaagtgaagcattcaagaacactgataataactataatttattgagtccttactagatgccagccagtgttctaggcactttactttcttttataaatcaacaggtagttcacttgagttcaaaattaattgctgaaaattaagcaattaagaggtaatgactattgggatccccattctacaaatgatgaaaataagggtcagagagctttagtaaatggcccaaagtctcataaaaatggtgaacatgaggttgtagctgaagaagtgtgactccagtgtccacattattcacaacatgctacaatttccctttgaggktgtcttggatcttaaataggtgcatactcagtgagaagcttatagtcactactcactgtaataataaaacctattgtcccacagactaccatttttcatgtaacagtcatgagcttggaaaatttttatttaattatatacttataaaaaaagaaaattgtcagcagaataccataaaggagagatgcactactagttctgtagatagttgtctagaaaggattttgaatttctcaaatttaatcccattgttttccggtgagtaaactgagacagacttgtaaatgcgttcaaaa

SEQ ID NO: 413490 - DNA, 485 bp, Homo sapiens
gaaaacttaaaaattgagagtggaatataagaccagcctgctttaatccaatctccaatgtaacagtgaaatactttatgccctgaatgccctttagctatcaaggtcattattattaaaatatttcttgttcttaaatactagggatataattttggcaaaaggggaagattttagcttactcaagcaccactctmgataactggataaaagtccatatgttcaaattacaagtgataacttaaggccgatttatgcaaaatcttttaccagtcactttgcggacatcactgctagctctagaccggtaccgaattttacatttcacacgtagctcttcgtgttgtaactaaactgaaatttccatttttacttcctatttacataataatttcttctttctttttacctgttaagtcaaaattttacattacatcaataatatatatttattgtaagaaagtacaaatactccaacaaactgc

SEQ ID NO: 413491 - DNA, 485 bp, Homo sapiens
gaaaacttaaaaattgagagtggaatataagaccagcctgctttaatccaatctccaatgtaacagtgaaatactttatgccctgaatgccctttagctatcaaggtcattattattaaaatatttcttgttcttaaatactagggatataattttggcaaaaggggaagattttagcttactcaagcaccactctagataactggataaaagtccatatgttcaaattacaagtgataacttaargccgatttatgcaaaatcttttaccagtcactttgcggacatcactgctagctctagaccggtaccgaattttacatttcacacgtagctcttcgtgttgtaactaaactgaaatttccatttttacttcctatttacataataatttcttctttctttttacctgttaagtcaaaattttacattacatcaataatatatatttattgtaagaaagtacaaatactccaacaaactgc

SEQ ID NO: 413492 - DNA, 521 bp, Homo sapiens
caattagtcaaaatagaaatgttttatccaccttctcttgaatttcactgattcctcttagcattctgaamacccaatattttaatcctcaatcttgtcaattctcagattccacaaaattttattcctttcctttttttctgtactaatatcacatagttgtttctgcccagttacatttacttgattaatgataaaatgttttctaagatagttatataaaaatggatttctctcttccacaccacatttatagaaagaaaacacagttcttgcttaagaatcaaactattagttatattgactaggtaagaaaccattatttctattttggagaattggggcaagttatgtaaaaccattatatgacaaatgatgacatgacccagactagcattgtcaactcaatgcatttcacccagcatcacatattctaataaggtttcatttatcctcttccaaactcaccctaatcggcaacatgggcttcttggtggttcctcaaacccccaaataaatgc

SEQ ID NO: 413493 - DNA, 521 bp, Homo sapiens
caattagtcaaaatagaaatgttttatccaccttctcttgaatttcactgattcctcttagcattctgaacacccaatattttaatcctcaatcttgtyaattctcagattccacaaaattttattcctttcctttttttctgtactaatatcacatagttgtttctgcccagttacatttacttgattaatgataaaatgttttctaagatagttatataaaaatggatttctctcttccacaccacatttatagaaagaaaacacagttcttgcttaagaatcaaactattagttatattgactaggtaagaaaccattatttctattttggagaattggggcaagttatgtaaaaccattatatgacaaatgatgacatgacccagactagcattgtcaactcaatgcatttcacccagcatcacatattctaataaggtttcatttatcctcttccaaactcaccctaatcggcaacatgggcttcttggtggttcctcaaacccccaaataaatgc

SEQ ID NO: 413494 - DNA, 521 bp, Homo sapiens
caattagtcaaaatagaaatgttttatccaccttctcttgaatttcactgattcctcttagcattctgaacacccaatattttaatcctcaatcttgtcaattctcagattccacaaaattttattcctttcctttttttctgtactaatatcacatagttgtttctgcccagttacatttacttgattaatgataaaatgttttctaagatagttatataaaaatggatttctctcttycacaccacatttatagaaagaaaacacagttcttgcttaagaatcaaactattagttatattgactaggtaagaaaccattatttctattttggagaattggggcaagttatgtaaaaccattatatgacaaatgatgacatgacccagactagcattgtcaactcaatgcatttcacccagcatcacatattctaataaggtttcatttatcctcttccaaactcaccctaatcggcaacatgggcttcttggtggttcctcaaacccccaaataaatgc

SEQ ID NO: 413495 - DNA, 521 bp, Homo sapiens
caattagtcaaaatagaaatgttttatccaccttctcttgaatttcactgattcctcttagcattctgaacacccaatattttaatcctcaatcttgtcaattctcagattccacaaaattttattcctttcctttttttctgtactaatatcacatagttgtttctgcccagttacatttacttgattaatgataaaatgttttctaagatagttatataaaaatggatttctctcttccacaccacatttatagaaagaaaacacagttcttgcttaagaatcaaactattagttatattgactaggtaagaaaccattatttctattttggagaattggggcaagttatgtaaaaccattatatgacaaatgatgacatgacccagactagcattgtcaactcaatgcatttcacccagcatmacatattctaataaggtttcatttatcctcttccaaactcaccctaatcggcaacatgggcttcttggtggttcctcaaacccccaaataaatgc

SEQ ID NO: 413496 - DNA, 528 bp, Homo sapiens
atcacatattctaataaggtttcatttatcctcttccaaactcaccctaatcggcaacatgggcttcttggtggttcctcaaacccccaaataaatgcaaattaaatattactgcacatgctgttttctatgcctagaattattttcatatatatataaatacatgtttctcatatatgtactcatatatatatttctcaaatataggtatatatggatatatgaggaatatatacgtgtatctgtgtgtgtatatatatattcctcaaatatatccatatatatgtatatataccaacacccaggtacacatatatattcatatatttatgaggaagagaaaggcaaacaggaggatatatatatttcctcctgatcaagattttgtttcagtgtgaatttttccatgagccttttttctaaccaccctatttaaaactcaaaycctcatccccagtccctggcctctgtgctccttttctactttcctgcttgattattctccaaagacactactacactctaaca

SEQ ID NO: 413497 - DNA, 580 bp, Homo sapiens
atacggtactaaacttccagcatctggttctggtggtttccatgttctggtttctgagattttcacaagctttttcccataagcactgcatttttttttaggagctcctcctgcaaaacagccatgaactgaagcacaagtgaggacaataaagtatcattcacactctgatatacgaaggacccaaaatgagagacaaattagcccacagaaaagagagtttgctttgtttctcctcatgtttgtcaaatctgagaggtgtgaagtcaaggaagctcataacggacatgcttaaagggacacagagatggcatcatccaatctccaaggaaagagwcttacaagaatttcatgtgtcctgtatagaaatagatcttcagaggcatcgcttacccggtattcctcagcagccaactcaatgggacagtgtctgtgatctcggtgctcctgagagttggagcacagaaaacagagcaggctcttgtccacttcacagaacaccttctttttgtgtctgtgcatcccacatatttgctcctcagagctaaggaattgccggaggctggcttttctggcaatg

SEQ ID NO: 413498 - DNA, 467 bp, Homo sapiens
aaaatgaaaaattcatacacaaagagagtctttaggctttttagcagacgctactgactagatgacacacagcctcttctactcctaattcctgcccataacataatgcaaatcttttcaaaaacctattccctggatgtcgatatgaaagtcgggttttaatcttaagtggtctagaataaaacatgcttgtccctatttctctttcaaataactactgaatgactatgggagaggagtagaaaacctacgttgggtaacaaaacatgggaagacggtcagagggcgctgtgacatakttttagagagagggacccagaagccggctctttaaaacaaaaacaaccccagaacaaaccaaccgaccagataaacaaaaaggcagcaattaaaccaagctgggatcactaggagataaaataaataatgaaaaatattgggtttatttttcttacggcttaaattaa

SEQ ID NO: 413499 - DNA, 604 bp, Homo sapiens
aataatacatggagaactggtaaagcattatttctgggtgagtctgtgaaggtgtttccagagagacatgtaagttggtgagctgagtggggaacagcagccctcaatgtgggtggacactatccaatcagctggtagctcagactgaatctaaagggcagagagaaggcagtttcctctctttctcctgaagctgattctaactcagccaggatattggtatctccaggacactaccttaatgacagcctatgttcaacttctcagactccataatcaagggaacaaatttccctagtggacttcctctcctgtamagtgtcatgtgtagagtgagaacagatatatgatctgagggacacattagacagtctcattattgtttgaacatcatagggtatacttacacaaacctcgatggtatagcctactacacacctatggtatacagtatagcatattgttcctaggctacaaacctgtatggtatacgatcggcaattgtaccacaattgtaagtattttgggtatatatacatatatatagttatgtacacatcctatggttctgtctctctggagaaccctgaccaatacaaactgt

SEQ ID NO: 413500 - DNA, 604 bp, Homo sapiens
aataatacatggagaactggtaaagcattatttctgggtgagtctgtgaaggtgtttccagagagacatgtaagttggtgagctgagtggggaacagcagccctcaatgtgggtggacactatccaatcagctggtagctcagactgaatctaaagggcagagagaaggcagtttcctctctttctcctgaagctgattctaactcagccaggatattggtatctccaggacactaccttaatgacagcctatgttcaacttctcagactccataatcaagggaacaaatttccctagtggacttcctctcctgtaaagtgtcatgtgtagagtgagaacagatatatgatctgagggacacattagacagtctcatyattgtttgaacatcatagggtatacttacacaaacctcgatggtatagcctactacacacctatggtatacagtatagcatattgttcctaggctacaaacctgtatggtatacgatcggcaattgtaccacaattgtaagtattttgggtatatatacatatatatagttatgtacacatcctatggttctgtctctctggagaaccctgaccaatacaaactgt

SEQ ID NO: 413501 - DNA, 230 bp, Homo sapiens
atgttccccttaccttcaggacttgaatctatttggaaatgactgtgtgtgttttgaggtaggagtcaatatttagttattttttaaaattcaaytaatccagcattgttctgaccaccttgtgtatttcaatgtagaagaacacactaataatgcaggattatttatctatgtggtgagaattccaaaatgaagcccagcatggaaggtcaaataatattaactcaaag

SEQ ID NO: 413502 - DNA, 500 bp, Homo sapiens
attgtcttacttgttttgtagatataagcactagaggacaagctctacctgatatagctggcctagacatatgcagatttattaattgtagaagaaagaattatacctttcaggtaaaatggctacaaaaaataattagctgctgtttttgagacaagttctcactctgtcacccaggctggcgtgcagtggcacaatcagaactcactgcagttttatactcctggactcaagcaatcctcccaactcagcctcctgagaagctgggacaacaggtgcacaccaccactcaaggctaattttctgtttattttctggtagaggtaatgtcttactctattgcccaggctgatctcaaactcctggcctccaytgatttttctgccttggcctgccaaagcactgggattataagtacggccactgaaaccagctttagatcaattttatttaatacagatagcttcccagctaaaaatatgttatgagaattctcttaa

SEQ ID NO: 413503 - DNA, 530 bp, Homo sapiens
tttaaaacttttgtgcctcaaaggaaattacctagaaaatcaaagtcagttcacaaaatgggagaaaatacatccaaatcatatatttgataaggatcttgtataaaaatatgtaaagtactctttacatctcaaaaataaaaagacaaacaactcaattaaaaatgcacaaaggggccaggcacagtggctcacacctgtaatcccagcagccgaggtgggtggatcacgaggtcaggagatcgagaccatcctggctaacacrgtgaaacaccatctctcctaaaaatacagaaaatttagctgggcatggtggcaggcgcctgtagtcctggctactcgggaggctgaggcagaagaatggcatgaacccgggaggcagagcttgcagtgagccgagatcacactgctgcactccagcctggtcgacagagcaagactccgtcttaaaaaaaaaaaaaatgcacaaaggtagtgacgtcaaaagataggagtttccacatcacattccctcacagaaacaccaatat

SEQ ID NO: 413504 - DNA, 530 bp, Homo sapiens
tttaaaacttttgtgcctcaaaggaaattacctagaaaatcaaagtcagttcacaaaatgggagaaaatacatccaaatcatatatttgataaggatcttgtataaaaatatgtaaagtactctttacatctcaaaaataaaaagacaaacaactcaattaaaaatgcacaaaggggccaggcacagtggctcacacctgtaatcccagcagccgaggtgggtggatcacgaggtcaggagatcgagaccatcctggctaacacggtgaaacaccrtctctcctaaaaatacagaaaatttagctgggcatggtggcaggcgcctgtagtcctggctactcgggaggctgaggcagaagaatggcatgaacccgggaggcagagcttgcagtgagccgagatcacactgctgcactccagcctggtcgacagagcaagactccgtcttaaaaaaaaaaaaaatgcacaaaggtagtgacgtcaaaagataggagtttccacatcacattccctcacagaaacaccaatat

SEQ ID NO: 413505 - DNA, 535 bp, Homo sapiens
ggtgattccttggttaagactagtatttctcctctgataattactcctggcctagaccctaaacctgaatgagtttgtgaacattctgtggtggctgggagtttactttatttgaaaggcataatacaatgtaggtgtcatataaacatttttcaattgaatgaataaaatattaaacttacaatacacatttccacaatattgacgattattgtagaaataaatggcttctaatctcygaaataagtgtctacaaaaatagaggaaattaaggatatggaaaagcacattgtatatttgatgagtatcaaaactgtctggagcaggataaatgtggacaattgtaagggatggatttggggaggtagcctggatcctggtcatccagggtcttgtatgccaaggtagaaagatagcattttattgagtgtagaatagaaatccaccatggggtttttgagtagaagagtggtataatattaaaaagattttcaaaagatcgtctgggctacttcatgaagtaacattattaagg

SEQ ID NO: 413506 - DNA, 535 bp, Homo sapiens
ggtgattccttggttaagactagtatttctcctctgataattactcctggcctagaccctaaacctgaatgagtttgtgaacattctgtggtggctgggagtttactttatttgaaaggcataatacaatgtaggtgtcatataaacatttttcaattgaatgaataaaatattaaacttacaatacacatttccacaatattgacgattattgtagaaataaatggcttctaatctccgaaataagtgtctacaaaaatagaggaaattaaggatatggaaaagcacattgtatatttgatgagtrtcaaaactgtctggagcaggataaatgtggacaattgtaagggatggatttggggaggtagcctggatcctggtcatccagggtcttgtatgccaaggtagaaagatagcattttattgagtgtagaatagaaatccaccatggggtttttgagtagaagagtggtataatattaaaaagattttcaaaagatcgtctgggctacttcatgaagtaacattattaagg

SEQ ID NO: 413507 - DNA, 542 bp, Homo sapiens
atgtgttgactcatgtgggagataaaaaattgacctcatgatggtagtgaatagaatggtggttaccagaagatgggaagggtagtgaggagaggggatgaagaggagttgattaatatatacagaaatacagttasgtaggaagaataagatcatgatagggcaactatagtttataattaattgttttaaatatctgcattccatatttttttgtttgtttagtgccattataaatagtgtcacaaaacatgccatgcttctgtccttatgttctagggctctaatttctatgggatagcttttgaaggggcaattgtttgaaagatatttttactttcattagagattgctaacttttgttccaaaaattataaaattcatattttcactatcagtgtaagaaaataccctttttatttttgctagctatagctactatcacttttagaatgtttttgtcagtttgatgaatataaggtgatatttgttttttattttgtatttttctatttataggtgaacttcagcaccctattata

SEQ ID NO: 413508 - DNA, 539 bp, Homo sapiens
gattttaagaggaacgtatgaggagctgatgaaaatgtgccataaaccagatgtggagctacttcaggtacaaactcacaatgtggtttcaggtttttgactcttcacatgtgtaagtattttcctcatggctgaaatccatctccctacctttatttccatgatgtgtttccaaaaacacattcacataactaatgctactttactgggaaagtatagccccgccaagggattctaccaggccaaagatccctcctactttatccaccagccacaaaamtttgtggaatggtcaaggtaacagccccaataactgttccccaactaagtcaataatatattttgggttgtcaaacacgtataaaatagtgagtgattcatttacatttagattaatttgaggacatggcaagatcagaaattttgggaatctaggctcacattaatactattttgggatccactcatttgggtaataggttctgggaaagatgactgagtaggttattcagactcacccagaaacaatgctgcacctg

SEQ ID NO: 413509 - DNA, 642 bp, Homo sapiens
tatgtttgtatctgcagggaaataggaaggagatgaaaactgtaaaaaagaactgctctttaaatatattctaattacttcaagacttgcaagaaattgaataagtgagataatgaaaatgaatgagtcaagtttggggttttctgtctggttttgatcaggaagtctaacttttggcatagaccttcaggaacttgtaaaaacattagttgattgttggttctctcaaaggccatctcctctagggaaaagttggtaatcagaagggcatccaaccttattctcaagagttcttgtccctgaaaggattctctggagcacygggctatccagaagggagaccatgatcctggagcttggagctcttaggcccgcttctcaatgaagcatgtgtgggatcacaaggaagatgttaccttttcatgtacctcgtcaggtatcatacccccatgtaacagaggcaattcatcttacccaccactgcctttgtgctttaagaacacataaagatttaaaaaaaaaaaaaaacctgaagtctaggaaaaagtgagaataatagcaaaacttagctttaagtactatcttaaagttaattgaatgaaatgtgcattcttcttcaagtaaatgaaaatagactatgta

SEQ ID NO: 413510 - DNA, 642 bp, Homo sapiens
tatgtttgtatctgcagggaaataggaaggagatgaaaactgtaaaaaagaactgctctttaaatatattctaattacttcaagacttgcaagaaattgaataagtgagataatgaaaatgaatgagtcaagtttggggttttctgtctggttttgatcaggaagtctaacttttggcatagaccttcaggaacttgtaaaaacattagttgattgttggttctctcaaaggccatctcctctagggaaaagttggtaatcagaagggcatccaaccttattctcaagagttcttgtccctgaaaggattctctggagcactgggctatccagaagggagaccatgatcctggagcttggagctcttaggcccgcttctcaatgaagcatgtgtgggatcacaaggaagatgttaccttttcatgtacctcgtcaggtatcataccyccatgtaacagaggcaattcatcttacccaccactgcctttgtgctttaagaacacataaagatttaaaaaaaaaaaaaaacctgaagtctaggaaaaagtgagaataatagcaaaacttagctttaagtactatcttaaagttaattgaatgaaatgtgcattcttcttcaagtaaatgaaaatagactatgta

SEQ ID NO: 413511 - DNA, 470 bp, Homo sapiens
tatggtgtcagaagggcagcggctccttgggagcacctgtcccaacagatgagcttctacaagttattcctggtcattcatgtcagactctgtaattctaacctttccaaaggttctttaaaaaacttaattgcatatagcaaatcycttctgcctaaactagccagagataattctgtgtcatcacctaagaaccatggctgatataataaattgatctaaatttctctatttcaatttgtcaccaaggatggaaagccatcaattgcagaagcattctgtttagcaagggtccctttgaaaactgcatttacttgtaacagcccattcttggcacagaataagcttgacatagaataaacacatgggcatttcttgtgctggaaatgccatagtgaacaaaacagccaatacctctactttcatggattttaattctaactggaaaaagaggacaaaaaaaattaaat

SEQ ID NO: 413512 - DNA, 585 bp, Homo sapiens
tgtcctttcagtttattgcttgttatccctggaagtggttatgtaaacactattaatacttgctcttgggtctccttttaacactcgtagccccctacctttcgagtagctctctattacatcatttgtttcactttttacaccttcccactctgttatcttttatctttttatctatatgcttacttgtttattgtctctctycccctataatagaaaatgtttctttggatgggcatgatggctcacacccataatcccagtccctcctgcaggaacactgaatttcaacaactaattgcacacacacagaagcacaaacataagaacaaaaaactgggtgagcaactccagtacctggttttaacttcacatcacaaaatgaaacacacttaagagggtaggaaagacagtcttaaattgccagtaacacccctccttgattccacagctgtggctgcatggtgcaaagagataatctgtgcacttgaggaaaaaagagtatagaactcagtgctatcttgtcacagcagagagcaaagccatgctgagctcaactggcacccacccatggagactgcattt

SEQ ID NO: 413513 - DNA, 586 bp, Homo sapiens
ttttttagaaaaacttgtggaggactggtgttaattcttccttaattgcttaataaaattcaccagtaaagccatcttggcctgggttttctttgtgagaaatatttttattactaattcaatatctttacttattatactatgttcagatcatctattaagtcaatttcagtggcttatgtctttctaagaatgtatccattttatctaagtcatataattttttgcatataatggcttatagtatcccttataatccttttcatttttgtaaggtcagtagtaatgtctgtctttcattgctgattttagtaatttgagtcttccatctcttttctttcttggtcaatctagctacagatttgtcactttggtgatctttttaaagaatccacttyggttttgttgtttttttagtctctatctattctctaattcatttgtttttgctctagtccttgctatttcctttcttctgcttcctttaggtttagtttgctcttattttccaatgtcttcatgggagcaggtaaagtgattaatttcagatctttcttcttttttaaatatacacattaacagctac

SEQ ID NO: 413514 - DNA, 586 bp, Homo sapiens
ttttttagaaaaacttgtggaggactggtgttaattcttccttaattgcttaataaaattcaccagtaaagccatcttggcctgggttttctttgtgagaaatatttttattactaattcaatatctttacttattatactatgttcagatcatctattaagtcaatttcagtggcttatgtctttctaagaatgtatccattttatctaagtcatataattttttgcatataatggcttatagtatcccttataatccttttcatttttgtaaggtcagtagtaatgtctgtctttcattgctgattttagtaatttgagtcttccatctcttttctttcttggtcaatctagctacagatttgtcactttggtgatctttttaaagaatccactttggttttgttgtttttttagtctctatctattctctaattcatttgtttttgctctagtccttgctatttcctttcttctgcttcctttaggtttagtttgctcttattttccartgtcttcatgggagcaggtaaagtgattaatttcagatctttcttcttttttaaatatacacattaacagctac

SEQ ID NO: 413515 - DNA, 618 bp, Homo sapiens
ccctttttatttttgctagctatagctactatcacttttagaatgtttttgtcagtttgatgaatataaggtgatatttgttttttattttgtatttttctatttataggtgaacttcagcaccctattatatttggccatttgaatgtactggtttttttaaaytgctggtttctatcatttgcccagtttgctattggtttgtcttttatttattaattgcttagagcactctgtctattttaaatattaactctgtgtcctcaaaattgtaaatatttttaaatggtatcttttcccaaattcttaaacaattttggaattgtcgaatatgtttattttggatttcaattattagttaagaagattctcccatccagagaatgtagaaagtcatctcctttattaactggaaagtaaatataaagtaaatctagctttagttttatattaaatctttaattcatttgtatttatttttgtttatggtattagctatatgtataattttatgatcgtccagatgtaaaactagttttggcaaactcatttatttaataaacttccttttcccatatacatcccaaattacttatttctctctccattaatttgtaa

SEQ ID NO: 413516 - DNA, 594 bp, Homo sapiens
ctccaattttatgaagtgcctgttcaaatattttcccaattttatattggtttcattttcttttatttattaccttcattaatcacatgtattatattttattgcatatatgttgggataaatatttttctccactcktggtttgcattttaattcttggatggtatattttgaaacacagaagtcatcatttttgatataaagtaactacatttttcttcttaattgttccttttttgtcctggttaggaaatctttctgtgtgagaatattttattgtgttcccttcaccttcagaacatgaatccatgtggaaatgcactgtgtatggtttgaggtaggggtcagtattcagttttgtccatttgaatattaaattgatccagcattgtcctgatccccttgtaaatttcactgtaggacatcactctgatcatgcacgagtattttgaatataagatgagatttacaaagataagcacagcataagaggtcaaataagattacctcaaaggatagtttcataaataaaacacatcaagaagtataatattgttagatgaagagaaagaaaatatttccaggttaccactg

SEQ ID NO: 413517 - DNA, 569 bp, Homo sapiens
ataacatttgtgtgtttcaattcttttcttaacttctctttgagattcattaatttgttgcatttcagtgttatctctgttttgtaaaattattttgtacratgagatcacaatttatttagcaattctactgttgttgaatatttattttgtctccaatttgagctactataaaaattgctgcaatgatcaacattgtgtttatcttgaaatacacataggcagtctgaggaatatattttagaattagaatatctagcccataaggaatgctcatagtcagttcgccaaaaagtatttcagcttacatccctccaggcatgaattactttcattgattctttatctttcacaacacacaatattatgtgtctttaaattttgctaatttttatggaggcctgtagttcaacttatggattaatttttattattctgaggactaataaaagtaatccctttttcatatttgtccagatattcatgcctccaattttatgaagttcctgttcaaatattttcccaatattatattgggttcattttcttttatttattaccttcgttaa

SEQ ID NO: 413518 - DNA, 569 bp, Homo sapiens
ataacatttgtgtgtttcaattcttttcttaacttctctttgagattcattaatttgttgcatttcagtgttatctctgttttgtaaaattattttgtacaatgagatcacaatttatttagcaattctactgttgttgaatatttatkttgtctccaatttgagctactataaaaattgctgcaatgatcaacattgtgtttatcttgaaatacacataggcagtctgaggaatatattttagaattagaatatctagcccataaggaatgctcatagtcagttcgccaaaaagtatttcagcttacatccctccaggcatgaattactttcattgattctttatctttcacaacacacaatattatgtgtctttaaattttgctaatttttatggaggcctgtagttcaacttatggattaatttttattattctgaggactaataaaagtaatccctttttcatatttgtccagatattcatgcctccaattttatgaagttcctgttcaaatattttcccaatattatattgggttcattttcttttatttattaccttcgttaa

SEQ ID NO: 413519 - DNA, 569 bp, Homo sapiens
ataacatttgtgtgtttcaattcttttcttaacttctctttgagattcattaatttgttgcatttcagtgttatctctgttttgtaaaattattttgtacaatgagatcacaatttatttagcaattctactgttgttgaatatttattttgtctccaatttgagctactataaaaattgctgcaatgatcaacattgtgtttatcttgaaatacacataggcagtctgaggaatatattttagaattagaatatctagcccataaggaatgctcatagtcagttcgccaaaaagtatttcagcttacatccctscaggcatgaattactttcattgattctttatctttcacaacacacaatattatgtgtctttaaattttgctaatttttatggaggcctgtagttcaacttatggattaatttttattattctgaggactaataaaagtaatccctttttcatatttgtccagatattcatgcctccaattttatgaagttcctgttcaaatattttcccaatattatattgggttcattttcttttatttattaccttcgttaa

SEQ ID NO: 413520 - DNA, 569 bp, Homo sapiens
ataacatttgtgtgtttcaattcttttcttaacttctctttgagattcattaatttgttgcatttcagtgttatctctgttttgtaaaattattttgtacaatgagatcacaatttatttagcaattctactgttgttgaatatttattttgtctccaatttgagctactataaaaattgctgcaatgatcaacattgtgtttatcttgaaatacacataggcagtctgaggaatatattttagaattagaatatctagcccataaggaatgctcatagtcagttcgccaaaaagtatttcagcttacatccctccaggcatgaattactttcattgattctttatctttcacaacacacaatattaygtgtctttaaattttgctaatttttatggaggcctgtagttcaacttatggattaatttttattattctgaggactaataaaagtaatccctttttcatatttgtccagatattcatgcctccaattttatgaagttcctgttcaaatattttcccaatattatattgggttcattttcttttatttattaccttcgttaa

SEQ ID NO: 413521 - DNA, 562 bp, Homo sapiens
atatatgttgggataaatatttttctccactcttggtttgcattttaattcttggatggtatattttgaaacacagaagtcatcatttttgatataaagtaactacatttttcttcttaattgttccttttttgtcctggttaggaaatctttctgtgtgagaatattttattgtgttcccttcaccttcagaacatgaatccatgtggaaatgcactgtgtatggtttgaggtaggkgtcagtattcagttttgtccatttgaatattaaattgatccagcattgtcctgatccccttgtaaatttcactgtagaatagcactctaataatgcatgagcattttgtatataagatgagatttacaaagataagcacagcataggaggtcaaataaaattacctcaaaatataggttcacaaataaacacatggataagtataatattgttagatgaagagaaagaaaatatttgcaggttaccattgagtctttttactccaaactatttcatgaagcccaagatctctactctcttccattgattttaacttcatttaga

SEQ ID NO: 413522 - DNA, 553 bp, Homo sapiens
tttatgccctgaatgccctttagctatcaaggtcattattattaaaatatttcttgttcttaaatactagtgatacaattttgacaagaatgagaagattttagcttactcaagcaccactccagataactggataaaagtccatatgttcaaattataagttgtaacttaaggcagatttttgcaaaaaattttaccagtcactttgcggacatccctgctagctctagactgaaaccgaattttagattttacatgtagctcttcatgttgtaactaaactgaaattatcatttccatttttacttcctatttacataataatttcttctttctttttacatgttaagtccaaattttacattatatcaataatatgtatttattgtaagaaagtacaaatactccaacaaacttyagtgaactctattccccaatgaaatatgtttaacaattcaaatgaaatacagtaaagaaatgtaaatgtttatgtaaccttggattattacacttccttctgagcattgttccatttattcaattttttatttct

SEQ ID NO: 413523 - DNA, 618 bp, Homo sapiens
ccctttttatttttgctagctatagctactatcacttttagaatgtttttgtcagtttgatgaatataaggtgatatttgttttttattttgtatttttctatttataggtgaacttcagcaccctattatatttggccatttgaatgtactggtttttttaaattgctggtttctatcatttgcccagtttgctattggtttgtcttttatttattaattgcttagagcactctgtctattttaaatattaactctgtgtcctcaaaattgtaaatatttttaaatggtatcttttcccaaattcttaaacaattttgraattgtcgaatatgtttattttggatttcaattattagttaagaagattctcccatccagagaatgtagaaagtcatctcctttattaactggaaagtaaatataaagtaaatctagctttagttttatattaaatctttaattcatttgtatttatttttgtttatggtattagctatatgtataattttatgatcgtccagatgtaaaactagttttggcaaactcatttatttaataaacttccttttcccatatacatcccaaattacttatttctctctccattaatttgtaa

SEQ ID NO: 413524 - DNA, 581 bp, Homo sapiens
ccatactgcccaaggtaatttacagattcaatgccatccccatcaagctaccaatggctttcttcacagaattggaaaatcttctttraagttcatatggaatgaaaaaagagcccacgttgccaagtcaatcctaagccaaaagctctaccttcttaaatctactgtactgtatacaaaactgtagtaataactgtagtcactttgctgtaccttagctctaccacttattttacataagggtgactttatacaccttgaccaacattcccatttctccctgctctagcccctcacaactactatactattcactgtttctatgagttttattattttagattttacctataagtgaggacatgcaatatttgtctttttgtgcctggcttattttgtttagcataatgtcctgcagatttatccatgttcttgcaaatggaagaatttcttttctattaaggctgaattatatatatatatataatcacttttctaatccattaagttaccaataggcaattagattgttgctgtatccttgtattgtgaataatactccagtaaacatggaatacagg

SEQ ID NO: 413525 - DNA, 581 bp, Homo sapiens
ttaaatcttacaccatgaacacattccattgatttatgacttctttatttcagcaatgttttgtagttttcagtacgtctttaatttccgattaaattcctacatatctgttctttcagatgctactataaaaagaaagttttaaaaaacttgtcctattgcttatttctagtgtatagaaacacaactgattttgtttattgwttttttgtcctacaactttgcttaattcatttattagctctaatagttttgttattaaatccttagagctttctacacataagaccaggtcatctgtgaatggagaacttctctcttttcaatttgtaagattttcatttatttgacttctctaattgctctgggctagaatttctactactatattgagtaaaaatagcgacagtaggaatcctgctctcgttcccattgttaagggaaagctttgagtctttcaatattgggtgtgatgttagctgtgggtttttcatatatcacctttatcgtgttatggaagatatcttttattcttcatttactgagtgttttaaaagaatgttgaactttatcaaatgatt

SEQ ID NO: 413526 - DNA, 522 bp, Homo sapiens
agttagctccttcttgctaaccatgagctcccagatttatcagaattattccattgaggtggaggcagccatcawccacctggtcaatttgtacttgtggatcttctaaacctatttctctctgggcttctattttgaccatgatgatgtggctctggaaggcatgggccacttctgcaaatcagctgaggagaagcatgagagcaccgagcatcgctcaaagatacaaaaccagtgtggcagcatgctgtcttccaggacatccagaaaccggctcaagataagtggggtacaactttggatgccatggaagccacaatgcccttggagaaaaatctgaactaggccattttggatcttcatgccctcagttctggctacacagatccccatctctgtgacttcctggagagtcacttcctagatgaggaagttaaactcatcaagaagatgggtgaccacctgaccaacctccacaggctgcacaggctggctggcctggaggctgggctggcgagtatc

SEQ ID NO: 413527 - DNA, 522 bp, Homo sapiens
agttagctccttcttgctaaccatgagctcccagatttatcagaattattccattgaggtggaggcagccatcaaccacctggtcaatttgtacttgtggatcttctaaacctatttctctctgggcttctattttgaccatgatgatgtggctctggaaggcatgggccacttctgcaaatcagctgaggagaagcatgagagcacygagcatcgctcaaagatacaaaaccagtgtggcagcatgctgtcttccaggacatccagaaaccggctcaagataagtggggtacaactttggatgccatggaagccacaatgcccttggagaaaaatctgaactaggccattttggatcttcatgccctcagttctggctacacagatccccatctctgtgacttcctggagagtcacttcctagatgaggaagttaaactcatcaagaagatgggtgaccacctgaccaacctccacaggctgcacaggctggctggcctggaggctgggctggcgagtatc

SEQ ID NO: 413528 - DNA, 507 bp, Homo sapiens
agttctacatacaaatcaaacatagtgcatgaagtttttgctagatataaaaccagaaatttttggaatcttcctatgagattattattttcaatgttattaatacattggttaattggataccttatttgagaacttcaacttgaatggagagtatttgttgtacagtttgtgcttccattttttaggtgcagaaatccagccttccttggtcatccaagagatacaattgaaggctcatgctgtccaatccccccctctccaaagtggtagagctgagggcttgtctgttccttcatatgcagaggatgatcctgatttttgggaggagaatgcactagatcatcatggataaatcaagcttcattgataaaggaaacaccctcctgttaatgcttaytatgtggcgtttcaatcctttttgtatccagattaatcaaggttcagctctggaagttgctgataagattagaacgagggagttccgtgtttgcaaaagttttgcag

SEQ ID NO: 413529 - DNA, 592 bp, Homo sapiens
ggcttctttcacttgagaatatatatttgagattcaaccatgccctttgtagctcccttcyttttttctcattaaataatattttgctctatagataataccacagtttttaaatccattcatctatcgaaagatatcatggcagcttccattttttggcaattatggatagagctgctataaacattaatgtgcatgtttttatggatatatgcttcaaaatcttttgggtaaatatctaggagtgtgagtgctgacttgttaagactatgtttagccttgtaaaaaattgccaaaatttctttccacttagctgtaccattttgcatttttttttttttttggttttgagacagggtctcactctgtcccactggctggagtgcagtggcatgatcatagctcaccacagcctttgcctcctggactcaagcccatcctcccacctcagccttctgagtagctggggccacaggctcatgccaccatgcacagctaattttttgatttttcttagagacgaggtctcattatgttgcccaggttggtctcaaactcctgggctcaagcatcctcccaccttgacctcttt

SEQ ID NO: 413530 - DNA, 547 bp, Homo sapiens
gggccctcgttctcagcaaatctatagcgtttgaagctttctttggaaacctgttacaataaataaattaataaacacaacttatagcacctctcccctgttgaattaaacaataagaagagaagtatcaatttaataacagacggtcctaataaacactaaacattattcgtgatgggmtctctttggattggccaaagcagaactatggattcccatcaaaacacaggtccttgagctctgtgccttggccccaccctcgaagacgggcattagatgatggctgaaaagagagagatgtgagacagacaggtggacagctaacgctacctgaagctgacccttttcccttcctagttggccttcctggtattcctgctatagaaagtcattaaaaactaagacactttctcctcttgaagtagtaagctgttgtaaccattgcatttgatttgagcaaatccacataggtaaaaatgattccacataatctagaaggaaggtaataggtcaaatgcaaaagatcttaagctagtcccttagcaac

SEQ ID NO: 413531 - DNA, 547 bp, Homo sapiens
gggccctcgttctcagcaaatctatagcgtttgaagctttctttggaaacctgttacaataaataaattaataaacacaacttatagcacctctcccctgttgaattaaacaataagaagagaagtatcaatttaataacagacggtcctaataaacactaaacattattcgtgatgggctmtctttggattggccaaagcagaactatggattcccatcaaaacacaggtccttgagctctgtgccttggccccaccctcgaagacgggcattagatgatggctgaaaagagagagatgtgagacagacaggtggacagctaacgctacctgaagctgacccttttcccttcctagttggccttcctggtattcctgctatagaaagtcattaaaaactaagacactttctcctcttgaagtagtaagctgttgtaaccattgcatttgatttgagcaaatccacataggtaaaaatgattccacataatctagaaggaaggtaataggtcaaatgcaaaagatcttaagctagtcccttagcaac

SEQ ID NO: 413532 - DNA, 545 bp, Homo sapiens
atccgtgttcccacacaagacatgatctcactttttttttatggccgcatagtattccatgaaatagtgtatatgtaccacattttctttatccaatctgtcattgatgagcatttaggttgattccatgtccttgctattacaaatagtgctgcaatgaacactcgtgtgcatgtgtctttatggtagaatgatttatattcctctgggtatatacccagtaatgggattgctgggtcaaatggtagttctattttcagctctttgaggaattaccacattgctttccacaatggttgaactaaggaacttttgaaacactactggaactaataaactacttcagtaaggttataatatacagaatcaaygtataaataccaattacctttctatatatcagcagcaatgaaacatatgaaaaaggaattgaaaaaataatgtattcatgacagcatcaaattcagtgaaggaattagaaaataagagaattgcaaggcatgcacactgaaaaccagaaaacattgcaggccagacgtggtggc

SEQ ID NO: 413533 - DNA, 598 bp, Homo sapiens
ctttttatgctaagatttaaaaatggtgggttttttttgtcttatagccttacagaaaccctgagatactcaaatttaatctgaacttatatagttgctggtttatttatcataaaaaagaaatcactggaattttgtrtagttcccagtttattctaaactctgttttgacttttgtttctaacaatagaactaggaacattgagaagtttgatatagagaagaattttttatttgctatgtcttaccaaatggcaaaaaaaaaaaaaaaaatcacgagtttttttctaataaagttttacaagttcacattacatttttttctaaactatttaagcaatgaatcattatatcagtttattcaatggttaataattttgctatgttaatgtgttatatactgtcttctctatgggtgatcatatatgtaaaacatagtttttgatttcaagatgcttactgcctcacagggtaatggggtatataacaagtgcaatatagagtgataaaggatatgataatagaatatgggaagacagcagatgatagggaaggttaggcaagatttcttggagggagaaacatttcattagaaggt

SEQ ID NO: 413534 - DNA, 510 bp, Homo sapiens
ggcaggagctgcgtgccccctggtgcagctgcagcctcccagctgaagctctagatcggagcatccctacattcttggggacctggaaagccccctgcccctgcaggcttggaagtgcctgcctctgctccctggcctcttcctactctcagtgcctgctccgaattcagaacaaagttgtagctagcccgggtactgtcgcaacccagctgggtgtgcayatgacggggcacactgacatgccaggcccctgctgcctcgggcccctttggactttgggtgccaatgagcatgggaggctaggccaagggggctctgaggatggctcaacacgggcctgtgtgtgtcccttggcacaaacagcctgggcaccacggacgacctgttgatgttagcaggaggcagacaggctcctagatgaaaaggggtgggtcctctgtgaagccccacctttaagcaagggatggcctgaagcctgggagccaggctgtcagttctgggtggagtctg

SEQ ID NO: 413535 - DNA, 591 bp, Homo sapiens
atgaatgttcagtgaaaaaataataggttgggcgcagtggctcaagcctgtaatcccagcactttgggaggctgaggtggctggatcacgaggtcaggagttcaataccaacccggccaagttggtgaaaccccatctctactaaaaatacaaaaaaattagccaagcatggaggtgggtgccttcaatcccagctattcaggaggctgaggcagagaattggttgaacccaagaggtggaggttgtagtgagccaagatcacaccatggcactccagcctgggtgacagagtaagactccatctcaaaaataataataataaacaaaatattagtaaattgaatgtaaaattgaataaacagaataatgtggttatgtgagatttgtctcaggaatacaagtcwagttcaattcaaaaatcaaaaatgcagtccaccatataaataaagaataaaaaagcagcatgatatcaatttatgtagaaaaagcatttgacaaaatttaatatccattcatggtaaatgatgagaatagaaggaaattatcaaactgacaaagggcatcttgagaaaaaactacaactaacatta

SEQ ID NO: 413536 - DNA, 567 bp, Homo sapiens
tgctttagctgccggagtaacttaagtgatagcaatcttggtttgtttctcttttgtcagggccttactagccaataagttgtcaatgcctatagcaggtaaacaactactctcaggaatcttgtaagtggcaaaggctggcggtttatcagttcaagagccagaatatagaaaatgaaggcctccttgtggcaaaactcctwtctctggaaaacccctgagaaaaagttttgttcagcatttgcagcacaatttcttactttcaatactttaaagtagttaagaccaaaagtcctcaaagctgtccagtcccggagaggtagataggtgcatttcaaggacaacaaatatacaccatctgattgtggtctttctcaactacataagaattggaaagtcacagaggctaatatttaatatcaaaaatgaaaaacataaagctgttctctttttacaccataagtagaatttgacattttggatacctaatattttccctaacttacagatataggaatatattatattaatggctatttcttaatataccatctattattcaggcta

SEQ ID NO: 413537 - DNA, 473 bp, Homo sapiens
cctccttgtggcaaaactcctttctctggaaaacccctgagaaaaagttttgttcagcatttgcagcacaatttcttactttcaatactttaaagtagttaagaccaaaagtcctcaaagctgtccagtcccggagaggtagataggtgcatttcaaggacaacaaatatacaccatctgattgtggtctttctcaactacataagaattggaaagtcacagaggctaatatttaatatcaaaaatgaaaaacataaagctgttctctttttacaccataagtagaatttgacattttgratacctaatattttccctaacttacagatataggaatatattatattaatggctatttcttaatataccatctattattcaggctacattccttctctgaatattttatcttttttatttttctcatttgtgcttctcatctgaaacagactaaaatcccttgttactagtta

SEQ ID NO: 413538 - DNA, 526 bp, Homo sapiens
ttctgggtttcctgtttattctttttcctcctcttacagctttggaaatttctattgtcatatctttaagcttagagagtctttcttcagccatgctcagtgaactaaagatcccatcgaagacattcttaatttctgttacggtggttttgatttctagcatttctttttggtttttcttaggattttcatttctctgcttacgttgttcatgtgttcttgtatcttgtctacttttcaaatttaattccttagcatattagttataagttgttttaattttttaatttcaaatctgatatttctaacttatctgtcatatctgactttggttttgacacattttcagcctcttcaaactggttttttttttttttttttttctttttyctttctctctctttttgtttgggccttttagtgtatcttgtaattttttttgttgaaaggcagacatgatgtactgggtaaaaggaactgatgtaaatcgtccattaataatgtttttgtaaggtaagggggaaag

SEQ ID NO: 413539 - DNA, 339 bp, Homo sapiens
tttttggtagtatttctttttctttataatctttggaagatttttttgttcatttagcrttatatttttgttaaatacattgtagagtgcaccagtgaagcccataggcctgatggttttatatgaaaataattgcaattgcagattcatttattataacatttgtaggactagttttttttttttttttttggtttgacaggtttttcttcttctaaaaatattaaaatcagatatattttaagtaataagttgtaagccataccccatagcaattttttatcaagataaatatatagtaaattccaagcattagtctctctttgttcccactcttaa

SEQ ID NO: 413540 - DNA, 486 bp, Homo sapiens
ttagtttgctgggcttccctaacaaaattcacagaatgactagcttaaacaacagaaatttattttgtcacagttatgaaagttggcagtctaagatcaaggtgccagcagagttgttttctcctgaggcccctctccttggctggcagatggccgccttctcactgataggtccttacatggctgtccccctgcaccccaggtgccaatctgtacatcctaatcttgtcttctaaggacaccagtaaaattgaattagggccacataygggctatctgccttattttaacttagctacctctttaaatgccctatttcaaagtatagtcacaaagggaggaaactgggactgcaacatatgaattgggtgtggagggtggcacaattcagtctacaatactttctttgaaattcttaggaatttcagcggctttcccatgagctgttgagaaccatacactttaatgcttcagaaggaggccttc

SEQ ID NO: 413541 - DNA, 411 bp, Homo sapiens
tgttgagaaccatacactttaatgcttcagaaggaggccttcagcgcatttgcttcattgatttttttttttttttttttttttgaggcagagtctcactcggtcacccaggctggagtgcagtagcatgatctcagctcactgcaacctctgcctcctggttcaagtgattcttgtgcctcagcctcctgagcatctgggattacaggtgtacaccaccatgccaggctaatattttgtattttagtagagaccgsatttcattatattggccaggctggtctcgaaatcctggcttcaagtgacctgcccatcttgtcctccgaaagtgctggggttacaggcatgagtcactgagcccagcagcttccttgacttttgacagtgtttcttcgaactgtggtagtgact

SEQ ID NO: 413542 - DNA, 550 bp, Homo sapiens
acctcgtctctactaaaatacaaaaaattagccaggcatggtggtgtgctcctgtaatcccagctactcaggaggctgagacaggagaattgcttgaacccaggaggtggagyttgcagtgagccgagattgcaccattgcatccagcctgggcaacagagcaagactccatctcaaaaaaaaaaaaaaaaaaagaaagaaaacaaacaaaccaaaaacaaaaaaacaaataaaaccccacataataggatatattaaacatacttgtttttcttatcagatcttgcaaatagaatcaaacaaagtatgtttattttgggatttttaacatatctttaaattcagttaacaatcatacaatcattttcatgagatgattgttaactactgttatagataaggtaacatagaaagaaggataactagttgatttatcaaatcacaagctcagcgctatccgcttcttattaaagtcaccacaagtctatgcttatctttttagttttttatgcccatgagtacaactgtatatattgtccagggtgattaa

SEQ ID NO: 413543 - DNA, 616 bp, Homo sapiens
ctgaatgggtgagatcccaaatgggatatcgtggcagtataggaaggctggctagtgtgcccagggaacttgtggagcaaactttctacagcatggtactgctgaaaaacaattctaacatggtggtttcctttggctgagttacagagtggagttcccagcactggagatgaaagtcccacctccctcctttgtgtctgcctatcctcagtaacatttctctctttatgcaagtgtgatgttcccatgggttaaggcagcgacagatctaatgccagggtaccaagatggtgaggaagctgatttcccacattaatctcacattttccagtggagaaactgagttgggggaaaatttttcacatacttggtgctaggcagaatagggggaagggtgtcacaattgtgaaaattcaattttcttaccatctgctgaaagttttttcacttctctatgtcccctgcaactgtctcattttcatgtttgagttctggtatgttgctcatgataatcacagccctctctatattgtttttacttttctgcggyggtaaatgaagcctgcttctataccatcattttgaaaccagaagtcagctataacttttataatag

SEQ ID NO: 413544 - DNA, 346 bp, Homo sapiens
catcatttgcgtaggctgcggaagaagagacatttaacttacaagcaactgttagaaaatacttaaggtctcttacaagttgagcagtgctttcttttgtaatccacataatcttcrtatgtattttggattctgtgtctttcaaagattgtttatcaactttacaaggaatgtttataaatgttctctaaaatattttatctctcctcctcctcctctactctcctttcctgaaaaataaagatattggtgcatgtttacatcacaaaaatagcaacataattaattttaaaaaccagatgtgttatttttaatactaaaactacaacttttctatttttctatg

SEQ ID NO: 413545 - DNA, 561 bp, Homo sapiens
ctgcctagtttgattccagtccacttctacagtgtgtctgtgtttcccaagcaccatcagctagagggagatgtcactctgccctttgtaagccttttatctagctccttagggaaaatcagtaatgaatttgagttacctccaatgtccacttttgtcactcagtactaggcaactgctaaaagcatttggatttttttttttccctgaggagcaagtttctggctacaccaaacccagactgttagccagaactggcaaatatctccagagatgagagtcaaaaatagtacaccagataagttaattgtgttatagtcttacaatgaaatattatatagcagtaagaatgatagaatcattgcttctagcaacaacatggatgtatcttacaacgtcaagtgaaaaaagccagacacaaaatattcatgttctatgattccatttatatgcyttttgaaatcagacatggtaatttattgtctagaaatcaggacaatgattactttggaagggtgagtagtgactggtacaggaaggagggagtttcagagtcctgat

SEQ ID NO: 413546 - DNA, 596 bp, Homo sapiens
attttattataaataaatatgtttatcagtacagagaaaagtgtttacctttgtaatggctctgaatctcttggtagtaaaggaataaattgataaccagtttgaaatgtttaaaaatatattttttagtatggaacaggtatggtagagcattctgacacatttaaggtcatgctttgagcctctcgatataggtcagttagttttaaaataacagtaaatayttcatgtggtcaaaagattgcatctttcatgattttgacaattgtatactattgatcactacagtaagtagataataagagtagctttaaaatactagaaatctgagatattgatcacctgacagtagataattaatcgactccttgtgagaaggataacaccttttacattttaaggacactaagttaccatttcatccagctgtggacaaaaactatttcccagtccagatgccaatacactggtatactgagttatttaccaagtttctcttgactctgggaaatggaaagcatcttatcgatgtgttcttgagtgatcatggagaacatacattgtaacaagatgttgataattattgtcagcatgag

SEQ ID NO: 413547 - DNA, 591 bp, Homo sapiens
agaaaattatttagggtatctggtggaagacatttctaagcagcaaagtgttcaagacataacctggctgattccgaaagcattcagtcatatgcattcacaaagagattatctgaaactgaaacttttatttaaaaggaagcagaacataaaagcttagaaaattttgcagcctgaccattaggtaaaaaagaaaaactcattttctggggagaaattcaagccagccrcagaaatttgtgtaagtaaggaggagccaaatgttaatagccaagacaatggggagaatgtctccagggcatgtaagagatcttcagggcatcaaaggcccagggccccgctgctctgtgcagcctcaggacttgatgccctgcttcccagccactccagctccagctgctaaaaggggccaaggtacagattgagctgttgcttcagagggtgcaaaccccaagccttggcagcttccacatggtgttgggcctgcaggtgcacagaagagacaattgttgagctttggaaacctccacctagatttcagaggatatatggaaatgcctgaatgtctaggcagaagtctgctgcaagggt

SEQ ID NO: 413548 - DNA, 591 bp, Homo sapiens
agaaaattatttagggtatctggtggaagacatttctaagcagcaaagtgttcaagacataacctggctgattccgaaagcattcagtcatatgcattcacaaagagattatctgaaactgaaacttttatttaaaaggaagcagaacataaaagcttagaaaattttgcagcctgaccattaggtaaaaaagaaaaactcattttctggggagaaattcaagccagccacagaaatttgtgtaagtaaggaggagccaaatgttaatagccaagacaatggggagaatgtctccagggcatgtaagagatcttcagggcatcaaaggcccagggccccgctgctctgtgcagcctcaggacttgatgccctgcttcccagccactccagctccagctgctaaaaggggccaaggtacagattgagctsttgcttcagagggtgcaaaccccaagccttggcagcttccacatggtgttgggcctgcaggtgcacagaagagacaattgttgagctttggaaacctccacctagatttcagaggatatatggaaatgcctgaatgtctaggcagaagtctgctgcaagggt

SEQ ID NO: 413549 - DNA, 551 bp, Homo sapiens
gggagaaggtagtttttacgctggtgatcctcgccctccccactacttgtcatctctttggcctctgtggaagctgtagaagaaaacctgatcgcccaatgttgcttgttaaagatgtttggaaacaatttacacttgcactaatacttcgtttatgagagacagcctgkgggagggggaaggaagggcttctttgctctgctagagttctcggttctctttgtaactcagatcttgagatttatggaaatagggagtggagggtggggaggttggagagggcggagattaaattggtgttgctgcctatatatagccttagattagcctcttaatccaaccttcattcaactgtaatatgtagcctggagcttcgaccataggtagatgggggtaaatacaagtgtgtatttcagaataagatttgcttgctaaaatgcgggaatcagtcatttctccagggtgcagatttatatttacatcatcaatgaaagtttctttggaaattagtgtttatgttttactgttgtttccctacagagtagtattga

SEQ ID NO: 413550 - DNA, 591 bp, Homo sapiens
aatccaaaactcataaatccaaaatgttaaatgtttaatagtatagaaggaaaaaatagagttaaaaatatgattgcttcttctaaaatttaagagataggaaacagtgaataataatgatgaaatgcctgtcaagttatttaactcaatttttaaagttaatttaagcagaggatgggctaacagttcagttttctgatttcgtgtcattcagtttttactttaggatgagatgaatggtcaaccacaagtccatagagtttttagtatcaatatgttgctaataagtaatgtaacagtagtaaatccaagtttggtgttttattcagctgaagctagtttttaaatttccatatagaagttacttaaccaaggattagcagaaaaasccaagaaatgaaatgaaatggatagtaatgtcctcagaggggaaagagaagacgaagggtacacctagagaaaacgtcattgaaagatgttggtatattttccattaacgtcatatgtaaaggcagactctacttccagatgctataatgtataacagggttatgaggtgtcagatgtgattccccaagacagtaaccacaa

SEQ ID NO: 413551 - DNA, 565 bp, Homo sapiens
tgtccttgtttttttgttttttaagatggagtttcgctcttgttgcccaggctagagtgcaatggctcactgcaacctccgcctcccaggttcaagtgattctcctgcctcagcttcctgagtagctgggattacaggcatgtgccaccaygcctggctaatttttgtttttagtagagatggggtttcttcatgttggtcaggctggtcttaaactcccgacctcaggtgatctgcccgcctcggcctcccaaagtgctgggattacaggtgtgaaccaccgcacctggccacctgtccttaaataaagaggcaaagcgtcagatatggagggcggtaaatatagcagaatatgaacacttgttgaatatatgtgggcatataccaatatttattttaatattctttaacgtttcctgttagaaaattttcacaataaaaagttcagggaagtcttaattttgtcctcattcttctttttcttttcctttacctttcgctcattcttgaataataattgagttggttataaaattcttggttggccattacttgtcctcagcat

SEQ ID NO: 413552 - DNA, 565 bp, Homo sapiens
tgtccttgtttttttgttttttaagatggagtttcgctcttgttgcccaggctagagtgcaatggctcactgcaacctccgcctcccaggttcaagtgattctcctgcctcagcttcctgagtagctgggattacaggcatgtgccaccacgcctggctaatttttgtttttagtagagatggggtttcttcatgttggtcaggctggtcttaaactcccgacctcaggtgatctgcccgcctcggcctcccaaagtgctgggattacaggtgtgaaccaccgcacctggccacctgtccttaaataaagaggcaaagcgtcagatatggagggcggtaaatatagcagaatatgaacacttgttgaatatatgtgggcatataccaatatttattttaatattctttaacktttcctgttagaaaattttcacaataaaaagttcagggaagtcttaattttgtcctcattcttctttttcttttcctttacctttcgctcattcttgaataataattgagttggttataaaattcttggttggccattacttgtcctcagcat

SEQ ID NO: 413553 - DNA, 521 bp, Homo sapiens
catcattcattgtatgtttcaatatatatatatttacagaatttttaaatcacgacttttagaacttaaactggccttatgagatttattccaattccctcacttttgagataagaaactaaggtgccaggaagtaaacgatttggcatccaacctgttaatgtcaaaaccaggaccagaaggaatactttcctcagctcagttagagggcctttctaataaagtagtaaagagacatgaatttctaaattagggcaaattttagagagcaagtctttcaaaaataaataattgaaaaacttccattaaaaagacaattattcaaagatatattttttacaaagacatattttcaaaggtagtcttcgtttttaaacygctgagctataagactacttctcaaatatttctttgcaagaaggaagggtccttacgatttcggtcaagcagctccactcctggaaggtggtagatgatatataaacgatacaggttatattggcacaaaggattttggtata

SEQ ID NO: 413554 - DNA, 613 bp, Homo sapiens
tatcacattatgcttggcacccagtaaattctcagaaaatgtgaaatgaatgaatacatgtcatttttctctgaacaaatgaataaatacattttcccttgcttggcaagcagcagtgacttygtttctcatgagttgctaacatactcatgctgtgagaatttttggtggagaagcagcttttattcccatagctctgttttaaaaataaaactttagcaacagctatttaaatgctttacttttttttcttaaagtcctttgctaaattataaaataatgttaataggccacatgacctaaaataatatgaaaaaagtaaagtctgtctgtaattttccatgagaaagtagagctcacaagacatgacaaaagtgaaaagtataatctttgcaatcctggaatctgacaaacattgtaattatcagagtcaaaacaatcaccgaattttagctgggatttgttatgaatggtgaggttataatgacttataaatctttctgggtgatatatgaaattttgacagtggttttgctatttggtagaggactttaacaggagttatatttagtgcaatgaacatatttaaagaaatgaggaagataggtacgct

SEQ ID NO: 413555 - DNA, 613 bp, Homo sapiens
tatcacattatgcttggcacccagtaaattctcagaaaatgtgaaatgaatgaatacatgtcatttttctctgaacaaatgaataaatacattttcccttgcttggcaagcagcagtgacttcgtttytcatgagttgctaacatactcatgctgtgagaatttttggtggagaagcagcttttattcccatagctctgttttaaaaataaaactttagcaacagctatttaaatgctttacttttttttcttaaagtcctttgctaaattataaaataatgttaataggccacatgacctaaaataatatgaaaaaagtaaagtctgtctgtaattttccatgagaaagtagagctcacaagacatgacaaaagtgaaaagtataatctttgcaatcctggaatctgacaaacattgtaattatcagagtcaaaacaatcaccgaattttagctgggatttgttatgaatggtgaggttataatgacttataaatctttctgggtgatatatgaaattttgacagtggttttgctatttggtagaggactttaacaggagttatatttagtgcaatgaacatatttaaagaaatgaggaagataggtacgct

SEQ ID NO: 413556 - DNA, 613 bp, Homo sapiens
tatcacattatgcttggcacccagtaaattctcagaaaatgtgaaatgaatgaatacatgtcatttttctctgaacaaatgaataaatacattttcccttgcttggcaagcagcagtgacttcgtttctcatgagttgctaacatactcatgctgtgagaatttttggtggagaagcagcttttattcccatagctctgttttaaaaataaaactttagcaacagctatttaaatgctttacttttttttcttaaagtcctttgctaaattataaaataatgttaataggccacatgacctaaaataatatgaaaaaagtaaagtctgtctgtaattttccatgaraaagtagagctcacaagacatgacaaaagtgaaaagtataatctttgcaatcctggaatctgacaaacattgtaattatcagagtcaaaacaatcaccgaattttagctgggatttgttatgaatggtgaggttataatgacttataaatctttctgggtgatatatgaaattttgacagtggttttgctatttggtagaggactttaacaggagttatatttagtgcaatgaacatatttaaagaaatgaggaagataggtacgct

SEQ ID NO: 413557 - DNA, 613 bp, Homo sapiens
tatcacattatgcttggcacccagtaaattctcagaaaatgtgaaatgaatgaatacatgtcatttttctctgaacaaatgaataaatacattttcccttgcttggcaagcagcagtgacttcgtttctcatgagttgctaacatactcatgctgtgagaatttttggtggagaagcagcttttattcccatagctctgttttaaaaataaaactttagcaacagctatttaaatgctttacttttttttcttaaagtcctttgctaaattataaaataatgttaataggccacatgacctaaaataatatgaaaaaagtaaagtctgtctgtaattttccatgagaaagtagagctmacaagacatgacaaaagtgaaaagtataatctttgcaatcctggaatctgacaaacattgtaattatcagagtcaaaacaatcaccgaattttagctgggatttgttatgaatggtgaggttataatgacttataaatctttctgggtgatatatgaaattttgacagtggttttgctatttggtagaggactttaacaggagttatatttagtgcaatgaacatatttaaagaaatgaggaagataggtacgct

SEQ ID NO: 413558 - DNA, 566 bp, Homo sapiens
agcatcaactgcctgttgactttaaggttgaaattctccagcatgttgtatgaaacccattataatctgctgtgacctacttcttcagcttcatcttgtttaatgacttacttctctgaacctgtttcctgaattaaatgaaattccagaattaaatcaaactatttatattggttaattattactgcttataaaaacacactcaaactcagtgcttaaaatgataatcatttagtctttctctcacagttgtggttggctgttctcagctggggcagttgtgctccatgtgactctcwtccttcttgtactagcaggctaggctgagcatgttgtcatggcaatagcaaaggtacacatgggcaggtagaaacacagaagacctctcaaggactagccttgaaattgccatgttgtttcatgctgttggttgaaacaaattacatggcccaatctgaagtcaagtctcctccccttcagtgcagagaactttgaaatcatgtgagaaagtgtatgaatgcaaggatgaatgaagaattggggccaataatacaatatatgtataa

SEQ ID NO: 413559 - DNA, 599 bp, Homo sapiens
tgagttgcttcagcagtgattatcagattggagaggagaactgcccccaccctcatgcctcattccagagaatgtatcatatgttctgggggagtgcatgtaatttgaaaaagatgcctcggttattctgataccaggcatttctgcctccatctctcaaggaaccatatcygctttactactgggttgagatatactctcagtggaattaaatggtttgtacacaattaaaccatttatccttaagagaatagtcaggctttctgactgccatgccttctcttgttttcttgaccaaacttttttattctatgtgctaaggacagaaagtaacaaatgttcattactaacacactattgagggagaataagattgtcagtagaatgggcactcccagttgttaagcatcattcatgcaccaaacactgctctaaatgttacagacaactttattcttcaccaatgtaggatagcctttattacctgcatattatagacaagggaaacaacttcatgcaggcaattacctctccaaggacatcaaataaattcacagaaaagctgtattcaaatacaggctttgtcaaatcccaagcaa

SEQ ID NO: 413560 - DNA, 570 bp, Homo sapiens
gtttctcaaccttcaagtactcaagaaagatgcacagggatgcatcaacaaagtaataagattatacacattttggatcttatatctttgagtgagtgtcagtcttcagaagagtcaccttataagaactgtmcactcattttcatgatgctcagcagactccacagattcttctttcgtaataaacttctggggaaatctattttactacatgatagtaacgccttatgttaaggaagaaccttaacttttgacacaacttagtatcttgctcacttaaacagctctgaactactatcaaatctttatgagtaaaagcatgtgatagatactgaaattgaaataggacctcatcactgtagcacacatgtagctgtgtagttttctgtgatgattattgaggaaattatacttgtttagctggatttttttgaaaaaattatgtgtaaacaacaacagcaaaagcctgtatttttaaaatctggaagacaatagcagtgaaatatttcagaatagctcttgaagtttcccagttaagccatttgaacttatgtgttggcctatgaaatt

SEQ ID NO: 413561 - DNA, 598 bp, Homo sapiens
caactaatgtttcatgttctatgtaaatttagtaaatattgggatttcagtactaaacatacaataacatactgttttarttaacacataagtacagaatttttcagaatttcatcatgtcgtttaatcactggtctatgtaagggactttgcccctacggtttttcaaccttgctactattgcgttttgacctggataattcttggtggtagagtctgtcctgtgtatttcaggatgctcagcagcatcctcggcctctacccattaatgccaggagatgccccccaggagtggcaaacaaaaatatttccagatattgtcaaatgctccctgggggcaaaattccccccacctccactgagaatcattcaatacagcagacagagtgatctgtggaaacctaagtgaaaacatgtcactcctctgctcaaaacctctggtggttttctgctacattcagccaagttcttacagtagccaacaaggtcctgtacacactgggcctctggttctctgtctgaccttattacctgccatctcttgctggcttattctggtttagccaccccaggcactggttgcactggacctgtgcac

SEQ ID NO: 413562 - DNA, 591 bp, Homo sapiens
actacttggatgacaagttcactaagatctcagactccatcactacacaatgcatcttgtaaccaaaaaccacttgtaccctaaaagctattaaaataaaatatatgtattttaacaagttttcttagtgtaattgacagcaaataatgagcagtgatgactagtacaaaagtcatcacccagctgatgttttggtaaatccaggaaatggtatatctgattcaatcccatgcttggtttcaaaggcaaaatgttacttaaaaaaataaatgttgactatatacctgcttgataataagaaacattcacctctcttcrtttaagttcaacttaaagaagaaacatttttgaaaagtgagaagtgtgttacattggtggtattatgataataattcaagtgtgcttgatgctggggataaaatgacaaatcagatgtgttctctggccttgcgttgttcagacaaacacatgagccaataaataaaacacaaagagaatatggacagtaatggctttcaaaacttaaaaaaatctaataataaatcattacaatttgttgcctgaggaaataatcctcatcatgtaaaccag

SEQ ID NO: 413563 - DNA, 619 bp, Homo sapiens
taaggaatgcatgttggagggacccatttctcatttgccctcatgtctagggcccagaggaccagtcacttaggacagctgaagccaagcaactgttgacatttctggccttgtctcctcttctccctcaccaaaatgatattagctgggacttcctcacctcctatccacaatgcattccctgttccagaaacatctcaggctgctggattaccaaggctggacccaaaccaggctgtgctcagtcactgctcattccgcccatgtggaggaaaaggttcaaggggatacttagagtctcatttgttcactgagggctccataataaagttctgctaaaaatgcatgttgctcctgaactcctgcagcctgcggtttgggacagagtgttattttggagcattcagagttgctgatgctaytgtgcccttgtccccgcttggtgtccaaactggagcatttccttgctttcttagagctgccttcacttgaggccacaaaggactcgcactattaatgagcttgtgcaccagaccaactgctgcctcataatcctcaaaacaacctagagaattttttagaggtgaagaggctttagtgattatcaagaccagcagtt

SEQ ID NO: 413564 - DNA, 525 bp, Homo sapiens
gatgctatcattccatgaagtagtgttttaattctcttctttggcactactaattggtattaacgttggcttgagcattaaaaattcataagctaccctgctcgtgtcctaaaagcacactcacaaagactgggctttgttagtttcacgaccagccagcaagctaagagcaccccttgccaattacaaagctgcatttgaagactgaacatcctctgagctgtagatctgtctgtggaactgaggctcaaccactgggcatctgtgaggcaaatgggccggagagaaaagatgtcctggcaaatgcactgggaagcagcagaattttcaygcgcagctagagaaaggccggtggagggggtgatggcacagtggtgcggaggcaatatcacttaattatcccaccctctgttgggatttgctgtgggtacaggcaccagcgatgaggcaaaatgacaaaagacatgaaatctgaagaaaatgatgaatttagtcctaagaaaagagatcagaagaaacacttgg

SEQ ID NO: 413565 - DNA, 576 bp, Homo sapiens
ttcattttttcccttgtttctttttaatatgacaattgcataacacaaagcagagcttttaaaatgtctgaaagcattgacagtacatgtcaatcagtaactaaatgaattagctgaatgatatgcagacatggaataaaaacataggaggtttttgcagcccaactctacttccttagttgcatttttcttctcaggatcagcttggttgatcctgacgctcttggcctgtgaaaatttattacccacagagtcaatctgcattcaggcagccaagtctgaataaatagaatcattgtgcttgtctgggatttgtggccagggttcatccagtcagcgtgacattcacatcccaggagattcataaaagccaacaccctggtatgtgctcttgaatcctgccaaaattgtgtagaattatataaacaggagttgaagcagtaatcaggaccaggtttgaggggcaaggctccaaaatgaagtttctcctacattagaaatgaactgtattgtcaatgttatttgtaggcaamcaagagctagacagtttttgcaaaaaactgagtatagtctcaa

SEQ ID NO: 413566 - DNA, 576 bp, Homo sapiens
tatttgcaaagtatgtaaataacttgaatgtagaacatataaaaaagacttttcaaaaatcaacaatgagaacaaaacaacctagtaaaaaaggccaaagttttttgaacacatcaccacagaagatacatggatggaaaataagtgtatgaaaagatgctcaatacaaccaatcatgaaggcaatgcacattaaaaccacaatgagataccactacatacctattagaatgtttaggattaaaaagatcaagtgttggcaaggatgtggagaaacaacaactctcctccattgctggtagagatgtaaaatgatataagcactttggagaacagtttagtgggtttttaagaaaatgttaaacatactcctattatttgatccaaacattccactcctaggtatttaccccagagargagaaagcacaaagacattttgtgtgttataaacatgtgcacaaatatttataatagcttttatgtataactgcccccaaatggatacaacccaaacgtcctctgacaggttaagggataaacaaattttgttatgtccatacaatggaatacggctc

SEQ ID NO: 413567 - DNA, 561 bp, Homo sapiens
tcattattggctgaattatgcttgttagagtaaccctaaatgacatttcccctttctaattatctttcaccctcatatcaattattcaaacagctccttcacagtacctagtcaatccctcattcaacctccccccatctgtttcacctttgacctatttactcaagacatgcatttttctttatgagcacacttatcttgcagttatatcttttttcatattttttaaactgtgcaatacactagccccatttttggtttagttattattttcattgcttatcttcactgtgcagtcacttcttccaaaatatacctctcagatacaccctttgtaagcgatccaataactctgccaggctccacttaatcactctaactacccctagcacatttacttttgttttatgtagttgtacagggataccytaaaaaggcaaatctctcctgcccctgccactcattagagagatattctctagcttcagatgtccttgaccgttcactgcagaaaagtgtaaaagttcacaacctgagaatgagggatcataatgatgtagg

SEQ ID NO: 413568 - DNA, 558 bp, Homo sapiens
acaaaggacaaaaatgaatgtctgaagagagtggagcatcaccttccaaattcagagggaagatttgtaatctagagtcccagataaactagaattaagatggcaagcaattaaaatggatagtaattgcttctcctcaccacagtctttaaaggtgtgccttttctataactttcaacatgatgaattgtgaagactattataaaaaacagttaggaaagtggtacaaaatgtcaattttaaacagtgtctcatgtagagtaggtggccaaaaatagcaccttttaaatgtgttttctccttttctaatgtggatgcatacactcactacttctctcctttcccccagacctgtaaggctctgccctaggcttgcatcttctaatgttagaacctggataacttgtgagtataaaataagaaaaaattcaaacataaaaatttaaaawattgattatccatatacttgttcttaggagttgctaagggatacgcttcatcacagcagaattaaaaaaaaagaaaagaaaagagaaaaaatgtgggttgaaatagcac

SEQ ID NO: 413569 - DNA, 604 bp, Homo sapiens
ctcatgttaaaagcagaacctttaatgtacacaaaaaccctcagtgcccttttttactaaagtaatattttattggaaactatagctcttctctccatcagtatataaattttatttctctatcctcaggagatattgtactaaattgtgaatagtatcatggaatttcccaagtcttttgagtaaaattttacatatgctttctccagaaacatgacagttttgatttctcaaaaaatccttgggtagatagaatataaaattttacatgctattatatgtgatcaatatctgattagtttttatgttatcacttcaaaagaaggcaataccttattagggtcttctgcagggtttgataatgcaaatattccaaaacttccaagaatctgaaatctgaaacacttttggttccaagcattccataagaggtatacttagcctgcactactaagcaataaaraggaacaaactactgatacacgcagtaaccggcatgaatctccagaaaattatgcggagtgaaaatagtcaatccgccaaagtttatataccatgtgattctactcataaaatattttttcaaatgacattataggaatgg

SEQ ID NO: 413570 - DNA, 604 bp, Homo sapiens
ctcatgttaaaagcagaacctttaatgtacacaaaaaccctcagtgcccttttttactaaagtaatattttattggaaactatagctcttctctccatcagtatataaattttatttctctatcctcaggagatattgtactaaattgtgaatagtatcatggaatttcccaagtcttttgagtaaaattttacatatgctttctccagaaacatgacagttttgatttctcaaaaaatccttgggtagatagaatataaaattttacatgctattatatgtgatcaatatctgattagtttttatgttatcacttcaaaagaaggcaataccttattagggtcttctgcagggtttgataatgcaaatattccaaaacttccaagaatctgaaatctgaaacacttttggttccaagcattccataagaggtatacttagcctgcactactaagcaataaagaggaacaaactactgatacackcagtaaccggcatgaatctccagaaaattatgcggagtgaaaatagtcaatccgccaaagtttatataccatgtgattctactcataaaatattttttcaaatgacattataggaatgg

SEQ ID NO: 413571 - DNA, 564 bp, Homo sapiens
tattcggcctccactcagttttgattgaatacatgcctgcagttagcatctgtgtgtgtatttaccactgggtgattttaatatattattaagaagaacttttctatctatggttatattttaggagagtaaaaaaagcaagttttttagtattttgaaaggagagaaaaatgagtaattaaacttaaagcacattgtttgcatactatgtacctgacaatttgtttggaaaccaggaacacaaagataaataagayaagggatgtgtgtatattaaaacggagtttggcaagtgccgtaacatacatgtaacacatgtaggatgaaagaggaataaacaggtaactctaggcaggataacaaaaggttactttaaagaaaatggggagaagttttttttctatgcccagagagcaacatatgcgaaggcttagagttgtaaacacattgttaaggcatttccaagaaagtttagtgcaacagaatacaatggtatcttggaaggagctgtgagtaggcatttttagacattgttagatgattgagaatggaattaatgacatg

SEQ ID NO: 413572 - DNA, 535 bp, Homo sapiens
gttgcctcagtgaatctttttgccttgagtaataaaaatcaccaagtactttaaatcaaagatttattagtaacttaaaactaatttttacagaaatttaacgctaaaaaatttgaatagttttctcagcataaaattttgcactgactgaagtgcactgaatttttcactgaaatagtgcactactttgaaaaacagyttggctgtttcttataataataaacacacccatcacataatctagcaattccatgcctagatatttacccaagaaaaataaatacatacatccacaataaaatctgtttgtgaatgttcagagttgcttcactcgtaacagaccatcataggaaataacctaactatctatcgcctggtaaatgaattgtggtacatccataaaatggaatacaactgaacaacaacaagaaataaattactgatacatgcaatatcatgaatgagtatcaaaagctttacgtggaagaatccagacacaaaaggcttttgagccaacttatatgacatctagaaa

SEQ ID NO: 413573 - DNA, 507 bp, Homo sapiens
agaaaatgttattcctttgagaggctgaatgacataccgggtgagactagtcaactaatgtaatgataggagaagttttgtgtcttttgggggaaaggatgtgtaaattttttcctctgcagtcatggaagaaaggtatcttggcttcagtagaggtgagggatgctgtcctagaaggactatgttgttgtgagctaaatrtccgacacctgcatttaagggggttaaaatataatgatagtagactcttcaaaactttgatgaaataaatggatgaatatgggtagggttgcaactagttatttctgaccagacagaaacatcaatcatcatactgttttcgcatttatctgatttgattatggttagatttcaaggaggttcttgattttactctaggcatcctgtgctattactaaattctatgaaaattatgttttagatctaagaattaagaaagaaaaactttttatctgaggaatgcaagctccttttaatttaggccca

SEQ ID NO: 413574 - DNA, 586 bp, Homo sapiens
ggtgataaagtattcagaacaatgatattttctaggttttctgtgtttctggacaacgatctataccatggatgttatatttcatattacattggcaattccaacatagagccagccacrgagataagatagttataaaataactaaagtatagctataagtaaacaaactagtaaatgcataatagtgggagaggacagaaaatactgtaaaatgcaaataacaggaggtcaatgaaaagtgggtaagtttggatctgaaccatgagacaatcctaccatttaaattgttgaaagaagggaatgagtgcatatagcctatgccaaagaacaggcgtggcaatgagcatggagcagatagaatacatatggatgggaaaaaaatgagtctatgagagaataactagcaaggcatgttcaacctgctggtgccaagctagggtgatttgttaagataaggaacagacacccgttgaaaattcttaaattgtaaaaatgatgtaaaaattgttcttgaatagatctagggtaaatttggcaactctgaacatgtgggtagagatcagtggcatgaacgaatcatgcca

SEQ ID NO: 413575 - DNA, 586 bp, Homo sapiens
ggtgataaagtattcagaacaatgatattttctaggttttctgtgtttctggacaacgatctataccatggatgttatatttcatattacattggcaattccaacatagagccagccacagagataagatagttataaaataactaaagtatagctataagtaaacaaactagtaaatgcataatagtgggagaggacagaaaatactgtaaaatgcaaataacaggaggtcaatgaaaagtgggtaagtttggatctgaaccatgagacaatcctaccatttaaattgttgaaagaagggaatgagtgcatatagcctatgccaaagaacaggcrtggcaatgagcatggagcagatagaatacatatggatgggaaaaaaatgagtctatgagagaataactagcaaggcatgttcaacctgctggtgccaagctagggtgatttgttaagataaggaacagacacccgttgaaaattcttaaattgtaaaaatgatgtaaaaattgttcttgaatagatctagggtaaatttggcaactctgaacatgtgggtagagatcagtggcatgaacgaatcatgcca

SEQ ID NO: 413576 - DNA, 646 bp, Homo sapiens
tggtgtttgtgtcccacaggggaacatgagtaccttaagagagatgagagtgaaaaaagcaaatgagttatgagaggtccggtgtactaaaataaagtctttgaccttggtagagtgtgtgagagaggacaccatttttaggaagaagagacaaaattagctgcttttcaattaagaagttttactctgacagtagtgtacaaataggatagaagtggaggatgaagaggcaaagactataataatgattcaggtgtgaaatcaaagtgtggtagtggtaatagctctatgcaaaaaaagacaaatgtaggcacagaaatgacaagtattgtctgctgataggatgcagagaggaattgccatagcacagggagaagggagaatcccgagttgaactttcttatttataggttaggtgattggttgtgaaaatgcgggacatggaagataatttttctttaagttttttttttcaattttggaaagagggaaaggagtatgggttagagttcagttctggatgtaatgagtctgmgttttccctaagatattctaacatgtgaattaggatttatttctctaacacttaggagctttgctgagcttcaccgtgcactgagtcctttaagagacttcagaatcagca

SEQ ID NO: 413577 - DNA, 550 bp, Homo sapiens
tctaacatgtgaattaggatttatttctctaacacttaggagctttgctgagcttcaccgtgcactgagtcctttaagagacttcagaatcagcaccatgaaagtgctacttaaagccatgtgtctttcgatttgtctgtggggagagagtgaggataaaaagagaactgggataccactataaaagggaastatatatataaaggaaaaagatctacttgtaacataaaagttccactttttccacacagcaaaactaatttgagagtttatagctgcctgtttgctcaatgcaaaaattcaattacatgtgtagaataatgaatctttgcttaatagtacattttactgaactcattattttttctactatgaattttgatataaacataagtttaaaaattctattttatttaatttaaagcttaaaggtaaactgataatgacagcctgtagctggagctccagctgtggaggaaattcttggcagctaccaacagtggccttcaatcttcaggattagacccataagtaactccatctttgtcac

SEQ ID NO: 413578 - DNA, 565 bp, Homo sapiens
cacccttaatctagggggcacaatctaatcatcttccatcaaatataaagcaggcagaaaaacatgaaaaagtgagatgrgtctagcctcccagcctccatctttctcctttgctggatgcttcctgccctcaaacattggattccatgttcttcagtttggggactcggactggcagtccttgctcttcagcttgcagaaagcctcctgtgggacctagtgatcatgtgggttaatgtttaataaactcatatatatatatcctattagttctgtccctgtaagagaaccctaatacagtattatattaaacagaatattttaaacttcatatgcatgtatgtttgtatacatatgtacacacatgtacctatatgtatataatagaaaattagtaaattataataaaatatttaggaattaagattttcaaagtaagaataaaaagatcacaatatgaaacttaaaaagttaagtaaatatagtaaataaacttatgatgtatttttcccttttaaagaaatgtactttttagctcatgccactgaaaaggcctaaaagcaat

SEQ ID NO: 413579 - DNA, 565 bp, Homo sapiens
cacccttaatctagggggcacaatctaatcatcttccatcaaatataaagcaggcagaaaaacatgaaaaagtgagatgggtctagcctcccagcctccatctttctcctttgctggatgcttcctgccctcaaacattggattccatgttcttcagtttggggactcggactggcagtccttgctcttcagcttgcagaaagcctcctgtgggacctagtgatcatgtgggttaatgtttaataaactcatatatatatatcctattagttctgtccctgtaagagaaccctaatacrgtattatattaaacagaatattttaaacttcatatgcatgtatgtttgtatacatatgtacacacatgtacctatatgtatataatagaaaattagtaaattataataaaatatttaggaattaagattttcaaagtaagaataaaaagatcacaatatgaaacttaaaaagttaagtaaatatagtaaataaacttatgatgtatttttcccttttaaagaaatgtactttttagctcatgccactgaaaaggcctaaaagcaat

SEQ ID NO: 413580 - DNA, 533 bp, Homo sapiens
acttgcctctagctaacagaatgaacaaagatgatgaggtgccactttcatgattaactacaaactctctatgagcaggttttagtgagaaagattctcctgctggccttgaagatgcagactgctgtgacgtgaactacctaggagagagggtcgtgtggcargaaattgtatgtggcatccaagactagacagtggcctccagctgacagttgataataagctgtgcctttagtctcacagccacaagagaatgaattctgacacccacctaaatgaatttggaagcagattcttctctagtcaagcgtgcagataaaaattcagtacagctaactgcttgagttcagccttgtgataccctgagaaaaagactgagataagtcatgcctaaatttctgacccacagaaattatggacgtgtgtgtgtgtgtgtgtgtgtgtgtgtgtgtgttttaagagactactttgtggaaatttgtcacacaaaaataggaaactattatagactcgaaatactttttatcactaag

SEQ ID NO: 413581 - DNA, 620 bp, Homo sapiens
ttgttctgaacactgtaaacaattgtaccacaacagtaagtatttttgtgtctaaacatatctaaacaaagaaaggtaatatattgctctatgatgttatgaaggctatgatgtcaataagcaatgggaatttttcagccccattagaatctcatgggactaccgttgcatatcatcattcactaaaacattattacgtggtatgtgactgtgtgtctatataaacatataagtatatatttatatatgttcacacatatatgcattttttataaaccacttaataagttatagatacgacattttccccctaaacatttcagtgtgtttttctaaaaataaggacattctgttactaagccacrgtacaatgataaaaaccaagaggagatagtcatataatagaatgaactgtttacagactttatcaaattttgtcatttgtctcaataatgtctgttataggaaaatgaaatctctcattatgcattgcttttagttttcatgtctctttagcatcttttaatctgtaacagttcctcagtcttcttttgtctttttaatgacagcaacatttttttaaaagtgcagtagagttgtgtttttttcttctattgaat

SEQ ID NO: 413582 - DNA, 592 bp, Homo sapiens
tgtgtaaggtaggtcacgatgtactacgggtttataaacttggtaacttcattcaataaaataaagcaaaacaaaagtgagtaaaggctttatatmcacagaatttaattgaaatattaccgcattctttgctttccaagttactaaaatccacatatgttgaaaaagttagtaacatagttcttttttaatggccacgatatcccccatgatgcttaaggaattcctcggcagcctttacactgaggctataagaaccagccacatgagagaagcagtgctaaaccaaggtaaggttgaacttttcagatacaccatactctaatggaagcatcatgaagacctgctggatagagagtatttagtggtccaatagcgctgctgttgaggacctttcactgtggaaaaagggggcctctgttaccttgtttataaatgaaatgtactgcaattatctcaatatttatttcttgctgagcatgggagttattgggagcaagtgctgatgaagtgcaatgttatttatctctttttgctttacaatagaaaattaaattaaaatgatgttaaattgctgcttaataaaaaatga

SEQ ID NO: 413583 - DNA, 624 bp, Homo sapiens
tggcataaactattcactaatatttttggccttgactacacctctgagacaggtgcactaaaatctaaaccattcccatagctggtacgtgttactcagactacatgtagtaactgagaactgtgtcatcatggggaggaaaactaattatttccagtaccctcacccaagtttaagagtgtgcaaaaacatacctgctagattttaatagggctggtgttttcaaagctctctgtggttatgtgatcatgtctataaaagaatataaaatttattgaagttggtaaagttacaaacctacaaaatgaaaggaatgagattcaatgacttaacattgacatatttcagaagcagtttccaaccaatgaaaatggaatttgtgattttaaaactttaatacacatttgggaagaagactgaatataatttayatccttccactgctggttattatggaacctacagggcaggactgtggaagtgggtatgtctagaataagaagaaaaatactgatagaatccaggtgtgagtatagatttagagccagataactcttaaattcctaattagtggccaaggagtcagacagccaggaagattgtggcaaagtaaagaatattgaa

SEQ ID NO: 413584 - DNA, 588 bp, Homo sapiens
tgtttcagccaactgactttattaaagctttctcatctacgaggcatgagaatatgtttgtgaatctgtttctcttttgtttggcagtgagaagtgcaattgctctttaattagaaccttctgtgtaccataaatatggtttaacccaggtgtttaatctacctccaatgcaagtgcaaattggtgacatgagtcaaatgacaattttatttaattatcagacaagttaggaatagctaaacgccagccaccatcaattcactgagttaaggatctttgctaataattacagcaaaagagaggggagtaataaagggagtgtactggaaatcacagtagacaagatcatgagactaaatgctagacttgatgattctgacaatatttatctgtatgggaatggccaaatcttttaagattattggaacttggtattcttatctgtaaaaattaggactattatttctaaaatatttcaccatataacttayaagattatacccagctctcagatcctgtaattctaatcaacacatagaaagacatgaaaaaacagaaagaagtagacgaatatttattaggtcggct

SEQ ID NO: 413585 - DNA, 437 bp, Homo sapiens
tgataaaataccagtatctttcctactttcttcatggatggatatttttgtgaggattctttttactgtgatgtaaaatatagttgtgaacttctagaagcagttgactactaacagatatcaatacctattttaaaagtcccacagtttaatttactagattttcttttttgcttctttagattcagagaaattcaatacacagtttctgaaaacccatytccactcagaactaatcactcttctaccatcctctcatgcaatctccacattttgctgcagtggaattattatcagctcctttatagagaggaagaaactgagacacttaaatatttaataacaaggcagttctcattcagctagtaagagatgaagccaggattcacaccaagagagtctaaatatggagctcatgtttttatccattaagatat

SEQ ID NO: 413586 - DNA, 617 bp, Homo sapiens
ggacttacagttttatttacagttctaagttttgggataaaggttataatagcctcagaaagcaattgttgagcagcattcattttctggaataacttcacttaatgaaagtattttaagtgaaggtggtctttgatttccctttgaagttctgatggttatttgcatattctagcctttgtgccaattttgtccttttatattactcaagaagtgcgtgagttttgtctaggttatttattgacacatgatattctttcatttctagaaactatgtctgtagctcaaagtcctttttcctttmgtacattatttcgtttattttgcttatctctttcttgtgatcagtcttgtctgagtaccctttccacaaaacagtagttatgagtttgggttacagagtcattctgtcatgtatcagttccattgatcagatttgtgacattaggcaacttatgtaactattctatgcctctgttttctcaattgcaaaatgggtgtaataatagtccctaaagcagaggattgttgaaaggattagttaatatgtgaaaagtgtttagaatagtgcctgacactttgtaagtgttcagttaatgctatttgctattagtagt

SEQ ID NO: 413587 - DNA, 548 bp, Homo sapiens
gtcagtcagttgaataacgtataacaactataagaaagtattataattaaaaaaatagctttattgagtgataaggttcacacttttaaaggttaacttcagtggaataatgaagttttaaagggtgctaagttaaaactgatagccagctttcattattagtgcttcccagtaacrcaaaagggtcactttactcaaacaaaacatgttagtattcagttcagtgttctgtgtctatatgaaaaaatcccattttttaagtggtcaactttactgtttttttcttttcttttcttttaatcttggcatttaccaatttgaagaaaactttgaaaaatgattttcagccttaatttttttaacatatttgatagccagtgttaatcaggaatgggcagatttcatcaataatcccacatactattttagcacttatattttagaattttagacctgtgttttctttcgtgttgaaaccaaaatatagttggagtttcataagtgtaggtactttaggaaatattacttctctgagcctgtgtttcctc

SEQ ID NO: 413588 - DNA, 548 bp, Homo sapiens
gtcagtcagttgaataacgtataacaactataagaaagtattataattaaaaaaatagctttattgagtgataaggttcacacttttaaaggttaacttcagtggaataatgaagttttaaagggtgctaagttaaaactgatagccagctttcattattagtgcttcccagtaacgcaaaagggtcactttactcaaacaaaacatgttagtattcagttcagtgttctgtgtctatatgaaaaaatcccattttttaagtggtcaactttactgtttttttcttttcttttcttttaatcttggcatttaycaatttgaagaaaactttgaaaaatgattttcagccttaatttttttaacatatttgatagccagtgttaatcaggaatgggcagatttcatcaataatcccacatactattttagcacttatattttagaattttagacctgtgttttctttcgtgttgaaaccaaaatatagttggagtttcataagtgtaggtactttaggaaatattacttctctgagcctgtgtttcctc

SEQ ID NO: 413589 - DNA, 548 bp, Homo sapiens
gtcagtcagttgaataacgtataacaactataagaaagtattataattaaaaaaatagctttattgagtgataaggttcacacttttaaaggttaacttcagtggaataatgaagttttaaagggtgctaagttaaaactgatagccagctttcattattagtgcttcccagtaacgcaaaagggtcactttactcaaacaaaacatgttagtattcagttcagtgttctgtgtctatatgaaaaaatcccattttttaagtggtcaactttactgtttttttcttttcttttcttttaatcttggcatttaccaatttgaagaaaactttgaaaaatgattttcagccttaatttttttaacatatttgatagccagtgttaatcaggaatgggcagatttcatcaataatcccacatactattttagcacttatattttagaattttagacctstgttttctttcgtgttgaaaccaaaatatagttggagtttcataagtgtaggtactttaggaaatattacttctctgagcctgtgtttcctc

SEQ ID NO: 413590 - DNA, 627 bp, Homo sapiens
cgtaaagtctaatcataaataattggaccatgtggtgtttggaattcttttttatcttttcaaccattagtccatttctacaactaagcaaagatcaattttaagaaaaatcgtaaaatcataatttgccctttactaaaaccatacatatattcatttcataccataactatatgtaacagttcatcaatatgaccaattttggaaattaaaatgagccactcttgatgtgtggagaaataaataacttttgttacactgaayggaaaataaatatgacctattcattcaacatcagttcattaaaatattagtgatatgccccaagcttagtcagcagtaagctaggttgaaatattatagtgtaataaattatttaataaatttatttcttaagattgaaatcttaaaatacctcagcaattattcttccaaaagatgaagtagagaaacacatgaaataaactgatgatacagactttattgtaatgttaaaactaacagtaatagctaagaaacttaagtttaaaaaatggattagttgacattgtcttattctaagatcaaatcctttggaatgatggaacatttcatatcactccaacttttttggtttttgtttttaac

SEQ ID NO: 413591 - DNA, 627 bp, Homo sapiens
cgtaaagtctaatcataaataattggaccatgtggtgtttggaattcttttttatcttttcaaccattagtccatttctacaactaagcaaagatcaattttaagaaaaatcgtaaaatcataatttgccctttactaaaaccatacatatattcatttcataccataactatatgtaacagttcatcaatatgaccaattttggaaattaaaatgagccactcttgatgtgtggagaaataaataacttttgttacactgaacggaaaataaatatgacctattcattcaacatcagttcattaaaatattagtgatatgccccaagcttagtcagcagtaagctaggttgaaatattatagtgtaataaattatttaataaatttatttcttaagattgaaatcttaaaatacctcagcaattattcttccaaaagatgaagtagagaaacacatgaaataaactgatgatacagactttattgtaatgttaaaactaacagtaatagctaagaaacttaagtttaaaaaatgrattagttgacattgtcttattctaagatcaaatcctttggaatgatggaacatttcatatcactccaacttttttggtttttgtttttaac

SEQ ID NO: 413592 - DNA, 591 bp, Homo sapiens
tcaggatttcagcctttggggatgcaacagtgaataagacatggggcctctgttctggagaactctgagattagaagaagaaatagatgaattacacaatgtgataaaaggggagaagagtcaaaatgaggaacacagtgaacccgggtagggaggcagatgattaattcagtccaataacacaggtatcatagagaagggattatgctgtgggtattgaagtataaacaggasttttccaggtagacaacttggaaagaccacagcatttcaatttggaaaagagcaagctcacaggtaatgaagtaaaatcatgtattatggctgaagcttaaacatcaagggggaaagagagtagataaatctagagaagtaggtaagggctttggatattattctgaggaaagccagtgaagcattttgtttgtttgtttaactttgttttgaaaataaatataagcgtacagaaaagttgccacaataaaaaagattatacaacatacctgtgtaccatttatctactgttaacattttgccccatttttcattccccctctctttctttccatatatatatatgtaatttttgaa

SEQ ID NO: 413593 - DNA, 604 bp, Homo sapiens
tctctgtgtcacattttggtaattcttacaatatgtcaaacttcatattattactgtatctgttatggtgatctgtaatcagtgatctttgaggttattatggtaattgtttgggggtgccatgaaacacgctcatataagatgactaagatggcaaacttcatggataaatgtgtgtgtcctgactgctccaccaaccagccattmcctcatctctctccctctcctcaggcctccctatttcctgagacataacaatattgaaattaggccaattaataactgcgatggccaggtgctgtggctcacgcctgtaatcccatcactttgggaggttgaggtgggcaaatcacatgagcttgggagtttaagaccagcctgggtaatgtggaaaagccctgtctctaccaaaaaccccaaaatcagccaggtgtggtggcacacacctgtagtcccagctccttgggaggctgaggtgagaggatcacttaagcctgggaggcagagaggttggcaacaaccagcctgggtgacagagcaagaccttgtctccaatatatatattataatatatatatataataatatataaattatatatagt

SEQ ID NO: 413594 - DNA, 610 bp, Homo sapiens
ttcatattatgggtaccccagtttgaatttctaagagttacaaaaaagattatttctaagagtttatacaaaaagtttataaaaccatttacaggtcaatacagcatatgagcatggacccacacaacccttatttaccaagcagtaaataaaataaggtgtttcaataaagttaaaaaaactttaccaaacaacaacaaaggttttgttttttaggcaactgaaactgctgtaaaacatattagagctacagtgaaaagacaaaaacgtaaacggtgataatactactactgtatgcaaataaatattagtcaagttccacaatagggatttgatattttaagaaataacattgctattatgaaagtattacaagacaaagtttaaaaaaaaaaacaaaccagccaggtgcagtgtctcacgcctgtaatcacagcactttgggaggctgaggcgggcggatcacaaggttaggagttcgagaccagccyggccaatatagtgaaactccatctctaccaaaaatacaaaaaaattagccaggcgtggtggcaggcgcctgtaatcatagctactcgggaggctgaggcaggtgaatcacttgaaccta

SEQ ID NO: 413595 - DNA, 476 bp, Homo sapiens
tctcactttttacccaggtgatgcaatcttggctcactgctacctccacccmctgggctcaagcaatcttcccgcctcagcctcccaagtagctgagactacaggtgtgtaccaccatgcctggctaatttttgtatttcttgtagagacagggctttgccatgttgcccaggctgctgtcaaactcctgggctcaagtgacccacctgcctcagcctcccaaagtactgggattacaggcttgaaccactgctcccagctccttatttctttgaatactttttgagccccatcttctttttcttctctttttgggactctgatgacataaatattgtatcttttatttagtcccacaggtctctgaggttctgtttattttcttccaatgtattttcattctgttgtttagattgggtaatttctattgctctgtctttaaggtccttgattctttcctttgacctttatcttct

SEQ ID NO: 413596 - DNA, 577 bp, Homo sapiens
gcattgaacctgtagtttgctttagatagtatggacattttaacaatattgatttttccaatccatgaacatggaatatcttttcttttttgtgtgtgttcctttcaatttattttatcagtgttttatagttttcattgtgaagatttttcacttttttggttaattctgtgaaaggaaaatcagtcttgggaccccaaaatcactaagacaaacaggaaagtcaagctgggaactgtgtcagacaaacctatctcctattttattcctaattaagatagctacaagattttttttttaagctacatacctccctcaaawtttgcccacaagatcttgaccctaaaacagttctgttgaatttcaccctggtaatataaattgatagcttatcttcacggatgagagataaaggacagaactaaaagttatcctgatgctcagctgagacaaatacatatctgattacctcctctgctctattatttatgtaaaaaatgtagattcactgagccagactaaggcataattgactattcctctacccacctctcacatgtaacttgtgtgttcagtg

SEQ ID NO: 413597 - DNA, 688 bp, Homo sapiens
ttggcattttgataaggattgcattgaacctgtagtttgctttagatagtatggacattttaacaatattgatttttccaatccatgaacatggaatatcttttcttttttgtgtgtgttcctttcaatttattttatcagtgttttatagttttcattgtgaagatttttcacttttttggttaattctgtgaaaggaaaatcagtcttgggaccccaaaatcactaagacaaacaggaaagtcaagctgggaactgtgtcagacaaacctatctcctattttattcctaattaagatagctacaagattttttttttaagctacatacctccctcaaaatttgcccacaagatcttgaccctaaaacagttctgttgaatttcaccctggtaatataaattgatagcttatcttcacggatgagagayaaaggacagaactaaaagttatcctgatgctcagctgagacaaatacatatctgattacctcctctgctctattatttatgtaaaaaatgtagattcactgagccagactaaggcataattgactattcctctacccacctctcacatgtaacttgtgtgttcagtgaaaggctgatcaaagactaaaaagaatgcaactatttgtgtcttacccacctataacctggaagcccccacttccagttgtcccacctttc

SEQ ID NO: 413598 - DNA, 620 bp, Homo sapiens
ctgaactgaaactatctcttgcaaataacactctgtgttggggtaagagaaggaaccacttacttttacatattacttttcttttttcttttttttttttttttttttttgtttgagacagtgtctggttctgttgcccaggctggagtgcagtggcatgatctcggctcactgcaacctctgcctcccaggttcaagcgatcctcccaccccagcctcctgagtagctgggactacaggcatgtgcccccacatgcggctaatttttgtatttttagtagagatgggttttcaccatgttggccaggctgggtcttgaactcctgacctcaaatgatccacctgccatggcctcccaaagtgctgggattacaggcatgagccaccacgcctggcctacrtatttcaaatgtactttctaacaacgaatgcgagcacttcaagcctttacatcttttctgctggcacacatttccaatagcaactggggctgctgttgagggaagcacagtttgtgcattgcagaaaggcacccagccaatggaacaaaagggagcaaagacccagttcaagctctactagccaaatcatgtacccacagggctgcatcacccagaggg

SEQ ID NO: 413599 - DNA, 620 bp, Homo sapiens
ctgaactgaaactatctcttgcaaataacactctgtgttggggtaagagaaggaaccacttacttttacatattacttttcttttttcttttttttttttttttttttttgtttgagacagtgtctggttctgttgcccaggctggagtgcagtggcatgatctcggctcactgcaacctctgcctcccaggttcaagcgatcctcccaccccagcctcctgagtagctgggactacaggcatgtgcccccacatgcggctaatttttgtatttttagtagagatgggttttcaccatgttggccaggctgggtcttgaactcctgacctcaaatgatccacctgccatggcctcccaaagtgctgggattacaggcatgagccaccacgcctggcctacatatttcaaatgtactttctaacaacsaatgcgagcacttcaagcctttacatcttttctgctggcacacatttccaatagcaactggggctgctgttgagggaagcacagtttgtgcattgcagaaaggcacccagccaatggaacaaaagggagcaaagacccagttcaagctctactagccaaatcatgtacccacagggctgcatcacccagaggg

SEQ ID NO: 413600 - DNA, 585 bp, Homo sapiens
atttaaaatatgctgtttccttagcactgccttaagtcattcaggagacagtttctgggaatgaagtccaatagatctttttcataaactggaacaaagtaatatctcatttttcaggagttaaaacctttccctccccatcctggacatgacatatatactgggatctatttcaaccagaggtcacataaccagccttccaggtacctttagaaactcatgtttccccagcttagcaatgactcagtagacagcasggagtattaatggccttaaatgccatactggcgccaagggtcatattgtcattatttattaaacattttatttacccagagcctaagttgttgtaactacattcttatgtagggcatggcttgagtcagaaatcttgtcattaggttagaagagataccatttttcatttatgaggttgaagctacagatctatcatgaaaatatctggtacatagtaagtattcaataaacatctgtcaaatgaaataatgagttcactaaactagtgcacaggcttaaatttggtttctaagtaactgtgacagttctacagcattttgaacacaa

SEQ ID NO: 413601 - DNA, 378 bp, Homo sapiens
aaaaaacagaaaattatgggccaccatgaaacacatgaacatctaaatgttggcagttccggtaggagagaagagaaggaatgcttgaggaaataattgccaagaattcccaaattcaatgaaaacttttaatttacacatcaaaaaaccctgaaataatagcaagtagaataaactcaaagatttttcacacctagaaacatcataatcgaaatgtcaaaaacccaaattaaagaaaaaatcttgaaaggaggaagagagaaatggcttgtcatgtccaaggaatcctcaataaaattaacagcaggtttctcacaagaaatcatggcrggcagaagggagtggatgacatgtttacagtgcttaaagaagatgact

SEQ ID NO: 413602 - DNA, 569 bp, Homo sapiens
aattttatttatttatttatttttgtttgtttattttttgagacagagtcttgctcgtcacccaggctggagggcagtggcgcgatctcagagcactgcaacttccgcctcccaggttcaagtgattctcctgcctcagcctcccgagtagctgggattacaggtgcccaccaccatgcccagctaatttttgtatttttagtagagacagggttttgtcatgttggccaggctggtctcaaatgcctgacctcaagtgatccacacatctcagcctccgaaaatgtcaaaattataggtgtgagccgtcgtgcctggccagaagaaatttaaaaaataaaataaagtaagtgaaattctcttcatgaaaaatacaaataacctatgaactcaaccactcaaattggtatacaaatrtcttttcttttctgtgcataaaatatgcacataataaaaatatacagaatttttatttttcatactgtataatatacaaattatctaatattgatttaattaattaataacataatttctttccaaggttgatatttatagaacacaagact

SEQ ID NO: 413603 - DNA, 635 bp, Homo sapiens
cacagtagaatattatgtatcaaaggaatattcaatttactgctatgtaacacaacatgaataaatctcataaacatcatgttaagcaaaatatttccatcatacacctagagaccctacaatatgttcttctattcatataaagttaaaaatcaggtaaatctgattcacgaaatcttgggaaatgaatgacagttagtgattggaagcagatgcaaggagacttttggraatgttgctaatttccattcctgttcaccttttgaaattttatagagtggagcacgtaatttgtgtactttttgtatttatggtatactttatcaattaatactttaaagttttaaacattgctcaaaatcgtttttccgtccccctaggaagaaagcacatcctcctagagggatcacactctttgaagagttacctatcaatgtcaaggactaggcatttttttacatctcctgacttttatcaggttctcctctcatgtattctttcgtactctacatggtgttttagaaaagaagtactatatttttcttttccatcacctgcctaaatcccacctcttctgcccaaactcagatgcagggactggaagctaattttcctaaccctttccaaagaaaggt

SEQ ID NO: 413604 - DNA, 635 bp, Homo sapiens
cacagtagaatattatgtatcaaaggaatattcaatttactgctatgtaacacaacatgaataaatctcataaacatcatgttaagcaaaatatttccatcatacacctagagaccctacaatatgttcttctattcatataaagttaaaaatcaggtaaatctgattcacgaaatcttgggaaatgaatgacagttagtgattggaagcagatgcaaggagacttttggaaatgttgctaatttccattcctgttcaccttttgaaattttatagagtggagcacgtaatttgtgtactttttgtatttatggtatactttatcaattaatactttaaagttttaaacattgctcaaaatcgtttttccgtccccctaggaagaaagcacatcctcctagagggatcacactctttgaagagttacctatcaatgtcaaggactaggcatttttttacatctcctgacttttmtcaggttctcctctcatgtattctttcgtactctacatggtgttttagaaaagaagtactatatttttcttttccatcacctgcctaaatcccacctcttctgcccaaactcagatgcagggactggaagctaattttcctaaccctttccaaagaaaggt

SEQ ID NO: 413605 - DNA, 635 bp, Homo sapiens
cacagtagaatattatgtatcaaaggaatattcaatttactgctatgtaacacaacatgaataaatctcataaacatcatgttaagcaaaatatttccatcatacacctagagaccctacaatatgttcttctattcatataaagttaaaaatcaggtaaatctgattcacgaaatcttgggaaatgaatgacagttagtgattggaagcagatgcaaggagacttttggaaatgttgctaatttccattcctgttcaccttttgaaattttatagagtggagcacgtaatttgtgtactttttgtatttatggtatactttatcaattaatactttaaagttttaaacattgctcaaaatcgtttttccgtccccctaggaagaaagcacatcctcctagagggatcacactctttgaagagttacctatcaatgtcaaggactaggcatttttttacatctcctgacttttatcaggytctcctctcatgtattctttcgtactctacatggtgttttagaaaagaagtactatatttttcttttccatcacctgcctaaatcccacctcttctgcccaaactcagatgcagggactggaagctaattttcctaaccctttccaaagaaaggt

SEQ ID NO: 413606 - DNA, 539 bp, Homo sapiens
aaagggattctgcaaaggtgcagtgttgagtttttcaaactctttcaaacagaaggcaagggtgaaataagggttgagaaaatgaaatcaagaaagttcccctgagcctggaggtgtgaagtcgcattgctgtragtacgcaggctccctcctgctttctgccctgttatcccagtgacctccccttgttctctttgtcagtgttagcgagtagagctggaaccatcaatcccacattcctggcacctggtgaaggaagtggctaggagagatggggcctgagatgtgagcctgctgtctggtaaagtggtcttgaggaagctgtccccaacattcccatctacatctcattatctagaccttagcatctagataatatctagacctagagggcacaccaagctctcgaggagaaaaatgtacagaaaatgaaggctttgtttctattcaaacaaataatttgagaagggatctgacattgatttagccttgacaacaaccaggtactgcacttggcactttccatttgctatttgatt

SEQ ID NO: 413607 - DNA, 543 bp, Homo sapiens
caggagccacagtaaggcctgtgcctccctttcagatagcatcccagtgcttttaattatcagaactaaattcacatttagaccttgtctaaaagggattctgcaaaggtgcagtgttgagtttttcaaactctttcaaacagaaggcaagggtgaaataagggttgagaaaatgaaatcaagaaagttcccctgagcctggaggtgtgaagtcgcattgctgtaagtacgcaggctccctcctgctttctgccctgttatcccagtgacctccccttgttctctttgtcagtgttagcgagtagagctggaaccatcaatcccacattcctggcaccwggtgaaggaagtggctaggagagatggggcctgagatgtgagcctgctgtctggtaaagtggtcttgaggaagctgtccccaacattcccatctacatctcattatctagaccttagcatctagataatatctagacctagagggcacaccaagctctcgaggagaaaaatgtacagaaaatgaaggctttgtttctattcaaa

SEQ ID NO: 413608 - DNA, 575 bp, Homo sapiens
tgtgcaagttgtctcagatagaaaggatgaggcccttgccaataaagaaaagatcatcaggttgtgaccatgattgccgaacaacaagtaaataaataatcaactctgctagtcattatttttctaatatatgatgctgtccaacagacacaactgtagttttacatttcaatgtatacagtgtacaaatgagttccagaaactacaaaatcataatattttcagaggtatattagatactaataaattaatatagaaaaataaatatttactactttgaactgtttatttaaaatcctggaattaataagacactatgactttcatttgagataacgtatatatctataaattatatggcaaaaactgggtctratttccagattcgtatgagatttatagatcagatttatgaaaatgcaattaattccagcatatctttaatcttaatatatttttctccatgaatagtttgataaaacccatgaaagtaatattagttcttgaaagagcaaatatttgagggaattactaatattaaataaaacacattttccaagtgtgtcatctagaca

SEQ ID NO: 413609 - DNA, 575 bp, Homo sapiens
tgtgcaagttgtctcagatagaaaggatgaggcccttgccaataaagaaaagatcatcaggttgtgaccatgattgccgaacaacaagtaaataaataatcaactctgctagtcattatttttctaatatatgatgctgtccaacagacacaactgtagttttacatttcaatgtatacagtgtacaaatgagttccagaaactacaaaatcataatattttcagaggtatattagatactaataaattaatatagaaaaataaatatttactactttgaactgtttatttaaaatcctggaattaataagacactatgactttcatttgagataacgtatatatctataaattatatggcaaaaactgggtctaatttccagattcgtatgagatttatagatcagatttatgaaaatgcaattaattccagcatatctttaatcttaatatatttttctccmtgaatagtttgataaaacccatgaaagtaatattagttcttgaaagagcaaatatttgagggaattactaatattaaataaaacacattttccaagtgtgtcatctagaca

SEQ ID NO: 413610 - DNA, 598 bp, Homo sapiens
atgatatgatctattaaggaagacttgtgagtttgtggacttttttgttcttcttgcctgtcattaactcttacataagttgctcttcatgaatttttttctctttgcctttctttggatcctctataccttctcctataaatatgtcattacaccagatgttgtcaaatctgattttcttatttggcatttgagttccttgtttattagaactgctgccaacacagcaaaattcagagtaatctttcaggtttgaattgcccatatgcaatttggacagcatgtggattatgcttagtgtagactgtgacatgaattcagtttctytgaagttaattgtcagctcttacagctatagtgactgcagaatagtcagcaaaatgctgcaatcaccaccattaagaaattttgaatgactgcctttagatgctgcataaagcttattgatgtgggggaaaaagatcattttggaatactgaacatttatcatggtactattgccaagtttctaattatatcttaaggcatgcctttgtgaaagaaactccacagaactgaatctactgtcaaattccactgatgttgttaacaagaaatg

SEQ ID NO: 413611 - DNA, 470 bp, Homo sapiens
catggtgaaactccatctctactaaaaatacaaaaatcagctaggtatgatagtgcatgcctgtaatcccagmtactcgggaggctgaggtaggagaatcacttgaagctgatcctgggagggggaggttgcagtgagccgaaatcatgccattgcactccagcctgggcgacagagcaagacttcatctcaaaagaaaaaaaaatagattaacaaaaatattttgaagttggtacagagaattccaatataaccaacatgtgtttcccctggtagcaaaattatacattattagggtacatttgttataattaagaaccaatattgatgcaccattaaataaagcccacactgtattcagctcaccctagttgttctctaatatcccatttctgttccagcatcccatccactgtagcacattcgattcagcagacatggcttttgggcttcccttggttatgagtttc

SEQ ID NO: 413612 - DNA, 470 bp, Homo sapiens
catggtgaaactccatctctactaaaaatacaaaaatcagctaggtatgatagtgcatgcctgtaatcccagatactcgggaggctgaggtaggagaatcacttgaagctgatcctgggagggggaggttgcagtgagccgaaatcatgccattgcactccagcctgggcgacagagcaagacttcatcwcaaaagaaaaaaaaatagattaacaaaaatattttgaagttggtacagagaattccaatataaccaacatgtgtttcccctggtagcaaaattatacattattagggtacatttgttataattaagaaccaatattgatgcaccattaaataaagcccacactgtattcagctcaccctagttgttctctaatatcccatttctgttccagcatcccatccactgtagcacattcgattcagcagacatggcttttgggcttcccttggttatgagtttc

SEQ ID NO: 413613 - DNA, 616 bp, Homo sapiens
tgtaatggcgattcagacacatattcagtacacaaattaatcatttcctcaattgagtacagctaatccaaaatgtttaaaggtatatatgataagagctgaatagattgggcaccaagttactctcatacaccagtgacttcagctattatatctgaaacattcactcttcagcacaaagcaaccaagagagcagggaaattgccagaaaaatcagggttaacctcatctttggataatactcacttgctatgtttgtcagtttaaaatttactactgaaggtatctatggtgtcaagaattacaagaatctcaaaaagagttcatcatttactctttcattagatggtatattagtcagggatttccagggggacagaactaatagaaaaaatatatatatatgtaaatatatataatactaaataaactcaatatatatacagaataaaaatatatataaaatatatatataaaatgctactcaataaactctcttcatatatatatatatatatatatatatatwttttttactatactaatactcttgtgagtattaattcacatgatcacaaggtcccacaggaggctgtctccaagctgaagagcaagg

SEQ ID NO: 413614 - DNA, 558 bp, Homo sapiens
cctaatggatctcctgtattccatgcgtactcttccttacctctgttgtggaaaagtagactgatttcatctcgatagtgcaggtaaatcccaccagcaaacactgtaactcccttcttagcctgttgacttaaaggtaggaggagcccaaagtgtccaagtggcaatcttaacttccagtctaatgaaaccactgttgtgtctcctggtggcagyattcctccctctaggccagcagaacataatatcacagaaacaagaagcaaaaattttgctagtggatcaccacgggtgatggtgagtggtgccacttccacttccaccccttgatgcctagacccaagaatcctggctgtgagagaaacaataccatatattggatgctaattcagagcatacacagatttctggagaactttgccccagtcctgcaaagtattgtcaccgagatggcactgtaaatgtgacttcaaaaggccattccaccattctatcaattcagctgcttgaggatgatgaggaacatggtaagaccagtgaattctataagcaggagcc

SEQ ID NO: 413615 - DNA, 558 bp, Homo sapiens
cctaatggatctcctgtattccatgcgtactcttccttacctctgttgtggaaaagtagactgatttcatctcgatagtgcaggtaaatcccaccagcaaacactgtaactcccttcttagcctgttgacttaaaggtaggaggagcccaaagtgtccaagtggcaatcttaacttccagtctaatgaaaccactgttgtgtctcctggtggcagcattcctccctctaggccagcagaacataatatcacagaaacaagaagcaaaaattttgctagtggatcaccacgggtgatggtgagtggtgccacttccacttccaccccttgatgcckagacccaagaatcctggctgtgagagaaacaataccatatattggatgctaattcagagcatacacagatttctggagaactttgccccagtcctgcaaagtattgtcaccgagatggcactgtaaatgtgacttcaaaaggccattccaccattctatcaattcagctgcttgaggatgatgaggaacatggtaagaccagtgaattctataagcaggagcc

SEQ ID NO: 413616 - DNA, 576 bp, Homo sapiens
aatcttcttgttcctctctcaactgatcatagggaactccgcatgaggccatcggtgcagactgagggagagaaggcagggtggcaggagtggggaccatggacatttgagtcacttccttatgttacttacttgtgccttcaggacttgctcaagcccaaccatgtgtataccacttccatttgatgatttgatgatggaatgctgctgtgcatgacctactttatggctagatgggtcagaaagcacccagatcctgatagacagttcaggtcacacggtggcttgatgacatattgtcaaacattcagtttccaccaaagcccagtaataggcaaagaactgtctttcagaaggagagtagctatctaaagaagatggcagggccttgctcgaaaatcccagagkcttctgctgtgattcacctatgggggtctgcaaaaggctccaacagcatccctatccaccactagcacctcaagcatcattggatctgctggctcataaagcctaagtggcagagcagcctggacctgttgcagagtcttatcctgttctggaccccactcaaaactg

SEQ ID NO: 413617 - DNA, 576 bp, Homo sapiens
aatcttcttgttcctctctcaactgatcatagggaactccgcatgaggccatcggtgcagactgagggagagaaggcagggtggcaggagtggggaccatggacatttgagtcacttccttatgttacttacttgtgccttcaggacttgctcaagcccaaccatgtgtataccacttccatttgatgatttgatgatggaatgctgctgtgcatgacctactttatggctagatgggtcagaaagcacccagatcctgatagacagttcaggtcacacggtggcttgatgacatattgtcaaacattcagtttccaccaaagcccagtaataggcaaagaactgtctttcagaaggagagtagctatctaaagaagatggcagggccttgctcgaaaatcccagagtcttctgctgtgattcacctatgggggtctgcaaaaggctccaacagcatccctatccrccactagcacctcaagcatcattggatctgctggctcataaagcctaagtggcagagcagcctggacctgttgcagagtcttatcctgttctggaccccactcaaaactg

SEQ ID NO: 413618 - DNA, 541 bp, Homo sapiens
ggatctaatcatattaagtagccaactccagaaaccccaaaaccaatgaaagaactccattcttaatattctgttcctctagaaccactcctggtaccaaaacctgtattaatcagggttctgtagaggcacagaactaataggttatacatatacctataaagcggaatttattaagtagtattaactcgcacgatcacaacatcctgcaatagactatctgcaaacttaggagcaaggaagccagtccgagtcccaaagcggaagaacttagagtctgatgtttggaygttcaagggcaggaagcatccagcacaggagaaagatgtaggctgggaggctaagccagtctacccttttcatgtttttctgcctgctttatatcctggctgcactggcagctgattagatggtgcccacccagattaagggtgggtctgtctttctttctcagcccactgactcaaatgttaatctcttttgacaacacccccacagacacacccagaatcaatactttgcatccttcaatgccatcaag

SEQ ID NO: 413619 - DNA, 541 bp, Homo sapiens
ggatctaatcatattaagtagccaactccagaaaccccaaaaccaatgaaagaactccattcttaatattctgttcctctagaaccactcctggtaccaaaacctgtattaatcagggttctgtagaggcacagaactaataggttatacatatacctataaagcggaatttattaagtagtattaactcgcacgatcacaacatcctgcaatagactatctgcaaacttaggagcaaggaagccagtccgagtcccaaagcggaagaacttagagtctgatgtttggatgttcaagggcaggaagcatccagcacaggagaaagatgtaggctgggaggctaagccagtctacccttttcatgtttttctgcctgctttatatcctggcygcactggcagctgattagatggtgcccacccagattaagggtgggtctgtctttctttctcagcccactgactcaaatgttaatctcttttgacaacacccccacagacacacccagaatcaatactttgcatccttcaatgccatcaag

SEQ ID NO: 413620 - DNA, 567 bp, Homo sapiens
attctttacagtgtttcaatttgcctcatgctctatttctctctggagactccaacctacattagagacccgctggatttaactgctggaatttgtttagaaaacagtccatttagctctactttctggggtcaaatacaatacgcaatgaatccttataaataggtggaggtgtgcggcatataggcctggatgtttcagaagtmatcagtgcattagtttcgtagtgattttccatggacatctgctggtccttgcagctgttgactgggaattgcaatttctctggatctcatgggtcagcaccctctgtgcagcagcaaactcagacatcctcaggcttggatttgctctattctagtctgtctgttgatttgataacatctttcttccttattaaaacccttggaaatgcttggtttgctggttgtatccattcttatcttccaatagttgtataatggtcatgaaaaatattttccctgctctctaaactctaggtagaaagaaaagagaagcaagcatgttggctcaatctattatcttgagcagaaaacatgtttagac

SEQ ID NO: 413621 - DNA, 478 bp, Homo sapiens
acctcacaattccttggcctcctccacccagtgacatttgcttccagcttaattcagcttcacctttctttaggctcacccttgacattggtgtcaccacaactatttcatcactaaagtaaaaaaaaaaaatactgtttttgttcatacttcacgatctatcacaacaagcaagacttttcggctgaaaggaacttctaaaatcgttgtgaaaaataaaattacatatttacttttccagataaaatgactgatataaaacaggctatcaatgttaatttgtttctttgcctaaaataaatccaacatttaattgcttttttcccccacaatccaatttgcactcagtctggggtgcaccttgcttgatggtgaggttgaaaagrgagcactgtgacagtagagataggagctgaagatctcttaaaggctcagctctggcctcagtcacattgtattagtgaaaataaggccaggc

SEQ ID NO: 413622 - DNA, 628 bp, Homo sapiens
gcaattttagcctaggaaactagtcaagaattaaagagacatcaaggttgaagaggaagtggtaaaattctctctttgcagatgatatggtcatgtatatataaattctaaagaaaacacaaacattactagagctcataaggctagtaaggctgcaagatataatataaatttgtttttgttttgttttttgtgacaagktcttgctctatcaaccaggctggagggcagtgatactggattgtggctcactgcagccttgaacttctggcctcaatcaatcctcccagcttggcctcccaaagttgtgagtttacaggcataagctacgatgccttaccttgaatttttaaaaaagtgttgtatttctatatcctatccataaacaatccaaaaatgaaattagagaacaattccatttacaatagcatacaaaacaatacttaggaataaatttaacaaacataattagtgaatggaaagacatctcatgttcatagatcaaaagatttaaaattgttaagatgacaatactttccaaattgaatagaattgagagattcaagaagcaaatttctacattaatcctcaattgatttttgataaatatctatacaattcaacagag

SEQ ID NO: 413623 - DNA, 628 bp, Homo sapiens
gcaattttagcctaggaaactagtcaagaattaaagagacatcaaggttgaagaggaagtggtaaaattctctctttgcagatgatatggtcatgtatatataaattctaaagaaaacacaaacattactagagctcataaggctagtaaggctgcaagatataatataaatttgtttttgttttgttttttgtgacaagttcttgctctatcaaccaggctggagggcagtgatactggattgtggctcactgcagccttgaacttctggcctcaatmaatcctcccagcttggcctcccaaagttgtgagtttacaggcataagctacgatgccttaccttgaatttttaaaaaagtgttgtatttctatatcctatccataaacaatccaaaaatgaaattagagaacaattccatttacaatagcatacaaaacaatacttaggaataaatttaacaaacataattagtgaatggaaagacatctcatgttcatagatcaaaagatttaaaattgttaagatgacaatactttccaaattgaatagaattgagagattcaagaagcaaatttctacattaatcctcaattgatttttgataaatatctatacaattcaacagag

SEQ ID NO: 413624 - DNA, 628 bp, Homo sapiens
gcaattttagcctaggaaactagtcaagaattaaagagacatcaaggttgaagaggaagtggtaaaattctctctttgcagatgatatggtcatgtatatataaattctaaagaaaacacaaacattactagagctcataaggctagtaaggctgcaagatataatataaatttgtttttgttttgttttttgtgacaagttcttgctctatcaaccaggctggagggcagtgatactggattgtggctcactgcagccttgaacttctggcctcaatcaatcctcccagcttggcctcccaaagttgtgagtttacaggcataagctacgatgccttacsttgaatttttaaaaaagtgttgtatttctatatcctatccataaacaatccaaaaatgaaattagagaacaattccatttacaatagcatacaaaacaatacttaggaataaatttaacaaacataattagtgaatggaaagacatctcatgttcatagatcaaaagatttaaaattgttaagatgacaatactttccaaattgaatagaattgagagattcaagaagcaaatttctacattaatcctcaattgatttttgataaatatctatacaattcaacagag

SEQ ID NO: 413625 - DNA, 574 bp, Homo sapiens
ctccatagtgctttgttccccttccagtgcatgtgtcaggggacagaattttccattgcaagcatgtctgggyaagtcacctgcattgcctttcttatctgtgtggctatgtgcatagttaggcaagccccccatgcaagtttccttatctgtgcctgctacttgattttttaggctattcttttgtttgaaagaattcaatcaaggacccaaccactgtaactgcctgatcgactggtttcctcctttcttctctatcaaaaagacttgtatccagaatatataaaaaaacacaacataacaataaaaagacaaacaactcagttttaaaaatgggccaagcagttgaatagacacttacctaaagaatacatatgaatgttaatagcgagtatatatattaataaattctcttagtagtcattaaactgccttaatattattttcactctttaatatttaattattgaatatagatttctgaactgaccattactttattcaactatttcaaatatattattctgataacttctagcttctgtatttcaagatgctctcattacaatgtttg

SEQ ID NO: 413626 - DNA, 561 bp, Homo sapiens
agtatatatattaataaattctcttagtagtcattaaactgccttaatattattttcactctttaatatttaattattgaatatagatttctgaactgaccattactttattcaactatttcaaatatattattctgataacttctagcttctgtatttcaagatgctctcattacaatgtttgttctcctttaagtggcctatattctctttataggactctaatctttttcattatgcttccgttactasatgcatccagggatgaatttagttttatttatcttttccaggatgcagtgtgctttattctatcttaaaatgtactattttctcatttcaaaacaattttcagggtttttttttaatatacttttttcaatatcttttctttggaagttttagttttgtgaaagaaaaaaaccaaccctgatttctaactcttgtaaacaaaaaattaaattctaaagcctttcctcttggctaagggcattcattatacattaacatcaacacagcattaacttcaacacagactttaagtctgataggaaacattta

SEQ ID NO: 413627 - DNA, 561 bp, Homo sapiens
agtatatatattaataaattctcttagtagtcattaaactgccttaatattattttcactctttaatatttaattattgaatatagatttctgaactgaccattactttattcaactatttcaaatatattattctgataacttctagcttctgtatttcaagatgctctcattacaatgtttgttctcctttaagtggcctatattctctttataggactctaatctttttcattatgcttccgttactagatgcatccagggatgaatttagwtttatttatcttttccaggatgcagtgtgctttattctatcttaaaatgtactattttctcatttcaaaacaattttcagggtttttttttaatatacttttttcaatatcttttctttggaagttttagttttgtgaaagaaaaaaaccaaccctgatttctaactcttgtaaacaaaaaattaaattctaaagcctttcctcttggctaagggcattcattatacattaacatcaacacagcattaacttcaacacagactttaagtctgataggaaacattta

SEQ ID NO: 413628 - DNA, 561 bp, Homo sapiens
agtatatatattaataaattctcttagtagtcattaaactgccttaatattattttcactctttaatatttaattattgaatatagatttctgaactgaccattactttattcaactatttcaaatatattattctgataacttctagcttctgtatttcaagatgctctcattacaatgtttgttctcctttaagtggcctatattctctttataggactctaatctttttcattatgcttccgttactagatgcatccagggatgaatttagtwttatttatcttttccaggatgcagtgtgctttattctatcttaaaatgtactattttctcatttcaaaacaattttcagggtttttttttaatatacttttttcaatatcttttctttggaagttttagttttgtgaaagaaaaaaaccaaccctgatttctaactcttgtaaacaaaaaattaaattctaaagcctttcctcttggctaagggcattcattatacattaacatcaacacagcattaacttcaacacagactttaagtctgataggaaacattta

SEQ ID NO: 413629 - DNA, 561 bp, Homo sapiens
agtatatatattaataaattctcttagtagtcattaaactgccttaatattattttcactctttaatatttaattattgaatatagatttctgaactgaccattactttattcaactatttcaaatatattattctgataacttctagcttctgtatttcaagatgctctcattacaatgtttgttctcctttaagtggcctatattctctttataggactctaatctttttcattatgcttccgttactagatgcatccagggatgaatttagttttatttatcttttccaggatgcagtgtgctttattctatcttaaaatgtactattttctcatttcaaaacaattttcagggtttttttttaatatacttttttcaatatcttttctttggaagttttagttttgtgaaagaaaaaaaccaaccctgatttctaactcttgtaaacaaaaaattaaattctaargcctttcctcttggctaagggcattcattatacattaacatcaacacagcattaacttcaacacagactttaagtctgataggaaacattta

SEQ ID NO: 413630 - DNA, 514 bp, Homo sapiens
tgacactggaaatttgctttatttggttgacatttatgtgtgtgtgtaaagagtaatttccacatgacctttgtctatcacatggatttccaattgtttttcccatctgaatgcttctactcatctttcaatactccgtcatcgcttgatttcacgaggatgaggatagccatctctggccatgtgcttgacataggctgtgtttttgagcycctcctcttgttcccatgggtcattgtgtgtacttctagtagtccactatatcaacattacaatttattattttagcttgtctgcactaccaaattgtattttgcctggaattaaaaaagaaatatttgctatcttttcaaacattgtattttctttattacatatgtgaaactcaggtttatatatattttaaattcctagcataactaatgataaattgtttgcaagtaatatcctatcttgagaaaaattaagatgttgacattataatgtcatatctccacaataatctttgttttcc

SEQ ID NO: 413631 - DNA, 617 bp, Homo sapiens
gagcccctcctcttgttcccatgggtcattgtgtgtacttctagtagtccactatatcaacattacaatttattattttagcttgtctgcactaccaaattgtattttgcctggaattaaaaaagaaatatttgctatcttttcaaacattgtattttctttattacatatgtgaaactcaggtttatatatattttaaattsctagcataactaatgataaattgtttgcaagtaatatcctatcttgagaaaaattaagatgttgacattataatgtcatatctccacaataatctttgttttcctctaggcactcaatctctcagggatgcagtaaaagacccttcatgaaggacagcctcaacttccagatcaatttaacttcaaagcctctgacattggttatttctcaagagctgtgattttttcttctgttgcagtcatagttggtctaaaggtaataatttcctgggcaggaatccaattctgtaaccatctctgtcagcatgccgattttgtattgtacctccaagactcatcaacataagctcagatagttctaccataatacttatatgtgctcttaagctaaagcatcagaaacaaaattaacaa

SEQ ID NO: 413632 - DNA, 617 bp, Homo sapiens
gagcccctcctcttgttcccatgggtcattgtgtgtacttctagtagtccactatatcaacattacaatttattattttagcttgtctgcactaccaaattgtattttgcctggaattaaaaaagaaatatttgctatcttttcaaacattgtattttctttattacatatgtgaaactcaggtttatatatattttaaattcctagcataactaatgataaattgtttgcaagtaatatcctatcttgagaaaaattaagatgttgacattataatgtcatatctccacaataatctttgttttcctctaggcactcaatctctcagggatgcagtaaaagacccttcatgaaggacagcctcaacttccagatcaatttaacttcaaagcctctgacattggttatttctcaagagctgtgattttttcttctgttgcagycatagttggtctaaaggtaataatttcctgggcaggaatccaattctgtaaccatctctgtcagcatgccgattttgtattgtacctccaagactcatcaacataagctcagatagttctaccataatacttatatgtgctcttaagctaaagcatcagaaacaaaattaacaa

SEQ ID NO: 413633 - DNA, 586 bp, Homo sapiens
aaaggttatgcccttttcctatttgcaggacaaaaatccacacaaatacaaggcacactagtgatgttaaactgggcattatttatgccacaattaaaagaaaattaagtgctctggaaactgwgtgttatagttttagatatttatgggcaaaagtttaagatttgcgtaaaatttttaaatgagtatgacatactaatatgtccctctttttcttgccaagagattatgggtgatatatactgtgagcatatctgcatatgccaaacacagtaattcagaattttactttgtagtgaaggttcaagtaaaatagatctcttttgatgagacgtactacacaccctgcatcttttgcctgggaaaattttttactcttatgagctatatttggattttggggctgctcataaaacaaaataaataaaatgactattttaaagccagtttcatagagtgaccattaacaatttatcaaatatacagcaaggcaatttaaattttatttccaatttcaagttgttaatttgaagataaagcctactagaatgtaaaaattgaaaaatatcaaattcacaaattactt

SEQ ID NO: 413634 - DNA, 521 bp, Homo sapiens
tcaatagactactgttgattgtaaacctcactgataacataaacagttgattaacatgtattttgtgtattaaatactgtattcttagaataaagtaagctagagaaaaaagttatttaaaaaatcataaggaacagaaaatacatttkactagtcattaagtgaaagtcaatcatcataaaggccaacattctccttgtcttcatattgagtaggctgaggagtaggaggcagaggaggagttggttttgctgtctcagtggtggcagaggcggaggaaacctgcacaaaagtgagccccagtagttcaagcctctgttgttctagggtcaacagtataaatcagtattatattattataataacaaattcctattaggtgagttgaaaactttttaagttttcttaaataataattataaaacttacacatgctccattctcctatcttctgagctctcccccctctataattctccggaataggtaatgtttggagaagaaagaagaaaagatggaga

SEQ ID NO: 413635 - DNA, 521 bp, Homo sapiens
tcaatagactactgttgattgtaaacctcactgataacataaacagttgattaacatgtattttgtgtattaaatactgtattcttagaataaagtaagctagagaaaaaagttatttaaaaaatcataaggaacagaaaatacatttgactagtcattaagtgaaagtcaatcatcataaaggccaacattctccttgtcttcataytgagtaggctgaggagtaggaggcagaggaggagttggttttgctgtctcagtggtggcagaggcggaggaaacctgcacaaaagtgagccccagtagttcaagcctctgttgttctagggtcaacagtataaatcagtattatattattataataacaaattcctattaggtgagttgaaaactttttaagttttcttaaataataattataaaacttacacatgctccattctcctatcttctgagctctcccccctctataattctccggaataggtaatgtttggagaagaaagaagaaaagatggaga

SEQ ID NO: 413636 - DNA, 521 bp, Homo sapiens
tcaatagactactgttgattgtaaacctcactgataacataaacagttgattaacatgtattttgtgtattaaatactgtattcttagaataaagtaagctagagaaaaaagttatttaaaaaatcataaggaacagaaaatacatttgactagtcattaagtgaaagtcaatcatcataaaggccaacattctccttgtcttcatattgagtaggctgaggagtaggaggcagaggaggagttggttttgctgtctcagtggtggcagaggcggaggaaacctgcacaaaagtgagccccagtagttcaagcctctgttgttctagggtcaacagtataaatcagtattatattattataataacaaattcctattaggtgagttgaaaactttttaagttttcttaaataataattataaaacttacacatgctccattctcctatcttctgagctytcccccctctataattctccggaataggtaatgtttggagaagaaagaagaaaagatggaga

SEQ ID NO: 413637 - DNA, 521 bp, Homo sapiens
caatgtttagatgttccactactatattctgggtagaatacttgttactaaacttcctctgcaacttttcaackttaatgtttctattcaaagaccatgtggctttgggtggctgcactgtttcaaaatatttcctggattttagtcttttagtgatttcttaagtttacagaacaagattgatgaaattttttatgggcgagctctttgaatcttttcctgatgttaatttttaataatttcattgatttgtatacgttttgaaaagacccatggcatgtggagcatatgggaggaagcttcggttaagtgttcatcagtgaatgaggacgtgtgtgtatgtctggaaattgggcaatcatgctatagggtaccgagaatgcaggagacacagggctcaagctggaatttccaggcagaagggcagtggagacaccaagtcccagcctcttagcaccccataaagagacctgtttgggcttcagtctggttggaggctttctgctccaagaggaagacat

SEQ ID NO: 413638 - DNA, 515 bp, Homo sapiens
atacaatattgtgactggaattataggtcagaatccaactacgactacaattataggcaacaatcttatgaaataattatgtaatttttccccagtaaaggagattctagacacttggagtgaaatggctcatatttgtgtaagataaaaatgttatgtcattgtgtgattgagatgggatttttatacagtgtctaatctaaatattataattgaaatattttaaagtaacattttgctaatagaaaaatctaagaaacaaacaattcccaatattwagaatatatttaaattaatgatggtacaatcatgcgatgtaacattatgtagactttaattatcgtgttttttataatggttagtggataatgtaatacaataattaataatgaaataattaatatggtcttaaattgaaaagtaaaaacacagaatgcaaaactcctctaatgttcagtgtgtgtctttgtgtgggcatgcctatagaaaggaaatgcaccaaaatgtttgcaatg

SEQ ID NO: 413639 - DNA, 515 bp, Homo sapiens
atacaatattgtgactggaattataggtcagaatccaactacgactacaattataggcaacaatcttatgaaataattatgtaatttttccccagtaaaggagattctagacacttggagtgaaatggctcatatttgtgtaagataaaaatgttatgtcattgtgtgattgagatgggatttttatacagtgtctaatctaaatattataattgaaatattttaaagtaacattttgctaatagaaaaatctaagaaacaaacaattcccaatattaagaatatatttaaattaatgatggtacartcatgcgatgtaacattatgtagactttaattatcgtgttttttataatggttagtggataatgtaatacaataattaataatgaaataattaatatggtcttaaattgaaaagtaaaaacacagaatgcaaaactcctctaatgttcagtgtgtgtctttgtgtgggcatgcctatagaaaggaaatgcaccaaaatgtttgcaatg

SEQ ID NO: 413640 - DNA, 506 bp, Homo sapiens
tgtagcagggaatgctgttgctgcaggtctgtgaccacccattgagcagtgctggtctaattcgcttcattcctaaatggttatatccaactcagatgcagcacgcacttgaattccacctctaagacctcacttcatgaattatattttcatttcatcctctcmctgttttagctctttccgccgatactggaaagaccttattaaaaaaaacaacagtaacaatatcccctctttctatctacctcaccctcctttcttgctacagtttctctttgcctctcccagctccactttttccaaccaaactagttgctcgcatcctcagcctctaccttgatcctttcttgtctgataactcatggcatcctacctaatgctgcactgcaatggctctgatgataacatccggccaaacacaatggttcttgctgtccttacttccctgtacctcagtctgattaagctattgtttgtactgtaggtctctactcattcaaactcta

SEQ ID NO: 413641 - DNA, 565 bp, Homo sapiens
tttcagcactttacagatttccaaagaaatgacaaaactgaaacagaaatgagtaagcgcagaaagctccagagagaggagtggcagcaaattcatcataccattagctgycatattttaactaagaaaagtccccaggcatcctcctcaggataccctttatggtgtatttttgcatactttcaatatatatttaaatagaggttaaatacatgtgtagatatggtccccaactgacaacggcttgacttagattttgcagctttatgatggtgtgacagtaatgctcactctgtagacactgtactttgagtaatcatacaaccattctgtttttcactttcagggcagtattcaataaattatgagatatccaacattttgctataaatagggtttgtgttagatggtttgctccactgtaggctaatgtaagtgttctgagcatgtatcatgtttggtaagttagacgtcttgaacgcatttttgacttacaatattttcaactgatgatgagtttgttaggatgtaactccattttaagtcaaggattttataaatatat

SEQ ID NO: 413642 - DNA, 547 bp, Homo sapiens
taaaattaattggtaaacacaaacatatccaaactgtaggcattagctcagtattatgaaaacagtattttttttaataaaaaggaaaataaacatcacgagtttatggcatttcaattgaaatagaaaaacctggaaaatgtaatcaatagcaagctctgaaactrtgggctcccactgactgggccacttgctggcattatcataaaaggtgacactgggcccgaggttgccaggacaccaagaagagggaagaagcctgagtccctgcctccccaggaaatgactgacacccctccaagaaagaaaatgtccaatgccctcaactgccacttacctgtaatggaacgggaataacctcgtttcctcttcccttccttggggccaccgcaaattacgagtggtgggtttttataatttgcctcattgtttgcctctgcctcaatctcttaatattcttatgggactcctgaaagctaaacacaactctcttctcagctctgcccccaggaatcctgttaggaagagattgtctctccacagggat

SEQ ID NO: 413643 - DNA, 547 bp, Homo sapiens
taaaattaattggtaaacacaaacatatccaaactgtaggcattagctcagtattatgaaaacagtattttttttaataaaaaggaaaataaacatcacgagtttatggcatttcaattgaaatagaaaaacctggaaaatgtaatcaatagcaagctctgaaactgtgggctcccactgactgggccacttgctggcattatcataaaaggtgacactgggcccgaggttgccaggacaccaagargagggaagaagcctgagtccctgcctccccaggaaatgactgacacccctccaagaaagaaaatgtccaatgccctcaactgccacttacctgtaatggaacgggaataacctcgtttcctcttcccttccttggggccaccgcaaattacgagtggtgggtttttataatttgcctcattgtttgcctctgcctcaatctcttaatattcttatgggactcctgaaagctaaacacaactctcttctcagctctgcccccaggaatcctgttaggaagagattgtctctccacagggat

SEQ ID NO: 413644 - DNA, 564 bp, Homo sapiens
aaccctggaaaaaaactgtgaagttaggrcgaggatggcaagcaactttcacttccttccaccaacccggactcttcctgatgaaatccctcaggaaggtcagttgcctcagcattcctacaatgaattttctccacttggggtatcccctataccatctctagtggcaaagaatcacatgctattcacagaattatacaggaaattcaaatgacaataaacattacacaaacaccccacttctcttaccaacctcagtccccaagcaccatacaaaaagccaacagcatcctcaacactaatctggctaacctatttaaagaattgcactgaccgtggccaccagtgctgcctgtcactctatgactctgagatcctccccactgtctccacataagttccggccttttcaaattctcacaggtaagggcatgcacatgccttagtcatctgggctagcagaagattctaagggactcatctcacattcttagatactgtggagggcaatgaaatatactcaggactatgattgctgtgtcaaggctgcctcttttagaactt

SEQ ID NO: 413645 - DNA, 456 bp, Homo sapiens
atcaacttaagaacatttccttctatttattccttacttgctgcargtttttatcagaaatgataaaattttttttctttttttttccccgagcttcagctatggaaagaaatattttaatgcctttttattatgaggtcatcatgtggcttttcctttttctagtatgactcctccttccatgtccatttggccttggtatattattactttaatcccctgatagatttgacttgctaatattttaagatttttatatctttattcatagttgagacagatttatagtttttcttaccatccttgtcaggttatgacgttagattgttggatgaattgggactgtttccgtctttttcaatgctctcaaaccacgttagtacaaaaattattttattttttattttttaagacagagtcttgctcttttgtccaggctggagagcagcggcacaa

SEQ ID NO: 413646 - DNA, 417 bp, Homo sapiens
gttggcttttttgttctctgaattgttcaccacaggggtctgggataggaaagagcattagaccagagttcatttgcagcactgatataatgacttattaaacacttgcttacttcttatctgctgtgattgttcctttgttgttgttttgcctttttactgcaacctaaacaacatcttttctggcaaggaaaaatgcccttttagatactgatgactggtagttcaaatccacattcagtgagacagactatactgattaactcactcaaactccacccaaagtcctctcctccccascagtttaacaaggccttgtgacaaagttctaacctaaaacacatcaatgaaattcctgactgtgggaatttggggaaactttggatttcctcataaacaaatcaacaaacatcttgc

SEQ ID NO: 413647 - DNA, 400 bp, Homo sapiens
tacgatggttaatattaggtgtcaacttgactggattgagggatgcctagacgactggtaaagtattgtttctaattgtgtttgtgagagtgttgccaggggagattgatatttgtttcagtggactgggtgaggaagactcaccctcaatgtgggtcacatcctattggctgccagcatagytagaacaaagcaggcagaaggaggtgggataaatttgtttgctgcatcttgtggttctctttcttcttccctgctggacacttgcttcctctcttcctgcccttggacatcagactccaggtactttggcctttggactccgggaatttcaccagtggcttcctgggggctcttgggcctttgccacagaatgagggctgtactgtcagcttcccta

SEQ ID NO: 413648 - DNA, 564 bp, Homo sapiens
acagaactagtaaacagattctttaaaatagctattataaaaatgttcaaggatacaaagaaaaaaatgaacttaaaagaagggaagtgggattttaaaaatgaaccaaaggaaacttctagagatcaatacaatatctgtaatttaaaagttcactggaagagcctaatagcaaatcagacacttgcatttaaaaaattactaaacttgaagaaatagcaataaccrctattcaaaatgaagcacagaaagaaaaacaaggctaagagaaaatgaacagaaactcaatgacctatgggacaatattaagttatctaagttatataatatttgtataactggagtcccaaaaagaggaaggagacagaaaaatagctgaggaaataatggctgaaaactttctaaatttgctaaaaatataaacccacagatccaagaagctcaatgaactccaaataggacaagcataaagaaaatcacataaaggcacatcataatcaaactgctgaaaagtcaatgataaagagagaaatcttaaaagcaagaagaaaaaaagacacacta

SEQ ID NO: 413649 - DNA, 532 bp, Homo sapiens
gggtttcaccatgtcggccggggctggtcttaaactcctgacctcaagtgatctgcctgctttggcctcccaaagtgctaggattacaggcatgagccaccgcacccagcaagaaacccattctttcccagtcaaygccttcactttaacagagtataaaagtgggtcaccggatgagataagataactgtaaaactgggtcacaggatgagattctgcatttgattttcaggaatctcagccctgtggctaaaggagataagactctccctcagggcacatgtggaagctttcagtcatttatgcagtacttgagctggaaatttgaattcctgagctccttcttttctttcaatactttgttcgtgacattaggagcaacaagccaacctaattatattcatgtgatttccagaaatgtttgagagtatcatatgcacaatgatcagctccttgcttcttataagtggttgattgggaacatccaatggagatatttggcatatctctattgccagataacaccgtgaaa

SEQ ID NO: 413650 - DNA, 563 bp, Homo sapiens
ctctctctctctacccctcatatcttcccaggagaagaggaggagtgtttgggagaaagaactaggcttgcaattcagctcctgctccaccctgccttgacctgaatgcaagatgcatgcatcctggtctgctctcagcagcatagggaggcctgcagttgttcagctgtgcagtgaccgaggggcgagtctatctgattcagggatgaaagaatgaagtagtatcctttgtcagtgatcttaagtcatagtctcctatcagctgtatcagawaatatgtccacttccatctctctatttctcaattggttccaaactcagatacggaagagggtgccctctaaaacctcaagaacatctgtgaggaatattttcctgtaaaagaggttggatcacataactctaaaattgctgtatatgtagaattcagtgactcttacttttcagatacttctaggaccttctaacttaatgtctcattgacatttcaaattcactgaatccaaaattaagtttctctttccccaaaaccagttgactctcccgacattactgcacatcat

SEQ ID NO: 413651 - DNA, 602 bp, Homo sapiens
taaaacctcaagaacatctgtgaggaatattttcctgtaaaagaggttggatcacataactctaaaattgctgtatatgtagaattcagtgactcttacttttcagatacttctaggaccttctaacttaatgtctcattgacatttcaaattcactgaatccaaaattaagtttctctttccccaaaaccagttgactctcccgacattactgcacatcataagtagcactggcttcacattcatcaagatttaaaaggttaaagtttccaaataataggtaaattggaaatgtccttatcatgattccaaagcaatgcygacaccagagagtggtgggtgaaagcctagctgtgactgccatgacctagtaagaatgtagggcaaagagagagagccaaagccaacatctggaggtacagtcagaccagagccaacatctgggtgtgaggagagagcaagaaacctatcctgaggatagagaaataattcccagagaaaagaaacaggaaatgtcatgccacagaagcccagaatcaagtgctactgaaaaagcaagacaagaagggatcataggcaatcagatttgatgattaagaaat

SEQ ID NO: 413652 - DNA, 600 bp, Homo sapiens
cagcctctgtgcttgggttaaattcctagctgcgagtggcagtcattttcaagtcccaacctcctttctattctttctcccaccatctcctcatacttgtctgatactctagccagatggagctgcttcctagtctctgaattttccacattccctctcacctttttctgtgtgtagaaagccccacccacctccttttgtttgagtgatgtatcagctctcatgaaggagagttctgyctaggtttcacttttttgtgaagacttctccttgatgcggagctggagaggccctcttctgaccctaatccagactgcatttcattgcagtagtttttgtactttcctgctcaccttgacctgggaggaatacagtgaggtgaagagggcataggcttttgtcatagacaaatctggcttcgagtctccctcctgttggttagtgctgtgaacatggccaaatcacttaccctctttgagttggctttctcatcagtaataagggtaaggctgtccacctcatcatgggatgctatacatgaaacccttagctcctttcccggtgagtggtagcagctgttagtagggatggaaagccttg

SEQ ID NO: 413653 - DNA, 596 bp, Homo sapiens
gagcctgcttctttttctttcagacactgtttttacatcatgttctccagcagttatttgaagataaatatgttttgagtgtgagggtatattggggtctggaccaatgctatgtgaccataattgtaggtttggatttgtgaactcaattctacaagaatatattcagagcttattgtgtacctagtagcatccaggatttctggtgggatagtgaaataaagggaggactcttgcctgtagaagtttaactgttaggtggggagacatttatttataaaacaacagagtatgatatgasacaatttataatcaagtattgaatcatgtggtggagattcttaagaggtacagaaattcttgtaagaaattgtttcttatgtgccaaggtgaagttaatcaggaaaggtattttagaaaaagtgaatacaggttgaactgtgccttatctgaaaccctcgtggctggctctgtttcaagatctaaaatatttcagattctagggtggtaatgtaatgtatgtattatatagcatccccaatcacctctggggaggcacctcataaaacaagcacataaattggatattcacaaaa

SEQ ID NO: 413654 - DNA, 596 bp, Homo sapiens
gagcctgcttctttttctttcagacactgtttttacatcatgttctccagcagttatttgaagataaatatgttttgagtgtgagggtatattggggtctggaccaatgctatgtgaccataattgtaggtttggatttgtgaactcaattctacaagaatatattcagagcttattgtgtacctagtagcatccaggatttctggtgggatagtgaaataaagggaggactcttgcctgtagaagtttaactgttaggtggggagacatttatttataaaacaacagagtatgatatgagacaatttataatcaagtattgaatcatgtggtggagattcttaagaggtacagaaattcttgtaagaaattgtttcttatgtgccaaggtgaagttaatcaggaaaggtattttagaaaaagtgaatacaggttgaactgtgccttatctgaaaccctcgtggctggctstgtttcaagatctaaaatatttcagattctagggtggtaatgtaatgtatgtattatatagcatccccaatcacctctggggaggcacctcataaaacaagcacataaattggatattcacaaaa

SEQ ID NO: 413655 - DNA, 554 bp, Homo sapiens
aaaacctccaagaaatgtgagattacattaagtgaccaaatctaagaataattggcattcctgaggaggaagaggaatctaaaagtttggaaaacatatttgggggaataatctagtacagcttccccagccttgctaaagacctaaacatccaaatagaaggagctcaaagaacacctggcaaattgcaaaaagatcattacctaggcacattgtcatcaggttagctaaagttaagatgagggaaagaatcttaatagctgtgaggcaaaagcattaggtaatctataaaggaaaacctatcagattaacagcagatttctcagcagaaaccctacaaggtagaagggattgggtccctatctgcagcctccttaaacaaaacaattatcagccaagaattttgtctccagcaaaactaagcttcataaatgaagaaaagatastctttttcaggtaaacaaatgctgagagaatttgccagtcctaagacagcactataagaactgctaaaaggagctccaaatcttgaaacaaatcctgaaaacacatca

SEQ ID NO: 413656 - DNA, 500 bp, Homo sapiens
aacaaaccaaaccaaacccaacagaatgaaggaaataaccaaggtcagagcagaactaaatgaaattgaaacaaaaagaaatgcaaaagataaatgaaacaaacagctggttctttgaaaagataaataaaattgatagaccattagcaagattaaccaagaaaagaagagggaagatccaaataagctcaattagaaatgaaatgggggatattacaactgacaccacagaaatacaaaagatcattcaaggctactatgaacacatttacgtgcataaactagaaaacatggaggatatggataaattcctggaaagagacaaccctcctagcttaaatcagaaagaattagaaaccctgaacagaccattaacaagcagtgagattgaaatggtaataaaaaaattaccarcaagaaaaagtccaggaccagatggattcaagttgaattctgccagacattcaaagaagaattaataccaatcatattgacattat

SEQ ID NO: 413657 - DNA, 566 bp, Homo sapiens
tattaaagacaactttgttaacatcagtattttaaagtcttcctatgcttctcctgtgattattcgtgcccttgggcaatgcactatagcagcttgacagggctgaaaggtgcctttcagtaaattgggaatggagaattttgaaaggagagtgcagtaggaaaggagaattagcataatgtcctaatcttgggcttattctttggtagatcagttttggaatagagtgtatatggaaggtgagaatctgggaattgagttcttaaaactatgtttacccatgtatcctttgggaagtcctcacatagcatccccgaggtgcctgcacctttgttacaatagcttagtgaatggcaacaccatctacccaattgctcaagctagaatcttgggtgtcattcccaactacatcatctcacctctcctcatarccagtcaccaagtcctggcagctttactccttaattcctagattgaccatacagttcactcactaatccaggatacttttgagagtgaaaagggacactgttaataactaagctgggaccactggtgtaaacagg

SEQ ID NO: 413658 - DNA, 616 bp, Homo sapiens
cttaccacctctgtcactgcaaaacaagtgatctgtaatgttactgagtgaaagaactctcgcctggactgtgtgggcagctcaytgggaggcgagggccttgacaagagcattcccacacctccccttcccacgcctgcatgctccctccttctcttatgaaaggcctctcctgctgttcattttaaccagatttaacttacatttaaaaaaaaagaaaaagctttactgagatattaggaagttagattgaaaattcttattgggattataagaaacaacaggtacaggatatttttaatgtgctggcagctactaggtgctgtttagaatattcttgtctggttagaggtatagtggtgtagtatgtaataaaaggaggcatattatatgaggatttgagttcaaacaatctcatgtgtaactgtatgatggtggatcccatgattttaaaaaattgtttataataaatagcacttctaaaagtagatttttctatttcttcttggttaaacagtgtttaataggaaaggaagagatgatgttcttctggaacattttctgtttagagtgggtgtgccctcttctgagcacagtcatgtgaaacaccatgaga

SEQ ID NO: 413659 - DNA, 616 bp, Homo sapiens
cttaccacctctgtcactgcaaaacaagtgatctgtaatgttactgagtgaaagaactctcgcctggactgtgtgggcagctcactgggaggcgagggccttgacaagagcattcccacacctccccttcccacgcctgcatgctccctccttctcttatgaaaggcctctcctgctgttcattttaaccagatttaacttacatttaaaaaaaaagaaaaagctttactgagatattaggaagttagattgaaaattcttattgggattataagaaacaacaggtacaggatatttttaatgtgctggcagctactaggtgctgtttagaatattcttgtctggttagaggtatagtggtgtagtatgtaataaaaggaggcatattatatgaggatttgagttcaaacaatstcatgtgtaactgtatgatggtggatcccatgattttaaaaaattgtttataataaatagcacttctaaaagtagatttttctatttcttcttggttaaacagtgtttaataggaaaggaagagatgatgttcttctggaacattttctgtttagagtgggtgtgccctcttctgagcacagtcatgtgaaacaccatgaga

SEQ ID NO: 413660 - DNA, 676 bp, Homo sapiens
gacatcccagagacattaggggagtaggggagtaggctggagtcacatctaggagtctctaggtttttaaagtcatgagaccaaataaggtcatttagggagaaacagactgtaattgcagatgagaaggggcaaggctgcagtgtgcagctgtgctaaccatgtgaattgtacatgctggagtaggtgtaactgtgtgggtggtgctgagcagggcacctggaccctgcttacttcgcagctccctgggctggcttgctcctttgtgccagattacttggttagctaaaactacatttatgttcagcttctaggacagagtttaaatgaaccctaacttaaccacctgtatattttaaattactacagtttcaagacatggcaaatttaggattttatttcaagatgaaatgatctcatagtctgtatacagtgatgcctcacttatccacattttaaaaatgtgttgcaacttcacttacccaaaatgtagtcraaactttccagagatctaaggtttcttaagcagcacagattgattattttagagtccactcacgggattcaggactttctcaaggaatctgtgatccctaaaaccatgtttattttcattttaggaagaaatctgaacacattggttattatgtgccctggtcctaagagatttgaaaca

SEQ ID NO: 413661 - DNA, 395 bp, Homo sapiens
tgagaaaagagaaaggagaaggctgtgacccactctatagcagtcatctgcattccatcatacaacataatccaggattctgctgcaagtatgggttttatgatacattataactttcccccttaacacaaaagccctctaaagtgacccaagaaacatttcactgaagtcattttaacatttataaccattcttacttttgttatcactaaagtgttctacaaaagggtaattctttaaaattgcagtaacagtggggcaggggattggcttatgtcctcctgttaacagcctgtttccgattctacaagaatagcctgggaayttaagttatcccacatgagagataaaagctctggagatagagaggttgaaggggagtatggacaaaacaa

SEQ ID NO: 413662 - DNA, 607 bp, Homo sapiens
actgacatcctaaagacaaatcattttttaaataaatgcaatataaataatatcaagtctgacgattcatctcaaacctgatctgatggcttatgatgtttcctaaaagtagcaggtagctttatatgtatttttatttgattattattatttttttttaaaggcaagatttcagaaacctttattttggaaaatatttttggtcaagaaaccctgcccttgaaatctattacttmaggaagccaattcctacctgagtcctgacttcttacaatgcaattggccatatcatttccattagccactttcaaggcttgaaaatgtcctgtacacaagtttcagctggtctagtcagagcccagtgtgagtgggacattcaggggctaaaccctgcagcacctcctggcctaatcaaaggaggttctgcagctgggtaataagagtggtaactttattatagaagaattttattcctttatgttccccatataacttataaaagacaagttatttcatattatatattttcaattcaaacaatcctgactggtgatgtaagaaacaaaaaaatcatgcccaacactttgagaggctgaggtagaaggat

SEQ ID NO: 413663 - DNA, 607 bp, Homo sapiens
actgacatcctaaagacaaatcattttttaaataaatgcaatataaataatatcaagtctgacgattcatctcaaacctgatctgatggcttatgatgtttcctaaaagtagcaggtagctttatatgtatttttatttgattattattatttttttttaaaggcaagatttcagaaacctttattttggaaaatatttttggtcaagaaaccctgcccttgaaatctattacttcaggaagccaattcctacctgagtcctgacttcttacaatgcaattggccatatcatttccattagccactttcaaggcttgaaaatgtcctgtacacaagtttcagctggtctagtcagagcccagtgtgagtgggacattcaggggctaaaccctgcagcacctcctggcctaatcaaaggaggttctgcagctgggtaataagagtggtaactttattatagaagaattttattcctttatgttccccatataacttataaaagacaagttatttcatattatatattttcaattcaaacaatcctgactggtgatgtaagaaacaaaaaaatcaygcccaacactttgagaggctgaggtagaaggat

SEQ ID NO: 413664 - DNA, 213 bp, Homo sapiens
accatgcccaatgctccccaccgaccctsgtctgagctctggatgtttctgtccgaggttgccaccccagcagcctagaaagaaacatgggatcctctctccatgactatgaccatgcccaaggctccctgctgtccctggcccaagctctggatgtctctgtctgagactgcttactcccagctggtctccctgtgttcaccatgtccacct

SEQ ID NO: 413665 - DNA, 496 bp, Homo sapiens
ctctggtcacataatgacccagctaacagaatgaaacacagaaagcacctgatgggatgcagcgagggaacgtgagaacagccactcagcagcagcgttagaaaaggctcctccttggaagggctgtggcatttgtcttctcatcctcccctgtcctctgtacctctcggtctttcctctgtcctttaagccagctccctccttttcccctaatctcccctcttcccccaggtgacacctgaatccygagggccaagaaattccttttgtaggtctcacagaaaccttttattctcaggtcacagtgatttccatttcatatcccaagctgcagctaggagccaccgagtcttaattatggaaactcttatgcaaacctgacgaatgttcgtgtcttctcgtcaggcctatgttcatggtctgatggctctctgggcgtcagccatgtgggaacgagaggaacaggtcccacatggaatctgcccgtgtgatttcc

SEQ ID NO: 413666 - DNA, 496 bp, Homo sapiens
ctctggtcacataatgacccagctaacagaatgaaacacagaaagcacctgatgggatgcagcgagggaacgtgagaacagccactcagcagcagcgttagaaaaggctcctccttggaagggctgtggcatttgtcttctcatcctcccctgtcctctgtacctctcggtctttcctctgtcctttaagccagctccctccttttcccctaatctcccctcttcccccaggtgacacctgaatcccgagggccaagaaattccttttgtaggtctcacagaaaccttttattctcaggtcacagtgatttccatttcatatcccaagctgcagctaggagccaccgagtcttaattatggaaactcttatgcaaacctgacgaatgttcgtgtcttctcgtcaggcctatgttcatggtctgatggctctctgggygtcagccatgtgggaacgagaggaacaggtcccacatggaatctgcccgtgtgatttcc

SEQ ID NO: 413667 - DNA, 496 bp, Homo sapiens
ctctggtcacataatgacccagctaacagaatgaaacacagaaagcacctgatgggatgcagcgagggaacgtgagaacagccactcagcagcagcgttagaaaaggctcctccttggaagggctgtggcatttgtcttctcatcctcccctgtcctctgtacctctcggtctttcctctgtcctttaagccagctccctccttttcccctaatctcccctcttcccccaggtgacacctgaatcccgagggccaagaaattccttttgtaggtctcacagaaaccttttattctcaggtcacagtgatttccatttcatatcccaagctgcagctaggagccaccgagtcttaattatggaaactcttatgcaaacctgacgaatgttcgtgtcttctcgtcaggcctatgttcatggtctgatggctctctgggcgtcagccatgtgggaacgagaggaacaggtcccacrtggaatctgcccgtgtgatttcc

SEQ ID NO: 413668 - DNA, 582 bp, Homo sapiens
ttcatttccctcccatgcatttggacaaacatgtcctttctcagcaaactgattcccaatcagcaggtgccaactataacaacgtcaagaaatgtttatcaggtaccggcatttaatgggattctgcaaaatcaaactggctttgtagctcacaatgaagtctccatttggactaaaaagtgcacgatttgctattctcacttaattttggccaaattaaaagatgcatagaaggctgaggtctgcttttcttgaattcttgccgatagaccagcagtgcacttcagagataagagccacgaagctcagaagacatggagatgcagaagcatgtttggaattcagaatgactatagagattatggaatgtgtgtcattccaagcccaaagccctttgcaatggaatgaaatgctaaaatgaggagcgaaaatctttctttctttttccatcatgtgggagaaaatgtgaagcatgcttatggcggcttccttggaaaagataacatcattacctatgttgtttactatgccaaagctaccctgtgctrgaaaagtaacatactttattacagagaaagcaca

SEQ ID NO: 413669 - DNA, 472 bp, Homo sapiens
aacttatgagcaattagataggaaagagtctcttataatgacttttagtaagaagagagagtaaattcaacctggtacttaaacaaaattaaaaaaattattgatttttcatccatataaatgaacatggggctagggagagccacccccttcccatgttttcccctccttgtgttccaatgtgcctgagccccctcatcattcattcacatgggctgctgctcccatccttcaaaaaagggaaatgtcatctggttgggctggagcagctgcagtttcatgtacattttggaaggcrtggactgaggcttgtctgtgttatttgaggaacatgttatggatggaatgtttgtaccccaccccccagattcctatgttggtgccctaacccccaatgtgactgtgtttggagatggggcctgtgaggaggtgataaaggttaaatgatgtcatcagagtggaccctggtctg

SEQ ID NO: 413670 - DNA, 524 bp, Homo sapiens
ccgcacatttgtgtgtggggactgagtgcttggattgggtttgagtattgtccacagctttctaactgcccagcaatcttaaggctccatttcctcaaatgggaaatggggataacaatagggcccctctcgtagcttgttgagatcattaaatgagataatgtgggtgaaatgtttagtatagtgcctggcacatagtagatgcccagcgaacatgagctgttttcattatttgaaaatgaaaagaagagttttcttacttactgagtacatgtgtggcactggattgtagcctgaaaggggctatgccaagcatggctgmgctaattacaaagtagaggggagccaaatggactcaggaaggtggactattcatggaggatgagggggaaggtggagacctgagtttcaatcctgggaccgccgattatccctggtccctatttcctcactctcaatgtaaaggagcagatctgaggagtggttcccaaatgtcttctttgcaacattagcctgtaagatgt

SEQ ID NO: 413671 - DNA, 524 bp, Homo sapiens
ccgcacatttgtgtgtggggactgagtgcttggattgggtttgagtattgtccacagctttctaactgcccagcaatcttaaggctccatttcctcaaatgggaaatggggataacaatagggcccctctcgtagcttgttgagatcattaaatgagataatgtgggtgaaatgtttagtatagtgcctggcacatagtagatgcccagcgaacatgagctgttttcattatttgaaaatgaaaagaagagttttcttacttactgagtacatgtgtggcactggattgtagcctgaaaggggctatgccaagcatggctgagctaattacaaagtagaggggagccaaatggactcaggaaggtggactattcatggaggatgagggggaaggtggagacctgagtttcaatcctgggacygccgattatccctggtccctatttcctcactctcaatgtaaaggagcagatctgaggagtggttcccaaatgtcttctttgcaacattagcctgtaagatgt

SEQ ID NO: 413672 - DNA, 525 bp, Homo sapiens
ccctgatgaacataggttcaaaaattcttcacaaaatactagcaaatcaaatccaacaacacatcaaaaagttaattcaccacgatcaagtaggcttcattcctgggatgcaaggttggttcaaatacataaatcaataaatgtgtgrttcaccacataagcagaattaaaaacaaaaaccatacaatcatctcaatagacagggaaaaaactttggataaaattcaacatctcttcatgataaaaaccttcaagaaacttggcatcaaaggaactgacctcaaaataatgagtcatctatgacaaacctacagccaacattatactgaatgggcaacaactggaaacattccccttgagaagtggaaaaagacaagaagtggtgagaataggcatggtactggtacaaaaacagacacatagaacaatagaacagaacaaagaacccagaaataaagctgtacacctacagccatctgatctttgacaaagtcaacaaaaatagacagtggggaaaggactccc

SEQ ID NO: 413673 - DNA, 580 bp, Homo sapiens
tattaagaaaggttcattttgcccaattttctcccttcaggattttcctgttggaagtcacttggtccaaagatcttgactattgttttctggaggtctatgttagtccattttgtgttgctataacagaatacctgagcctgggtattctgtataaagaaaagaggcgtatttggctcatgattctggtgattggaaagtccaagattgggcagctgtgtctggtgagggtctcatgttgcttccactcatagtgaaaagaggagggggagtaggcgtgtrcagaggaatctcatggccagagaggaagcaagagagagaaacggaggaagtgaaactctttaacaaccagcttttatggaaattaatcaattcctgtgaaagccagaacttactcctgagggaagacattaatctgttcatgagggatccacccccatgaccaaaacactgcccactcggccccacctccaacaatgccacactggggatcaaatttcaacatgcgttctggcagggacaaaccacatccaaactatagcaaggtgggattgctttttaaactttttaaaacaatgtg

SEQ ID NO: 413674 - DNA, 444 bp, Homo sapiens
tatcatcagtttcccctagattctgaacaatgccactgaaattttgaatcgcaggactttttatagacagttagtttcagctgtttagagattttttttttagcctgtcaattatttgtaatgccacatattatttctcctcagccttgtcacagatgcacttgatgaatgtactttgcagtagtttacccaaattgttgataagaatatccgtcagaacagggtcacacatggagccttctggcagagccctggaggcttccctccgggagggcyttcatcaatacatggaccttccacaccattcagtccatgatttatgtttcccaggagcttggttgaaattaagaatttgattggtggtttactctaattagaaacccagttgtttgtgcagattgcttttttggttagtacactgtgacaagatgttggatcaatcaa

SEQ ID NO: 413675 - DNA, 229 bp, Homo sapiens
ccacgccccatcctccgtgggcctgagactaggccaggctctccctgctggcagtgctgcctaggcatctggtgtttgtggtcagcaggaagctgctgtgcaaattcccttaaaacacccattgaagctaacagtcacatccaaggaaaaacactgttctgctgtagttttrgtaaaaatggtgaaaccgtcatgtgttcccagggccacggtgtcgaggacctgctga

SEQ ID NO: 413676 - DNA, 562 bp, Homo sapiens
tcatttagttttaattgtatttctgtatagtgttccatcatgtaaatatactcaaatacttttattcattctcctactggtcactatttggattgtttctaagttttggctatcatacaaaaatgctatgaagaacattcttttacgtgttcttgggccttggtacacatatgcatgagattatttagggaataaatgaagagagcaatttctgggttgaagggtatatgtatgttcaacattacrggataatgccaaaatattttccaaaatggctgtgccaatgctcacatccaccagcagtgatgaacatttcaattactccacatctctgcaacacttagcactgtcactctggtggggcatgtgtttcttttccttctatgttttccttaaatattaatatattattttcctcaaaatacacagcgatgatcgctggcttcctttaaaatggcagaattaattattgagcacctttctcttaagtttatgttgccctacagaggaaaaagaaaaggacagatgattgcagtgatggaaagcctgggtgcacgtccag

SEQ ID NO: 413677 - DNA, 543 bp, Homo sapiens
ctctctcccagctgcagtccgcagcggcactttgccctaccacttaagtacatgcatgcactcatgcatgcgtgtgtgtgtgtgtgttttaaattcattgcttttggtcttccttttattttctttctctttttagagacagggccttgctttgtcacccaggctggagtgcagtggcacaatcacggttcattgcagcctccacctcttgggctcaagcaattctcctgcctcggcctcctgagtagctgggacaacaggcacacgtccccatgctgggctaatttttacatttttagtagcgatgaggtctcactatgttgcccaggctggtctcaaactcctgggctcaagcgatctgcmcccccttgactttccaaagtgctgggattacaggcacaaaacaccgcacccagccttcttttcttttatgaatatagtgacagatcttggttggtgtctagtctcttctggtttgctgtgtgactctgcactagtcacttggcctctctgggccatagttttatcatctgccctaaatgc

SEQ ID NO: 413678 - DNA, 575 bp, Homo sapiens
gctgcagctataaaacaggcaagaggcattccaggaggcattcttagtttaaaggtttctttgtcttttctaagtgatctccagttggaagaaggctccagatgggacgggagctggggaggaggggacaccaggggctttcggaaaagacagcccaccgtctctaactgtcaacatctcaggcatcccacctggcaatgagagagttgatggacatgcgaggctatttcctctggcttaagggagaaagagrcgaactggccctgagtcagggtctgtctgaaatgctatgtgtggctgctctggcctgagccggcctctagttctcggtcggctccagcctgtcaggagccttgatggctgcaggagctcaggggctgtgtgcacccccaatctggaaccattttctcaatatgtgacagagatgggtaaaggagatacagatgggggagtgggcaaatggcattctgtggctttgggtgtttcctgtggacccagcctactgtgtatccttgggccacagggtctaagggaagccatggtgcagggctgtgacatttgggatggggcgaggg

SEQ ID NO: 413679 - DNA, 575 bp, Homo sapiens
gctgcagctataaaacaggcaagaggcattccaggaggcattcttagtttaaaggtttctttgtcttttctaagtgatctccagttggaagaaggctccagatgggacgggagctggggaggaggggacaccaggggctttcggaaaagacagcccaccgtctctaactgtcaacatctcaggcatcccacctggcaatgagagagttgatggacatgcgaggctatttcctctggcttaagggagaaagagacgaactggccctgagtcagggtctgtctgaaatgctatgtgtggctgctctggcctgagccggcctctagttctcggtcggctccagcctgtcaggagccttgatggctgcaggagctcaggggctgtgtgcacccccaatctggarccattttctcaatatgtgacagagatgggtaaaggagatacagatgggggagtgggcaaatggcattctgtggctttgggtgtttcctgtggacccagcctactgtgtatccttgggccacagggtctaagggaagccatggtgcagggctgtgacatttgggatggggcgaggg

SEQ ID NO: 413680 - DNA, 287 bp, Homo sapiens
ccactgcacattagacatcatcagcyccgttttgcagaggagcaaatgaaagcatagagagagcatacaatttgtccaaggacacccagctaatatgtgggagctgtgatttgaatcaagttcttccatctgaagtcaaggctgttctggagtttcagttttgtggaggctagagaggagatgacttataagcaaatgctctaggagtataagaaggacacagcaggtgactggcagaatcttgccttcacttggaaaatcaggagacctggattttagtcaaagtt

SEQ ID NO: 413681 - DNA, 287 bp, Homo sapiens
ccactgcacattagacatcatcagctccgttttgcagaggagcaaatgaaagcatagagagagcatacaatttgtccaaggacacccagctaatatgtgggagctgtgatttgaatcaagttcttccatctgaagtcaaggctgttctggagtttcagttttgtggaggctagagaggagatgrcttataagcaaatgctctaggagtataagaaggacacagcaggtgactggcagaatcttgccttcacttggaaaatcaggagacctggattttagtcaaagtt

SEQ ID NO: 413682 - DNA, 556 bp, Homo sapiens
agttaactggcccaacctattcctttaattcagcccatcccttggtttcccataagggataattttagttaatcaaatatttataggcttatggctctgaaggctgtgagacccctgatttcccacttcacacctcaatatttctgtgtgtgtgtctttaattcctctagcgctgctgggttagggtgtgtgtctttaattcctctagcgccgctgggttagggtctccctgactgagctggcacccaacgtggggctcgaatccaggttgaagggttgccagagtgacagttggagaatgtggaaatagctggaggacacccgagtactcttaaagcaatccccatggtgagtaagaaggggagctcagaagtgtcagggtaacaatgggacaagtgtggggtctggttcgttccgtgttggaactttttcacactgataatgaggaggaaggagagtatagtgaagtaayggaagaggttacagaacatgtttatttaccagctaaagctaaagcagcaaaggaaggagaggttcatctctacccttttgcacc

SEQ ID NO: 413683 - DNA, 511 bp, Homo sapiens
gtcagttcattcacgagttagtaactgtgatcaaagctctctgctttagctcaaggaaccaacccttargtttgggagttgaattttgactcactaattggctctgcaggtgcctttgtttttttatttccactccctaagtgcccttgtcagtctctggctggcctccctgggtgctagagaattcaaaacaagaaaaagagcaaaactttggggagcaggaaactgaaggttactctcaagatccttttgtcagctggataagtcacttgatttctctgtgcctccattttgggatcatgttggtacctacctaacaggttcatgggaaggttgggtgagttaaggcatagacaccctcagcaaatgcaaggcagagcgcccttgctcattaaaagggagctgctgttatttcaatgctctttcttccatcattacaagaggggaccaaagtcctgtctggatggtccccctacccctgcctacctcaggagggaatccataaaaaaaa

SEQ ID NO: 413684 - DNA, 511 bp, Homo sapiens
gtcagttcattcacgagttagtaactgtgatcaaagctctctgctttagctcaaggaaccaacccttaggtttgggagttgaattttgactcactaattggctctgcaggtgcctttgtttttttatttccactccctaagtgcccttgtcagtctctggctggcctccctgggtgctagagaattcaaaacaagaaaaagagcaaaactttggggagcaggaaactgaaggttactctcaagatccttttgtcagctggataagtcacttgatttctctgtgcctccattttgggatcatgttggtacctacctaayaggttcatgggaaggttgggtgagttaaggcatagacaccctcagcaaatgcaaggcagagcgcccttgctcattaaaagggagctgctgttatttcaatgctctttcttccatcattacaagaggggaccaaagtcctgtctggatggtccccctacccctgcctacctcaggagggaatccataaaaaaaa

SEQ ID NO: 413685 - DNA, 330 bp, Homo sapiens
gtcaacacactaataaatatataacatgtcaagtgctatgaagaaacataaagtgaagtcaaaggaatggatgattgatggtgttacttagcagggtgattaggaaaaaaactttgctgatgaaatggtatttgaacacaagcgagggaaagaggggctgaaccatgcagacatctggtggaagaacattccakcaagcatagggaacagaaggagggcagagagggagaaaagagaagatgcatgggcaagatctcatgagaccttgctagcacggatttctttctgaatgcactttttgttctttaatgaggccaatgagatgaggaa

SEQ ID NO: 413686 - DNA, 613 bp, Homo sapiens
tggcactaaaaaaaggtaatagtaaaataaaataaaatgtataagttctagatatgtgagtgttagtgccatgtagaatataggagagctcccatcacagcaatcagaacaaaaggaaagaatattggtgaacaaaaataactatgtgcacagcaagcattttcccatgtccttaaacattctctgaaagcatgattttcatggctgcataatacattactgtgtaatgcgccgtgttaaccaatccctgttaaatgttttctagttttgtgtttgttttgaactgttataatataatgctataaggaaaatcttcagatataaatctttaactgcttctttattttctcaggataaattcttatagtggaagtatttggtcatagcctcagaaaagcattaaattacagaaccacccactgggtgtgacatggatctcacctgatccttaccataatgtagaatctgaatcttggtcattcattcagacmgtcttaattcgtgcattccattgctttgttaatatgaggaaaatagaatattggtattgaagggaaatgtaaagtagataacaaactaaaagtgatttctgccattcagctttggaagagtt

SEQ ID NO: 413687 - DNA, 570 bp, Homo sapiens
gcagtaacttagggaacgcccattagaaggatctggaggctgggtgtgggggctcacatctgtaatcccagcactttaggaggccaaggtgggaggatcgcttgagcccaggagttggacaccagcctgagcaacatagcaagatcctatctctacaaaaattttaaaagtttaaaagttagcygggtgtgatggcatgtgcctgtagtccccccagctactcaggaggctgaggtgggaggaacacaccatcccaggaggcagagactgcagtgatctataatcaggcgactgcactccagcctgggtgacagagtgagaccctgtctcaaaaaaaaaaaaaaaaaaaaaaaggatctggaagaggaagaaccgttactggggcatttgagtaagagaggaaatatcagcgggctgaagataatgtaatgaaacactccaagttctagtgtattcttctccatctctactctgtccacagattatctactggctttaaagattatttatatagccgcaaatttttagctcaagccttgacctttttcctgggttccaaactcctatatc

SEQ ID NO: 413688 - DNA, 570 bp, Homo sapiens
gcagtaacttagggaacgcccattagaaggatctggaggctgggtgtgggggctcacatctgtaatcccagcactttaggaggccaaggtgggaggatcgcttgagcccaggagttggacaccagcctgagcaacatagcaagatcctatctctacaaaaattttaaaagtttaaaagttagccgggtgtgatggcatgtgcctgtagtccccccagctactcaggaggctgaggtgggaggaacacaccatcccaggaggcagagactgcagtgatctataatcaggcgactgcactccagcctgggtgacagagtgagaccctgtctcaaaaaaaaaaaaaaaaaaaaaaaggatctggaagaggaagaaccgttactggggcatttgagtaagagaggaaatatcagcrggctgaagataatgtaatgaaacactccaagttctagtgtattcttctccatctctactctgtccacagattatctactggctttaaagattatttatatagccgcaaatttttagctcaagccttgacctttttcctgggttccaaactcctatatc

SEQ ID NO: 413689 - DNA, 653 bp, Homo sapiens
tacacctctttttctttataaattacccagtctcagagatgtctttattagcagtgtgaaaacagactaatacacacatcttcatctaatcattcttttgaagtttctccttcttccccccactcctgtcccatacttcaatacctgcagagtgtatgttcttaataaatgtatattcaattttgaattcttatagctggctctttgcagcatatcgttccaaccaaagaaatgaattggccaattgcctctccctgtgttccccagaggatcagagaaggctgagcttcctgaactcagtagtgaaggggtcttgagccttgagccctctggagcccgctcttctagaaccctgaggtctcatgctgctgaagccttgggaatgtgtactccaagcactgtctctttctttacaggattttcccaaattaaaatgcccaataggtaaacaaaacctcagacttttactttaggccctgctggaaggacccagttggagaaaggagtgaataatgtaaagattaagggccttrggggtcagatagccatggccttgacatccatacaaaatcaggcaagtaacccagcccataggagccccagtttccctatgcataaatggggagaatactacctttttcagaaggtagttg

SEQ ID NO: 413690 - DNA, 580 bp, Homo sapiens
ccacaactgctaaattaagtatcatgaactactgtcatcattaatgcaaacacacaagacagctttagaaatcctggcagtgctttctggcaaatgtaatgaaaaacttaaataattattccatgtaaatagatttcatatgagctcttcttttggtaggaaggaagggagaaaaggtgggagaatcctgtgatttatggctttgagtggtacaatgaattaggccaggcatcccactgtgagtctgagcctgccttggcctgcattatgaggttgttagatcattttgagcagcgtggctcargtgacctaatgcaggcgtgagagaaaaggtcattaaaatctgccacactgtaggaactctctaaaaagagacgcaaaggctgcgttcgcagagtagcggcatttctctttgggatacaaggtgttctatcacttagggaaaactgaaaaccaaagtgataatgatgggaaataaattgatggcctcaaaaggaagggttgcagaaggaggagggagataggggagctacctacaacccgtggcaaaggctcctcctgtaagagaaataatgaatga

SEQ ID NO: 413691 - DNA, 661 bp, Homo sapiens
atattgagatacaatttagactttgggttttaggcatctaaatgaatatatgaatattaaatataaatataaaatataataaaaacatacattaaaatataaaactcaatacttcaaatttatttttatatacacacatatagttattaaaaacattatcaaataagatgtcttcataaacttttatcacctcacagaagtaaaccaaatactttagtgatgtgtttagcttctgagagacgattgttaaattttaagaacttttgcatgctggttaacatcagccatagcggagcaaaattgtcatatgctacaaatcagaattttctccaccctgagagccagatattaaacatttactagcacaccactagtaacattcatgaaaaagtataaaagaaagcaaatcactttaatattataaagttgtttataaacacacatatgttagtgtataaaatgtgtattctcaatatctttctgaggtcacattgtaagatggaatccaattattttcttatttactaaygctcccccccataattatgtgatatggaaaattgatgataatagttaaagctaaacagcttgatgctcagatttgttttttccaaatattggctaatgtgattatcacagtttggtgtagttaacctatgtt

SEQ ID NO: 413692 - DNA, 548 bp, Homo sapiens
ccacatactcaacaatatgtgatgttgtcagtaattttcattttagcctttctagtttgtatgtagtggtattacattgtggttttaatttctatttccttgatgacttataaatgtactcatcttctcacatgttttttggcttcttagatactctcttttgtaaagtatttgctcaaatatttgcctattttaaattaagttgtctgacttttatgaacttaaaggagttctttatatattttgaatacaagtcctttgctatagctatttatttaaaatatcttccattgtgtgactgctctttccctctttaagggtgtcttttgatgtacaaacatacctaatttcaatatatgtaatgtacttaatgctgaaatattgaaagttttccccgaaactggaaacatgacaattactatttattgtcaactgttttattctctatacagttatgcatcacttatcaatcaactgggatatgttctatgaartattccattaggcaatttcatcattgtgcaaacatcatggagtatacttacata

SEQ ID NO: 413693 - DNA, 625 bp, Homo sapiens
ttctggaattttacactggaataaagagagcaaataaaataaagtggtcaaaaattcaatctgtgtaaaaaaaaamacatacctaattgacacttttattactgagaaaacatttggctgaaagatctgaatttacaatatattagttaaatcttagcatatcatcctttctttttccaaattgcagcgtcatagaattgacatgctagctgtcctttccttctttgcctagatcacgagaaactgtgcatgcaaatcattcactggttccaagagtttcccctctaataagtcagactacaaagaaacccattctacccacctttccctcctctttctcccattaataatcaatattagccaaccccatttaattttaaagaatcgcctttgaattatttttcaggaatagacaaaactaacggtaagaggtcaacatcctcaaagccactgttacgtattccaggctttagtacattattcctaatggtgtcccagaagtctagatattttcaacttaggatgattaataaacattaacaaattttttagcctagtgtggtggggtgtgcctgcagtcccagctacacaagaggctgaggcaggaagatggcttgagctcagg

SEQ ID NO: 413694 - DNA, 625 bp, Homo sapiens
ttctggaattttacactggaataaagagagcaaataaaataaagtggtcaaaaattcaatctgtgtaaaaaaaaaaacatacctaattgacacttttattactgagaaaacatttggctgaaagatctgaatttacaatatattagttaaatcttarcatatcatcctttctttttccaaattgcagcgtcatagaattgacatgctagctgtcctttccttctttgcctagatcacgagaaactgtgcatgcaaatcattcactggttccaagagtttcccctctaataagtcagactacaaagaaacccattctacccacctttccctcctctttctcccattaataatcaatattagccaaccccatttaattttaaagaatcgcctttgaattatttttcaggaatagacaaaactaacggtaagaggtcaacatcctcaaagccactgttacgtattccaggctttagtacattattcctaatggtgtcccagaagtctagatattttcaacttaggatgattaataaacattaacaaattttttagcctagtgtggtggggtgtgcctgcagtcccagctacacaagaggctgaggcaggaagatggcttgagctcagg

SEQ ID NO: 413695 - DNA, 538 bp, Homo sapiens
taataagtaaatgcaaaattaaatagattgcatacaaaggaggtagagatgattgctagagaggaaattaaagaagaataaagctgaagtatattgttggtggtggagttattttaaatggagtgaccagagagggttctgtaatcaatttgtatcgaagcagagacctaaatgaagtggcagaggttgatgtgcagatgtgtgagtgaatagattgccaggcagtgagaactgtaagtgcaaaggctgtgaggcaagtgcatgcttggtgtattcaaagaatgaaaatacagtcagtgcaaatggagtgatgtattagaggacaagagctggaggaaatgagattcatgaggcaatgggctcccratcactcatgccttgaggacactgtaatgactttgagctttactttgaaagtattgagaagccattggagagtaaagtatattagtctggctgctttgctcggactagacttaaaaccagcccaaatatcccatggaacagatgctcatggtttattttgaattaacataga

SEQ ID NO: 413696 - DNA, 545 bp, Homo sapiens
tgatccttgttaaacattactgctataattggttctggattaaaagcccaataaaatataaatgaaataaagtcttatagaggatgttagtgtttctctattttcatctctccctcaactccaattcacttctactcgtctctgtgcctgcaaatgttgagccctttagtgtaaattaccggggctccttgtcttctggcttccaggtgaattgggccaataggaggaactcacaggaaacaggagggtcgggggagagagaggctgggcattgcatccccttctttctttctgtatctccagtctggtaggggctgcctaatccacaactacaggtcctgttgagcaactgactcctgttgcatggctgcagctcctcaractcttgtataataatatcatttcctcctcttgccctgcaggtggtggtttcatgctgtgctagcctagctgctggctgcccgctcctctgtagatactcccttactcaaatcctcctaacaatcctagtggactgggtcttgtttcttgccaggccactgact

SEQ ID NO: 413697 - DNA, 489 bp, Homo sapiens
cagcattatgcccaagctcacattctcgtagaggctctgatatggtttggatttgtgtccctgcccaaatctcaagtcaaatttttatcaccagtgttggaggaggtccctggtgggaggtgatgggggtggatttaccccttgatattgtcctgatagtgagttctcatgagatcttgtttaaaagtgtgtagtaggccaggcacggtggctcaygcctgtaatcccagcactgtgggtgactgaggtgggaggatcacttcagcctgggaggcagaggttgcagtgagctgaggtggcaccactgcacgccagcctgggcaacagagtgaggccttgtctaaaaaacaaaaaattaataaaactaaaagtgtgtcgcacttccttctctcccttcctcttgctctaccttgtaggaaagatgtgtctgtttctcttttgccttccaccgtcattgtaactttcctgaggtctccccagccatgtttc

SEQ ID NO: 413698 - DNA, 489 bp, Homo sapiens
cagcattatgcccaagctcacattctcgtagaggctctgatatggtttggatttgtgtccctgcccaaatctcaagtcaaatttttatcaccagtgttggaggaggtccctggtgggaggtgatgggggtggatttaccccttgatattgtcctgatagtgagttctcatgagatcttgtttaaaagtgtgtagtaggccaggcacggtggctcacgcctgtaatcccagcactgtgggtgactgaggtgggaggatcacttcagcctgggaggcagaggttgcagtgagctgaggtggcaccactgcacgccagcctgggcaacagagtgaggccttgtctaaaaaacaaaaaattaataaaactaaaagtgtgtcgcacttccttctctcccttcctcttgctcyaccttgtaggaaagatgtgtctgtttctcttttgccttccaccgtcattgtaactttcctgaggtctccccagccatgtttc

SEQ ID NO: 413699 - DNA, 553 bp, Homo sapiens
ggaggcaaacttcccccttgctgttctcatgatagtgagttctcacaagatctggttgtttaaaagtgtgtagcacctccccttctctcttcctcctgctccagccatgtaagttgtgcctccttcctcttctccttctgccawgattgtatgtttcctgaggcctccttcagtcatgcttcctgtacagcctgtggaactgtgagtcaattaaatctcttttctttataaattacctagtctcaggtaactgctttacagcaatgctagaatggactaaaacatgtatatctatatacccagaagtgaaattgctggatcatgttggtcttcctatttttaaatttttgaagaacctccatacattctccataatggctatacaaatttacatttctacagacattgtataaagattcccttttctccacatcctcatcaatatttgttaccttttgtctttttgaagccattctaccaggtatgagatgatatatcattatggttttaatttgcatttccctgatgattagtgatgttgagcatttttaat

SEQ ID NO: 413700 - DNA, 563 bp, Homo sapiens
gctatacaaatttacatttctacagacattgtataaagattcccttttctccacatcctcatcaatatttgttaccttttgtctttttgaagccattctaccaggtatgagatgatatatcattatggttttaatttgcatttccctgatgattagtgatgttgagcatttttaatatacttgttggycatcttcatatcgtcttttgagaaatgtctatgcaggtcccttggcctcttttaaattgggttattagttttcttgctattgagttgtttgagtttcttacatatatctttatattaacttctcatctgatgtatggtttgcaaatattttaccccattccatagtttgtttttcactctttggttgtttcccgtgttgtgcagaaggctcagtttgatgcaatcttatcagtctatgttttccttttgttacctgtgatttgaggccatacggtgatatggtttggatttgtgctcccacccaaatcttatggcaaattgtaatccccattgttggaagaggggcctgatgagaggtgattggatcatggggat

SEQ ID NO: 413701 - DNA, 613 bp, Homo sapiens
tttttggcttatgatagacaagagcactaaaagctattttaaaggtttttttttcctcaagaaaggtaatcaactattgagattcaagtaaatctgtaacaaatttaaataattaaagagcatgtcaatatggttttgagtttgcttagtgaagggaaggaggcttaaattcaattaaaaagcttattagggatgatactaactctagctattttcagtgcatrttgacactatataacacatagtaattatatgtttcttcttgaaatatctgatcaaacactatctatagtaagcatatattccaaattgttacagatgctcctgtatcaaaaatatttatatgaaaattgtgtagaatgtttgaaaaaaaattgggggtacttgatttgtgttcttttttagataagtcacttaatctgatgtatatccattctttagattgtaaacctttccttggacacttattggaacttatttaaagtatatttaaatattagaaaacctctccccttattatctattgaacaaagcccaaataccttaccttgtatttcaaaacattctagagtcaggtctcaatatacttttaaaatctcacatatttttcttt

SEQ ID NO: 413702 - DNA, 557 bp, Homo sapiens
gatatgtaatttgagactgcacaggtaagaatatcacaaaaacaaatcctttggaagtttaatatttgtagatgaattccaggctcataagggacaaaagttgatgtgtataaaggtcctactgaaaataggttatattcttataaattatgtgatttaaaacataattatcaatttgtactatatatcatcaacaataaattaaacatttaaaaatgccacttttatcctattgtaattctcctcagaaaaattactaacccctaagtgtctacaggaaaaaaatattttcctggtatgaaacgaatttattttaccacatcccccattccatctttactactttctttgattatgttcctacctaaattatcacaatttgtcatatttgttaacttctgtacattctatccctttcgtttgccagtcatccctggtatactaygtgtacagactttgtaaaaattcagggccatggaaagttctgttttgttggtgtcactggcctcctttaacatggaggcaagcttgataactttacctttgaagccatgcca

SEQ ID NO: 413703 - DNA, 600 bp, Homo sapiens
ttttcagtactccccggggacatctgaattcccttgtggtttgtgactagtgagtagttgagtgtttagcatgactgcctctcctctctaatgtcaaaaaacatttactgtatagatgacgttgtgttggctggtaagtaagagggctcagcctaaatgccccagactatatagtattatcacacttctgccagcgtgatgaagcctgagaaaattcagggatcttcttgccaagtcgtttatggagacagtctgggtagattcaaaatgctcaatttctttaacgttcaagaaaaactgcagtcttttcaggtctttgaaagaagmctcttccaaaagaaagccctgcactttattgaacaatttggatattggaaatagtatatacctcatttagatattctacttggtattttatatcaactaacacacagatcagcatcctttaagtggggcccaaactacaggttgtattggaagatgtcctgtgaattgtttcatggtctctatattgggagctcccacaactgcaatggctcctttgaactacaagttactgggactgatgattttgctgattaaaatcttgggtaaaaaaga

SEQ ID NO: 413704 - DNA, 577 bp, Homo sapiens
aaattctcaatgttgagaataagtcttttagaaaaccttttacaaggtagagataaaagttaaggtagtctctgtctccttgtaataataaaaattgctctattgcttcctaatatttatattaataactaagatattttcataaagatracaattagataggagtcagacctggaggcaacatgtgaacatgctctgcattatcctaaaaaaaaagttttatgcatgtttagcaacaactactgtaatttatagtatatgatttcaaaaaagcttttgcaatttttcctctgtatgatctctgttgagtaattatttacttacattaaaatggtcaggataacacaagttaacaagtaacttgcaaggataaaaaaagaagtggagagctaacaaaaataagattttcaggtagaaaatatcatctttttttttcctttctcaacaaatatagtacagatcaccccactgtcactgtgcaaaaaattaacgcattgacttaattcttttcaagcacagaatgttctgtgcctaaacaagtgacttgagcatttttattctaaagagtcaaaatggc

SEQ ID NO: 413705 - DNA, 591 bp, Homo sapiens
agttttactgattattaggtaattcaatcaaaatgaatgatctcaatatttcatttagatataccctggaaatctgacacagagacagagtaatcaaaagctcctctgttttggctacatcaacatcataatcataatcagacattaattgatatttggacaaggtggtaatcactggtgctgtgaagagtaatgaagaggtattagacacatcagaataataatgtgaawagaaggctgaaatgttattctccaacaaagaagaaacaaatattcaaaattgtaagaagaaaaatgctgcaaagttacaagattctatgcagtgttacttggtttgcagatgaagtcaggacttacttgaatcagaattactaaacccctaaatagacctattcctgcttgccatgcccaaatcccctcttggttcaaattttacaaaaaagaaggcatactacacatttttaagtacacgagatcatgagaaagtatttaattttcacatacttgtgatttggagaaagaacttaacttttttatgaagcgtgagaggaaattgaggatgagcatttggattactttctgacttgaaca

SEQ ID NO: 413706 - DNA, 621 bp, Homo sapiens
attagtagcatcctgtcctttatatacacagctgcagttctgattatatatcagcagagcaagctctcagaatctattttctagtagaggcaatacatttgtattaaccgtgactatactttctctcccaagcaaggcagccaaccagggttggaaatccaattcgtggttcgcatcaagccagcaaatatattttgactgaagtgccaactgaaacatctcaatatcaagcccagttggaaaatgctccataactrattatcattgtctgccagaagctcagaaggggtgaatgatggcaaatgcatagcacaacttttttaccattcctgctgagaacccaaattgctacactgatatttttatacagttttaatcagctgaacataacagtaacttcatgaaataaacaactaaccaggaaaagacaagagggatccctgagaatattgaaaaactaatcatgattttttatatgttaatttaacaatttaaacaactcaaaggagacataaccttaattttcttatagaaatactagggaaaacaagagttaattctgatcaaatggaaagaacaatcaaatttagtcctaaagattaccccttcattaacaatact

SEQ ID NO: 413707 - DNA, 433 bp, Homo sapiens
gagtgtaataaataaattattggtcaaagagcacagaaaacttcataagtcatttgggcacctatcagtttacagtatcaaaagtgtataaacaactcactttctaaaatacttagtagactacasagaagttactatatattttcttcacagattaacataggaatgtgctgcaataggcctctctattgtcatttagtctcatcattacttagccaaatcccagatcacatgccccaacccccaatttgatagtacttcagaccccccactgcaaacaaataaactaataaccgtttttatcttcactttgcagtgcagttgcagaaatcacttatcttttactagttcatttgttttctagagacaaaccacttaatgaaatttcagagaattttaaatagtcaactgttcagaattcatcatattaaca

SEQ ID NO: 413708 - DNA, 547 bp, Homo sapiens
taattgaagaaaaacctagaaacaaatagtcataatttttacttgatatgtaagttaatcaacagaaccttagaaataagttatgaatcattttgatttgacagggtgatataattagattttggctataatgttgattaatgyagatggtttctggtagaactttattaattaaaaacaaacaaacttttaattaaatgaaatattttaggtccttattcatgttaggagaaagataaagatacaaaagataaaagtttctatacaaaccagaagtggacatttttgattaaaaatattttcaagaaagttataccaaatactctcactctctgcttttactgttgtcatttttaaaatgaagagccttagggaaaggatgatgacatttaaataataaaactaatgtttattaaatatttactatgttcagggcactgtgttaaacattttctatgcattatctactagaatacagaaacaagggtatgaaatacattgttaggtatttcaaattgaaaattaatcaaattgtctaaggctgaca

SEQ ID NO: 413709 - DNA, 547 bp, Homo sapiens
taattgaagaaaaacctagaaacaaatagtcataatttttacttgatatgtaagttaatcaacagaaccttagaaataagttatgaatcattttgatttgacagggtgatataattagattttggctataatgttgattaatgcagatggtttctggtagaactttattaattaaaaacaaacaaacttttaattaaatgaaatattttaggtccttattcatgttaggagaaagataaagatacaaaagataaaagtttctatacaaaccagaagtggacatttttgattaaaaatattttcaagaaasttataccaaatactctcactctctgcttttactgttgtcatttttaaaatgaagagccttagggaaaggatgatgacatttaaataataaaactaatgtttattaaatatttactatgttcagggcactgtgttaaacattttctatgcattatctactagaatacagaaacaagggtatgaaatacattgttaggtatttcaaattgaaaattaatcaaattgtctaaggctgaca

SEQ ID NO: 413710 - DNA, 547 bp, Homo sapiens
taattgaagaaaaacctagaaacaaatagtcataatttttacttgatatgtaagttaatcaacagaaccttagaaataagttatgaatcattttgatttgacagggtgatataattagattttggctataatgttgattaatgcagatggtttctggtagaactttattaattaaaaacaaacaaacttttaattaaatgaaatattttaggtccttattcatgttaggagaaagataaagatacaaaagataaaagtttctatacaaaccagaagtggacatttttgattaaaaatattttcaagaaagttataccaaatactctcactctctgcttttactgttgtcatttttaaaatgaagagccttagggaaagratgatgacatttaaataataaaactaatgtttattaaatatttactatgttcagggcactgtgttaaacattttctatgcattatctactagaatacagaaacaagggtatgaaatacattgttaggtatttcaaattgaaaattaatcaaattgtctaaggctgaca

SEQ ID NO: 413711 - DNA, 595 bp, Homo sapiens
aaactagaaattaaaaaataacagatctttaaggtaaatcacattagcattggtttttcatcttygaaaatcgtaaaacctattacatcacctgaccttcattgtttttcagtctaactacatatcctatatataaaagtagcataccccaatcaaatcaaataatgtaagttattctgaatcatatattcctgttttcaaaggatcctatactactgaacatatttgttaaaaacatgaggtaatcatccttccatattttcacatttttttgatcaattggatcattagtatgacaagtaatttataatatcagttatgcttaaatgcataacttaatgttttcatgctcttataacattttaatacagtgggatgaaattgtcatatttttctaagctgaaaactttattcaaattacatacaattacattcatttttctaaataaaggcaataagaaacagtcttctgtgttatgacatgtcagactaccactaaagttgttttactctacaataagacaagtaaattacttacaaaaatacttaaaattactcttcattattttcaaatacatgctcacagcaaacattg

SEQ ID NO: 413712 - DNA, 470 bp, Homo sapiens
cttgcgcacacatgtttatagcagcacaatttgcaattgcaaaaatatagaaccaaatgtccaccaatcaacgagtggataaagaaattgtggtatatatggcatttgcagcaacctggatggaactaagactactattccaagtgaagtatctcaggaatagaaaaccaaacactgtattttctcacccatatgtggaagctaagctatgaaaatgcraaggcgttaagaatgccactctatggactttggggactcatgggaaagggtgggaaggaggtataggataaaagactacaaattggattcagtttatactgttcaggcgatgagtgtgacaaaatatcacaaatcaccactaaaaacttactcatgtaaccaactaacgcctgtttcccgcagaacgctatggaaataaaaaaattcaaaaatagccataaaaagacatataacatatagaatagagaaac

SEQ ID NO: 413713 - DNA, 452 bp, Homo sapiens
  misc_feature (1)...(452): n = A,T,C or G
aagaaaacaacactngtgggtttttcatcataagtgatgtaaagaagacaatgaaatgacatgataaagtgctaaacagaaaaaaaaatctgtcaacctagaattccatatctattatatataatcttgaaaaatgaaggcaaaataatgatacttaaccaacaaatgcaaaacataaaaatgtgttgctggcagtaatgcactacctgaaacattacgggaaactttgcagcctgaggtaaataactctggaaagaataccaraagaatacaaggaaataaagagtgccaaagatgtgagtaaatacaaattttatttttgcacttttagttgttagtatataattggtcacttaaataggatattagtgtattctgaagtttatgaaatacatagaacttaaacacctgacaaaattatctaaactaatcaattttaaaaagagaaccga

SEQ ID NO: 413714 - DNA, 597 bp, Homo sapiens
agtaagataatatcacaaacaagtttatgacaatagaatctatctagataaaagggaaaaatcttaaaagacacattacatactgaaataagaaaaaaaagaaaattcttagtctatacaattctctatccataaaatgaattaatatttaagaagcactaggtttcactagtgaattacatcaaatattttataatgaatattaatcttatacaaacaattttagaaagaaaagaggaaggaatgaagtctaattttatgaggcccgcattactctgatatgaaaaccaaaagaaaaggcattacaataaatctaccaataatatacctcataagtatagccacaacatcctaaactaaacattagaaaatgtaatcttggactctataaaaagattcatgatcaaatgaattttataacaggaactcacagttgatttaacatctgaaacayagccacatgttgagctagaaatgttgaatgattaattcaacatacgttgagtgattaaccacgttaagtgattaaacatgatcacagattaaaggaaaaatatcgtataatcatctcaacaggtagagcaataacacttgtaa

SEQ ID NO: 413715 - DNA, 496 bp, Homo sapiens
atctattcctcagcctcattgactgatagatagatagatagatagatagatagatagatagatagatagatagaatcccaagtacatctgctagtctcactttatcaacatgattaaatttaaaggctaatttcttcagctaccatattctctgcaagtatagaatttatttcatcaaagttaaccattcacaacgacatttgtgtattataggttaccatgtattccacttttgctagtgaagtatctggttaactaaccaaaacatattaataaacatggtcaaaaatacggaaaaccccttaattaawcccagatcttaaagcatgaaagcaaattgtaaatataatgatgttggtaatttgagatttacataatactttgaacacttggaagactggcaccttatcttccatccatatcagtgtttatcattatgtccattggaaatgatgtatatttcctattgattcagttcaaccaaagaaacagaact

SEQ ID NO: 413716 - DNA, 605 bp, Homo sapiens
taccatgtattccacttttgctagtgaagtatctggttaactaaccaaaacatattaataaacatggtcaaaaatacggaaaaccccttaattaaacccagatcttaaagcatgaaagcaaattgtaaatataatgatgttggtaatttgagatttacataatactttgaacacttggaagactggcaccttatcttccatccatatcagtgtttatcattatgtccattggaaatgatgtatatttcctattgattcagttcaaccaaagaaacagaactaatagaaaatatatattaacagatttattacaagaaattattttgtgctatgctagtgcatagctaggcaagtacaaaattcatatagtaggtaatcaagaagggcagaatggaactctgcggcacaagccaaagcacatatccacaggcagaaattcttcttccacggggaagcctcagctctrctcttaaggactctcagctaattaaatcaggcccatggagatacactagattaatctttcttacttaaagtcaactgattatgaactgtattcacttctataaaataccttctcagtaggtaaataataagtgaggctg

SEQ ID NO: 413717 - DNA, 592 bp, Homo sapiens
actgatagaattccttttagctcttggggtggttacactttggacattaaggttttcagctgattgagttaaccccactcacattatggagagtaatctattttgctcaaagttcaccaacttaaatgttaatcttatctaaaaaaaaaaagtcacagaaatattcaaaataatgtctgactaaataggtgagcattgtgacccagtcaaatttacatataaaattaaccatcagacatactattacagtcctcatttttgcamctgaccacataatcatagctggtatttagaactaccttcttctactacccattcaatatcctctttgctctcagcaatcactatacttagttgttgttatttgcctgacagtgtggctcaatcttcattcctgaaggatctgaaccattagaagtttagtctgaatctggtttttgcagttttccatttacttaatcacagaacatgataatcttaagagatgctttatggaatatcctgtatcccagacacactgcttctcacttccattctatggcagcaacccaatttcctcttggtattcagcaccaatccacatagccaattt

SEQ ID NO: 413718 - DNA, 592 bp, Homo sapiens
actgatagaattccttttagctcttggggtggttacactttggacattaaggttttcagctgattgagttaaccccactcacattatggagagtaatctattttgctcaaagttcaccaacttaaatgttaatcttatctaaaaaaaaaaagtcacagaaatattcaaaataatgtctgactaaataggtgagcattgtgacccagtcaaatttacatataaaattaaccatcagacatactattacagtcctcatttttgcaactgaccacataatcatagctggtatttagaactaccttcttctactacccattcaatatcctctttgctctcagcaatcactatacttagttgttgttatttgcctgacagtgtggctcaatcttcattcctgaaggatctgaaccattagaagtttagtctgaatctggtttttgcagttttccatttacttaatcacagaacaygataatcttaagagatgctttatggaatatcctgtatcccagacacactgcttctcacttccattctatggcagcaacccaatttcctcttggtattcagcaccaatccacatagccaattt

SEQ ID NO: 413719 - DNA, 541 bp, Homo sapiens
atgataatcttaagagatgctttatggaatatcctgtatcccagacacactgcttctcacttccattctatggcagcaacccaatttcctcttggtattcagcaccaatccacatagccaatttagtaatccccttctttgcttattgtttcagaggcatgaaacccaaagttactggatggaagtctatactttcagttcaatggccwttggtgtttctccaaaatttctaaaccatcagatgttaaggtgatgaaacagaaagtatcaattttgctaacagatcactaggggtaaaagtttgtggagtcactctcatttccaccccttgattcctggacaataatcctggctataagagaaaaagcaccattatactggatgctgatttagatcatatacagtatcttggaggatatttttccggcctcactaagtattgtcccttagatggtgttttaaatgtcctcaaagtccattccactattttgtcaaaccagctgcttatggatgataaggaacatagtaagactagtaattt

SEQ ID NO: 413720 - DNA, 542 bp, Homo sapiens
tgcaagctgctcttccacttgagccatatgacccagcagatccaatgatgcttgaggtgtcagtggcagatagggatactgtttagagcctccggcaggcccccataggtgaatcacagtggaggcctctaggattttggagcaataccttgccgtcttctgcagataactactcgtcttttgagtgacaactcttggcctgttactgggcttttggtggaaaccgaatgtttgactatgagtcatcargtcaccatgcaacctgaactgactatcatgaactgggtgctttctgacccatctagccataaagtgggtcatgcccagtcacattccatcatcaaatggaagtggtatatatgggattgggcttgagaaggtcctgaaggcacaagtaagttacatgaggaagtggctcaaatgcctatggtctccactcctgcaccctgccttctctcccccagcctgcactgatggcctcatgggggaattccttatgatcagttgacagtgaaagagaagactagggcctagttcacaga

SEQ ID NO: 413721 - DNA, 542 bp, Homo sapiens
tgcaagctgctcttccacttgagccatatgacccagcagatccaatgatgcttgaggtgtcagtggcagatagggatactgtttagagcctccggcaggcccccataggtgaatcacagtggaggcctctaggattttggagcaataccttgccgtcttctgcagataactactcgtcttttgagtgacaactcttggcctgttactgggcttttggtggaaaccgaatgtttgactatgagtcatcaggtcaccatgcaacctgaactgactatcatgaactgggtgctttctgacccatctagccataaagtgggtcatgcccagycacattccatcatcaaatggaagtggtatatatgggattgggcttgagaaggtcctgaaggcacaagtaagttacatgaggaagtggctcaaatgcctatggtctccactcctgcaccctgccttctctcccccagcctgcactgatggcctcatgggggaattccttatgatcagttgacagtgaaagagaagactagggcctagttcacaga

SEQ ID NO: 413722 - DNA, 536 bp, Homo sapiens
tatagctgtcagaattaaataaccagttccaaatgtcccacttgtttgagtaatattgcaggtaagaataaaaggtttcattggaggcctattctaacaacatgagtgaaaaacagataccggttttgtaaagtcagcctctcagagtctttttctcttgatcaatgtctcaattctcttccaagatgatactgatccacctacaaaggtaaagaaataatattcataaactaagttattattgacttgaccattttccatagcagatttcaatgaaatcagcctttcsctacaaccttcttctacttgtatttctctttgtaatcttcctatctattatctctgagatactatattaatgagatttggatagaacatgatggataaaccattagtgttcacttcagctgagcattttttggttttgagcagctcaaattatgccatgtgataatgctggcattttactactagatagtgttctgtaaggcattataagacacttggaaatcatccagatgcttgctgggaatgac

SEQ ID NO: 413723 - DNA, 541 bp, Homo sapiens
cttgtgtctgtttttccacaatttcagctctttctctacaggagataagactctcactcaaggcaatcttagaagacttgaggctcagtatctgcttctgaagccgggagttagaattcctgagttcataattttctttcatcacttcgtacagtgaacttaggagaaaccaacaagcttcattatgttccttggttctccacatatggccaaaggtattatgtatagagtcactaagctcctgcctctcaggattggtgaatcagtagtgtcaaatgcatttattttgtctaactctctaaacagttcatgccaacgactaatagtgttctccatactattakaagtagagtccttagcattttgggtattaagcaccgaactccagaaaccccaaaaccaatgaaagaactccatccttaatattctgttcctctagaaccactccttgtaccaaaatctgtattagtcagggttctcttgagggacagcactaataggttaaatgtatatatgaaggggagtttattaaggaatattg

SEQ ID NO: 413724 - DNA, 593 bp, Homo sapiens
gccacttgcatgataagagcttgtgtctgtttttccacaatttcagctctttctctacaggagataagactctcactcaaggcaatcttagaagacttgaggctcagtatctgcttctgaagccgggagttagaattcctgagttcataattttctttcatcacttcgtacagtgaacttaggagaaaccaacaagcttcattatgttccttggttctccacatatggccaaaggtattatgtatagagtcactaagctcctgcctctcaggattggtgaatcagtagtgtcaaatgcatttattttgtctaactctctaaacagttcatgccaacgactaatagtgttctccatactattagaagtagagtccttagcattttgggtattaagcaccgaactccagaaaccccaaaaccaatgaaagaaytccatccttaatattctgttcctctagaaccactccttgtaccaaaatctgtattagtcagggttctcttgagggacagcactaataggttaaatgtatatatgaaggggagtttattaaggaatattgatccacacaatcacaaggtgaggtcccacaata

SEQ ID NO: 413725 - DNA, 673 bp, Homo sapiens
ataccattacactcgggagaagggtttcagcatatgaattttgagaggatacacattcaatctgtagcagagtagatattgtaattgctaaggaaacctgcagaaagttaatagtgggcttcattttcacaagtggggcttatgttattacctggtatcctctgtgaatctgagaaaagagcacaactgacaactggaaacagtggttgcaaataatacacagytttagttggtcataaaaacttgagatccttttcacatttctgttttgtgtaataaggatgaagatttgtatgtgtatgaatccacctaatggagatgaaatccaaaccttttgttattcttagccttagagcctatttgaacttctcttgatattggatcggtagcttgcctaagagatgtttgggtcagttcttggtgattcctaatcctgggtggcccactttttatacctaattaatatacaacatcagtcagtccatcttttttaggctatgacctcataacttgtggttaaacttccaagggtatatatgactttctgtaaagaagtaaataaccatttctatcataagaaactgatgagattatcatcattattttattatttatagtagtagtagtaattgctgtatattatatatttatgtaaccaaatctgaggaacatc

SEQ ID NO: 413726 - DNA, 673 bp, Homo sapiens
ataccattacactcgggagaagggtttcagcatatgaattttgagaggatacacattcaatctgtagcagagtagatattgtaattgctaaggaaacctgcagaaagttaatagtgggcttcattttcacaagtggggcttatgttattacctggtatcctctgtgaatctgagaaaagagcacaactgacaactggaaacagtggttgcaaataatacacagttttagttggtcataaaaacttgagatccttttcacatttytgttttgtgtaataaggatgaagatttgtatgtgtatgaatccacctaatggagatgaaatccaaaccttttgttattcttagccttagagcctatttgaacttctcttgatattggatcggtagcttgcctaagagatgtttgggtcagttcttggtgattcctaatcctgggtggcccactttttatacctaattaatatacaacatcagtcagtccatcttttttaggctatgacctcataacttgtggttaaacttccaagggtatatatgactttctgtaaagaagtaaataaccatttctatcataagaaactgatgagattatcatcattattttattatttatagtagtagtagtaattgctgtatattatatatttatgtaaccaaatctgaggaacatc

SEQ ID NO: 413727 - DNA, 673 bp, Homo sapiens
ataccattacactcgggagaagggtttcagcatatgaattttgagaggatacacattcaatctgtagcagagtagatattgtaattgctaaggaaacctgcagaaagttaatagtgggcttcattttcacaagtggggcttatgttattacctggtatcctctgtgaatctgagaaaagagcacaactgacaactggaaacagtggttgcaaataatacacagttttagttggtcataaaaacttgagatccttttcacatttctgttttgtgtaataaggrtgaagatttgtatgtgtatgaatccacctaatggagatgaaatccaaaccttttgttattcttagccttagagcctatttgaacttctcttgatattggatcggtagcttgcctaagagatgtttgggtcagttcttggtgattcctaatcctgggtggcccactttttatacctaattaatatacaacatcagtcagtccatcttttttaggctatgacctcataacttgtggttaaacttccaagggtatatatgactttctgtaaagaagtaaataaccatttctatcataagaaactgatgagattatcatcattattttattatttatagtagtagtagtaattgctgtatattatatatttatgtaaccaaatctgaggaacatc

SEQ ID NO: 413728 - DNA, 673 bp, Homo sapiens
ataccattacactcgggagaagggtttcagcatatgaattttgagaggatacacattcaatctgtagcagagtagatattgtaattgctaaggaaacctgcagaaagttaatagtgggcttcattttcacaagtggggcttatgttattacctggtatcctctgtgaatctgagaaaagagcacaactgacaactggaaacagtggttgcaaataatacacagttttagttggtcataaaaacttgagatccttttcacatttctgttttgtgtaataaggatgaagatttgtatgtgtatgaatccacctaatggagatgaaatccaaaccttttgttattcttagccttagagcctatttgaacttctcttgatattggatcggtagcttgcctaagagatgtttgggtcagttcttggtgattcctaatcctgggtggcccactttttatacctaattaatatacaacatcagtcagtccatcttttttaggctatgacctcataacttgtggttaaacttccaagggtatatatgmctttctgtaaagaagtaaataaccatttctatcataagaaactgatgagattatcatcattattttattatttatagtagtagtagtaattgctgtatattatatatttatgtaaccaaatctgaggaacatc

SEQ ID NO: 413729 - DNA, 557 bp, Homo sapiens
actcactttgaaataatactataaagcttcatgtgttggtcaagtgccttataataaaaaaaataagatcctaatttcttcctcccttttcttgtattattgttgtcatttctttcatttatgcataagcacacataagcatacatatgtaatatgtatatatataaatatataaaataatcaaatatattgtggtcattattttaaacagacttttatcrgttgggttgaataagaaatataaaagtgtatattttaccttgacacttccttacttgaatgctctttctttatgtaagtccagttttctgacctattctatttttcttctctctgaagaaccttttaacatttctcgcaaggcaggtctactggcaacaaattttctcaatttttgtttgtctaagaaagtccgtatttctctctcacttttgaaggataattttacagggtgtaaaattctaggctggtgtgggtttcttttttttattttctcaacatttcaaatattttcctccactcttttctcacttgtgtgttttctgagaagtcagatg

SEQ ID NO: 413730 - DNA, 570 bp, Homo sapiens
ttctctctcacttttgaaggataattttacagggtgtaaaattctaggctggtgtgggtttcttttttttattttctcaacatttcaaatattttcctccactcttttctcacttgtgtgttttctgagaagtcagatgttattctaatctattcttctgtaggtaaagtttgttttttttaaattatttcctctggcttctttcaagtattttttcttcattgattttctgcattttgcatataatatgcctaggttttttggcatttatctttgttgtttttttctgagcttcctggaacaatagtttggtctttaacattaatttgggggaaacgctcagtcattattgtttaaaacatttcttcygtttatttctctctctcttctcctcctaatattcacattacacacactttatggcttttgtagttgtctcatagttattggacatattttttcaatctttttttctttgcctttcaactttggaagtttctatcatgagatcattagcatgaggaaaactcagcaattctttcctcagtcatgtccagtctattaatgagc

SEQ ID NO: 413731 - DNA, 556 bp, Homo sapiens
ttattttgtctaaaaacaattgatcatgaaagaatgggtgtatttctggattaactattatgttatattgaaacgtagttatcttttcagcaaracaacactgttttattgttgaagctttataggatggctttaattttttatcagaacaaattttgttctttttcaaaattgtatagctagtctagtttctagtttatttttatccccatgtaaattttagaattagatttttgacttatgcacaaaaacatgctgggattttgattggagatgcactgaatctcaacacaattgcactgaatttaaactaacatcaatattcagtattccaattcataaaaaggctgcatttcccaattttttagtgttctcttttctttcatgtgatttacagtttagttttagagatcctgttcctattttgctagatttatgcctaaatattttgtgaggtttagtattattaaatggtaatgcttttcaagttctacttcattgataatgcatagaaatgtaattaacttttctttactgaccttatatcctgtattct

SEQ ID NO: 413732 - DNA, 500 bp, Homo sapiens
gttggaatagtaaggctgtaatatatagaatgttttctcagtgatttacaaagacataatcaattgtggattttttttattgatacctaaactcttgtattcttttcaaaggactttctaatgtcagctcaagcattacaagttagtaagaaattgccttctcttttctgttagaaatatctagcacattatgtttatgaaagacatattttcatatatgaataattttatttatatttatgctaagatcgttaggttattgaaaggtagttcttaaaataaatttatgtttaatcataaattaaacattaaacatataaatagtttgttcttcttttttgttctaactttctttccagtgcctgtttcagtatcaaaattttctatgcttatgtttcaaatgttartactacaagaaaataagtatggtaaacttttgtaaaatagaagaatccatatatattatgcaagatcttaatacaaatgatcaataaaagaag

SEQ ID NO: 413733 - DNA, 419 bp, Homo sapiens
taaattttaaaaatagtctgtgacaagaggagccaaggtggctgagtagacacagcaaagagtaacatctcctactgagggaccaagacactggggagactggcgtgctccaagcagatcttcagaggaagggtattgagagtgcatcaagggaggatgcaggtctggggctgaagtaggaggaakgtgagaaccctgtacagggctaccaagcaccaggacttgttccctggaccccagtgattcctagggaaagggtgagttgaacaggcaaagtggtctgctctaaccacaataatctgtattcacggcatcaggagaccccacaaacacttgagttggcagggagagctgcttagagagttggtaggggtgggactacagcctgtgtggagcccggagagtttggtgtgggaatg

SEQ ID NO: 413734 - DNA, 582 bp, Homo sapiens
cacatctcacatctgaatttttttttttttttttttttttttttttttttagacacagggttgcgccacgttgctcaggctggttttgaattcctgggctcaagggatctacctgccttagcctaccaaagtcctgagattacaggagtgagccactatgcctggctatggagatttattatttattgctctccttcctttcattctagttatcgccacccataattattcaatctgtacattccttgacttgttttggtttattggccatgagatatctgtcaatttcttgaacatttactatcccataaattgaaaagcagcataagatcaaagctgcttgaggtgagagcctactaacgtggtacagcttgaggcatgccagatggtgtcctgacaaaataatrataagttctggggtacatgtgcagaacgtgcaggtttgttacataggtaaacacgtgccatggtggtttgctgcacacttcatctacattaggtatttctcctaatgctatccctcccccaggcccccactccctgacaggcctcggtgtgtgatgcctgccccacaccatgtct

SEQ ID NO: 413735 - DNA, 547 bp, Homo sapiens
gtctaaatggctataatgtgaaaaagagattttttcatcggaagaaactggaatcacttataaaattgacaaaatagagatttcaggaacctatcccagaactattgaataaaaagaattaggggtgtctcctgaaaatctgcattttaaaaatatctccaggtaagtataattagacagccaaaattgggaacccccgtttatgtaattcataatagaatcagaataaatcagtgttagctccctgggaacagaaacaggaattaaatgaattttcatcctttttgtcctatataatgcctgtcacataatagttactgaaatatttgttagatgaatgaatgaagatactgggaggcatgtttcattcaaacgtaatgaaaaggtattttgtcagctagaattgtcgtttctcgtgcctgcagstgttaaagcaatgactagattacttattggtgttgctggtatcagaaaagtgcagggactgacatatagtaagcactcaagaaatgcttcacaaattaatgcataaactaaatgtgagttt

SEQ ID NO: 413736 - DNA, 547 bp, Homo sapiens
gtctaaatggctataatgtgaaaaagagattttttcatcggaagaaactggaatcacttataaaattgacaaaatagagatttcaggaacctatcccagaactattgaataaaaagaattaggggtgtctcctgaaaatctgcattttaaaaatatctccaggtaagtataattagacagccaaaattgggaacccccgtttatgtaattcataatagaatcagaataaatcagtgttagctccctgggaacagaaacaggaattaaatgaattttcatcctttttgtcctatataatgcctgtcacataatagttactgaaatatttgttagatgaatgaatgaagatactgggaggcatgtttcattcaaacgtaatgaaaaggtattttgtcagctagaattgtcgtttctcgtgcctgcagctgttaaagcaatgrctagattacttattggtgttgctggtatcagaaaagtgcagggactgacatatagtaagcactcaagaaatgcttcacaaattaatgcataaactaaatgtgagttt

SEQ ID NO: 413737 - DNA, 600 bp, Homo sapiens
agcaactgacctttttactatctctatagttttgccttttccagaattgtttcttaatataaagacataaaaattaagtatcttcaaattagaagcttgaaggtttgaaactatctcactgtaaaagttacacatgcctcaagaaacttaatccgttgttaatgttctttggagaaaagtttctaaatttagaataaagtcyctttcactgtgagcaaatcttcaaaaccatattatgaacattcaaacatcaaaagaaaatataggtgaaagacccgcattatatgaaaatattcttgacaggctttcaacatcaatgtatcacacatatcttcaagtacattgtaaaattagagttttccaacaaacttgtactggagggaccactaatatcctgtggtattagtcagggtaagtcaggagacagagaaaaataaaaaataccagtgagttgaataggaaaagtttataaaggtttgttaactactaaaaagtggttaactatgaaaggatacaatatgctacggttactattaaaagagttaaagtagactctaagaggtcaagaattagcgagctaaaagaaacaaaagcagctat

SEQ ID NO: 413738 - DNA, 621 bp, Homo sapiens
gctctcatgataagattagtgccttcctaagaagagacacaagagagcttgccttttctctctctctctctgtatgtgtgtgtatgtggtgtgtgtgtatgtggcatatgtgtctttttctcaccatggacacgtgataaaacagcaagaaattgcccacatgagaaaaccagagaggccacatgagaacattaccatgctgacaccctgatgtactttccagcctccagaactgtgagaaataaatgtttaagccatctagtctatagtgttttgttttaacagcccgaactgactaaaacagaaatgcaagaaagcagaaatcttgatctamaattagaaggaaaaagacaaatagaaaaagacaaagaaaagagagagacactcatagctagctaccatggacatatttaagatattaaagaaaaacattagcataatgaatggaaaggtgggaactataaatatagaatttcaacaactgaaaaaatatgtatctgagaagaaaaacttactggacaggcctggaaacagataggaaactaacagaacaaaaatcagtgaacttaatgcaagaaaaagagaaactacccaaactgaaacaaaaagatgtttttaacc

SEQ ID NO: 413739 - DNA, 621 bp, Homo sapiens
gctctcatgataagattagtgccttcctaagaagagacacaagagagcttgccttttctctctctctctctgtatgtgtgtgtatgtggtgtgtgtgtatgtggcatatgtgtctttttctcaccatggacacgtgataaaacagcaagaaattgcccacatgagaaaaccagagaggccacatgagaacattaccatgctgacaccctgatgtactttccagcctccagaactgtgagaaataaatgtttaagccatctagtctatagtgttttgttttaacagcccgaactgactaaaacagaaatgcaagaaagcagaaatcttgatctaaaattagaaggaaaaagacaaatagaaaaagacaaagaaaagagagagacactcatagctagctaccatggacatatttaagatattaaagaaaaacattagcataatgaatggaaaggtgggaactataaatatagaatttcaacaactgaaaaaataygtatctgagaagaaaaacttactggacaggcctggaaacagataggaaactaacagaacaaaaatcagtgaacttaatgcaagaaaaagagaaactacccaaactgaaacaaaaagatgtttttaacc

SEQ ID NO: 413740 - DNA, 621 bp, Homo sapiens
gctctcatgataagattagtgccttcctaagaagagacacaagagagcttgccttttctctctctctctctgtatgtgtgtgtatgtggtgtgtgtgtatgtggcatatgtgtctttttctcaccatggacacgtgataaaacagcaagaaattgcccacatgagaaaaccagagaggccacatgagaacattaccatgctgacaccctgatgtactttccagcctccagaactgtgagaaataaatgtttaagccatctagtctatagtgttttgttttaacagcccgaactgactaaaacagaaatgcaagaaagcagaaatcttgatctaaaattagaaggaaaaagacaaatagaaaaagacaaagaaaagagagagacactcatagctagctaccatggacatatttaagatattaaagaaaaacattagcataatgaatggaaaggtgggaactataaatatagaatttcaacaactgaaaaaatatrtatctgagaagaaaaacttactggacaggcctggaaacagataggaaactaacagaacaaaaatcagtgaacttaatgcaagaaaaagagaaactacccaaactgaaacaaaaagatgtttttaacc

SEQ ID NO: 413741 - DNA, 580 bp, Homo sapiens
acaataaacatacatgtaattaaacaatatgctcctgaatgaccactgagtcaagaaaaaatatggaggacataaaaatgtgaaacaaaatataaacacaacatatcaaaacctgtaggatacaaaaaagcrgtgctaacatggaagtttatagcaataaacgcctgtatcagaaaagcagaaagatttcagataaacaatttaaaaattcaccttaaggaattagaaaagcaagaactaattaaagccaaaattagtagaagaaaagaagtaataaagatcagagcagaactaaacaaatagagactaaaaaaatacaaagaatcaatgaatcaaagatttggttttttgaaaaaataaacaaaattaatactagcttaactaagcaagaaaataaagagagaaggcccaagtcaacaaaatcagaaatgaaaagagacataacaactgatacaacagaaatacaaaggatcatcagagactgttatgagcaactatatgctaataaattggaaaacttatgaataaattcctgtacacatgtcatctattaagactgaatcaggaagaaatagaaaac

SEQ ID NO: 413742 - DNA, 615 bp, Homo sapiens
tataaggccagtaataccctgttaccaaccagacaaggacaggacacaacaaataaagaaaactaaaagccaatatctctcatgaacatagacacacaaattctcaacaaaatattagcaaactgagttcaaaagcacattaaaaaggtagtacatcattatcaagtgtgacttatmccaggctgtaaggatggttcagcatatgcaaatcatatcaagagaatgaaacacaaaaccaagtagatgcagaaaaagcattccagccaacttgctgcaaatgacaagattttgctcatttttattgcttaaatatattccattgtgtgcacaatggaatatatccatatttctcagcagttttattcatttcttttcattcttttttctctattcttgtctgcctgtcttacttcagaacggtagtcttcagcttttagattctttcctccgcttgttctattcaattatctgtatttgtgattgcattgtgaagtcttgtgttgtgcttttcagctgtatcaggtcagttacgttcctctctacattggctattctggttattagctcctgtaatgttctatcatgattctttgcttctttgcattgggttacaac

SEQ ID NO: 413743 - DNA, 617 bp, Homo sapiens
aatatgtataattttcattcatcactttaaaacattttttaaaaaaagatattaccattgagggaaactgagtaatagatataagagatctctttgcattattaattacaagtgtagaatctacaattctttcaaaacaaaatgttcacaagagtaaaagataatacacgttttcrgattaaaaaccaattattaatgctaaatggatgaatatggtattcaccttcactgcggtggtagtttcttatgtcaaaatatatcaatgctaaatgatgcaaaaataattatagtcatcattgtctttaactatagcaataaaattggactaccaaaaaatagtaattaaaaagtcagccacttttatccaaaccccatctaggtctgccaacgcttaggccacttcgtttattgacatcctgggccactgctgccgtagccaaatcccactgtcacccctcctacccctgcactgctttttctagcatttgcctatcctttttttattcctttagggtcccaaggtaacaactaacaagcttatagatgagctataccagaagatagctacaaccctcattccaagtctatatattttatgtagcttctgcaatcaatac

SEQ ID NO: 413744 - DNA, 577 bp, Homo sapiens
cttcttttcataagagtgtgctatattttgtcagatgctttctctgcatctattgagatgttcatgtggttttataagttgatatttaaaaaatttaaacttaccagtccatggatacacatcaatacaacattataaggctacttaaatatttctgtaataaatcgttcttttaaataatatgtatctttaagaaaaatggtcccagccacaaaagtatgttctgtgtttaccatactttagctgaatacttgtttagcttcctgttctgatataaatatctgctttcattagaataactccatgtctgtgataacatgcttggattttctcaygttaaacaatacatatcaaagcataaaaataatgcatttaatattaaaatacatacaattgtagctacagctgagtacttgtgtgtgtttatttaagaagttagtttttactttatgagcaaaaggaatgtatttactattctacttaatattcaaaaataaaaaggcattcagattggaaaagaagcaataaaactatctctatttgtagatagcatggtcttatacatagaaaattctaa

SEQ ID NO: 413745 - DNA, 577 bp, Homo sapiens
cttcttttcataagagtgtgctatattttgtcagatgctttctctgcatctattgagatgttcatgtggttttataagttgatatttaaaaaatttaaacttaccagtccatggatacacatcaatacaacattataaggctacttaaatatttctgtaataaatcgttcttttaaataatatgtatctttaagaaaaatggtcccagccacaaaagtatgttctgtgtttaccatactttagctgaatacttgtttagcttcctgttctgatataaatatctgctttcattagaataactccatgtctgtgataacatgcttggattttctcatgttaaacaatacatatcaaagcataaaaataatgcatttaatattaaaatacatacaattgtagctacagctgagtacttgtgtgtgtttatttaakaagttagtttttactttatgagcaaaaggaatgtatttactattctacttaatattcaaaaataaaaaggcattcagattggaaaagaagcaataaaactatctctatttgtagatagcatggtcttatacatagaaaattctaa

SEQ ID NO: 413746 - DNA, 568 bp, Homo sapiens
aattgttatttcattttgcagcactccctgaaattctaccaattaagtcttcatttgaaatatagtaagtattccttttcaaaacaagcaagaaaaaaattcccaaatggtcgatatttttatggacttattttttttcaaatgtcttagatatatcagagagatagagtaggaatttgagagaacatggtgagaaaattttgggtcaagattttcagggaggtataggcttagggtgacatacagcactttgggttagaaatgagatgagagctcctgtccttccctcttccatcaaggaatttaattcwtcaaagcactgaatgctgcaggttaatggccaaacacattattaggccgaagaggaatgtggagtaagtgtgggaaagactttagtcaaggacatagtccattatggctaatgatgaattaagtaaaattgagtttggaagtaatagccacccacaattttcacatagtagatctcaataaatatttactaaattaacaagtaaatgcatattcagaaaaggtaggaacaagtgtcaaatattcaaagcagtagaca

SEQ ID NO: 413747 - DNA, 570 bp, Homo sapiens
agaaatgctgcttatatgcccctggagaattattttgcctatggatatgtaaggttttttttttctttattttataagccaattatatcaggattttctgattctcaaaaacaaatgcatcctaatggaaacattcakttagtacgggatacctaagaggaagtatttttcttcttagttccagttaaagctctgagataatggagcagcttctgtcacatatctatttctaagccaatgtctctgggtcttgggcctaccctagagctgtggcttgaacagccctccacaacaaattgcccagactaagagtgagaaccaagaaagcagtagtcgttacccaagcaaatgtgaatggattctagtcaggctaaattaacagatgtttattaaaataagcttcaaaaatgagaatatttaccaataattattattatgtttacctactatatgacatgggttgtctgcgttagtccattttacatttccataaaggaatacctaaggctgggtactttttaaagaaaaggggattatttgcctcacggctctgcagactgtatacgtgaa

SEQ ID NO: 413748 - DNA, 566 bp, Homo sapiens
tctgagtccatttccaaaagtgcgttagctgccatttggcaaataacatttgtttctgcattatttgctaatattttaaacttaaatgttatctattatcaactgttgccttagtggccaacttatgtttgactttggaaaccaagacaacctctactttcatggtatttctcattccaacatcctgggcctggccaaaagtcagatataaggaaaacaatycttttattcctgataccagtttttgttttctactttatatattatcccattaaattactttttttattatggattaatttaaaccatgggtaatttatctttaaaaattgattagattttaaactccttgagggtaaaggctaggagtgtttagctttgtatacctactgcctgacagatggcaggtatttaatggaagcttattaattaatgaataaataattacagcattagttttgatgggaacactaatgtaaagaacattaaggcatagtgtttaatatatactctctactatgtgacaagaccaattcacatgctgatggtatttggtctatattgtc

SEQ ID NO: 413749 - DNA, 553 bp, Homo sapiens
gagggtaaaacgtatagttcaatgcctgtatagaatggtaacctggcaactttagcctttatgctttttagtgctgcttttaaataaattatgaagatattaaagataaaactattaattaaagcaaaacttaaacataagagacctgtaaaaaagaagtcgaatacattacaaaatactatatttgaacaagatgctctcatagttatggtgaacttgaactgggccatgcctctacatagctagtgttccttaccctgccctgttgaaaatattttactaacatttaatcacttagtaatcaaaataactctgagaattgagttgtttaattttattcattataaagataaggctacttgayatccaaggaaggaaatatgtggctccaaggcatatagcttgtcagtgggagcccaggtttgaaactaggtgggctaattccaaaatctgcaatcttaaatgctgctcaaacaatgctttttaacatgcattagactgcatttcaaggttgtcatttgtgaaagctgagaaattacattgccctcaccct

SEQ ID NO: 413750 - DNA, 553 bp, Homo sapiens
gagggtaaaacgtatagttcaatgcctgtatagaatggtaacctggcaactttagcctttatgctttttagtgctgcttttaaataaattatgaagatattaaagataaaactattaattaaagcaaaacttaaacataagagacctgtaaaaaagaagtcgaatacattacaaaatactatatttgaacaagatgctctcatagttatggtgaacttgaactgggccatgcctctacatagctagtgttccttaccctgccctgttgaaaatattttactaacatttaatcacttagtaatcaaaataactctgagaattgagttgtttaattttattcattataaagataaggctacttgacatccaaggaaggaaataygtggctccaaggcatatagcttgtcagtgggagcccaggtttgaaactaggtgggctaattccaaaatctgcaatcttaaatgctgctcaaacaatgctttttaacatgcattagactgcatttcaaggttgtcatttgtgaaagctgagaaattacattgccctcaccct

SEQ ID NO: 413751 - DNA, 533 bp, Homo sapiens
ttttgggtcctcctctatgaagttacagtaaaacattttccatatattccaaagctacattatmtagtatttttattttctctgtatctctcaaaagtatttgacacagaggaaaaatcgtacaaagaaattttgtgtcattttagttctttccaacattttatatgcacttattcatttcttaaaattatctctcaaaaaatagcataatcatgatatttatgcaggataagccaagctgaaaataatattattttctgcctcctgctccctctctcctttttcattcttctttcttgtgaaagggaattagaggtttttcaggaaatcaaacattaagataacagtaaagatgatctcaagaaactaaaatttctcctggagaagaaggctgggtctgttcagtgtatatttattacataatctagggactaaagtggaagaaagcacctaaaagaaataaaacactcatctaaagttaatattttctgatggtagatttcaattgtaacattgtcctgtactgtatgaag

SEQ ID NO: 413752 - DNA, 598 bp, Homo sapiens
tctgcttaataatactcatgtctttttagtcttttaagtgtggatcttttctcaaagacacaccactggaattatccaaattcaaatgattgggactgaaggaatatgttacaatcacattttatattattatccattaaatagctttggattatataatacgcagctgaaatatgctgacagttattcagaaacctaagtaaaacttttgatgaaccgggctctactttagttcagtagttatatctcaatcagacaagytcgactgtataatttaagttttagtcaagatgagatttatgggtatatcatatccacagactgctgtgaggaaagaaagatttgaagaaatgagttattaatctttactgcagaacattaacaaatgtcatgtggcttttatgagttggtacctaggaggtagtagtttcataagccccccaaaatagatttcctcttatatacctctgataccaagaacataattaatagttacctattattcacttgtgaagctcagagttttagttcatttattaaattcaagcttagtatgaaattaacaaaattaaataagggctgtcatattataatgaat

SEQ ID NO: 413753 - DNA, 566 bp, Homo sapiens
agggactctgtgcggaggctctgaccccacatttcccttctgtactgccctagcagaggttctctatgagggccctgtccctgcagcaaacttctgcctgggcattcaggcatttccatacatcctctgaaattgaggtggaggttcccaaacctcaattcttgacttctsagcaccgtaggctcaacacctcatggaagctgccaaggcttggggcttccgccctctgaagcaacagccctagctgtaccttggccccttttagtcacagctggagcagctgggacacaggacaccaaatttctaggttgcatacagcatggggaccctgggactggcccaggaaaccattttttcctcagaaacctctgagcttgtgatagtagaggctgcttccaaggtctctgtcatgccctggaaacattttccccatcgtcttggtgattaacattcagctcctcattagttatgcaaatttctacagcccacttgaatttcttctcagaaaagcccatttacttttctattgcattgtcaggctgcaaattttccaaacttttatgctc

SEQ ID NO: 413754 - DNA, 566 bp, Homo sapiens
agggactctgtgcggaggctctgaccccacatttcccttctgtactgccctagcagaggttctctatgagggccctgtccctgcagcaaacttctgcctgggcattcaggcatttccatacatcctctgaaattgaggtggaggttcccaaacctcaattcttgacttctgwgcaccgtaggctcaacacctcatggaagctgccaaggcttggggcttccgccctctgaagcaacagccctagctgtaccttggccccttttagtcacagctggagcagctgggacacaggacaccaaatttctaggttgcatacagcatggggaccctgggactggcccaggaaaccattttttcctcagaaacctctgagcttgtgatagtagaggctgcttccaaggtctctgtcatgccctggaaacattttccccatcgtcttggtgattaacattcagctcctcattagttatgcaaatttctacagcccacttgaatttcttctcagaaaagcccatttacttttctattgcattgtcaggctgcaaattttccaaacttttatgctc

SEQ ID NO: 413755 - DNA, 548 bp, Homo sapiens
tatctcctagtgaattccactttatttttcatgaattcatagaccagctgtttaataatcaatctgctttagaatttcatgaygcctaaaaatcaagctcactagctcttggtttctaaaatctgtcttttcctatttttaataagtttttcttatcattaactttggttcctcaaatacttttcttgtttccaagctcacataattattctgggcctagacattttaatttctttagattggtttgctgatccgttattacctacattcctctattgggcttcaattttgttttaatggttgttttatatattctagtttaaagcataatttagagccgtgtggttctttttttctatacatatatccattgctcctgggctacagtttgtcatagaaaacattagtctctttctagaaacatcttccctttccagttcctctactgtcttccattaggaggttgacaattcaatattgggcaccaattgtcatgtgtacagctataatcagttagccaaacaaccaattaataattttggagtttg

SEQ ID NO: 413756 - DNA, 566 bp, Homo sapiens
aagcaatggctacgatattttcccaattgttagccatttcatttccaaaatttyatttgaaaatttctataagacatgttaggaagtattgataggagaccttagtgagaaactacactcgcatgatgtaaattgagtagagacagctcagagtgcttttaacctgttctcattttccaaggctccgcaatgatcaccattctataaatacacacctctagattttgcatgttgaaatagggaaaaatgtaggtaaaggcagacattgcctaaaatatattctaagagacactagcttggagagatgcccagggataaaaatgttcccaaaatccaagtaaacttgagtgaggccgtgcacattttccctctcatggtacaataaaccttagtgtaaagacttagagactttcagtatatagaatcttgtttcaatatcttaactcagcttttccccaataattgcttaagactaacaattttcatgacaacaattattcatagagcctatttcagtggtgcttttgtaggtgaaaattatgggcaattttctgatttttaaaaat

SEQ ID NO: 413757 - DNA, 566 bp, Homo sapiens
aagcaatggctacgatattttcccaattgttagccatttcatttccaaaatttcatttgaaaatttctataagacatgttaggaagtattgataggagaccttagtgagaaactacactcgcatgatgtaaattgagtagagacagctcagagtgcttttaacctgttctcattttccaaggctccgcaatgatcaccattctataaatacacacctctagattttgcatgttgaaatagggaaaaatgtaggtaaaggcagacattgcctaaaatatattctaagagacactrgcttggagagatgcccagggataaaaatgttcccaaaatccaagtaaacttgagtgaggccgtgcacattttccctctcatggtacaataaaccttagtgtaaagacttagagactttcagtatatagaatcttgtttcaatatcttaactcagcttttccccaataattgcttaagactaacaattttcatgacaacaattattcatagagcctatttcagtggtgcttttgtaggtgaaaattatgggcaattttctgatttttaaaaat

SEQ ID NO: 413758 - DNA, 600 bp, Homo sapiens
agaatcttgtttcaatatcttaactcagcttttccccaataattgcttaagactaacaattttcatgacaacaattattcatagagcctatttcagtggtgcttttgtaggtgaaaattatgggcaattttctgatttttaaaaatctattactgacattacttatttgtcmtttcaaaaagatacaaagctgaaaaggattttgaagttagctgctaatgtggggactgaggtgcccatccatactcatgggcattcacaacaggccaatttccttttaccacccttggccaaaattacaggattggaggacgcacattgttagcccagcccatccccctcgacctcattcatgccatcactagagtcttcacagagcaatttccagcttgctttctgtgctccgtgccaatgcaaatcctgcctgttttcaaggcccatgataaatcccatctcacttcaaagcctttcctgaagatttgcttccatttggcttagttcaataaacatttattaaatgattaattcatgtttcactctgaactgtgagccagagatacaaaatggagatgtctctctgcccttaagaatattaaaatc

SEQ ID NO: 413759 - DNA, 560 bp, Homo sapiens
aatgaactttaattccaaataagccaactttgaggcaaaactatcttttttttctatttagggaaattgtagtaaacctatgggctttgagtgaggaaatggtaacatgtgagtcttattccacatgtcataaacttattttttatctattgttgaatttataccattatggacagtttgaagaatacagaaaaaatgaagtaagaaaaatatctacacactcacacagcatcacacacatgctgtaaaaaaatatttctaattaaaaataaaatatatagctctttctcagctccttaacagaagagcctgcagagattcttgggaaggcagcctggaaaggggtgcccaacaccttcagtacttgcggattcccagtctcytgcaggtgcatccacactcggcttccagcaactccttggggctgtcactggggtgttcttaccaggtcaagtccccagtagcttctgcgccagctctgaacataaccaggcaggagttccgtgacacgtggcacaagatgtgaggatgggtcactgcttcttgctgtttggtcactg

SEQ ID NO: 413760 - DNA, 584 bp, Homo sapiens
ctccccagactaaatcgttggattttaaaattaacacctttccatcaaattttccattgctgaaggcatcttcttcctgtactgacaaatctatatcatattcatagaaaactgaccttgggtaagctagcaaagaagttcacttttcatacatttgtctgccttgatggatggagttccaagacttcctagagtaaaagaatgtgcagacatgatttgctttaaggaatggatttacttaagcattaatcattcccttgagaattaatccttcatcaatagcttaawtcctttgtaactataaaactcacccttcacaaacattcatggtccagaaaccaactctctgtgaacttgattatccctggagctagtgaatgcctatctgtacttttggagatcaagtccccattcaagagtccaaaaccctccagattttcttattcctggtatttctgtttgagatgttaacagaaaagaggaactgtaccaatgcccacttgggaaagttgagttcatttttcacattgtgcaacaaagacatgtatggtcaagattgtgaggagaggcactgagaacaaaag

SEQ ID NO: 413761 - DNA, 590 bp, Homo sapiens
aatactaagttgcactctgtcccctgaaccttttattaagtggcccaatctctacctctaggcactatacataataaaattcatctccctcatacttaagttcatcattctcatacttgaggaaaatataatcttctcttcttgaaataaaaattcagctccttcaaatactcttcatctgacttgatagtcacaaaaatgtgtttttagcggccagcacattcaaaacagcagtcagtgtccagaactgcatatggagttgcttagaatgtcagatccaatckgttttaaccctatcacacaccaaaattggttctactacaaaatgaatacctgatattagctgtttactttttagtcacacagaaacagaagttgtggaccaactaaataaaggtgctttttgattaacgtaatgttaactgtatcacataatatatttttacccttctatctgccctccttgctcaccccacctgtcacctatcaaccggacacatcatctcttcttcagctttccgatgaccttagatgtaactgtggccactcttcctgattactgtctgttgaaaaaaaagagaggaatttct

SEQ ID NO: 413762 - DNA, 561 bp, Homo sapiens
aggtatgaatctatatgcatatatagaagccaaagggtatgtttataagacacacaaaattgttaaaagctaaaatctctgaggaggaaagtaggctgggcgttgcaggaacagtggcaggaggacaacgaggaaattgaagcaacacttytcgtcgttattttatgtatttctgcattattttacaactataaggtcaacggtagcattctgtcttggtaattatgtgatttgttctttttttctgtagcccactggttcagaatatccacaaaatccagcaggggtagcaaacgctcagacccatagaaacaagctcgcggaaactgagtggctgagatggtcagcaccgtcttctgacatgcgttttgagagaatcagacaccatcctggacacggagaacaggttaaatccaagctatgcagataatccaccaacaaccttggcacttgagtagatctgcctggttaaagaataagctgttagttttgaatgaacaggaatatcaagagacctcaacaaaaagaacccaaacctcaggaaaacctacttcaggaaaa

SEQ ID NO: 413763 - DNA, 561 bp, Homo sapiens
aggtatgaatctatatgcatatatagaagccaaagggtatgtttataagacacacaaaattgttaaaagctaaaatctctgaggaggaaagtaggctgggcgttgcaggaacagtggcaggaggacaacgaggaaattgaagcaacacttcycgtcgttattttatgtatttctgcattattttacaactataaggtcaacggtagcattctgtcttggtaattatgtgatttgttctttttttctgtagcccactggttcagaatatccacaaaatccagcaggggtagcaaacgctcagacccatagaaacaagctcgcggaaactgagtggctgagatggtcagcaccgtcttctgacatgcgttttgagagaatcagacaccatcctggacacggagaacaggttaaatccaagctatgcagataatccaccaacaaccttggcacttgagtagatctgcctggttaaagaataagctgttagttttgaatgaacaggaatatcaagagacctcaacaaaaagaacccaaacctcaggaaaacctacttcaggaaaa

SEQ ID NO: 413764 - DNA, 561 bp, Homo sapiens
aggtatgaatctatatgcatatatagaagccaaagggtatgtttataagacacacaaaattgttaaaagctaaaatctctgaggaggaaagtaggctgggcgttgcaggaacagtggcaggaggacaacgaggaaattgaagcaacacttctcgtcgttattttatgtatttctgcattattttacaactataaggtcaacggtagcattctgtcttggtaattatgtgatttgttctttttttctgtagcccactggttcagaatatccacaaaatccagcaggggtagcaaacgctcagacccatagaaacaagctcgcggaaactgagtggctgagatggtcagcaccgtcttctgacatgcgttttgagagaatcagacaccatcctggacacggagaacaggttaaatccaagctatgcagataatccaccaacwaccttggcacttgagtagatctgcctggttaaagaataagctgttagttttgaatgaacaggaatatcaagagacctcaacaaaaagaacccaaacctcaggaaaacctacttcaggaaaa

SEQ ID NO: 413765 - DNA, 622 bp, Homo sapiens
caaatggtgtttttttcaaaatgaataaattgatagacrgtgagactggtcaaagaaagaaggtgcaggtaatcaatttcatggataaaatggatcagtccttatagaccaagcagatatcaaacagtttataaagtaatattatgagcaactctaagccaatagaacatttacttgaagtggatgaaatattacacaaaaataaaactcaccaaaattgtccttcccttttatagataatctgattaatccttaatttaaggaactaaatttctaaaagaagcaaaagataacttcactaagaaaatgttagatccacataatgtagccgctaagatttttctaaatatttaacagaataaaatttgaattataaataattttttcttgactttattaactaatcttttagataagttagataaaattataaactactctctcatagagataaaacacctgaaacaaaatattagccagattcaaatgatataaaccatgacctcattgattttaaacctgaatgcaagaataattgctcttaagaaaaccagcatatttcaactaaaaatggttattaaaggagattaataatacaataattttaatatatgcataataa

SEQ ID NO: 413766 - DNA, 622 bp, Homo sapiens
caaatggtgtttttttcaaaatgaataaattgatagacagtgagactggtcaaagaaagaaggtgcaggtaatcaatttcatggataaaatggatcagtccttatagaccaagcagatatcaaacagtttataaagtaatattatgagcaactctaagccaatagaacatttacttgaagtggatgaaatattacacaaaaataaaactcaccaaaattgtccttcccttttatagataatctgattaatccttaatttaaggaactaaatttctaaaagaagcaaaagataacttcactaagaaaatgttagatccacataatgtagccgctaagatttttctaaatatttaacagaataaaatttgaaytataaataattttttcttgactttattaactaatcttttagataagttagataaaattataaactactctctcatagagataaaacacctgaaacaaaatattagccagattcaaatgatataaaccatgacctcattgattttaaacctgaatgcaagaataattgctcttaagaaaaccagcatatttcaactaaaaatggttattaaaggagattaataatacaataattttaatatatgcataataa

SEQ ID NO: 413767 - DNA, 613 bp, Homo sapiens
gaatagctattcagatcaagttaaaaattgaaatacaaaaacaaaccagagagagaaagagagagagagacaggaaaaacccatccattgaatctccagcattcctgcatggagtttagtaaggaaagagcacatgtcgcaaagcaaagacattgcagttccaacaacaaaagtgaaacatcttatttacaaaagacccctttccggctgttgtgagtgaacctgtgtttgtgagaagcagcgaagaagctctaaagcccacacttttctccccttaaacggtcatcacagcatcgaagttccaaaaggggacacctattacaggcctctaatgattatttttttaagtgcactttacacgtcctcccacagccctagtgctgcgctggaaagatgatccctttcctgcctgtcagccacaggtacagaatgycccttgtccagacccaggagaaacaacaggagctgttgaactctttgccttgagtcttccctgagagaatgcgccaggctttgtcttccttgggacaaagctcctctctcccagggggccggggtgccaccaaaccatggcatggatttagactccatgggattggagttcattcagaaa

SEQ ID NO: 413768 - DNA, 460 bp, Homo sapiens
ttgaggaaattaaatatctggattatttcaaaatattacttagggagcatttcatgaaggaatataatgaaagtgggagggaaaagagcagaaacaaaagaggcctacattaaagattttgcagtgctcaaaccaggccctctatgcaggagactcttgaagccctgaggaggctttgaagagggagctctgggcatccactgcacccgtcctgggaygggaatcagaactgcccagtaaacgcattaagcacacctgcccttcttcagttggtacagtgattggtgccctatttaacttttccttttccctcacaggtcttctggagacttctgagcaacctgctatacgtgtcctgtcgttggtgatgtttccatgtctctgtgtgatctgcaaacccctctgctaaaaaagaattccgattcgcattcttaccactggggctgcacctgctccacct

SEQ ID NO: 413769 - DNA, 460 bp, Homo sapiens
ttgaggaaattaaatatctggattatttcaaaatattacttagggagcatttcatgaaggaatataatgaaagtgggagggaaaagagcagaaacaaaagaggcctacattaaagattttgcagtgctcaaaccaggccctctatgcaggagactcttgaagccctgaggaggctttgaagagggagctctgggcatccactgcacccgtcctgggatrggaatcagaactgcccagtaaacgcattaagcacacctgcccttcttcagttggtacagtgattggtgccctatttaacttttccttttccctcacaggtcttctggagacttctgagcaacctgctatacgtgtcctgtcgttggtgatgtttccatgtctctgtgtgatctgcaaacccctctgctaaaaaagaattccgattcgcattcttaccactggggctgcacctgctccacct

SEQ ID NO: 413770 - DNA, 460 bp, Homo sapiens
ttgaggaaattaaatatctggattatttcaaaatattacttagggagcatttcatgaaggaatataatgaaagtgggagggaaaagagcagaaacaaaagaggcctacattaaagattttgcagtgctcaaaccaggccctctatgcaggagactcttgaagccctgaggaggctttgaagagggagctctgggcatccactgcacccgtcctgggatgggaatcagaactgcccagtaaacgcattaagcacwcctgcccttcttcagttggtacagtgattggtgccctatttaacttttccttttccctcacaggtcttctggagacttctgagcaacctgctatacgtgtcctgtcgttggtgatgtttccatgtctctgtgtgatctgcaaacccctctgctaaaaaagaattccgattcgcattcttaccactggggctgcacctgctccacct

SEQ ID NO: 413771 - DNA, 460 bp, Homo sapiens
ttgaggaaattaaatatctggattatttcaaaatattacttagggagcatttcatgaaggaatataatgaaagtgggagggaaaagagcagaaacaaaagaggcctacattaaagattttgcagtgctcaaaccaggccctctatgcaggagactcttgaagccctgaggaggctttgaagagggagctctgggcatccactgcacccgtcctgggatgggaatcagaactgcccagtaaacgcattaagcacacctgcccttcttcagttggtacagtgattggtgccctatttaacttttccttttccctcacaggtcttctggagacttctgagcaacctgctatacgtgtcctgtcgttggtgatgtttccatgtctmtgtgtgatctgcaaacccctctgctaaaaaagaattccgattcgcattcttaccactggggctgcacctgctccacct

SEQ ID NO: 413772 - DNA, 550 bp, Homo sapiens
ctttgaccccaatttaacctaattaatttaatataattgcctcagatgagagtgaagttatttgctttctggaacaccagtaggaaatgatagaactgagtctaagaacacagactgagcatgacatcacagggtaaggtgagccagagggctgggtgacacgatgtttcctcgtcctctggtatcccactggttgggaggagcggggaggacagggaagccaggggacagcagagaccacagaagcattctccctgttgctgctccagtgactggcacaagacgctgaaatccaaggtcaggggcagccttctgggtgtttcccagaggaaaagaccagaaatcactcaatctggaagctgaagacggcattyaatttttgtcacaggccatggatcccagtcaggaagaggaatggagatggcaactaggaatgaatggtcagaggcaaatggactagagacagtctcttcctgtgtctacttcaaaaatcacgttgttttcactcaaaaatgcccctaaagcagcccaaactgcccacttctttgtg

SEQ ID NO: 413773 - DNA, 357 bp, Homo sapiens
tgtacatgatatacgcaattatttctcaagtaaaaataaagtaactatataaagctagattagaggactttatgtgttcaataaaatagacatgctaaaatagaattgaaaagtttaagatcctagactctagattgggggtctgcaaattatgtcccttggtccaaatctggtccatcmctctgtttttataaataaagttgtattgaaacacagccatgaccatttattaacatattttccatggatacttttgctcaaaatctgcagagatgagtatttgaaacagaggttttatgtattgcaaaacgtaaaatatttgcaatactgctaccttattctcaaaaaaacccacaa

SEQ ID NO: 413774 - DNA, 562 bp, Homo sapiens
ctccccaaagttctgtcctccccaaatcgcagtcctccccaaacctgtgtcttctaggatgtgctagttcrtttgtataacttttaaccagtttctgaatctcatcaaaccttaatgtatgtatctgtaagatgatggtgatgattcttccattccagcaacacaatgagaattaagtgtgataaaacacagcagaatgtttactactggcacagacagggcagttttctgctctttctctccctctctcagctctggtgacagggaattctcctgtttttgttcctgtctttcaagtgcccctgacttcctgtgtttctgctcccctccttcctctggctgcattgctttcaggtcactctgcaccttatgcaagggctgtctgtgcttaagcccatgtcctctatgttggacttcctgtggattcgctaagcatcatcttatctgtgtaccttccacaaggactaagtcatgtgtgcacccagaggtgcaagtatttaacatttgtttactgactggagcgtgtctcagtcctcagattgtgttgcctgtctcagcacat

SEQ ID NO: 413775 - DNA, 562 bp, Homo sapiens
ctccccaaagttctgtcctccccaaatcgcagtcctccccaaacctgtgtcttctaggatgtgctagttcatttgtataacttttaaccagtttctgaatctcatcaaaccttaatgtatgtatctgtaagatgatggtgatgattcttccattccagcawcacaatgagaattaagtgtgataaaacacagcagaatgtttactactggcacagacagggcagttttctgctctttctctccctctctcagctctggtgacagggaattctcctgtttttgttcctgtctttcaagtgcccctgacttcctgtgtttctgctcccctccttcctctggctgcattgctttcaggtcactctgcaccttatgcaagggctgtctgtgcttaagcccatgtcctctatgttggacttcctgtggattcgctaagcatcatcttatctgtgtaccttccacaaggactaagtcatgtgtgcacccagaggtgcaagtatttaacatttgtttactgactggagcgtgtctcagtcctcagattgtgttgcctgtctcagcacat

SEQ ID NO: 413776 - DNA, 562 bp, Homo sapiens
ctccccaaagttctgtcctccccaaatcgcagtcctccccaaacctgtgtcttctaggatgtgctagttcatttgtataacttttaaccagtttctgaatctcatcaaaccttaatgtatgtatctgtaagatgatggtgatgattcttccattccagcaacacaatgagaattaagtgtgataaaacacagcagaatgtttactactggcacagacagggcagttttctgctctttctctccctctctcagctctggtgacagggaattctcctgtttttgttcctgtctttcaagtgcccctgacttcctgtgtttctgctcccctccttcctctggctgcattgctttcaggtcactctgcaccttatgcaagggctgtctgtgcttaagcccatgtcctctrtgttggacttcctgtggattcgctaagcatcatcttatctgtgtaccttccacaaggactaagtcatgtgtgcacccagaggtgcaagtatttaacatttgtttactgactggagcgtgtctcagtcctcagattgtgttgcctgtctcagcacat

SEQ ID NO: 413777 - DNA, 582 bp, Homo sapiens
atgtacatatatgtatatatttatattctatatataatataaatataactatatacacattatatatttatatagatacataaatatattttatgtatttatatttatttacgataattgtttattggtattatttatattttatattaatatattattttaatatataaatatatattttatgcacttaacatatatttayatatgtatatttatatatagatacaaaaacacatatattagagaccagataaaaatataaataataggtaaataatatgtaaatatatatagttatttaaatttgttgtataatatatatattttttcagaatcatattatactacagctccccagacaaatgaatcaagggcatctagtgtcgttggaacagcatagaaacatcttagaacaaagaagttattctacaaacttctacattgaacgtgatctgttgtgagtccacttgtgtgactgtgatggttaattctgagtgtccacttcattggattgaaggatgcaaagtattgatcctgggagtttctgtgagagtcttgccaaaggagatttacatttgagtc

SEQ ID NO: 413778 - DNA, 582 bp, Homo sapiens
atgtacatatatgtatatatttatattctatatataatataaatataactatatacacattatatatttatatagatacataaatatattttatgtatttatatttatttacgataattgtttattggtattatttatattttatattaatatattattttaatatataaatatatattttatgcacttaacatatatttatatatgtatatttatatatagatacaaaaacacatatattagagaccagataaaaatataaataataggtaaataatatgtaaatatatatagttatttaaatttgttgtataatatatatattttttcagaatcatattatactacasctccccagacaaatgaatcaagggcatctagtgtcgttggaacagcatagaaacatcttagaacaaagaagttattctacaaacttctacattgaacgtgatctgttgtgagtccacttgtgtgactgtgatggttaattctgagtgtccacttcattggattgaaggatgcaaagtattgatcctgggagtttctgtgagagtcttgccaaaggagatttacatttgagtc

SEQ ID NO: 413779 - DNA, 470 bp, Homo sapiens
ggggccattcaccttgcatttggagttaaagtacgtgggtttgaatcctgggttctccatttagtagatttatgtcctccatcttcctgaccctcaaattcctcatctgtgaaaaggagatactgaatcaaacctcacaattctraagattaaaagtgaggactatgtgtgaaatctccacctaacaaagactggtatgcaataaaaacagtatatgtgagaggaacctgtaggattatgtaagaaacaaggaaccagtaaagtttttgagcacacaaatgagatagccagaactagacatttggaaatttattgcagcaatattgtgtgtagaatgaattaaaagacagccattgtacaggaagggagacccagtaggagagcattacactagtgcaggtttgaggcagtgaaagcctgaacagtgctgctgggaatgagcaggaggggatgtgggtaagaggcttcat

SEQ ID NO: 413780 - DNA, 473 bp, Homo sapiens
ggatgtcatttccatgaggtatttatgctggctatctgagttttatagcttttgatcttttaaaattgtttgttgtatctttaattgtattgtcagtcttattttgcatgaaacaaaaaacaatgtcaggtggagattaaatgatatatgttcatcatcattcagccaaggcatgtagtaaccacaactttagctctaccaaatgagatgttaaaaaatttatgtttgtttagacacttcaaaactagaacaattggtcaatgsaggcaggaatatgggaacctggagagcacttattttctctaatagacttcaagccttcccatcagaaattgcatccaaaaaaaaggtggcaaaggttttcagtagcagcagcttgcaaagcacgactacttaatgtgctaaactaatgaatgaccttctttcattgccttgtccaatgcataacaggaagacctgtgttttggttaggg

SEQ ID NO: 413781 - DNA, 374 bp, Homo sapiens
agttcacctcaacaggcttttgacattatgaaggaagcaattggcaaactactgctagcsgctgaagtattcagtgaaacatctactctgggaccaaagaccttccataggtaaaaaacaaattttaatttaaaaaaaaaagaaaagaaagaaagaaacctatcttttaaaaattgttggtggaaatgtatcttaattatcataagtaggtggtacttggaaaattttatgtcaatatacaaacatgatcttctaaacatatgtggccatatttatagatcctaaaactttagaacgtgtggcagactcagtagtatctaaatagtggtaacaagaagtaaagtgcgcattttcaaagttaatcttttaattgc

SEQ ID NO: 413782 - DNA, 590 bp, Homo sapiens
attgatataattctcaaagcaaattgccaccaaatctaatatttgccttagaaataaatatctgtaaagggctactagcccttgctttcttcttacaggcttgaaaagtggttatgagttgtaggtaatggtgctcctgaaaacccagagaaattgaacagtatatcatttggactatttatattgttctcattagtcaaagccattggtgtgctttctttcagcaggctataacaaattgttttttgttcaaagaaaggttggcccaatgtttcaattaggtaatgctgagaaaatttccacatgcatktgacatttccttcaataggcatgtgttgtaggaacaagattgggggatggagtattccttgcagatggtttcactgattgcagaactaactacaggctggtttgatatatgttccctgaagacagaattaggacactttaccgcctgacatatttaacttcttttgaaaatgatgctaatttgtcctttttttctttttcacccacacccttttataggcaggactgatgagtttaaaacattgagcatgacctcattcttcaaagcagagcaggcccct

SEQ ID NO: 413783 - DNA, 487 bp, Homo sapiens
agtgaaataagccaggcacagaaagacaaatgttgcatgttcacgttcatatatgtgagctaaaaaaatacatctcatgaagattgagaatmgagtgatggttaccagaagccagaaatgatagaaggaggatggaaggaaaaaagaatatagctatacttattaccactgaactgtatgcttaagaataataaagacagtaaattttatatgcatattttgtctaaataaaaaaattaaaaaataaaatgtgatctctcatggctcgtacatatttttattgtgtttagtgcaatactgtaaacttgaataacaccagggcacccataaaaagtgccaccactaatgatgctagaagtgctcccaagaagcagagaaaagtcatgatataacagaaaaagttgaattgcttgatatgtattgtcagttgaatatgtgttaatcaattgtttatgttagcaaggattcaactcaatagtaggttatt

SEQ ID NO: 413784 - DNA, 533 bp, Homo sapiens
ttaaaaaaacacctcaggctactaaggaaaagtaacaccagtttaatattttgtaatgaaacaaatatgctttcatcataaatgataccaaaatgtataattatttgcttttctacatcatatttctaaatgttaaatatctaagtttgatcaatgaaaggactgtgcttttatacatatatatttatatatatatttatatatatattatttatgtatttatatatatttatatatwtttttatatatatatttatatatatttatatatatatatatatttgagacaaggtcttgctgtcactcaggctggagtgaagtggtgcaatcacagctcactgcagcctccacttcgagggctcagttggttctcctgcctcagcctcttgagtagctgagaccacaggcatgcaccactgtgcctggctaatttttctattttttgtatagatggattctcactatgttgctcaggctggtcttgaactactgggcttaaataatcctcctgccttgacctcccaaagcactgg

SEQ ID NO: 413785 - DNA, 567 bp, Homo sapiens
gcttacgtattaacttgtaagatctgaataagcacattgggtcagatgcatatatttcttcaatataaaagttgatgtaattaatataaatatcaatgtatctacatgaacctatatatgtaggtatttctgtttgtttttttaattatcccaaagaggtgtcataataatatatgtctggcttatttatacctactaacccatcctggcatcctttccatatcagcatattcagagttatttcatacatacctcttaatagcttagggtgcgtcattaaataaataaatatacatttgatttagccattctttattgttgtgtatttacattatttttgtaatgtttttcttttgctatttcaaaagtactgcaatgaatactcttayacatctattttggtgtacttttacaagtttgtctagtggcggatttgtattggtacgtgtaattgccaggtcaatggtaaacgcactgcaaatttgttagacatgaccagattgcctcccaaaatggttgctccaatttccactctctccaacagtatttagaagttgttttcttaat

SEQ ID NO: 413786 - DNA, 567 bp, Homo sapiens
gcttacgtattaacttgtaagatctgaataagcacattgggtcagatgcatatatttcttcaatataaaagttgatgtaattaatataaatatcaatgtatctacatgaacctatatatgtaggtatttctgtttgtttttttaattatcccaaagaggtgtcataataatatatgtctggcttatttatacctactaacccatcctggcatcctttccatatcagcatattcagagttatttcatacatacctcttaatagcttagggtgcgtcattaaataaataaatatacatttgatttagccattctttattgttgtgtatttacattatttttgtaatgtttttcttttgctatttcaaaagtactgcaatgaatactcttacacatctattttggtgtacttttacaagtttgtctagtggcggatttgtattggtaygtgtaattgccaggtcaatggtaaacgcactgcaaatttgttagacatgaccagattgcctcccaaaatggttgctccaatttccactctctccaacagtatttagaagttgttttcttaat

SEQ ID NO: 413787 - DNA, 561 bp, Homo sapiens
tagcagtgagccaagatcacgccactgcaytccagcctgggcaaaagggtgtgtgagatgtcatcaagaaagaaagagaaagagagaaagagggagagagagggagagtgagagacagagagagagagagagaaggaaagaaagagaaagagaggaaaggaaggaaggaagaaaggaaggaaggaaggagaaaatttagagaggaatgcccagaaaattgacttctttgcagctttttgttgcttttctcacacctaggtagggagcagttagctcatacctctacctggtaagccctctaggaatctaatttctgaatgcagttataaatacagcccttcacagaggaagacagaaagcagaaggtaaagcaatctcagtttcatcttccgtcctcctctcctctacacctaatctgcagtttatatttttttcttatctgacaaatcctccttttagaagtagacttcccccttagcctgaacacgaaagaagagaaagatttcctccatttcctccatattccaccactgatggcaattttttaatgttagatgaaac

SEQ ID NO: 413788 - DNA, 599 bp, Homo sapiens
tatgtaagtacaggcaacagtaacctcccttcttctgccttgaaatttaagttatgtcaacattcaaagagtttcaactgctaaagataaatacccctcatttaaaaaggaaaagagggaccaaatgcatagaagtggggcacagagccttccttgagatgctaatgaagacaaaataatgacattttctcaataagttttagatgggtaattaagaaactttgacctctatttctccaaaaggcaagcattaactaggccaaaatgggcagccaggcattgtgaatattaatatcacaaaaagttaattcactttacagaaggatattttgcataatggaacacgctactgatctaattagaatatagttttctttactaaaatctattaacttttaaagcacatttctaagatataaaacagccatgatgaccttttaataatggttgttttaatattttattgtttttattacaartaatacaaaatgtatgtaataaatcactgcatgttctttctaatcttgccccagacatcacagtttggtatatatctatctagcctttttatttattataaatatttaccaagaaatgat

SEQ ID NO: 413789 - DNA, 599 bp, Homo sapiens
tatgtaagtacaggcaacagtaacctcccttcttctgccttgaaatttaagttatgtcaacattcaaagagtttcaactgctaaagataaatacccctcatttaaaaaggaaaagagggaccaaatgcatagaagtggggcacagagccttccttgagatgctaatgaagacaaaataatgacattttctcaataagttttagatgggtaattaagaaactttgacctctatttctccaaaaggcaagcattaactaggccaaaatgggcagccaggcattgtgaatattaatatcacaaaaagttaattcactttacagaaggatattttgcataatggaacacgctactgatctaattagaatatagttttctttactaaaatctattaacttttaaagcacatttctaagatataaaacagccatgatgaccttttaataatggttgttttaatattttattgtttttattacaaataatacaaaatgtatgtaataaatcactgcatgttctttctaatcttgccccagacatcacagtttggtatatatctatctagcctttttatttaytataaatatttaccaagaaatgat

SEQ ID NO: 413790 - DNA, 612 bp, Homo sapiens
tgtgtacataaacattactggccaggcatgtaataaatgctttaaaaatacatctatttcaattatccttatgctccagttttatccttgaggagcttgacaaatctatactagttgtggtaagttggaaggcaggttagaactccaagtagcaactaatatcctgagatttgcaaaatatttttggaataaacttatagcagamcagacaattcataattggcagactacttaagatttgtcacaaaaatcaactcaaaatggattaaagacttaaatgtaatcccagaaactgtaaaaatactagaagaaaacctagggaaaggtctcctggacattggtttaggcaaataatttatgattaagacttcaaaatcacaggcaactaaaccaaaaatagactaagaagacttaattaaactagaaagcttctgcacagcaaaagaaaatcaagagataacttgctgaatgagagaaaatatttgcaaactattctcctgatgggggactaatatctagaatacacaaggaactcaaacaacaagtgaaaaagcaaataattccatcaacaagtgggcaacttatagaaatagacatttctcaaaagaagac

SEQ ID NO: 413791 - DNA, 612 bp, Homo sapiens
tgtgtacataaacattactggccaggcatgtaataaatgctttaaaaatacatctatttcaattatccttatgctccagttttatccttgaggagcttgacaaatctatactagttgtggtaagttggaaggcaggttagaactccaagtagcaactaatatcctgagatttgcaaaatatttttggaataaacttatagcagaacagacaattcataattggcagactacttaagatttgtcacaaaaatcaactcaaaatggattaaagacttaaatgtaatcccagaaactgtaaaaatactagaagaaaacctagggaaaggtctcctggacattggtttaggcaaataatttatgattaagacttcaaaatcacaggcaactaaaccaaaaatagactaakaagacttaattaaactagaaagcttctgcacagcaaaagaaaatcaagagataacttgctgaatgagagaaaatatttgcaaactattctcctgatgggggactaatatctagaatacacaaggaactcaaacaacaagtgaaaaagcaaataattccatcaacaagtgggcaacttatagaaatagacatttctcaaaagaagac

SEQ ID NO: 413792 - DNA, 610 bp, Homo sapiens
tgagagaccatcaggaaatgtgtctggcatttatctttacatttgtgtgatttttgccggcgtcactgacaggtatgtagaacgttggatggagatagattggattgttccaggattggagagttgctgtgtaccataagtaaaataaaaaaaggaagatgyggattgttgaggtatagaaatgaacagtgtagacacaaattgaaagagttaggaatcatgggaatggaagttctgcatgactgcagaagaggcaggaataaggtagaagaaaagtatattttattttgagaaaaggaattagaatttaaaattacagatggagcatccctggcttgaatgaaatattctagcatttgtacaaaaatattgttgaatgaaatagaatgaatccatacagacctttgatagcaaattgtgaaatggagagaatgacaatggctaaggtgtcccattggtacatggaagcataattaagatgttgatagaagattgccacaaggaggagccaggtgaaatgagccacagtagagggtaacacaatggaataatggtttgaaagaggcagttggaagacaagaagaagtaaacttcctgactacgcaggcag

SEQ ID NO: 413793 - DNA, 600 bp, Homo sapiens
gttacagcctatttcttctgactacattgaagccattttacagtctgaactaaaaagatgtccatctggggacatgaaaggtgactatcacattggatatcacttctctaaaaaaagaataatttggtatagataagtgtatgcttatttaaactatccttttataaaaaaacaagggcattactttttattgacwatgaactataaagcatataattaatgtaagtgcattgttttaatatttgaaatactttgattaatcaattattttcttctcccctttttgcccagttaatccatattcatctgcagatatgttacccatgttacacttgccagagagccttccctgagcctctgatttgtttctttattatatagttgatagcactcagtaattttcttccgtagcagttaccacaattatttaaatgaccaagtattgaattaattgtttaatgtcagttttcccaggatgtcagcttcatgagggcagagagcctgactagtttgcattatactaattcatttggcaccataatttgtacatagtagttagaaaataaatatctggtgtgaaccaaagaactgcaaagtatg

SEQ ID NO: 413794 - DNA, 600 bp, Homo sapiens
gttacagcctatttcttctgactacattgaagccattttacagtctgaactaaaaagatgtccatctggggacatgaaaggtgactatcacattggatatcacttctctaaaaaaagaataatttggtatagataagtgtatgcttatttaaactatccttttataaaaaaacaagggcattactttttattgacaatgaactataaagcatataattaatgtaagtgcattgttttaatatttgaaatactttgattaatcaattattttcttctcccctttttgyccagttaatccatattcatctgcagatatgttacccatgttacacttgccagagagccttccctgagcctctgatttgtttctttattatatagttgatagcactcagtaattttcttccgtagcagttaccacaattatttaaatgaccaagtattgaattaattgtttaatgtcagttttcccaggatgtcagcttcatgagggcagagagcctgactagtttgcattatactaattcatttggcaccataatttgtacatagtagttagaaaataaatatctggtgtgaaccaaagaactgcaaagtatg

SEQ ID NO: 413795 - DNA, 607 bp, Homo sapiens
aatctggcataaagtgatagttaatagcccagtagatcacatgggctacagttccacccaccttattaactaaactgataacttggcactccacacatcccctaccctgttttacscaggagcaggagagcaatgataagaaaaactcggaagcattttgagtgaatgctgtaaaatcaatatattctgcacctcggtagagagatgttttggcaagtttttccagaagaccacctcagttacctcagttattccaagactaacaagcaagtctctaagtcagttatttctggttgctaccttctgatggtcatttttccttttttcagaaatatgtacaacagctccctgaatgcaactgttatgatgcaaaacaaactgcatgattaggaaattgagcaaattcaggtgcctttctgtaaattactgactgctttctctctaatctcttaatctactcagatctctttgaattatttctctctctacagcttttgcgtcgctctcagatgctgtgccacccaggcattaaataaatgtgcagttatcttgtctccttgataattaacagagatgttaagggctagtaccaattcagtggcatggg

SEQ ID NO: 413796 - DNA, 607 bp, Homo sapiens
aatctggcataaagtgatagttaatagcccagtagatcacatgggctacagttccacccaccttattaactaaactgataacttggcactccacacatcccctaccctgttttacccaggagcaggagagcaatgataagaaaaactcggaagcattttgagtgaatgctgtaaaatcaatatattctgcacctcggtagagagatgttttggcaagtttttccagaagaccacctcagttacctcagttattccaagactaacaagcaagtctctaagtcarttatttctggttgctaccttctgatggtcatttttccttttttcagaaatatgtacaacagctccctgaatgcaactgttatgatgcaaaacaaactgcatgattaggaaattgagcaaattcaggtgcctttctgtaaattactgactgctttctctctaatctcttaatctactcagatctctttgaattatttctctctctacagcttttgcgtcgctctcagatgctgtgccacccaggcattaaataaatgtgcagttatcttgtctccttgataattaacagagatgttaagggctagtaccaattcagtggcatggg

SEQ ID NO: 413797 - DNA, 559 bp, Homo sapiens
aagcaatgcttataaagtaagcacagtaagtgtttaaaaagtatcagcagttatttttaagaagttttagctgagtttcatctatgcgactggcctaacgagagttattgaccttgtttacttgcaggaaaaaatggaactaaatttgtttctaataaggtgaaatcatgtttacgtcggcagtgaatatcaaaacctactcaggcatcagagtgagcaatgtacttcacagacttagaaaaacctcaaaactaagatatataatcaagagatatccttcagctgccacactgggaacactgggttgaaaagccgctctcagactaggttttcaggcttcagtatcggggataggtttgacctagaccacttctgtgacatttgcctgagacttgagatgagattttgttgctktgctagctcagctgatacctgtctccttagggctctttatctgaacctttcctaagacactgatcatctctgccacgtactgtagttatttatgggcatgcattactcccagctagatgcaccttcttgggacggggttcaaagc

SEQ ID NO: 413798 - DNA, 559 bp, Homo sapiens
aagcaatgcttataaagtaagcacagtaagtgtttaaaaagtatcagcagttatttttaagaagttttagctgagtttcatctatgcgactggcctaacgagagttattgaccttgtttacttgcaggaaaaaatggaactaaatttgtttctaataaggtgaaatcatgtttacgtcggcagtgaatatcaaaacctactcaggcatcagagtgagcaatgtacttcacagacttagaaaaacctcaaaactaagatatataatcaagagatatccttcagctgccacactgggaacactgggttgaaaagccgctctcagactaggttttcaggcttcagtatcggggataggtttgacctagaccacttctgtgacatttgcctgagacttgagatgagattttgttgctgtgctagctcagctgatacctgtctccttagggctctttatctgaacctttcctaagacactgatcatctctgccaygtactgtagttatttatgggcatgcattactcccagctagatgcaccttcttgggacggggttcaaagc

SEQ ID NO: 413799 - DNA, 459 bp, Homo sapiens
ctctcaggatgctgtctggcacatagtaggtgctcaacaacgtgaattccctttgttcttccctcccccttaccccacttacaaagtgactaaattggacagttagggcataaagtatgacccattcaactcttcagtctcatctacagtgtctatatttgtgttttaaatgacctctgcacaagctgattcaccaaaatttctcttcactccccctytccctaactcctgtcctataatgtggcttccccaagaactttaaatctgacacatatatttattttattttttttagataatttcttcttcctgataggctggaagttctgaggaagctagaggcaggccttcctcatgtcacagaagcatgtttctaaataaggaagaataataagaactaatttgtggttactaacctttggtacaagtacagcctgaaataattgttccaaagacagt

SEQ ID NO: 413800 - DNA, 459 bp, Homo sapiens
ctctcaggatgctgtctggcacatagtaggtgctcaacaacgtgaattccctttgttcttccctcccccttaccccacttacaaagtgactaaattggacagttagggcataaagtatgacccattcaactcttcagtctcatctacagtgtctatatttgtgttttaaatgacctctgcacaagctgattcaccaaaatttctcttcactccccctttccctaactcctgtcctataatstggcttccccaagaactttaaatctgacacatatatttattttattttttttagataatttcttcttcctgataggctggaagttctgaggaagctagaggcaggccttcctcatgtcacagaagcatgtttctaaataaggaagaataataagaactaatttgtggttactaacctttggtacaagtacagcctgaaataattgttccaaagacagt

SEQ ID NO: 413801 - DNA, 541 bp, Homo sapiens
ttgttcttccctcccccttaccccacttacaaagtgactaaattggacagttagggcataaagtatgacccattcaactcttcagtctcatctacagtgtctatatttgtgttttaaatgacctctgcacaagctgattcaccaaaatttctcttcactccccctttccctaactcctgtcctataatgtggcttccccaagaactttaaatctgacacatatatttattttattttttttagataatttcttcttcctgataggctggaagttctgaggaagctagaggcaggccttcctcatgtcacagaagcatgtttctaaataaggaagaataataagaactaatttgtggttactaacctttggtacaagtacagcctgaaataattgtyccaaagacagtttgttgatagagggcctaattcccttcaaaactatacagggtggttctaaatgtcaacttacttcgtgagagaaagttctcgttttctttggcaccttgctgaagctaattgggtttctttgtgttttgagcga

SEQ ID NO: 413802 - DNA, 572 bp, Homo sapiens
tttgcatttgaggcagatatcccctaaagttattaaatgatcaatcttccccaaagaagcagcaaacaaaatcctgagcaattctcacctagcaagctgtcttccttcttgaaggatttcagcatctgtttggtctttatctaaagtatcttccaaaaacagctcagcttaactttctcctgtttggctgtggtcagcaagatgagaaattatsagggggaaaattagaatttggaagtgggcactgaccgagttgtcatctgaccagagaagatgaataagaagataaacaggaaggcagcatgggagaaatacaattagacgtgtggatccacggagagaattagaattcagcaaaattccctccgtgcaggagctaccaattcaattctgtaaaattgtaaatgatgctatcactttcaaaactgggtaggtgcatactgtatttcttcacttctacccaatccccaatccccaccagctgctgaaaaaacaaagtactagataaacaaaaagaatgcctaccttggattttctctctgcggaagcagtcgacttgtttattaatctga

SEQ ID NO: 413803 - DNA, 572 bp, Homo sapiens
tttgcatttgaggcagatatcccctaaagttattaaatgatcaatcttccccaaagaagcagcaaacaaaatcctgagcaattctcacctagcaagctgtcttccttcttgaaggatttcagcatctgtttggtctttatctaaagtatcttccaaaaacagctcagcttaactttctcctgtttggctgtggtcagcaagatgagaaattatcagggggaaaattagaatttggaagtgggcactgaccgagttgtcatctgaccagagaagatgaatragaagataaacaggaaggcagcatgggagaaatacaattagacgtgtggatccacggagagaattagaattcagcaaaattccctccgtgcaggagctaccaattcaattctgtaaaattgtaaatgatgctatcactttcaaaactgggtaggtgcatactgtatttcttcacttctacccaatccccaatccccaccagctgctgaaaaaacaaagtactagataaacaaaaagaatgcctaccttggattttctctctgcggaagcagtcgacttgtttattaatctga

SEQ ID NO: 413804 - DNA, 566 bp, Homo sapiens
ctgacactggagatgtgattggtttgggaaaagatgtcatgggagttgaaggttatccatgatcccagttttagggagcaggaagaggcaggggcaggggcattaggcaggaactgatcttaacgtccacagggactcataatcatctctctgaaccaggggcggttgccaaatgcaaacatgtgcctgttctttgtgtatacttaaagagtagttctatrtctaaatgctgctccaaactataaggtttaatcctatgaaattaccaatatttaacagcttctgacttaccaaaaaaaaaaaaaaaatggcaacttcacaagatgcaacctaatgcaatatgaactgtaaaataaatgtaatacagaatatggactgaaaataaatgcaaaattctttatacttagctctactcttttgtcaaataaattttaaatgaggaatcaacttttaggttttctatatttagatttaagtactttgaggatttttccatcacagattttccatccttgaaaccacttgcacagaactgactctgatctgctgccccctgctgtcagcta

SEQ ID NO: 413805 - DNA, 526 bp, Homo sapiens
ggagtttgacacaaggcattcccttggcttgtgctatctgtagatcattctgtatttcaccgtggcagtgttttgttctaaagttggaaaagaccttgtagttttttaaagagccaaaatacaggattgtttctaagaaaggaggtggccagaatcagtaaatttaagctcatttgtggaagcttccaaatctcaaacctagggcagtattgaacacctctccaaaaagtcagattaagtatttgcaaatggcttcaacaaactccctctctatgaaattttaattatagttgattaaatattcactttaatcatcttaattaatgatatttracaaatattttagctttgcttatgatattcacttgctctgtcagaactctccagttcacactgaaagggtaaagttaacaacctggacagacaggcccatcatgtgtgttatgacctatctggtttcctactcgcatggttagaaggctcattttattgctttgaactctggaattaatcctgcttaaaggag

SEQ ID NO: 413806 - DNA, 611 bp, Homo sapiens
gtctctttgctgacctactgaatcatagcctctaagaacgcgccccaggagcttgcatttaagtaagatttcccatttattctaatgcgcactaaactccattctatagaactgtcccatatggtttccagtgtggtagccactggccacatgtggcttttgagggcttgcagcgtggttgatgacacatattgaaatgatattttggacctacygggttaaataaaacgtaatttaaaattaaaaaaagaagacaacaaatcctaagcaggttacgcaaaaaataatttcaacctaaatgcaccttaaactgcagaacaccaaagacaaaagaaagacttaaaagcagccagaaaaagaacaaattacattaaaggaagcaacaattaaataacaccttatatttcaatagtaacagtgtagaatcttgaagacactagaatgacatcttcaatattcaaagtgaaacttgttaacttaaaatatcatagagtaaaaagtatctttccatagtaaaaattctctaaaaaatataatttatctagaataaaagtgatccaacatgaatggtctgaaagcaataaaaatgaagagtagaacatgggaaaata

SEQ ID NO: 413807 - DNA, 515 bp, Homo sapiens
taaaacaccatgcaagacccagacaaaaaataagtaaatgtggttctcttctcccataaccaccaygcacacattcatctctgaggtatcatggtgtggtggttttgagcacagctaagttcaaatcatggctcggccagctactagctatatggcgactcacaggtttctgaatctaagcctcaggctcctcactagaaaaatgatgtcaataacagtacctccttgaaaggctcattgtgaagaagtgagttattacttgaaacatgcttagaacagtacttggcacacaaagctcaataactgcttgctggcatcaggattactattatttataaaatttgaaaatttattgacagagagattgcctcctttgaaatttcaaaaaactaagggcaaagcacgggatttaatcaagtctgaccttctaatcatgctatgtctcctgtgaagttgtctaggaaatgatgatattttgcattgattaggcaacatgatacttcttgttctgtaac

SEQ ID NO: 413808 - DNA, 515 bp, Homo sapiens
taaaacaccatgcaagacccagacaaaaaataagtaaatgtggttctcttctcccataaccaccacgcacacattcatctctgaggtatcatggtgtggtggttttgagcacagctaagttcaaatcatggctcggccagctactagctatatggcgactcacaggtttytgaatctaagcctcaggctcctcactagaaaaatgatgtcaataacagtacctccttgaaaggctcattgtgaagaagtgagttattacttgaaacatgcttagaacagtacttggcacacaaagctcaataactgcttgctggcatcaggattactattatttataaaatttgaaaatttattgacagagagattgcctcctttgaaatttcaaaaaactaagggcaaagcacgggatttaatcaagtctgaccttctaatcatgctatgtctcctgtgaagttgtctaggaaatgatgatattttgcattgattaggcaacatgatacttcttgttctgtaac

SEQ ID NO: 413809 - DNA, 564 bp, Homo sapiens
gtttcttaagtccctgttagctgcagaaaaaactgattaccttaaattgttctattattttgtttatttacatataatggactatttttactaaaggatttgrggcagcttatagagaataagcagtataaaatagaaaatagattttaaaaagcagggccagtaaaaacatatagaatagaagaacaaggccaaggttcaagctgaagcagagagatgctggacattgatccaataactattacaattgagtggcaaatctggctctgagcttcctggcagtcaaagcaaaaaaacaaaacaaaacaaaaagcctaatctataatatgattcattgtgcatgaggaaaagtattaatttctcaggggaataaaagattttcctgggatttggtctgaaagaaattttacacatgcatctttatatagaggatattgaattggttcagaaacactgacttaacaacgtcttaacagtaaatgcaataatgacctcacatggctgtttattgggagtccttcaatgtaaacagaggagagtacaccagagcaaactccgtgcaaa

SEQ ID NO: 413810 - DNA, 564 bp, Homo sapiens
gtttcttaagtccctgttagctgcagaaaaaactgattaccttaaattgttctattattttgtttatttacatataatggactatttttactaaaggatttggggcagcttatagagaataagcagtataaaatagaaaatagattttaaaaagcagggccagtaaaaacatatagaatagaagaacaaggccaaggttcaagctgaagcagagagatgctggacattgatccaataactattacaattgagtggcaaatctggctctgagcttcctggcagtcaaagcaaaaaaacaaaacaaaacaaaaagcctaatctataatatgattcattgtgcatgaggaaaagtattaatttctcaggggaataaaagattttcctgggatttggtctgaaagaaattttacacatgcatctttatatagaggatattgaattggttcagaaacactgacttaacaacrtcttaacagtaaatgcaataatgacctcacatggctgtttattgggagtccttcaatgtaaacagaggagagtacaccagagcaaactccgtgcaaa

SEQ ID NO: 413811 - DNA, 556 bp, Homo sapiens
gtgggattctgcaggtggtcatatagttctaaaactgattcaccgttaaggttactgagtgttggaaactagagcataagtggtaccaaattcaggaagaagaagtaacaatttgtctgacttccttgactcttgccttattttttatttttatgagtccttttaagggaatcaaagtttccctttctaataaaatataagtaatctcaagttaacagtaataatgagaaaagtaaataatgcagtttaaaacttttagcatatgtacacatgcaataaaaaacaccagagacatgtctctgcctttcaatttctttatctgtaaaatggaaagaactttcctcattgtgcttgcctgaactaacagattactgtgaaaaacttttgaaactgtcaacaccatttgtattagttatctattgctgtgtaacaaaattaccatatatgtggtgactcaaaactagacaatcatttattatcytctgcagtttttgtgggtcaagaattcagacaggcccagcagggatttcttgtctctgcttctcactgttaatgg

SEQ ID NO: 413812 - DNA, 584 bp, Homo sapiens
cataaggcttttcaaggttttatggattatagaatgtatcagtatttctttctttttattgctgaatagcatctcatcatatgggtatatcacatttcatttatccattcaccagttgagagatgtgccaaatctttacccctggaagtgagtcataggagccagaatttctcttccccaaagtgagtcatagaacctagaactcctctccccaaagcaagccataaaacctaggatgatcactctccctcttcccttcttccttgaagactctcatcccagaaggatcttgcccaatcctcaaggaaggaatgctacacagagaggccaagaaggatttgaacagacaggtcttgctgggttccccctctccatctattactattagatcatacccttttaatctaatcatatttctgcatggccatccattcttcattaaacctaagcataaacatacamaattttccctggtttttggatctttatttctgaaggctcctatgtcacgtaaaactttgattaaataagctattatgctgttgtcttgttaacccaactcctgctataggcgtgttggttgt

SEQ ID NO: 413813 - DNA, 584 bp, Homo sapiens
cataaggcttttcaaggttttatggattatagaatgtatcagtatttctttctttttattgctgaatagcatctcatcatatgggtatatcacatttcatttatccattcaccagttgagagatgtgccaaatctttacccctggaagtgagtcataggagccagaatttctcttccccaaagtgagtcatagaacctagaactcctctccccaaagcaagccataaaacctaggatgatcactctccctcttcccttcttccttgaagactctcatcccagaaggatcttgcccaatcctcaaggaaggaatgctacacagagaggccaagaaggatttgaacagacaggtcttgctgggttccccctctccatctattactattagatcatacccttttaatctaatcatatttctgcatggccatccattcttcattaaacctaagcataaacatacaaaattttccctggtttttggatctttatttctgaaggctcctatgtcacrtaaaactttgattaaataagctattatgctgttgtcttgttaacccaactcctgctataggcgtgttggttgt

SEQ ID NO: 413814 - DNA, 586 bp, Homo sapiens
gcctaaatgatctattttatgtatgtgtgttggtgtgggggtgagagctaggatgaaaaggggagagaaagtactacagaaagtaaatgttagcagtcaaagcaatttactcacacttttggattcttttagatagaagtgttttaaagctcgaaatgtgattcttaattattggtatcatttgcacacactggggagtctttgcatatcttatttttaatgtacagtggaatatgtttaacttacttggttttagataaaatttaatttagtgaaatttgagagttaggatttcagtctttgaaatggctttatacatgttattaaagatgttatatttaattctttttaaatatctgaaatttagaaaaactgattaggacacagttaatgtggctttcaaagaaaagctggcattttggctttatagtatttttaatactaratttttagtaattttctataaatatataggcaaggaaacaatgacttactgtatctgcatgtgtaatattttatggttaaaaaaataaagaatgaaaacaacaaaacctaacataaaatctttttatatcccttaggagca

SEQ ID NO: 413815 - DNA, 586 bp, Homo sapiens
gcctaaatgatctattttatgtatgtgtgttggtgtgggggtgagagctaggatgaaaaggggagagaaagtactacagaaagtaaatgttagcagtcaaagcaatttactcacacttttggattcttttagatagaagtgttttaaagctcgaaatgtgattcttaattattggtatcatttgcacacactggggagtctttgcatatcttatttttaatgtacagtggaatatgtttaacttacttggttttagataaaatttaatttagtgaaatttgagagttaggatttcagtctttgaaatggctttatacatgttattaaagatgttatatttaattctttttaaatatctgaaatttagaaaaactgattaggacacagttaatgtggctttcaaagaaaagctggcattttggctttatagtatttttaatactagatttttagtaattttctataaatatatagkcaaggaaacaatgacttactgtatctgcatgtgtaatattttatggttaaaaaaataaagaatgaaaacaacaaaacctaacataaaatctttttatatcccttaggagca

SEQ ID NO: 413816 - DNA, 555 bp, Homo sapiens
atcaccttaaagttttatagtgcagaattttctagaagtcaactgattaattaagtaccttttgtgtgtcagtttatcacactgggttgtttctgtattttaaaacatttcatccttatagcatccccatgaaatgcagattatcctctttttttttttttcagtgaggaagttgagtctcaggaaggcacaataggacaatatgcaattttaagaattagcctgatttagcaaaaataagacattttaggtagaggattttcartattattgcaggagactaatacattcaagtttggagtttctttgggttgctagaataactaaaaggctttggtttgtttcatttaaaaacaaaatagagaaaaatactttttcttgttctatcgatatcacaccattcaatgaccccactcccacacaatacccacaatcaaaatatagaaagaattattagctaaccaaaaaaagttcacataggtaatctaaagtaattttatttttggttttaagtgctttaatctagttaactaaaggaacaaaaagggcaaacat

SEQ ID NO: 413817 - DNA, 616 bp, Homo sapiens
tggtaaatgtggatgaccctaactacatcatcgtcttatcatggaacttctttatatctctgttatggcaattaccgatccatactgtaacacagtatctttttccatgcccatctcactgattagacatcgtctagactagactagagtatgagcttcttgagagcaaagaccatgacttattctaacaaagtggctgatatatgcattattctaaaaacaggagtggaagaagtataggaaaaaaggaacgaraaaaattctgtaaatttccttgcatgtatttaacaaactttgacaggtagtgcagaaccagaatatgtcactggctaagagaaaaatgtagcggcagactctctaaggctgtgtcctgtcccacagagtagctactagcaacatgtggctgctgagaacttaaaatatagctagttcacattcagatgtgctttaagtgtaaaacacacatatttcaaagacttagtatgaaaaaatgtgaagtatctgaataaattttatattgattacatgttgaaattatgtttttgatatactgggttaaataaaatgtattcctgaaattatcctcacctgtgtttcttattacttttctaatgtg

SEQ ID NO: 413818 - DNA, 674 bp, Homo sapiens
ttactaaggtttatcttaaaaggcaatagattaacaactgtaaaaaacaaatccagctcatctcttaaatttttcttaaagagatttctataacaatgacctttcggaagaaattacttctacagcacatttgtgaactttccaagcatcatttctctcttttttttttttttgagatggagtttcgctcttgttgcccaggctgaagggcagtggcatgatttcggctcaccacaacctccgcctccygggttcaagcaattctcctacctcatcctcccaggtagctgggattacaggcatgcgccaccacacctgacttattttttatttttagtggagatggggtttctccatgttggccatgctggtcttgaactcctgacctcaggtgatctgccgacctcggcctcccaaagtgctgggattaccggcatgagccactgtgcctggccaagcatcatttctctcttaaaatgaatacaaatctttttaaaagacccatatccttgtaataataatttatgttaaatttaaacccaatttaaaaatccataaatatatttgtttttattacttgcaacccaggtacactcattatgaaaacaaggtttcagaaaggctcgcaatataaagagaagactttgggtgtgttattaaaaggattatatatc

SEQ ID NO: 413819 - DNA, 559 bp, Homo sapiens
acaacaacaacaacaaaaatccagataactaggactgtgtgcataaaaatgctaggaaaagttttcaggtgaggatagttacagtaaatcagcagaaaactctttaaatgaacattgtaagatgaacagtttagctccaatttgatcataaaacacaaggaaagattatttattaagctcttcagagcttgtactgcaatttatatcttttttaccagaaagattcatttgttcatttatccattcactcatctatccattaaacacaagactgagtgcctactattggattatgtattgttacaggcattgagaatacagcaatgagcaagagaacaaatctttggtctgtggagtttacattctagcagagtggttctcaatctcaactacstattaaggaacaactcctagaaattgatttaatggggaagaaggtaagagaggtggagatcaaagcagaagtagaaaggctgacttcagagaccactgctgcttggccaattctaacaggaggataggcagagtacatgcatacaaatgcatgcaggttaagggg

SEQ ID NO: 413820 - DNA, 639 bp, Homo sapiens
aggggaactgtcaagcagccctaagggccaacytgggattagtgatcattaatttaaaattcaagccagaccaacatggtcatccatttactccaaccatgttcagctactcaagggccaatgcagagcaaatgaacagttggatttgaccaggggtggggtcaaattcaatagaggaaggaagaacgaggaagctgaggatgtgtaatcatgtacggtggaatataaaccagtagggaaggaagctaggacatgaagagggtagagataaagaagcaggtgtttaattattctgcttcagttttatctacaacaggtactgccatcaactataattgcttatcttcctaaaatttgaaattcccttcctttagaattattcaattccttttacggaaggatggaaggtagatttccttttctcctccaaatttattaaggtttaattgataaaaattttatagatttatgatatacaacatatttcgataaatgtatacattgtgcaatgattaaatcaagctaattaacatatccatcaccttatatacttatcgctttttctagattacttttgctcaggagtggccaaacttagtttctttcaaagttcagaagactctgtggatccttcagcac

SEQ ID NO: 413821 - DNA, 590 bp, Homo sapiens
cttgttttctctctttggatgtaattattagcatttgaaatcagaggccaaaaagacttcatgctttgacttaggattaacagtctcttttgaacagaactatcacttgtctattcaacttagtaaagtaattgcttctttattctccttgaaatgttgttgtatgctttacaagtacacaatcccttcccttcaactcttatacaataagctctgaaatgcaaaagagtttttcttcactcatttggcagcaaaactttacctgaactgatttaaggctatagtcttcatttcttctgcttagtgtgaatattcatatatttcattgcagaaattgttggtgttttgattacagggggctgccctggtctctgctggggatgttacatwgcatatggtaaatatacatattaccttgctataattctaaaacaaaactcacatgactccaagagtttcaagtaagggattgtgggactatgggaatttttttcttttcctattttatgaacaggaacctaatttctggcttagtcgtagaattattgtaatagttcactcccacttactaaataattatgatataccag

SEQ ID NO: 413822 - DNA, 541 bp, Homo sapiens
taattgtggatatccttcttttatattaaacccaaacytgacaaatggtggtttcttaaaggcttgttgcaatgtggaaagaactttttatactatgttacattaaaatctatccctctattttgtactttgcatcttttatctaggcataatttggtaacatcatacaacggtcaattggaaaatactcgttcagttagttatgcagatattctaaattcccagtatacagtaacagaaactcacattctttaactgcaccaacaatcttttcacaaaagtctttaaggattagaaagttgttaagttcatatggtcagatacaagttttccaaaattctaatttttacttgaaagatccagttttatcattggttacaaataccctcagttgctttccttgaagtaagactcacttttttctttctataagatgtcttgttattctttgaaataaaaatggtgttccacaaaaatgcagatagtatagctggcaactcaaacaatcacctaaatacttctcaagacaaccccaatacca

SEQ ID NO: 413823 - DNA, 541 bp, Homo sapiens
taattgtggatatccttcttttatattaaacccaaacctgacaaatggtggtttcttaaaggcttgttgcaatgtggaaagaactttttatactatgttacattaaaatctatccctctattttgtactttgcatcttttatctaggcataatttggtaacatcatacaacggtcaattggaaaatactsgttcagttagttatgcagatattctaaattcccagtatacagtaacagaaactcacattctttaactgcaccaacaatcttttcacaaaagtctttaaggattagaaagttgttaagttcatatggtcagatacaagttttccaaaattctaatttttacttgaaagatccagttttatcattggttacaaataccctcagttgctttccttgaagtaagactcacttttttctttctataagatgtcttgttattctttgaaataaaaatggtgttccacaaaaatgcagatagtatagctggcaactcaaacaatcacctaaatacttctcaagacaaccccaatacca

SEQ ID NO: 413824 - DNA, 599 bp, Homo sapiens
aaaagaatgaaaaagtaaaaagcatttgtaagacgattcaaagagaaacagatcaaatgtcaatgacacacactcaaaggaagtgtataaattggtttcaccagattttggttgtcctaaaagtgagtgagtttggggcttgtaacatttaagttttctgtttactgaaaaatgaatctagagttttcctgcccttaaaaatggttgtattttctaggtacatgatttttttttaaatttttttggagaaaatgttataagatggcaaaattctcaatttaagaacacagatgtaaactttattaacagcaggcagaaagctggccttcttccatgctattctattctaatctaagaagataggtggttatgtaattcctccacataaattcagtccacctggacgtgaagggggaggtgacttaacaaactgacttcacatcagttcackcattttctctgcaatttattctttaaaaatgttttttccctatgaacaatacattcaatataaattattagattatcaccaatttctacaaaagcaaatatgcccttgttgcaaatatgcaaaaacagaaggaaaacacaaaaaggaa

SEQ ID NO: 413825 - DNA, 599 bp, Homo sapiens
aaaagaatgaaaaagtaaaaagcatttgtaagacgattcaaagagaaacagatcaaatgtcaatgacacacactcaaaggaagtgtataaattggtttcaccagattttggttgtcctaaaagtgagtgagtttggggcttgtaacatttaagttttctgtttactgaaaaatgaatctagagttttcctgcccttaaaaatggttgtattttctaggtacatgatttttttttaaatttttttggagaaaatgttataagatggcaaaattctcaatttaagaacacagatgtaaactttattaacagcaggcagaaagctggccttcttccatgctattctattctaatctaagaagataggtggttatgtaattcctccacataaattcagtccacctggacgtgaagggggaggtgacttaacaaactgacttcacatcagttcacgcattttctctgcaatttattctttaaaaatgttttttccctatgaacaatacattcaatataaattattagattatcaccaatttctacaaaagcaaatatgcccttgtkgcaaatatgcaaaaacagaaggaaaacacaaaaaggaa

SEQ ID NO: 413826 - DNA, 566 bp, Homo sapiens
atccatgggtctttcatgctttctacacacctagcaaagcacagataccaaataacattgttctaaactacttttttgcgttaggccattctttcacattgctataaagaaatacctgagggtgggtaatttataaagaaaggaagtttaagcggctcaggttctgcaggctgtgcagaaagcacgggaccagcatttctggggaggcctcaggragcttttactcatggcagaaggcagaacaagaataggggcatcacaaggcctactcccactgtgggagcaagagagagagttggggagagatgccgcacacttttaaacaaccagacatcgcaagaactcagtcactaccctgaggacagcaccaagccatgagggatccatgactcaaacacctcccaccaggccccacctccaacactggggactacatctctacatgagatttggaggggacatccaaagtatatcacttttgaaaaattttgtagagtggtcagccttcaaagatacagtgtctcttaccagagaagagattgggcatactctctgtccattataaa

SEQ ID NO: 413827 - DNA, 556 bp, Homo sapiens
tacaccatggaatactatgcagccataaaaaggaatgagatcatgttttttgcagggacgtggatgaagctggaagccatcatcctcagcaaactaacacaggaatggaaaaccaaacactgcatgttctcacttataagagggagtcgagcaatgaaaacacatggacacagggaggagaacaacacacaccggggcctgttagggggtggggggcaaggggagagagcattaggacaaatagccaatgcatgcagggcttaaaacctagatgatgggttcataggtgcagcaaaccaccatggcacacatatacctatgtaacaaacctatacgttctgcacttgtatctkggaacttaaagtaaaataaaaataaaaacagtttgggccttgggaattgtgtatttctaaatgaatcagccagtactgtcaccgtgtactgttatgcagtcaccatgtactgttttgcagtcacagtgacaggaacatgagcacacagcattaggtatgctcatgtccctattactgtgaccacataacaagccaccccaaac

SEQ ID NO: 413828 - DNA, 502 bp, Homo sapiens
acactatcaagcctagtcccacagccaaagacctaaattagctaggcatagtggctcacatctgtaatcccagcactttgggaggttgaggctggtggactgcttgagcccagaagtttgagaccagcctgggyaacacggcgaaaccgtctttacaaaaaatacaaaaattagctgggcatggtggcatgtgcctgtagtcccagctactcaggaggctgagatggaggattgcttgaacccagaaggtggaggctgcagtgagctgagatcgcaccactgcactccagcctggacaacagagcaagaccctgtctcaaaaacaaaacaaaaagactgaaattatcctgaaataaatgtaaccattttgaacttaggaaagaatacctagaaagctgcgactctaaaactgtgtaagacagcttatggatttcaggagacattgtatagatgtttatgtctatcaaaaatgaagaaatttattacaatgacacgccatttt

SEQ ID NO: 413829 - DNA, 502 bp, Homo sapiens
acactatcaagcctagtcccacagccaaagacctaaattagctaggcatagtggctcacatctgtaatcccagcactttgggaggttgaggctggtggactgcttgagcccagaagtttgagaccagcctgggcaacacggcgaaaccgtctttacaaaaaatacaaaaattagctgggcatggtggcatgtgcctgtagtcccagctactcaggaggctgagatggaggattgcttgaacccagaaggtggaggctgcagtgagctgagatcgcaycactgcactccagcctggacaacagagcaagaccctgtctcaaaaacaaaacaaaaagactgaaattatcctgaaataaatgtaaccattttgaacttaggaaagaatacctagaaagctgcgactctaaaactgtgtaagacagcttatggatttcaggagacattgtatagatgtttatgtctatcaaaaatgaagaaatttattacaatgacacgccatttt

SEQ ID NO: 413830 - DNA, 502 bp, Homo sapiens
acactatcaagcctagtcccacagccaaagacctaaattagctaggcatagtggctcacatctgtaatcccagcactttgggaggttgaggctggtggactgcttgagcccagaagtttgagaccagcctgggcaacacggcgaaaccgtctttacaaaaaatacaaaaattagctgggcatggtggcatgtgcctgtagtcccagctactcaggaggctgagatggaggattgcttgaacccagaaggtggaggctgcagtgagctgagatcgcaccactgcactccagcctggacaacagagcaagaccctgtctcaaaaacaaaacaaaaagacygaaattatcctgaaataaatgtaaccattttgaacttaggaaagaatacctagaaagctgcgactctaaaactgtgtaagacagcttatggatttcaggagacattgtatagatgtttatgtctatcaaaaatgaagaaatttattacaatgacacgccatttt

SEQ ID NO: 413831 - DNA, 494 bp, Homo sapiens
tccccttaggaataacctcctggctgccccagaaatgctgatatgtggattgtgtaatgtcagctctcctgtgcgccctatctgtgcctccttcctcgcagcagggaggcgttcagcccgcccctgcccgttccctgccttgctcttttctaagaactggaaattattcctgagatgagaggaataaaacatacataggacatatccagtctatttctgaagcagaacatggagaaaacctagcgaagagattacaaaaaaagataaaagaagttttcytcctagtcctcactcccaatcccttcctgcccaagtttatgtctgctaagggctcctctcatcagcccaacttcctgggctgctttcaggatcaggagagagaggagcttcataatatttccatgtttactttttaggcaaggataggtaagaagggccccattcacagaagcactgctcagacaggatagcagatggcggctgggtgggaagga

SEQ ID NO: 413832 - DNA, 495 bp, Homo sapiens
tatattctaagaaacccaggaagaagctttaaggcttctggtaacctagtcttggaaatcccagaatgtcacttcggctgcattctgttgatcaattatgtccccaagaccaacccgggtttaaaaaaaaaaggttcagactctttttttgggaggttacgtgtggtaatttaatacatttatataatttgtaaagatcaaatcagtatacttaggatgtccatcaccttaaaatatgtgtgctttctttgtgctagatatacagactgcccctcttgatgaaagaaatagcaagggatctgtggccatctttaatatattatagaaggaatagcaagaccaaaggtgagaaatgcrgaaaaaaatatgcattcttgtcagagaactgagtcataaagttgggatggattatcaagttcatgggagttaaatctagaaaagaaaagaagaggcataggagacaagattgagaactctgtacttaaagaagtggga

SEQ ID NO: 413833 - DNA, 500 bp, Homo sapiens
acctagctttacctacctctgaatatttttttctccttataagctttctgtttcatagagatttgctcttttttttatcctactgagaataccaagcttattttaaaatgctcttctarttcctatagtaaatatttttcagaagtctgtacttcttttttgctttagcgtgaagttttcttccctttcatctgcagtaaatttttcatgggttctgtactagagtctttttctgtttgaccctctaggccactctttattcttttccatcctttgtgccctcacagtgtgccctgtgaggctaatatccatggactgcaccaacaagctggagaatcctctggcttccagttgagttcagcaaatgggagcaccagcaggagactggagggcaggaagagaatgaaattagaatgtttatttcccttcatctattatttccagctccttgagacttgggaggactcttgtgaggggtcctttgcatatagatatccttt

SEQ ID NO: 413834 - DNA, 500 bp, Homo sapiens
acctagctttacctacctctgaatatttttttctccttataagctttctgtttcatagagatttgctcttttttttatcctactgagaataccaagcttattttaaaatgctcttctagttcmtatagtaaatatttttcagaagtctgtacttcttttttgctttagcgtgaagttttcttccctttcatctgcagtaaatttttcatgggttctgtactagagtctttttctgtttgaccctctaggccactctttattcttttccatcctttgtgccctcacagtgtgccctgtgaggctaatatccatggactgcaccaacaagctggagaatcctctggcttccagttgagttcagcaaatgggagcaccagcaggagactggagggcaggaagagaatgaaattagaatgtttatttcccttcatctattatttccagctccttgagacttgggaggactcttgtgaggggtcctttgcatatagatatccttt

SEQ ID NO: 413835 - DNA, 500 bp, Homo sapiens
acctagctttacctacctctgaatatttttttctccttataagctttctgtttcatagagatttgctcttttttttatcctactgagaataccaagcttattttaaaatgctcttctagttcctatagtaaatatttttcagaagtctgtacttcttttttgctttagcrtgaagttttcttccctttcatctgcagtaaatttttcatgggttctgtactagagtctttttctgtttgaccctctaggccactctttattcttttccatcctttgtgccctcacagtgtgccctgtgaggctaatatccatggactgcaccaacaagctggagaatcctctggcttccagttgagttcagcaaatgggagcaccagcaggagactggagggcaggaagagaatgaaattagaatgtttatttcccttcatctattatttccagctccttgagacttgggaggactcttgtgaggggtcctttgcatatagatatccttt

SEQ ID NO: 413836 - DNA, 500 bp, Homo sapiens
acctagctttacctacctctgaatatttttttctccttataagctttctgtttcatagagatttgctcttttttttatcctactgagaataccaagcttattttaaaatgctcttctagttcctatagtaaatatttttcagaagtctgtacttcttttttgctttagcgtgaagttttcttcyctttcatctgcagtaaatttttcatgggttctgtactagagtctttttctgtttgaccctctaggccactctttattcttttccatcctttgtgccctcacagtgtgccctgtgaggctaatatccatggactgcaccaacaagctggagaatcctctggcttccagttgagttcagcaaatgggagcaccagcaggagactggagggcaggaagagaatgaaattagaatgtttatttcccttcatctattatttccagctccttgagacttgggaggactcttgtgaggggtcctttgcatatagatatccttt

SEQ ID NO: 413837 - DNA, 573 bp, Homo sapiens
tttccaagaagacaggcaaattgtatgtgaagtatatcaccatactgctttccacaatgtttgaactaatttacactcccaccaacagtgtataagtgttcccttttctctgccacctcaccagcatctgctatttttttatgttttaataatagccattctgactggtgtgagaggtatcttattgtggttttgatttgcatttctctaacgatcagcgatgttgggctttttttcatgtgcttgttggctgcatgtatgtcttctgccaaaagcattttctttctccatcgtcaaaagcagagttgcatagatcaaggtaatcgtcactttgattgctaagaaacctaggtcatgattttctttacattcaaaatttgtataatgtgatttgattcattgtctcattttctagtggtggtaatataaataatggtagattttattattaaataggttcttcctttgtattattttccatctaaaaccttttaatagtcttttgttaattatactagataggtaggtaggtaragagatagatagtatcctttatctactgggaagcagtgc

SEQ ID NO: 413838 - DNA, 596 bp, Homo sapiens
cccaggaaagcctttcctggaaatgacctaaagtgtaccaacttgtatatagtccaacttacacaattcctattttgcctacagatgttagcttataaagggaagcgctgatttaatcaatggcaattayacaactttgtgtggttattgacttcacatttgtgccagaatgtggaaaacatcataggtaaagggaaaattgatggaatctgagctggtactgtagttcctgcctgctgctatgtttttcttctgttaaagctaaaatattaaagttagtgggtacaaaaaatctaattagaaagaataaccaagacctaatatttggtagcacaagagggtgacaataggtaataataacctaatagttcattttaaaataacttagagtgtaattggattgtttgtaactcaaaggataaatgcttgagggaatgaataccccattctccataatgtgcttatttcacactacatttctgtatccaaacatcttatgtaccccataaacatacaaatactatgtacccacaaattaaaaaaaatttaagaagtttgactacacaaatacactagatgcacattccagctaataa

SEQ ID NO: 413839 - DNA, 386 bp, Homo sapiens
atctttttttgcaaagaaacacatgtgaatttcctcttaaccttcctgagttcaaattaatacatttaaatatatacattgaaggcttacaagttctgaaataaactagggactgggagcaataaaaaaggtaagtattgatcactctctttaaggcaattttaatattctcagggatacaaaacaaatgcgtgatggattggagagcagttaagcaacagagaaaagagaaggggaaaacactgagrattaatgaagcctctgaaaaagcttcaagagctagaagggggctgctagccctgaggaatttaaactgtggaaaacaggaaaaaattattaaaggtgggaaaagcaacatcaactaaatcatggagtcagggatgagc

SEQ ID NO: 413840 - DNA, 586 bp, Homo sapiens
cagcatgaagctgtactatagtaatgtcctcttaacaataagcgtatctataaaaaagactggggttgactaagtgaggacctttgaggaagatgttaaaaatgctgaygttgcaaaggcattgaccccagttggcaggtcttttttgacctttctgcctctcatgaactgagcagaaagtagccatgaaaccaaatatgtggcagagaaaatgaccaacctgtaatatttactctagactctgaccattatccagtattttatgatagagacaaaagccctttttgactctggagaaaaatatagagtagtaaaagttttgaaaacataatgtataatgtatgagggtaagttttgtggtttgaggttacttggagattagaagtcttaggaaggaataaaggtttggtcttatcctattggctttggaggttgaataatcacagatgtgaaaaggcaggtctgttctttcaaaaccctctgcaaaccagaaaacagaggtgagatattggaattggtgccacaggcaaactttctttacttttcaaatgtgtctacctccccttttaacaaactcttgaggaga

SEQ ID NO: 413841 - DNA, 588 bp, Homo sapiens
atgaaatctttgccagggcctaggtccagaatggtattttctaggttgtcttctagggattttttagttttgagttttacatttaagtctttcataagaattttatgaggacatagcaccaaaaagcaactcaaagagagctaactctcaagggtaaacaacctggacaaatgtctatagttttttgctgatctgaatttatttcaaaataaattctagtctatctagaagacttttccccaaagaatgcatcagaggttaaaatactaatagtagatattctgggaaaaaataaaaaggaagaggaagtatagcaggaagggtatggatgaaaaaaaaggagaaagaatrcagaatggttaagtaagtttaagaaatgctgggatagcaatcttaaacaattcctcaaaggttcttagtatgctaatatgcattaagaatgtccaagaggagtacagaacatgtagcgtttcctaaattaatctgaccatagagccctttatcatatagaatataaaagaaatgatattctatatattcttctatagagatcacactaaaggaaactctgagcaattaatacacaga

SEQ ID NO: 413842 - DNA, 547 bp, Homo sapiens
tgaaacttctagacaaaaaaagagaagaaaatttttgttgtcttcggctagtccaagagttttttagacataacaccaaaagtatgatcactaatagaaaaattaataaactagacttaatcaaagttaaatactctgtgtttccagagactctgttaggagaatgagaaggcaacccacagacttcgagaaaatatttgcaaagtgtagacctaacacatctgggcttgcatctagagtatataaagaattctcaaaaatcataakaaaacaatagtgcaaaagatttgaacagacacttgactaaagaagacatattaatggcagataagctcaagaaaagatgtgtagcatcactagtttttagggaaaagcatgctaaaatcaaaatgagatatctctacatatttacaaggacgtataaattttaaaacaagtgttggtgaaaatatgaagaaactggaactctcatacattgctggtagaaacttaaaatagtacaactactttggaaaagtgtttggtcatttatttaaaaaattaaaca

SEQ ID NO: 413843 - DNA, 576 bp, Homo sapiens
gtgcatgtgaaatatattttcaatattgttatctttctttattaggttggctcatcaaatataattcatatcactcagcatgtggagctcttggttgacccaggcaagagaaaccaaactaactggacaattatttttaaccttcctaaggtcacatctacacagtccccccatattcatgggggatatgttccaacacacccagtggaattctgaaactgcagatagtaccaaaccatatagacacacattttccatcttaactraatatttattatgcactggggctataactagcacaaatttcttttttcttctttacaacttcatggatagattatttgctcttagcaaccttggcaaatgattatgtttctttccttattaagtcaagaactttcatcttttcactaaaggaagcacttgactgcttccctttagcatatctgaattgccagcatcattacttaggaacattattaagtaaaataaggattacttgaacacaagcactgtgatgctcaatagttgatctgataaccaagacggttagttactaagtgactaatgagcagg

SEQ ID NO: 413844 - DNA, 566 bp, Homo sapiens
gtcagaaacatacccaaaaattaagaccaagaagcatttcaattcacacattgcagctctgtcctcttgtttatgattgatttaaagactattgctaattttctaaaaggcagctcagagcatgcacaacctctttagtgtcgtgtttgttctctagtattccctcatcacgatgattgttaaccttaaaattggaaagaccctgtagatcacctgatccaacactacaattttattactgaagagacttggctctagagagattgaatgggttatccagatctacatacctacctcatggcaacatgaggacaaagcccagatctccctcctccaagttcaatgytgtttctacaatatcagggtgctttccttattctttcaaaattataaatatgtgaattatgttgatatttgtattcatatgtggagactttcatgagtcatcattacaaaccaaagatgatataaaaacagtgtcaacatacttacaataacatagaaaaattatctttgatcactgtgaaaactacatttttactgcagtagacaggcgctttatagca

SEQ ID NO: 413845 - DNA, 561 bp, Homo sapiens
ttataattccaatttaatgtggcaggtagaactaaaggcataaatcacacctgagtacacgtgattataaagttattagttctcaaaatataatttggtagtctttactttgtgttattgttgctgcacttagcaattttgctccgtgtgtgtgtgtgtgtgtgtgtgtgtgtgtgtgtgtgtgtatcatgttgaatggggtacctggtaccattgacatttattttcatgcttgcaaatttcctatagatatgtcttttcagtaagtatttttttcctactatatttggaatatttcgccataacttytgggcccacatgacacttcccacttgggagatctgataagatctattcattgtatcaatcagtatggaagatgtaagtaattaacacatatatagtacaagctggtactatactgagcacttctcatgcattgctttattgaattctcacaggcctatgagacaaatttgatgattaacaccactttacagataaggaaactaaggtgtagaacagctaagtaacttgttcagggtcacatggtaatgtttt

SEQ ID NO: 413846 - DNA, 615 bp, Homo sapiens
cagcacttcactaatatttattgagatgccagacctcatctacttattttggtgaagaagataatacgcagttcagtgattttgttgctttaggaaaacctccrgaaggttgtagaagtgcaggattacaatctcattctcatctttccattcttaatggttattaagagcagcctctggaatcagactgcttgggttcatgtccatagtctgcgacttactgtgtgactttggacaaatatgccttagttttctcatctgtaaaatgaaaatcatgaaagtatacatctcacattgctgtgaaaattaaataatgtacataaaacatttgagaagtatagctgacatatgtgttagctattattattaaaattagcctgtccacacaaattaatctaacatatagagtccagtaggcaccaaaatagtggcaggcaattatggatttgcctttgtaacaagtgtctaaacacagattaaattaaatataacacagattaggttaaatatccaagttacaatttatcagtgatgctaagttatagaaatatataaatatcatgacgcaaggccattagacaacagataatggagagcattgttatacacaattag

SEQ ID NO: 413847 - DNA, 594 bp, Homo sapiens
attcacaaaaataagcagggtcagtggtgggaaatcaaggtgatttctattttctccatgtggaatctggtggcaagaccatctattaagagttgggggacaggtgtggtatcaaatgattgtggggaagatcattatcacttagtataattcccacaataataaggatgaattaaattatagctgttattatcaaatatgccgttgaccatttatactctgaccataattacggaacagcatacaattctcattacagagtgtcaatttaattattcttaacaaatccttttgctttacaagtccagaattgaagaactccttcaattattattgaatataaatttcttaaccaaatgaattctatttattagatttaagaattttgtgacctgaatgacaaaacaatacagtatgtacagccttcctttgaaattcgatcaaagcttgtcacgtgccctataaaagttactctttctcatatttcatctcaatgactctgagaaatgtgcatgtttgtgtcattttcattgtccagtatctctctttttaataattarcattaagattgtttacatgaaagagattacttgc

SEQ ID NO: 413848 - DNA, 567 bp, Homo sapiens
ctttatccttgaaactgaccttatcctagtcatgggttgctggcatttaatattcaggcttcctaattcttttttgaaaggctgtygcaggagaattgcttgtggaatatataatgatttatttagtctcacagtccttcatatctgggaaacttaaaaaaaaagaaagacaagatgattcttccatattaatggaaacaattgcctatgaattgtttttaaaaagttgacagtagaaaattaaaaataacataagtttgtgattttaaaaaatgtttttgctattcacaccatccattcatatcgcagcatccatattttaagtgcttcagggtaagatgttttatagccttgcattgtttccatgaaactagattcacctgaccagattaccaaaaccttagaagtcattcattcttcacagtgaatttgagtacatttatttcaggaagctaatattcacaaacctggaagattgctgagaaacaaaaggataatgatgacatagggcatgtagatcgttttctttctgacataagtctaataaaacaggcagaaaagtaactg

SEQ ID NO: 413849 - DNA, 567 bp, Homo sapiens
ctttatccttgaaactgaccttatcctagtcatgggttgctggcatttaatattcaggcttcctaattcttttttgaaaggctgtcgcaggagaattgcttgtggaatatataatgatttatttagtctcacagtccttcatatctgggaaacttaaaawaaaagaaagacaagatgattcttccatattaatggaaacaattgcctatgaattgtttttaaaaagttgacagtagaaaattaaaaataacataagtttgtgattttaaaaaatgtttttgctattcacaccatccattcatatcgcagcatccatattttaagtgcttcagggtaagatgttttatagccttgcattgtttccatgaaactagattcacctgaccagattaccaaaaccttagaagtcattcattcttcacagtgaatttgagtacatttatttcaggaagctaatattcacaaacctggaagattgctgagaaacaaaaggataatgatgacatagggcatgtagatcgttttctttctgacataagtctaataaaacaggcagaaaagtaactg

SEQ ID NO: 413850 - DNA, 633 bp, Homo sapiens
taagattttttcacatggatataatataaatagcgataggactacaaagattttaacttctagctgagtaattaaaaaacttatctagaattgctgaccacagttctaatagtagagaaataattcttcattcctaagtcttaattattgagttatttgacaattgaacttgaagtccaagcaatgacctagatgacttttacctgtcctttttagacctaacatgttaaaatggcttcatattaaaatgatagactaatataaaaatggtagaccaatacctaatttctccataaaattattatggactgaacattttttgtgtccrcctttcaattcatatgttgaaaccctaacgctcaatatgatggtattcggaggtgaagcctttgggaagtaattaggtttaaatgaagttataaagttgggtcccccctcattcttctttacaggaattaaagagatctctaaagaatacagagataactgatataagaaacagccactacacccacggtgagatacagcacgcagagaaaggccctcctgatccaggctgaggtccaggcctctctggagcggggacagaggtagcttactggctctgcttactggcagagaagtcccagcagt

SEQ ID NO: 413851 - DNA, 633 bp, Homo sapiens
taagattttttcacatggatataatataaatagcgataggactacaaagattttaacttctagctgagtaattaaaaaacttatctagaattgctgaccacagttctaatagtagagaaataattcttcattcctaagtcttaattattgagttatttgacaattgaacttgaagtccaagcaatgacctagatgacttttacctgtcctttttagacctaacatgttaaaatggcttcatattaaaatgatagactaatataaaaatggtagaccaatacctaatttctccataaaattattatggactgaacattttttgtgtccacctttcaattcatatgttgaaaccctaacgctcaatatgatggtattcggaggtgaagcctttgggaagtaattaggtttaaatgaagttataaagttgggtcccccctcattcttctttayaggaattaaagagatctctaaagaatacagagataactgatataagaaacagccactacacccacggtgagatacagcacgcagagaaaggccctcctgatccaggctgaggtccaggcctctctggagcggggacagaggtagcttactggctctgcttactggcagagaagtcccagcagt

SEQ ID NO: 413852 - DNA, 620 bp, Homo sapiens
tggccctacaaccagaatgtcttaacaaatcaagttgtgagtttgggtgcacgtccatttattcatttccctccttctcctaggactgtggctgctttggtgctctcagaaagtgagacaacattaartttagatattctgggtaaaattgggtcctgggagtacacagaatgtctacattccgagttcatccgctttcttcaggatgagccaagatcaactggaacagtccacgcagcttacatggtatcgcgagaagcttgcagttgccaggtgttctactttctgctctctcccacatggcaattagtgaaactgtctttcaactactctaataaatcaaactttattctctgtctcatctggaatgctaactttataaatcatctactccacacattatttgccccacatttcccccactgcattacaaacctcaaactccacaaaatgccggggaacaaatactaacaaatttctgagataaagcagacctccttaaagaaagcagaggctatttggtctgctttcattttattgatcagaataatgtaaaaactataaatcaaaaactatatagttgagaaggaattgaggcccaagatatataaagatctaga

SEQ ID NO: 413853 - DNA, 620 bp, Homo sapiens
tggccctacaaccagaatgtcttaacaaatcaagttgtgagtttgggtgcacgtccatttattcatttccctccttctcctaggactgtggctgctttggtgctctcagaaagtgagacaacattaaatttagatattctgggtaaaattgggtcctgggagtacacagaatgtctacattcmgagttcatccgctttcttcaggatgagccaagatcaactggaacagtccacgcagcttacatggtatcgcgagaagcttgcagttgccaggtgttctactttctgctctctcccacatggcaattagtgaaactgtctttcaactactctaataaatcaaactttattctctgtctcatctggaatgctaactttataaatcatctactccacacattatttgccccacatttcccccactgcattacaaacctcaaactccacaaaatgccggggaacaaatactaacaaatttctgagataaagcagacctccttaaagaaagcagaggctatttggtctgctttcattttattgatcagaataatgtaaaaactataaatcaaaaactatatagttgagaaggaattgaggcccaagatatataaagatctaga

SEQ ID NO: 413854 - DNA, 620 bp, Homo sapiens
tggccctacaaccagaatgtcttaacaaatcaagttgtgagtttgggtgcacgtccatttattcatttccctccttctcctaggactgtggctgctttggtgctctcagaaagtgagacaacattaaatttagatattctgggtaaaattgggtcctgggagtacacagaatgtctacattccgagttcatccgctttcttcaggatgagccaagatcaactggaacagtccaygcagcttacatggtatcgcgagaagcttgcagttgccaggtgttctactttctgctctctcccacatggcaattagtgaaactgtctttcaactactctaataaatcaaactttattctctgtctcatctggaatgctaactttataaatcatctactccacacattatttgccccacatttcccccactgcattacaaacctcaaactccacaaaatgccggggaacaaatactaacaaatttctgagataaagcagacctccttaaagaaagcagaggctatttggtctgctttcattttattgatcagaataatgtaaaaactataaatcaaaaactatatagttgagaaggaattgaggcccaagatatataaagatctaga

SEQ ID NO: 413855 - DNA, 620 bp, Homo sapiens
tggccctacaaccagaatgtcttaacaaatcaagttgtgagtttgggtgcacgtccatttattcatttccctccttctcctaggactgtggctgctttggtgctctcagaaagtgagacaacattaaatttagatattctgggtaaaattgggtcctgggagtacacagaatgtctacattccgagttcatccgctttcttcaggatgagccaagatcaactggaacagtccacgcagcttacatggtatcgcgagaagcttgcagttgccaggtgttctactttctgctctctcccacatggcaattagtgaaactgtctttcaactactctaataaatcaaactttattctctgtctcatctggaatgctaactttataaatcatctactccacacattatttgccccacatttcccccactgcattacaaacctcaaactccacaaaatgccggggaacaaatactaacaaatttctgagataaagcagacctccttaaagaaagcagaggctatttggtctgctttcattttattgatcagaatamtgtaaaaactataaatcaaaaactatatagttgagaaggaattgaggcccaagatatataaagatctaga

SEQ ID NO: 413856 - DNA, 626 bp, Homo sapiens
tagactgcctgtggctgtgaccttgaataaaacctttaacctatctctgtctcagctttcccatcggtaaagtgggcataataaaagtgtctacttcatagggctattgtggggattagtagcatatctaaagtagcttaaaacagtgtcttacatacagtaggtcawatatagtgttagctattattaccattatcactgtcactatccttatcctccaaagtttgcaacaaactgagagacagatacaggaaccatagagatggtgatcagaggtcagctttaaaattgagcgatttagagaatgtgatatagatatgcacacaaatggacttgctaatattttaccccttaattaggtaaacttacctgccaattcatagagcatagtccattgcatggccaagagcagactggaatgaggtcctctgtgaacaatcaagagagaaagagcagtacagaaagagttaaattgacaatattcatattctcttcccaaatgctccagtcagacaggtcactgctacttatggggtagactgtgtgaggtgcagtacagaagctggaagcctctatccatattcttcccttctgggaaatgaggttcaaattccctcttccttaaa

SEQ ID NO: 413857 - DNA, 533 bp, Homo sapiens
catgacttcactttgctgcccaattttaaggtaattttggtgagatctgggaggctttttgtgtttccaggagcaggaagtggagaacaatttttaacacaaaagtcgctggcactgtggccatttcaccctttgagcacactgcagcctacagaaaaagccaatttggaggtagaatcaaaaattcttgcaaaatagggcaagacaaaccagtccttcaaatatgaggaagtgaaaagaaagcaccctattgctccaggaatactgctccatccccactcattaaaggattgtaaaataaaagttgccaaaatctgccaccaggtgtatagtttgaggagggggaaagataatccgttaatatacaaggttttaaaactcaaattattgcacttttcgggcttaattccacaagtttttawttgaaaataaaataaatattttatttgggctcagtgaaagactagacacattaaaatgattactgcaagggcgatgcagcagaacctctattgctccaccctgtggagttg

SEQ ID NO: 413858 - DNA, 572 bp, Homo sapiens
ttgctttataagaacaacatgatgttaaatgagttaatatgcgtgatttatggaaaacaatactggcacatagtagacagtattactgctcagctgtgagttacatatgtgtgtatgtatatatacacatacacgtatacacacatactatatatatctgtatatatatgcatatatatacactatatatatatatatatatatatatatatatatatataatttttttctactgtatccttagcttatcatagcagagagcagagtggaaagttttccagcaagcctagaaagtctctaccacttatttcgttgtgwaactggcaagtgtcttatctcctggagccttagtttccttattcacaaaatgaattaaaatgctctttccgtattattggatgaattaaatgctgcagcaatatgacacatcttagcacagtggcccataatatgtgttttatcaatgttaaccattaatatgacaaagattttaatgatgatgattaaaggaggaggaggaggaagaagaggaggagggaggaggaaagaacagagattgggatcaggaagct

SEQ ID NO: 413859 - DNA, 538 bp, Homo sapiens
gatctcagctcactgcaacctccacctccccagttcaagtgattcccccacctcagcatccttagtagctgggtctacaggtgcgcaccaccatgcccagctaattttttgtattttagtagagacagtgtttcatcatgttggccaggttagtctcgatctcctgaactcatgatccacccacctcagccttccaaactgctgggattacaggcgtgagtcaccacgcccggccctaaaccttgcctttttaaactttaaacttaatgatatatcttgaggtcaygctgtttactacaggaagaccttatttattcttttgtaatggctccattgtatttttatgtggattatcgtaatttatttcatcagtactctgttggtaagtattaacatttatgttgtttctaatctttcactattacaagtaatgctttaatgaagaactttgtatgtatcattttacacatgtgtaagaagatagctatgtgaaataatacattaagttgaatgtatgagtcaaaggacatgagaatgt

SEQ ID NO: 413860 - DNA, 579 bp, Homo sapiens
tagcataactattgaaaattttgtctctggtttcagactccttgggtttaagactgatttctaccttttttttttttttgctgggtaagctgggattaggtaataaacctctctatgcctctatttcctcacttatgaaataaacagaataacctatttccttgagtcgtcgtgaagattaaatgaaataaatgtaaggagctgagaaaggtgtgtctctagaggataatgtgtgatcagtaaaagttagccatgatttcctcacttagcctgggatatatttgcatattggttaggtaataaccctgtgacttttatgaattcactgctggctcacccagtctttgagatagcactctgsccaaacatctctgtattgtagcagcttccctaactctcctaagcatggactctttaactcaatgataagaagttattcattcagctactactatgtgcccgtctcctaccaaacactgtgccaagttccgggctaatgaaagggcaatcttttgacctcaagaaacttataggtcggaaaggtgaaacccttgtaaataaaacaataacaagaataat

SEQ ID NO: 413861 - DNA, 415 bp, Homo sapiens
aggttctgtggtttttttagtaagcggcagaaagagtgggcaggttgaggagggctggcacagaaaggatcatcttgaatgcaggtctggaaatacactgttggcagcagcacaaggatccaagaagtcaaaggtatyggggagaaagctgcagctgcctgagctagtaaggatgagggaaggcggatcctggtgagtctagggtggaagagcagagccaactggctgagaactcacttatacagggaaaaggagaggatgacggggccattctgggaatgggaggagagattcatgtgggcgaacacaacacaaggaagatgaacacttctgtctttgccaagttcactgggcggctggatggaacttctggtttatgattcaatttcacacatctttgcagaagctgtaaaag

SEQ ID NO: 413862 - DNA, 566 bp, Homo sapiens
  misc_feature (1)...(566): n = A,T,C or G
cagtaatttctgtgtttgttaacccttgactttcactgtgactcaagttgctggaacagaaaagatgggataacgaatgagtaagargacacatgggatctggagcaagttattacctacaggtgttgaacatgcatgacagtgatgtggctgcattaaaaagccccaacgtatacacagataaaagagttttttcactgtgtaggctttgtaaaaacagctttgttcaagtataatttacatgccacaggataagcgtgcattgatgatgatatttagtaaatatatagcattgtacaatcatcacaatccagcttttgaacacttccatcactccaaaaggttgcctcttgtccacttgccgtcaatctctgtgtctacctgctgcccacgcaacaactgccctgaattctgtgtctgcagatttgtcccttccccaaactcacgtacatggaatcatacaatctgatgtttcctgtgtctggaatctttcacttacagtgctcttcaggatcacccatgctggagcatgtatcaacagttcattcnnnnnnnnnnnnnnnnnn

SEQ ID NO: 413863 - DNA, 566 bp, Homo sapiens
  misc_feature (1)...(566): n = A,T,C or G
cagtaatttctgtgtttgttaacccttgactttcactgtgactcaagttgctggaacagaaaagatgggataacgaatgagtaagaggacacatgggatctggagcaagttattacctacaggtgttgaacatgcatgacagtgatgtggctgcattaaaaagccccaacgtatacacagataaaagagttttttcactgtgtaggctttgtaaaaacagctttgttcargtataatttacatgccacaggataagcgtgcattgatgatgatatttagtaaatatatagcattgtacaatcatcacaatccagcttttgaacacttccatcactccaaaaggttgcctcttgtccacttgccgtcaatctctgtgtctacctgctgcccacgcaacaactgccctgaattctgtgtctgcagatttgtcccttccccaaactcacgtacatggaatcatacaatctgatgtttcctgtgtctggaatctttcacttacagtgctcttcaggatcacccatgctggagcatgtatcaacagttcattcnnnnnnnnnnnnnnnnnn

SEQ ID NO: 413864 - DNA, 604 bp, Homo sapiens
ttattggtagagcctgagttttttcatctacaaaaatcatgtaaattgcaaataataaaaaatttatttttattaaaacttttatcagttatttatttattttttttgtctaaatgtattgcctaggacctccaatacaatattaaataaatagtgacagtaggcatctcgatctcattttcactctcttgggaaattgttctgttttttacattgaatgtgacacttactgacatattttagtagaatacctttaacaggttaaggttatctatttcagattctagattactaagattttttaaaaatataaatgagtatttgattttatcaaatgtacattcaaaaatgagttagtcartttaatgccaatgactgaactgtatacattttaaagcaaattataaacatgaaaattgactcaagaagaaataaaaatcctcaaatgttaccatcgaataactttatagttaaaatgttcagtcaccaacaaccccactccacacattccccaggcctattttacctcctaccaaggaacaataactattaaataatagaaaatattacagagactaggaaaagagggaaactgaccagcact

SEQ ID NO: 413865 - DNA, 553 bp, Homo sapiens
cttctgcctgggaatatggggtataaggttgctgcagtggctagaatagttgtttccattttggatgcctcccaagacaaggaatagagacagattgtcttaaaaatttaattctctaaatttgaaaaaaaattaccaactacaaactatgagccaggatgtatgctacaaaatgtacataaacagtccattgmatccattgaatgttcataaaactgtgcaaatttgatattattgtcctaattttacaaaagggaaactaaggctaagaaagttggcttaattggagtaattctgagatcttttaacaaagcaggctattctcttgggaaaaagtaagatgtacactacaccccccaccatcttacctgatactaattaatatcttctacctcatgccttttgtctcttatcatgctaccctctttctgccatgtgcaactgttgaagtgaggcatggctttgcggccccaggcaatcctgagtccttccttcctctcaatatactcaggggccccactctctaggcacttttatcagagagagaagggcc

SEQ ID NO: 413866 - DNA, 555 bp, Homo sapiens
ccatgcttggcacaaaaacaaaacaacagccaaaaaaaaaaaaacaacaaaaaacatcaaaaaacatgggcctctcaaatttcactgggacaaagtcattttaaaaaaaatttcctgagaagtaaaaataagctgggaattttttattgagtgtggcttataattaagttttggttttgcccttggagggggatggcagagggaatttttaaatcttactcatattttacccatgtgaggaagagccagggctgaaagagtgagcatggggaagtgaaaagcctcagccgagygtgagaacattttggttcttattttgggtctgttctttggttgtaaagtgagcttgagcttgtcacttctcttccttggcccctaggaactgagtttctaagtaaatgacttcttcctttgtctctctgagaattaagacatggaggctaggacgtcaaaagaggaggagagtgggaagcactgagctgtctgtctggctgtactggtaacttctgccagccccaggctgacctctggagggatgtagaaagtttccctgtg

SEQ ID NO: 413867 - DNA, 539 bp, Homo sapiens
tttactcagcaaaatatctcatggctaatcccaggcctaccaaaatgaatcctcaaatcccaaccacattttgccatgtgtgaccccaataaacagcctcagtgaccatcccaggaagactcgaaaattgatyatgcatctcccctaaaagaccatcagaagcaatttaatatgactgttttcccacatcagatcatccaccatttccaggactttgatctcaaatggtttgtatattctgtaatgtaactaaatttctcactccttcccagagcttttctctgccctcataggagctcagtatgacatcagtaaatttgtctatattctaaatatcttctaggaatgttctcttcactttcttattgtatctgaaatatagacatatcttaagaactttgtccctacccagcggtcctctcaagtggaggctatttttttttctcttacaaattgaagagtctagaggtaggataagtttgtttttaagttttcattgtcacatttgctcaatgctatactctccatactaaaaagtt

SEQ ID NO: 413868 - DNA, 498 bp, Homo sapiens
aactcccttcttagcctgttgacttaaagattggaggagcccaaagtgtccaggtggcaatcttaacttccagtttaatggaattgttgttgtgtctcctggtggcagtgttcctccctctggaactaatacctctaggccagcagaatgcaatgtcacaggaacaggaaggaaaaattttgctagtggattgctaggggtgagggtgaggggtgctacttccacttccacttcttgattcctggaaatcctggctatgggagaaacagtaccatatattggatgytcattcagagcgtacatagccttctggagaactttgcctcagccctgcaaagtattgtcacctagttggcattgaaattgtgacttcaaaaggccattccaccgttctatcaatccagctgcttcaggatgatggggaacatggtaagaccagtgaattccacgagtaaaaacccacttccacacttctttagctgtaaagtgagctccttg

SEQ ID NO: 413869 - DNA, 589 bp, Homo sapiens
gggcaattcttgcacctaattctttgccttggggataactccaactgagacatctccrtaagccatactcaagagtttaaattctacctgtggatctagaaaaccaatgaagggttttaattagggaagtgacctggttaccggcacacacatatacaatatacacatttttaaaataaatatcaccaagatgactaagatgaggaaggattgagaggcaacagagaaaaaggaatctcagagatccatagccaaagtcaggggaaggttccaaggtggtcatgacataaagcatggagtgcctgaacttccctggccccagcccgttgtagccacagctgttcatctttgactattggtagtgatttatatcccagagaactgcccacccacttttactggcacttctaattgcagaattacacacatgttttccaaggagaaaatgctgcctccccactgactcatgtttatttatcccaggcagaaggaccattttagcactctttccaccattttcatccccaaatttatcttgggcctcttaaggaacccaagcatcttggtttattatgaacatacattaccg

SEQ ID NO: 413870 - DNA, 351 bp, Homo sapiens
catttattacttttaatttcayaaatatacttgcacactttgaggaataagctcatgataattaaggtaaaataatctacttgtaataataatttaaagttgaaaatttagccagaatttatgccagtttatattatgccagtttaggttaaacatacatttaaaaattaattggattcttaacatatgagtgcatttaaattatatctcccagaacaaaccaaatgaatatgataacatcatttgaaaaattatttaatgacggcactgtttgaatagtgtaccttttcctcttgatgattggaaataacatttttcctagcataactttagggcaaagagcagacagta

SEQ ID NO: 413871 - DNA, 588 bp, Homo sapiens
ttgcaaaagcagtgctcatttcccgcttactcractatatcaagatattcaatttatgatttctgaattcaaaagagagacaacccccagaactccaagtgacacttagacgaactcagagttttatagttcaccagcttagatatctttccaaagaaaggctaatgatttctttattaccttattagctattagatggcacagttacacaaatgtatgcaatggtaaaaaattaataattgtatataactgatggagtaacaaaatcaaaatgtattatataagatgagcctttacctgaagcactcaatcaaattcctaatacattaatacatatgattttatgcattattaaaattagaaatgtagtagtacatatagtttctctaatcatagcccattttatcttgacaaattatgaccaaccaaaatattaaaaaatacatttctagattaaaaggatacataaggatgccatccaaagtgtgcatactgtattttcaaacaaattttaataactcgacatcaaatgacagataaaattacagtattagatcaggacttcagactttagataaattctaatgg

SEQ ID NO: 413872 - DNA, 648 bp, Homo sapiens
gtaataggcttgcaaattttgtgaaaatgattttttcatcctccgttcttgtggctaatctctgaattattttggatattgatgatgaacaaggttttgtgctacatgttataggagatacaataattagtaaggcccccatttcaaggatgtcgccacctagtggaagagagaaaaatacatccgtatgyacatgcttcccggacggtgggaagatcacatatttccctcaccatgcttagcagaaattgtctcattaaagatccttaatacatgactaattatgtaattacagcacaaggtagaatgaggtgaagattaagttagaggtacaaacaaaatgctgtatattaaatgcttcccaatatttggagaatgactagcttatataattgccagttgctaaataacaaaactacgtttggagtaatataaattgcctaaggtcaaaaaccttttatgttgaaataaaagcaattttttttaattaaatgagcttttggcttgactttaaaggaactcccatatagatgtggtgacaggaatttcaacccctttcctttgcatcagaggaaaatctgaatcccaggaattaagactcatgccattccccattcaacagagaatgcaaccattaaaagctactaa

SEQ ID NO: 413873 - DNA, 500 bp, Homo sapiens
gcccccaggattcaattatttcccaccaggtccctcctataacatgtgggaattatgggagtacaattcaagatgagattttggcggagacacagagccaaaccatatcaatcagttttctggatagcttacactgtggtcaaacaaaagtaactcattacttggaaattaattaatgggaagtaattcattaatgggaaaacagtttcaatgttgtataatgattcctgtattaacatatgaacacgaatttctgatgcttattcttcacacaatattgaggctatggtgaaaacattacaagtgaattgaagtcataaagttatcaaatttcttcatttctttcctgctctggtttctttcaaaagcaaaatgtttttatctctcaggttattggacacactaaaatraacagagttgtttaccctttcctctaattcactctaccttttaggaggtaatcaagtggaaccaatggaaaacacagctgaaacttgttt

SEQ ID NO: 413874 - DNA, 569 bp, Homo sapiens
gacatattatcatcagcattgtcagggacatttaatyatgcaatactccaccattgacatttcatcaaaacagcaggccatggtagtaatcgcttattgctgacagttagtatactaaactccttaattacgtgattacacatgcaattaagttttccaggtcctgatgtaaaaccatccttgtgaaaggagagaagacacctcttacatctccatgctcagaaacaatcctgtgagttgcacttaacaaaactattatatataaaattgcacatcctcaaaatatcttctaagcccatttgaaaagaatcttctatagcaagggtaggaaaactactgtccatagaccaaatctactctgatggctctatttgttttgttttgtttttaaagttttattggaacacagccatgcccattttatgttatctatagctgcttttgtgctacagctacagagttgaggagctgaaatagagtccttctgacacacaaagcctaaaatatctattatctggccctatacagaaaaaattcgttaatgcctgccctaaaggacatttatttaa

SEQ ID NO: 413875 - DNA, 569 bp, Homo sapiens
gacatattatcatcagcattgtcagggacatttaatcatgcaatactccaccattgacatttcatcaaaacagcaggccatggtagtaatcgcttattgctgacagttagtatactaaactccttaattacgtgattacacatgcaattaagttttccaggtcctgatgtaaaaccatccttgtgaaaggaragaagacacctcttacatctccatgctcagaaacaatcctgtgagttgcacttaacaaaactattatatataaaattgcacatcctcaaaatatcttctaagcccatttgaaaagaatcttctatagcaagggtaggaaaactactgtccatagaccaaatctactctgatggctctatttgttttgttttgtttttaaagttttattggaacacagccatgcccattttatgttatctatagctgcttttgtgctacagctacagagttgaggagctgaaatagagtccttctgacacacaaagcctaaaatatctattatctggccctatacagaaaaaattcgttaatgcctgccctaaaggacatttatttaa

SEQ ID NO: 413876 - DNA, 586 bp, Homo sapiens
agagccagactccatctcaaaaaaaaaaaaaaaaaggatctgtaaatagatcctggttagctgcatttcaacaagtgttgcacgaaatttttaacagagaactgcaagttgtaactgggaaggaggcaagagaagtggagaatgcaaaactcaaatgtcctaccctgtcttcacaaaaaaatagtagcaatttgagaaaatttatggcctatctgatttattctcatgcttaactgtcttcaatctctttttacaaaaraaagtcaggataggggactattcattacctgaccaactaattagtcctatagccttgacaaagttattgactaaacaatatgcaaatgagagtttagtctatttttagctttgaaaaatctttattaatttttaaatttaaaaattatgacttattcctataaaaatccaaacaaaaactgatgaaaggaattatggaaaactctcctttccttaaatctcccatttccatttcctaagggatactttaaagtgcatccttgcagaatcctttttcttttaatttccaagaatttcctatgactatttcactttataaggtcttcct

SEQ ID NO: 413877 - DNA, 586 bp, Homo sapiens
agagccagactccatctcaaaaaaaaaaaaaaaaaggatctgtaaatagatcctggttagctgcatttcaacaagtgttgcacgaaatttttaacagagaactgcaagttgtaactgggaaggaggcaagagaagtggagaatgcaaaactcaaatgtcctaccctgtcttcacaaaaaaatagtagcaatttgagaaaatttatggcctatctgatttattctcatgcttaactgtcttcaatctctttttacaaaagaaagtcaggataggggactattcattacctgaccaactaattaktcctatagccttgacaaagttattgactaaacaatatgcaaatgagagtttagtctatttttagctttgaaaaatctttattaatttttaaatttaaaaattatgacttattcctataaaaatccaaacaaaaactgatgaaaggaattatggaaaactctcctttccttaaatctcccatttccatttcctaagggatactttaaagtgcatccttgcagaatcctttttcttttaatttccaagaatttcctatgactatttcactttataaggtcttcct

SEQ ID NO: 413878 - DNA, 482 bp, Homo sapiens
cttgcacttcccacaaaaatgctgtggtgtaggaataacaggctggaactgggaggaggcaagtaaggtggccagggtgcgtgattcccactctcagggccatgaggcayctcactgaggagtctggccctgaggaataattactctcacctgtaacaaataaagaaactcttttggtattgtgtccaaaataaccagaaaagaccaaaatcgtgatctaattccagtttatatttgcttcaactttagttcctttacagatcaacagtttttatttttggaagaaaacataaaggtctcttaccccaaccttaactctcttgtacttgtagcctcataaaagcctgatctgagttttcatacagacataggtgcttttaaaaagaaaatcagtttctagggtttatttcaaggtgagaaaaaatgaaaaaaagtcagtgctctggaagtgtgcttctcaaaaatccgatgtgcatataaat

SEQ ID NO: 413879 - DNA, 585 bp, Homo sapiens
ttacattttccccaaatgctagatgaattgtgtatcaaaactcattaagcagcaatgytggctctgagccagcttttgctggtccatagctagtgcctcaggaagaaatgattatgggctgaactggtaatcaagaacattgtgatataagtatttatccacaatttctgactttgttgcttccttttttataatcttttatccatctggaaattacttgcttaaaacctaaagattttctgcatctgcaggtatattttcctttttctctttccctttccatttatctccattctttctctttttttgatttgattgttttttaactatcgatgattcatacattttcccccaagcattgtcatctcttccagaagtctttttccatgattctttcaacaaatagacagtgctgtgccacctcttctgcaaacattttttgaaaaggtatttatttctgccacaggcagttacagtagttttagtagcttcttattgcatagcaaggcacctgccatcattttttgtctgcttttcattttattcaccctcttgaaataaaagatattaacatagccatccttc

SEQ ID NO: 413880 - DNA, 537 bp, Homo sapiens
aatgaggaggagagagtgagggttgtaatggttatcaggcaaagaaggtgatatgtacaaaggcacagaaaaatatgatagttcaaggacagttgttggctctgtgtggctgcagcaaaggaccaggaaactgactggtgaggttggagaacagaccccagaaggactttgtattcatgtttctgtttgcctgggataggccagagttatgcctgctgtccaaagtaattaaaagtgcaaattctcactcttaaccttccagaataatcatggtcaccctactaacatttcaatttgggaagttttgatctaacctgaaagctatgaagagttcccagaaaaagtgaggctggggaaatgacatgattaattytagttttagggaacattctggcaattatgtgagcaatggtggaggatgagttagagagggcaacctggaggcaggtagaatgtggaagtgaagtcagtataaattgcactttcagctatatggtctgaattgcaatcagagttagtatatatcatccatttatt

SEQ ID NO: 413881 - DNA, 569 bp, Homo sapiens
ttctgcatctgcaggtatattttcctttttctctttccctttccatttatctccattctttctctttttttgatttgattgttttttaactatcgatgattcatacattttcccccaagcattgtcatctcttccagaagtctttttccatgattctttcaacaaatagacagtgctgtgccacctcttctgcaaacattttttgaaaaggtatttatttctgccacaggcagttacagtagttttagtagcttcttattgcakagcaaggcacctgccatcattttttgtctgcttttcattttattcaccctcttgaaataaaagatattaacatagccatccttcccatctattcaagtctaataaaccatagactactcgtcataatttattgcttttaactctatatttttcttcagaaacttttccctttcttttctatgttaccttttccttccccattttttgaataataagtatttctatcctttcacactaggtaatgaaacttttaaacgcagtcattatattgctctgctcaaccaccttttaaatacaaaaatatt

SEQ ID NO: 413882 - DNA, 540 bp, Homo sapiens
atgaatgagagaatgagaatagataacaaaaggatcattctcttgtttttttattatgctaagaaataatcacaatakaattaatgtttcaagttccactatctttgtgctctttattccagatttttatgtgacagcaaaccaaagaaaatgctcaaaagaagcatgagagaatggatcttcttaagagaataactgcaaggagtaggactctggttcactaaaataataataacaatataacagctgctatggtctgaatgtttaagtcccttcgaaatccatatgttgaagtctaaacccccaaagtgaaggtattagttcacagggctttggggcagtaaattataagagtggtgccctcgtgaatgggattagggttcttatgaaagaggcctgagagaatctcctggcttcttctactatgtgaggacacagcaatcaggtgttttatacgaaccagaaaagtgggccctcgccagacaccaaatctgccaccattttgatcgtggacttcccagcctccagtactatgagaat

SEQ ID NO: 413883 - DNA, 553 bp, Homo sapiens
gccaaatgttgactgcattttactttctccaggatcactaacatcacatagcacttgtcaatcaagtcatttagctcccacttaaaagtgagaacatgtggtatttggttttctatttctgcattagtttgctaaggataatggcctccagctccaactatgttcccacaaaagctatgatctcactgytttttatggctgcatagtattccatgaagctcccttattttataattgttaaaaccaacacacaggaaattagtaagaaccaggactggaaacacaaccactgttttctgttctagtaatctttccattcactatccctgtctctaataacctagcagtcaacttcttaggagaaaattcattggcagccaatatgagcaaaaactagacacaaaataaagaatctgggaaaagagaaatgcctaaggatgcaggtacctgaacatggacaagggcaagggaaattagacacatttaactctattcaattaatcacttttggacatttcaggacctgcttatccaaaattgtgcctcacaactt

SEQ ID NO: 413884 - DNA, 553 bp, Homo sapiens
gccaaatgttgactgcattttactttctccaggatcactaacatcacatagcacttgtcaatcaagtcatttagctcccacttaaaagtgagaacatgtggtatttggttttctatttctgcattagtttgctaaggataatggcctccagctccaactatgttcccacaaaagctatgatctcactgttttttatggctgcatagtattccatgaagctcccttattttataattrttaaaaccaacacacaggaaattagtaagaaccaggactggaaacacaaccactgttttctgttctagtaatctttccattcactatccctgtctctaataacctagcagtcaacttcttaggagaaaattcattggcagccaatatgagcaaaaactagacacaaaataaagaatctgggaaaagagaaatgcctaaggatgcaggtacctgaacatggacaagggcaagggaaattagacacatttaactctattcaattaatcacttttggacatttcaggacctgcttatccaaaattgtgcctcacaactt

SEQ ID NO: 413885 - DNA, 565 bp, Homo sapiens
gccaaatgttgactgcattttactttctccaggatcactaacatcacatagcacttgtcaatcaagtcatttagctcccacttaaaagtgagaacatgtggtatttggttttctatttctgcattagtttgctaaggataatggcctccagctccaactatgttcccacaaaagctatgatctcactgttttttatggctgcatagtattccatgaagctcccttattttataattgttaaaaccaacacacaggaaattagtaagaaccaggactggaaacacaaccactgttttctgttctagtaatctttccattcactatccctgtctctaataacctagcagtcaacttcttaggagaaawttcattggcagccaatatgagcaaaaactagacacaaaataaagaatctgggaaaagagaaatgcctaaggatgcaggtacctgaacatggacaagggcaagggaaattagacacatttaactctattcaattaatcacttttggacatttcaggacctgcttatccaaaattgtgcctcacaactttgtcaactaatg

SEQ ID NO: 413886 - DNA, 482 bp, Homo sapiens
agatatgtcccattttaaccagctgcttcttagctgcagtttctttgaaaaaacaattggttttaggcttattattgcctttaataagcacaattcaaaggtaaactgaagacaaaactaattttttttacccactttttcttattgtgtctattgcaggtagttttccaatactgtatgaaacatttgaaggtttcrtgatccttttgttggttttaggtaattgaagtttcctcattccattcctgtcacaagcatagtcttgtttcagaaatgacactgttcggtccacagtaatcaaaaatacaaccttgaacttttcccctcttcaatcagagcctgactgtagtgtagccattgcagtggtagaggatggagggaatgggtcattctgtctaactcatctcctcctctactcacctgttcatgtaaattaaaaggattggaggccaaaggcagacagggagctttcacttaggcag

SEQ ID NO: 413887 - DNA, 627 bp, Homo sapiens
cccagtcctcacctttgagaggggtggtgagatttagagcctagcaccagctcctttcaaggaaatctctcgcaaatatatttttactttactttcttactcagtccttttatcatcggaattagagccttctagccagttatttttctcagaggatttgtttttcgacctggcatctcacttcaggactttgtatctgtggaaatatggtgcctcactctaaacttccaatgactgtacatctacttgaaccattagaatatacctgccaagttttcatttctgatgaaaacttttgtctaacattcttaatacattgcataaatcacagttmatatttatccatgctttgatttatctttaaattatgggtatgacattaaataacagtttggccttaacatgctgttacaataacgttggtcattttaataataaatcatgccagttaagtttctaagtaacaaatgaaaattaagatcttctcattacacacacaaaaagtgtttgcctccaaattttacatgtactataagtccttttgcagagaaatgagtgcacatttgcaagcatgcagttttactctgacttaagaaagatgtgtcttttgttctctgcttcctcttc

SEQ ID NO: 413888 - DNA, 611 bp, Homo sapiens
aaatctgtttttattttggacggaaaagtgccagcatgtaaaataatgagtttgatttcatcctggactaagatgagttaaaacttttgctgggtccaactgattagttaagatgaagactragccgctataataaaactgtccaaagtatagaggttaaaaaatataactctaattctttcttgtgtcacagatgtaagtagcagtccaggtaagcagacagctctgccccatgaggtcattcagagattcaagttccttacattgtgattctgccatcaacaaggctgttgttctcatccgtatggccgtagctaagtcccagaaatggccatgttgcagctcacaggaaagggaaagtataaaaacacttgcttgactaatatttttaagacctatagctggaagtgtcattttcacttttagtcgcattccattagtgaaaatgtagccaaaggaccacatctagctggaagagagtctgagaaatgtctctagctaggcagctacatgcccaacaacaaatttactatgaaagaataggagaaaatattttgttggacatttttctatttctaccctcaggcaaggagagcatgaggatgttggtt

SEQ ID NO: 413889 - DNA, 598 bp, Homo sapiens
aggcatatacaaaggcaaagttaatttccattcttattgtcaatttcccttccaggctagcatgtacttctagggaggaactgagatgagcatcatttggcattgcctttgatgtattctctcccttctgctaaaacagccacwatatctgggaacactcaaataggaaggcatttgtcaaccctgtctagcccctttgcagaacactcatgcaagtgcaaaaagcaaaaggaaattcagttgtagatccaagaaccttcttttagaaatcaggaacccatgcatattcccaaattttgtttccaattgcactctacatctaaatatgttcagacactattacagctatacttctcactccataactcaaaattagcctgaggctacttaaactgttacttgctggcgtgttaatttgatcagaatgtctcagagctctcctgctttcttaatccttttaagaccagggtcagcaaaccacagctgtgtgccaaatcaggcctgccacctggttttgtgcagcccataagctctaagaatggcttttacagatgaacattagcaatcaatttgatgatagggaacattatgtttgacc

SEQ ID NO: 413890 - DNA, 598 bp, Homo sapiens
aggcatatacaaaggcaaagttaatttccattcttattgtcaatttcccttccaggctagcatgtacttctagggaggaactgagatgagcatcatttggcattgcctttgatgtattctctcccttctgctaaaacagccactatatctgggaacactcaaataggaaggcatttgtcaaccctgtctagccyctttgcagaacactcatgcaagtgcaaaaagcaaaaggaaattcagttgtagatccaagaaccttcttttagaaatcaggaacccatgcatattcccaaattttgtttccaattgcactctacatctaaatatgttcagacactattacagctatacttctcactccataactcaaaattagcctgaggctacttaaactgttacttgctggcgtgttaatttgatcagaatgtctcagagctctcctgctttcttaatccttttaagaccagggtcagcaaaccacagctgtgtgccaaatcaggcctgccacctggttttgtgcagcccataagctctaagaatggcttttacagatgaacattagcaatcaatttgatgatagggaacattatgtttgacc

SEQ ID NO: 413891 - DNA, 620 bp, Homo sapiens
taaataacatatggaatgccaacttgtgaaaaataaacacttgtcatgctttgctctcagaagacaatattagagtaatgaataagacacaacttcagctctgtgtatctcttaaaatatatatactggtaatctctttaaagtttctaaagatagaaaacaagaactaactgtagaatctcyttccttcactccatacacacttattgtgccattacttttctagatattgaggtctcagaaataaaaaagggagatgagactcatgctcttaaggggcttaaatttgacaggaggaggcagtcagcaaagaagaaaagaaacacacaaacaagaattcataaagtgataagtgccatggaaaaaactacaggtagtattgtcagacatagaattgcaccaagagactaagtgtgtgagtgggagagatgcacatgaacggctaatgctcaggtcaagtgatcagcaaagacacctctgaaaaaggtgacatgaaatggaactgaaataatacagtgagccagtttgtgcatgctaagtggaaaaggccaaagatgttgtattagtctgttttcctgttgctctaaaagaactgcccaagacttggtcatttataaagg

SEQ ID NO: 413892 - DNA, 620 bp, Homo sapiens
taaataacatatggaatgccaacttgtgaaaaataaacacttgtcatgctttgctctcagaagacaatattagagtaatgaataagacacaacttcagctctgtgtatctcttaaaatatatatactggtaatctctttaaagtttctaaagatagaaaacaagaactaactgtagaatctccttccttcactccatacacacttattgtgccattacttttctagatattgaggtctcagaaataaaaaagggagatgagactcatgctcttaaggggcttaaatttgacaggaggaggcagtcagcaaagaagaaaagaaacacacaaacaagaattcataaagtgataagtgccatggaaaaaactacaggtagtattgtcagacatagaattgcaccaagagactaagtgtgtgagtgggagagatgcacatgaacggctaatgctcaggtcaagtgatcagcaaagacacctctgaaaaaggtgacatgaaatggaactgaaataatacagtgagccagtttgtgcatgctaagtggaaaaggccaaagatgttgtattagtctgttttcctrttgctctaaaagaactgcccaagacttggtcatttataaagg

SEQ ID NO: 413893 - DNA, 495 bp, Homo sapiens
ttattttattgtcacctgcttctttatgatgagttgattacaaacattaaaaatcagtttatttatgggtgatattggtcctcaatatttagagaaaccacagctaaataatttagtattctgggagacttatatttatctcaatttactagtctagctagactagataacttaaaacatctctcamaatgcgtatctagatttacttaaaaaggaaagggactttccaagggcaaggaacgatagtgcaaaccaatgagctggtgtggaaataaacctttgttggggaggaagttgatcatttgctgggtaactaaacaatttggggttgacactgatgtagaccacggataatgaggaagtagagatatctcaatcaaagaaggaacctagaacagctgcaccatctgttagcgggtaggcaggaaaaataaatatatctattcaaggtagaagacatggatgttttcctcatattctgggtgcatgaaaaaa

SEQ ID NO: 413894 - DNA, 594 bp, Homo sapiens
tagttatcatatttcacatcatatcattgaatgtgaaacagagtatataaaaaacaaacactaagatctcttcacttttcagtaaaaggggaaaaaagacagcctctctttgaaaaagaaatctaagatatatattctacatctgcctacatgaacaatgttgttttaaattatgggtacattttactgtctcaaatagtttattgaaacaattgaattgggaaccactatttataggtttcaatgaggcgattacaaaaaaaaattcactgatacttaaaatttctacatgcaacaatctaatagaataaaatgatcttttccaaatggatccaaaaagcactgcccatgttttggaaattatttggatctttgcattgttaaatgcctatagccaataatacataatattaggtaagggaaacagtatggcataccccaatttttttttttaagaaagggtcttgctctgtctcccaggctggagtacagtggtgatcatagctcactgtagccttgtgtttcgtggcccaagtgatcctaccacctcagcctgctgagtagctggyaccacaggcatattctaccatgctt

SEQ ID NO: 413895 - DNA, 607 bp, Homo sapiens
ctcaacaaagtactagcaaactcactgcaacagcacatcaaaaagctaatccaccatgattaagtaggctttatccctgagatgcgatgatggtttgaaacaygaaaatcagtaaatgtaattcatcacacaaacagaactaaaaatataaaccacataatcaactgaatagactcagatatggcattgataaaatttgacacccatgcatgtttaaaaccctcaacaaattaggcatcaaaggaacatacctttgatgataataagagtcacctatgacaaacccaaagccaacatcataatcaatgggcaaaagctgaagcatttttcttgaaaaccagcacaagacaagaatgccactctcatcactcctattcagcataatacaggaaggcctagccagagccatcagacaagagaaagaaataaatggctttcaaataggaaaagaggaagtcaaactatctctctttgctaatgatataattctatacctagaaaatcctaaagactctgccaaaaggctactggaactgataaacaacttcagtaaagattcctaatacaaaatcaatgtacaaaaaaatcagtagtatttctacacact

SEQ ID NO: 413896 - DNA, 641 bp, Homo sapiens
aattaaaagagaaattgcaaatgmagtaaattatatcttaggtttttgtaatctgttaaagaaggtaacttcaattatctcatgcttctctaaaaaaagagtaatatatttttagaagttagtaatttaacattgacattttggaacattacatgggggacaataaaatgttaataatgtaatgaaattcttctacataccctataaattaacaaccattattatgaaatctaaagtcatttgttagctaagttatggagacaaaaatctccatttaaacaataagttgtggtcttcatagggatgggttacatgcacaatgggcaacaaagacaaaggagagatgaataatgtgtaaagcagttgtatttgagattgctttggaaataaaccaccacaaaagattatggctctgtcactcaccgaaagcctatcttcttaaattcatgatataaaaaattcttatttaccatgaattcacttcatatgaatttaatgtattgtttgaagcactatctgtcaaatcaaaaccaaaattatgttgtccagaatataccattttgcaacttagttgcatttactatcaattcagtcaagaacactaggcatccacttgcagtatacagctcctacgacaagag

SEQ ID NO: 413897 - DNA, 515 bp, Homo sapiens
cttctctaaaaaaagagtaatatatttttagaagttagtaatttaacattgacattttggaacattacatgggggacaataaaatgttaataatgtaaygaaattcttctacataccctataaattaacaaccattattatgaaatctaaagtcatttgttagctaagttatggagacaaaaatctccatttaaacaataagttgtggtcttcatagggatgggttacatgcacaatgggcaacaaagacaaaggagagatgaataatgtgtaaagcagttgtatttgagattgctttggaaataaaccaccacaaaagattatggctctgtcactcaccgaaagcctatcttcttaaattcatgatataaaaaattcttatttaccatgaattcacttcatatgaatttaatgtattgtttgaagcactatctgtcaaatcaaaaccaaaattatgttgtccagaatataccattttgcaacttagttgcatttactatcaattcagtcaagaa

SEQ ID NO: 413898 - DNA, 637 bp, Homo sapiens
cactaatataccaccctaaatctatagccttatactaagcctgtgtgtgaagtggtaatagagtttgtactaagttggacatccctataccttgagaatttgtgagtattatcctaggactaaactatgttatagcaaatgttaatagattctggcaactggaaagcagatagaggatattttatttaaagagagtggcatcygcagaggtgtgaaagttggagccaataagaaattaggcatgtttcagcttaactggagtatgcatatttttaaaaaagaacatactttgcagaaaatgccattaaattagatagtaaaaaatcttgaaaatcaggttaatgagcttaatttttatttacttattaggataaaaagcttactcatttaatccttataataataaccttatccagtgggttttattatcatctctactttatagatcataaaattgaagcacagagagattaagtcacattgctagaaaacggtagaggcaagattctaatccaggaagtttactaggacttttctgcctagaaattaatggtagaactgggctttagtataaaaaaaaaatctattggttagacagagagagataacctatttgagacttagagaaattaaagat

SEQ ID NO: 413899 - DNA, 597 bp, Homo sapiens
actttctcatcagcaataaggctgttttgcttatcatttgtgtgttcaccagagaagtacttttaattttcttcaagaatctttccattgaattcacaacttggctaactgtttggtgcaagaggcctagcttttggcctgtcttggctttagacatgccctcctcactaagtttaatcatttccagcttttcactgaaaggagagatgtgggactcttcctttcacttgaatgcttagaggtcattgcagggttactaactggtcaaayttcaatattattgtgtcttagggaacagagaggaccaaggagaggaagaaagacggaaatggccaatgagtgtagtagtcagaacatacacaacatttctcaattagttggaagtcttatataggcatttttgtggcaccccaaagaattacaatagtaacattgaagaccactgatcacagatcaccataactgatgtaataataatgattattattattgtagggattaccaaaatgtgacagagaaatacaaagtaagcacacgctgttagaaaaaaaaagtgctgacaaatttgctagacacagggttgccacaaaccttcaa

SEQ ID NO: 413900 - DNA, 621 bp, Homo sapiens
ttactaagtgtttgatcatgggttattcacaacccatacaaaatatctcttagtccattataaaatgcagataatctactctctgtgcctatctaaaaaaatgatttaagaacaaattagaaaatgcctggggaacagaatatcaatataaatttagtataattaatttcaaatagcattcataaaatactttttaaaattcaagaataagagcaagaaaaaattttagcaattaaatgtttagtctattaatcaactgtggtatcttttcattttcatagaccaatttattaccctatatttagctagaattatacaactacgtgctacatgccctctaagattctttccaactcataaggcttataatttttgatgtcctcttttaaaaactccttaccaagtctctaagatagttctcaagaaaacaaaggcatttyatatagtcatttcaggtaagtcttttcaataataaacttctcctttatgtcctagatactacttaccatgtaagcctcaactcctatcacttcccacatagtcctgtaatatataattagtccctgggacatcatttctccattcttttcaagtggcttcccttcgcctagaagacctccc

SEQ ID NO: 413901 - DNA, 579 bp, Homo sapiens
gcttggctgaccctctaatttgagacagttgctcttggaacacagccaccatattgtaaggtagcccaggcaatatgaagatgccccacatgggccttccaattaaaagccacagcagggccccaccatcagatctgtgagagaatgacagtatagataatttcaaccttcaatatttgagacttccagctgagacccacacaaactgttagagattataggtgattattgctgtttcaagccaccttgctttagaatgatttattatgcaccaataaataatcaatgtagatctggcaaactgccaagccttggaaataccaatttatagctagacttcaggtggtctgagacctcccatactctgggcaatttcttattgacagactatttgaaaataaccactctgaacttcacactcccacattaaatattacyattatgaaagaaatttttaaaaaatcgttcagaaaatactataccaaattcctgtttggtaaaagcctccagattgtttttaaagtccttaacaatatttctttatctatttgtaactatattttctctagcataagtcaa

SEQ ID NO: 413902 - DNA, 579 bp, Homo sapiens
gcttggctgaccctctaatttgagacagttgctcttggaacacagccaccatattgtaaggtagcccaggcaatatgaagatgccccacatgggccttccaattaaaagccacagcagggccccaccatcagatctgtgagagaatgacagtatagataatttcaaccttcaatatttgagacttccagctgagacccacacaaactgttagagattataggtgattattgctgtttcaagccaccttgctttagaatgatttattatgcaccaataaataatcaatgtagatctggcaaactgccaagccttggaaataccaatttatagctagacttcaggtggtctgagacctcccatactctgggcaatttcttattgacagactatttgaaaataaccactctgaacttcacactcccacattaaatattaccattaygaaagaaatttttaaaaaatcgttcagaaaatactataccaaattcctgtttggtaaaagcctccagattgtttttaaagtccttaacaatatttctttatctatttgtaactatattttctctagcataagtcaa

SEQ ID NO: 413903 - DNA, 546 bp, Homo sapiens
gtttttgaggttattaatgtttttccattacagttagagcttctgtatttttttgaaattgtatttgtctactacaaaatcatgaatatattctttttttctatactctgtaatgtttttctgttcacttttagaattatatcattaatttataccatttttgctatactaaatggtgtttgatatatatatatatacacacatatcatacaaattatatatatacacataccatataaattcgcctttatactatgtttgtgayagtataaactaaggttcaaaaattaaggtcaattctatatattcaattgacatggcgttatttattgaaggaaacattctttctccatggctgcagacattttgagtactaactttagctcagttattacacaaatgcaaaataacaagcattgtttttatttttatcatgtatcattttatttatcattgttgtcatttatcttccagttgagtaacagagccaggtctgtaactcaggtatcctataagctggttcaatgttctccaagttcaccgtgc

SEQ ID NO: 413904 - DNA, 546 bp, Homo sapiens
gtttttgaggttattaatgtttttccattacagttagagcttctgtatttttttgaaattgtatttgtctactacaaaatcatgaatatattctttttttctatactctgtaatgtttttctgttcacttttagaattatatcattaatttataccatttttgctatactaaatggtgtttgatatatatatatatacacacatatcatacaaattatatatatacacataccatataaattcgcctttatactatgtttgtgatagtataaactaaggttcaaaaattaaggtcaattctatatattcaattgacatggcgttatttattgaaggaaacattctttctccatggctgcagacattttgagtactaactttagctcagttattacacaaatgcaaaataacaagcattgtttttatttttatmatgtatcattttatttatcattgttgtcatttatcttccagttgagtaacagagccaggtctgtaactcaggtatcctataagctggttcaatgttctccaagttcaccgtgc

SEQ ID NO: 413905 - DNA, 567 bp, Homo sapiens
cctgtggtattattttgtgaatatacatcaaagtacttaatgcactattgtctagttgggattgagatggttttcagatttgccattatgagtagagctacaataaatactattgtatatgtcttctactgtattatgtatgagaattttacttggccatacacctagcattatcctgggtacttgcatgtaatgttttatctattactcttcttgcattaggtcatgtttcccctgaaaaccatttaagcttcgtaggtccctacattatacatctggcccaacatatcaasctgtgcagggcatttggcggttgtcttttcaccatttatcccctctttcctccatcaagagtaccctacttttttcttgataaattcccttcattctcattttcagccatttaggatggtgccagacctaggaatagaactgagtggcagggccactcaatgcaccctatcctctctatccacaggtatcactggttcagggatagctaggtaagccatttagagatctttgctgcagcttttgggaggaagggttttatttatcttctatgta

SEQ ID NO: 413906 - DNA, 489 bp, Homo sapiens
acaccagatagacagataaatatcagatagatagcagctcagccacagtggggtagagcaataggcaggcatttggatctccaactccaagcctagagtcttggacagcatttctggacctgtccagggcagaggtcacactggcccatggtgagtcttaaacatggcagcattcaccacaagctgaatgaagatcccttaggctttaaatgaacattagcctgtggcctggaagaacccttcatgggytgttggtggtggtggccacagggagaagctcctctgcctttaaaaagggaagggaagagcaggaaggatctttgtattgtggtttgatgccagcttagctttagtaaaaccagaacatcaggctaatttctaaggtttttgatccctgactcccagagagcatctctagaccctactaggacctgggggatctggccatcttgaagggaagtccacaaatgtcactggcattgccacttg

SEQ ID NO: 413907 - DNA, 573 bp, Homo sapiens
ttaaaataatgagttataagacagtatttgcaagactcacagtaacctcaratcaaaaaacatgcaatggatacacacacacacaaagttagaaattaaaacataccaccagagaaaatcactttaattaaagggaagtcaggaaggaagaaaagaaggaagagaagactacaaaacaatcagaacataaataacaaaatgtcaggagaaagtcctactcatcaataataacattgaatgtaaatggactaaactctccaataaaaaaacagagtgactgtatgtatataaaaaaagtcacagtaatctgttgcctacaagatatacacttctcctataaaaatacacatggactgaaaataaagggatgataaaaaatgttccatgacaatggaaaccaaaaaaggccaggagtggttatacttatatcagaaaaaatagatttcaagaaaaaaatatttaaaaagacaaaggaggccattatataatgataaagggattgatccagcaacagaatacaataattataaatatatatccacccaacactggaacacacagatatataaaaca

SEQ ID NO: 413908 - DNA, 573 bp, Homo sapiens
ttaaaataatgagttataagacagtatttgcaagactcacagtaacctcagatcaaaaaacatgcaatggatacacacacacacaaagttagaaattaaaacataccaccagagaaaatcactttaattaaagggaagtcaggaaggaagaaaagaaggaagagaagactacaaaacaatcagaacataaataacaaaatgtcaggagaaagtcctactcatcaataataacattgaatgtaaatggactaaactctccaataaaaaaacagagtgactgtatgyatataaaaaaagtcacagtaatctgttgcctacaagatatacacttctcctataaaaatacacatggactgaaaataaagggatgataaaaaatgttccatgacaatggaaaccaaaaaaggccaggagtggttatacttatatcagaaaaaatagatttcaagaaaaaaatatttaaaaagacaaaggaggccattatataatgataaagggattgatccagcaacagaatacaataattataaatatatatccacccaacactggaacacacagatatataaaaca

SEQ ID NO: 413909 - DNA, 549 bp, Homo sapiens
tgtagtaactaaaaatcaaaacatgatgagttcatcatggagacagagtgtagaaggatggttaccagaggctgaaaagggtagttggggaagagtagtgggtaggtgtggatggttaattggtacaaaaaataattagaaaaatgaataagacctagtatttgacagcacaacagggtgacaacagtcaaaataatttaaaattgcacatttaaaagaactaaaagagtataattggattatttgtaaaacaaaggataaatgctttaggagatggataccccattttccatgatgggattattatgcattgcatgactgtatcaaaacatytaatgtaccccataaatatacacacctactatgtacccacaaaaaattaaaaaccctgaagatggtaatatgcttaatttctaacaagaacctatactttgtgctattaaatctaaaccttaacccaacaccttacgtcctccccctctccaaatttgaaatattttctaaacattatgaggttccaagtagcatgagttccaaaatgatttttca

SEQ ID NO: 413910 - DNA, 558 bp, Homo sapiens
tggttagtatgagcaagactgcaccccaaaaagccaactggataaattaaattmcagattatccagccccccaaaaagccaagggttttgtaaattgcttaatgttttcatttggaaagcatgggtccaaaaaaaaaaaaaaaaaacaatgaaattgaccctggtagaaatggcactaaaagctcactggtaattggagaataggcgagttgtttactgaagtttctctttggacttcaaaacatgctttctgtatgttttggagtaggaaaaaaaaaaggagagttgagatagttctattctatgccatttaaattgcaaattttccatttcagcattctctgaatctcagtatggtacaggtgaaaagtttgatgtttataatcaaagaatatgacttagctgacatacaacttctgtccatggaaataaagtcttttttaatcaatttttcaagatgaaaacataaaggtgacaatggttaggactgtctttcatcaactaaaacaaaaaccttactgtgccttatgggaaatttttttttttttttagaaactc

SEQ ID NO: 413911 - DNA, 558 bp, Homo sapiens
tggttagtatgagcaagactgcaccccaaaaagccaactggataaattaaattccagattatmcagccccccaaaaagccaagggttttgtaaattgcttaatgttttcatttggaaagcatgggtccaaaaaaaaaaaaaaaaaacaatgaaattgaccctggtagaaatggcactaaaagctcactggtaattggagaataggcgagttgtttactgaagtttctctttggacttcaaaacatgctttctgtatgttttggagtaggaaaaaaaaaaggagagttgagatagttctattctatgccatttaaattgcaaattttccatttcagcattctctgaatctcagtatggtacaggtgaaaagtttgatgtttataatcaaagaatatgacttagctgacatacaacttctgtccatggaaataaagtcttttttaatcaatttttcaagatgaaaacataaaggtgacaatggttaggactgtctttcatcaactaaaacaaaaaccttactgtgccttatgggaaatttttttttttttttagaaactc

SEQ ID NO: 413912 - DNA, 558 bp, Homo sapiens
tggttagtatgagcaagactgcaccccaaaaagccaactggataaattaaattccagattatccagccccccaaaaagccaakggttttgtaaattgcttaatgttttcatttggaaagcatgggtccaaaaaaaaaaaaaaaaaacaatgaaattgaccctggtagaaatggcactaaaagctcactggtaattggagaataggcgagttgtttactgaagtttctctttggacttcaaaacatgctttctgtatgttttggagtaggaaaaaaaaaaggagagttgagatagttctattctatgccatttaaattgcaaattttccatttcagcattctctgaatctcagtatggtacaggtgaaaagtttgatgtttataatcaaagaatatgacttagctgacatacaacttctgtccatggaaataaagtcttttttaatcaatttttcaagatgaaaacataaaggtgacaatggttaggactgtctttcatcaactaaaacaaaaaccttactgtgccttatgggaaatttttttttttttttagaaactc

SEQ ID NO: 413913 - DNA, 617 bp, Homo sapiens
aatggcactaaaagctcactggtaattggagaataggcgagttgtttactgaagtttctctttggacttcaaaacatgctttctgtatgttttggagtaggaaaaaaaaaaggagagttgagatagttctattctatgccatttaaattgcaaattttccatttcagcattctctgaatctcagtatggtacaggtgaaaagtttgatgtttataatcaaagaatatgacttagctgacatacaacttctgtccatggaaataaagtcttttttaatcaatttttcaagatgaaaacataaaggtgacaatggttaggactgtctttcatcaactaaaacaaaaaccttactgtgccttatgggaaatttttttttttttttagaaactcaaacataaaaaaaaaaaaaacctttctaggttatwtagaagattgtgtctacaatttggaaaaaccaggaacttacccattttatagataggccttattgtggactaaatgtttgtgtcctgccaaaattcatatgttgaagccctaaccccaaagtgatagcatttggaagtgggatctttgggaagtaattaggtttagatgaagtcatgtgatacggccccctc

SEQ ID NO: 413914 - DNA, 599 bp, Homo sapiens
tccttccttcgaatcccaacctaacttgcaatgcttcagattattgtcctattaaactggggacagtagagctactctggctaatgtaagctgggaaggctggaatctaggctgttgtgagacttacatgaaatactatatgcaaaataactaacrtaagatctgaaacatagtccctagtcacaaatgctagttctcttatttacatctgaccagccttgtccccattcaggcaatagaattgcctctcagattgaatccaagttgcaatttcaattttattgttaccttttcttcctatccctgaattcctgtattactattccattgtctcataccttcattaaatattaacaaaacaatccttaaagtcctttaatacctagttttgtttaaaaaatgtttgcccattctacagttacataactaaatttttaaaatattagtttagtattttaaatcctctgttaaatgtgttcatgatttctgcccaccatttcagatggtaatcttgtaaatgatcttgtaaatgtgacaagcaaataaatactatatatttatggacacccccgtaaaagaaagcacagagtatattggca

SEQ ID NO: 413915 - DNA, 599 bp, Homo sapiens
tccttccttcgaatcccaacctaacttgcaatgcttcagattattgtcctattaaactggggacagtagagctactctggctaatgtaagctgggaaggctggaatctaggctgttgtgagacttacatgaaatactatatgcaaaataactaacgtaagatctgaaacatagtccctagtcacaaatgctagttctcttatttacatctgaccagccttgtccccattcaggcaatagaattgcctctcagattgaatccaagttgcaatttcaattttattrttaccttttcttcctatccctgaattcctgtattactattccattgtctcataccttcattaaatattaacaaaacaatccttaaagtcctttaatacctagttttgtttaaaaaatgtttgcccattctacagttacataactaaatttttaaaatattagtttagtattttaaatcctctgttaaatgtgttcatgatttctgcccaccatttcagatggtaatcttgtaaatgatcttgtaaatgtgacaagcaaataaatactatatatttatggacacccccgtaaaagaaagcacagagtatattggca

SEQ ID NO: 413916 - DNA, 554 bp, Homo sapiens
tgtccaaaataatatgtacaccttattgttttgactccatttatagttactctattttataggtcatatttatgataatcccagcaaacgtcaataagaatcaagcacctagttcccagtgcaatcactggaggcaatataatgagcctgaaaaaagaaatacctcccaatgacaacaatgtctttttaaccgtgtcaataaaaagagccatgggaggttttgaaaaatataaattgaatcttgactcagtatraacttcagaggttcacatgatcttctgaaaatggttcactcattgtatagcctgccactactatgaaagatacatgtcacttttatatgtcctcaaatgtcatagaggattgtgaattgggatctgagaggatgtctaacactcacttctatttatggctccttcagcaagaaagttattttctggtcctaaatgagaaagtaagtccatgagatgctctgtatatcctgagctgaattcttggtgaaaatattcatccatgaactcaaatagtggctatttattaaatgtagaagacat

SEQ ID NO: 413917 - DNA, 632 bp, Homo sapiens
tactatgaaagatacatgtcacttttatatgtcctcaaatgtcatagaggattgtgaattgggatctgagaggatgtctaacactcacttctatttatggctccttcagcaagaaagttattttctggtcctaaatgagaaagtaagtccatgagatgctctgtatatcctgagctgaattcttggtgaaaatattcatccatgaactcaaatagtggctatttattaaatgtagaagacatgatgctagcatagcaagagaccctgttctaccaagtcagagaacctactagtatcttctctctagtgagccaagcaacccttccagtgcaaccgaggtctttctccacacccctgcattgacattagttccacatcaacagcagtttctcttcrgcatgttcatcatatcctacatttatatacatgcacaggtcttaaccactgatcaaaacaatcattggtagttcgtagaaaacattgcatttaacacacagtgatatttgctaaagcttaactttaagtttgacttatttccagtatacaaaagaaactaccatgcattcatcatacattgattatatgccaggccctatgctaagagaacaacaacttgatgaggcagttcttat

SEQ ID NO: 413918 - DNA, 583 bp, Homo sapiens
atgatttcaaactatatagcaatcaattgaccaaatcagccattcagaaacaacctgggcctgagcacagggccatgctgttgctggttcctgctaataacaggcaatcaagaatcttctagtttttaatgatggaagacctgttgaggtactggggagagactttgagtggtagggagggagcactatggagcaacaactrattttgatttataaaaatttgcagtattttcataatccaccaggtacatcattaccattgtgtattgaatgaatattaaccatgcttatgtatataaccattcccactgtattctaagaagtgtggtgatgtaattatcagcagattgtgagtagatctttgttacactaaatatggatatagagcaacatgatacttaagagcatgggctctgccactaacgttgcaacactgttattaactccagcttccttactagtaaaatgaaagtgataaaaatacccttatgccaatggtctcagaattaataatgtatgaaaatcacttttcatcgtgagaactcaacaaatgctggtccatgtcgaccttaatagtagaagg

SEQ ID NO: 413919 - DNA, 583 bp, Homo sapiens
atgatttcaaactatatagcaatcaattgaccaaatcagccattcagaaacaacctgggcctgagcacagggccatgctgttgctggttcctgctaataacaggcaatcaagaatcttctagtttttaatgatggaagacctgttgaggtactggggagagactttgagtggtagggagggagcactatggagcaacaactgattttgatttataaaaatttgcagtattttcataatccaccaggtacatcattaccattgtgtattgaatgaatattaaccatgcttatgtatataaccattyccactgtattctaagaagtgtggtgatgtaattatcagcagattgtgagtagatctttgttacactaaatatggatatagagcaacatgatacttaagagcatgggctctgccactaacgttgcaacactgttattaactccagcttccttactagtaaaatgaaagtgataaaaatacccttatgccaatggtctcagaattaataatgtatgaaaatcacttttcatcgtgagaactcaacaaatgctggtccatgtcgaccttaatagtagaagg

SEQ ID NO: 413920 - DNA, 588 bp, Homo sapiens
cagtaatatggacatttctgatagaaataaaatattagcaatcattattctgttctttccgacatcatattttgttcacatcagtttccttatttagctacaatttccaagtgtatgttcaattgaaggactatatactggtatagattaattactacataatgtatattcttaagtatgaacaatccagttacactgcaatatctagaaataagtgactgatttctaagtgactaaaatgagaagtgtttccataatataatttgacataatggtccccagataaaagtcaacaccaggctcataaaattactgcatcagttaaggaagaaaataaccccacgatatgctcaccaamtgccacactcttgcatctacatataattcttaaacacctattaagtagttttaagcaagttttcatccgtttttgacgtattttacaaaaatttcccaagcaagtattttacaatataggaaaagctcaaccgttttcttaagagtttgataattacaagttgaatctctgcatctgaaaggtaaggggactatatttcagcctatggatttataataaaaacaagtcat

SEQ ID NO: 413921 - DNA, 588 bp, Homo sapiens
cagtaatatggacatttctgatagaaataaaatattagcaatcattattctgttctttccgacatcatattttgttcacatcagtttccttatttagctacaatttccaagtgtatgttcaattgaaggactatatactggtatagattaattactacataatgtatattcttaagtatgaacaatccagttacactgcaatatctagaaataagtgactgatttctaagtgactaaaatgagaagtgtttccataatataatttgacataatggtccccagataaaagtcaacaccaggctcataaaattactgcatcagttaaggaagaaaataaccccacgatatgctcaccaaatgccacactcttgcatctacatataattcttaaacacctattaagtagttttaagcaagttttcatccgtttttgaygtattttacaaaaatttcccaagcaagtattttacaatataggaaaagctcaaccgttttcttaagagtttgataattacaagttgaatctctgcatctgaaaggtaaggggactatatttcagcctatggatttataataaaaacaagtcat

SEQ ID NO: 413922 - DNA, 545 bp, Homo sapiens
aaaaatacaaaaattagctgggcatggtggcatgtgcctgtaatcccagctactcaggaggctgaggcaggagaatcacttgaacctggaggcagaggttgcagtgagccgagattgcgctactgctctccaacctggatgacagactgagactccatctccaaaaaaaacaagaaacaaaaataaacaacaacaaygaaacagtcatttattgttatatatctagtctgtattacctctgtcctgcctcaaatactaaagcaatcaattataagacctctaaagaatctctttataaaatacatgtatgtgtgtatgtgtacgtctaaatgcatttgttgcatatccccatgctcatggcactgttccaggtgcctaaacagagcttacattctgtcagggtgggctgaaaatgaagttccaatcacaaaattaataatttaattacagttgtgatatgacacgttagaaagtagcagtatataatattaagagcaaaaagagagtgttgatctattctgtggtcactaggaggctgagttctt

SEQ ID NO: 413923 - DNA, 590 bp, Homo sapiens
ccttggtcattcctgggtgtggggcaagctaactttgggagaaatttatagtttaaatgataatagtcctcaaaactaaaccacctttgtaaaactaatcgaagctcaccaggttaggagaatgagaggggcctgaactctgctaccatgtaggcatagctaaatgattaccagccattattccagaggttacaagatttgcagcttccccaattactcctgtmaataacaccactgttgtagaacctaagattggcctttagagatgtcttttcaagcttttgcctttctgaccagatggacccaccgggaccagcaactcttccgtggctcccacccagaagccaactgagtgcaccaggaccagcttccacaccccgatggttgcatccccaaccaatcagcagtaccaattccctagtcctctgtctgccaaactatccttgcaaaaccctagcttccacattttcgaggaggatgatttgagtaataataaaactcccatctcccctttagccagttctctgtgtattaaactccttctcttttgccattcccctgtcttgaaaaatctgctctctctgggtagt

SEQ ID NO: 413924 - DNA, 560 bp, Homo sapiens
atcctgcagcctttacaacttttgaatgtcctgaaatctgtttataattttataaactaataaagtgaacctaactcacttttcatataaacaaaatatactttttgcatagttttaatatatgctgaattgctagaaataagactaccacataaatcaagctaagctgattggcttctttttttctttaacgtcaccaaaagttgwtcctcgtttcagaaagttgcaccatgaccacagaaaagatctacagaaaaatcataataaataataaagccacatcactgatagtaccatggcttgtggcatctgagttgccaatacaatacctcatatcaatctgcattttcttactagttagtagtagcttctaatgaagtcatgccaaacatctatacaatgaaatacacattgtagacggtctccaacttatgatagtttgacttacaatttttcaactttatgatcctgcaaaagtgatatttactcagtagctcctagatttgtgatggatgtaatcctgtcataagctggggagcatcagcattttatcgtaagtt

SEQ ID NO: 413925 - DNA, 511 bp, Homo sapiens
ccccaggcaacaacatgttttcataccttctgtaataaacctgcctttctttacccaaaaccatcttggttaaaaccttgactgcctgagagcagcctgactgcagtttttgtcaaaggaaagagtctttgtcacccaattgtagtcaattatagacagattactgtatttctttttttccccaaattcaaacattctttgaaatgcttttctatgtccatattgttctgttgacttaaaaataaacctttcatagctgagtcctgatgtctgtggaaaaaaataataaaccttccaacatatctattaaatgaatagatacagctatttagttggagagactggcatgargggcagtcaggtgtcccattacaccgaacttgcaactcatacaccatctaggggccaagggaaaaactttcctttcactctctgaaagttcgctgaaaaatcaactcacaaaaggcaggttaattggagaaaatgtcatgggtgtgactagctagggcca

SEQ ID NO: 413926 - DNA, 579 bp, Homo sapiens
tgtttgccttttatccaattactctatcttctgtgagttgatttttcagcaaatcttcaggggccaaagagaacttttctcttgccccwacagagtcccagactccctgaatttaaatgaactcattattttctgtcttcctgaaacctttcctactagaggtcttttactaaacccggttcggtttttgtctaacttagtcggatacctaaagccttcttatagaacctaatccagtttctcttgtgacttccacagatagtctggatcaaaactgttcatataaaattggacacaaataatggagctcatatccaagggggacttaccagtgacaccctccaaatgtgcaaagagaagcagtgagcacaagtaactcagcagagtagccagtctgtttgcttgttaatcctggagttcatcaatgtggatctcctttgaaccattgcttttgaccatacatctaataaaataaaaccttagacaaaataaatttaacagagtttatttgagcaaataataattcaagaatcaggtagctctcacaacctgaagagattcagagagctctgctctgca

SEQ ID NO: 413927 - DNA, 558 bp, Homo sapiens
cggatacctaaagccttcttatagaacctaatccagtttctcttgtgacttccacagatagtctggatcaaaactgttcatataaaattggacacaaataatggagctcatatccaagggggacttaccagtgacaccctccaaatgtgcaaagagaagcagtgagcacaagtaactcagcagagtagccagtctgtttgcttgttaatcctggagttcatcaatgtggatctcctttgaaccattgcttttgaccatacatctaataaaataaaaccttagacaaaataaatttaacagagtttatttgagcaaataataattcaagaatcaggtagctctcacaacctgaagagattcagagagctctgctctgcaatgtggccagtgagtatttatagacaagaaaaggctgaagaatgcagaatcaaagaataaaagatggagtgatcatttcaaagttgttttccttgaaagggttaaagctggggggggatttccttgttatgctggctaaaacwggcctgttcgaggatttggctattatctctcccctga

SEQ ID NO: 413928 - DNA, 414 bp, Homo sapiens
aggctagcctaggcaacgtggtggaaccccatctctataaaaaacacaaaaattagtcaggcatggtggtgtccatttttagtcccagctacttgggaggctgagatgggaagatcaattgagcccaggaagttgagtcttcaatgagctgtgatcaygccactacactccagcctgggcaacagagcaaagccctgtttcaataaataaataaacaaaataaaataaaataaataaaaagtaaataaaaatgtttgcttaaaaccaggagttccagaccaaccaacgtttagcacagctcataaatactgaccacctatatcaaaaaagaaaaaaattactaaaatattacaaatcagctttcactttaagcaattaaaaaaagaaaacgaatgaaactctaagtaagcagaa

SEQ ID NO: 413929 - DNA, 414 bp, Homo sapiens
aggctagcctaggcaacgtggtggaaccccatctctataaaaaacacaaaaattagtcaggcatggtggtgtccatttttagtcccagctacttgggaggctgagatgggaagatcaattgagcccaggaagttgagtcttcaatgagctgtgatcatgccactacactccagcctgggcaacagagcaaagccctgtttcaataaataaataaayaaaataaaataaaataaataaaaagtaaataaaaatgtttgcttaaaaccaggagttccagaccaaccaacgtttagcacagctcataaatactgaccacctatatcaaaaaagaaaaaaattactaaaatattacaaatcagctttcactttaagcaattaaaaaaagaaaacgaatgaaactctaagtaagcagaa

SEQ ID NO: 413930 - DNA, 540 bp, Homo sapiens
tggatatgactgaatttgtttaaatgacagaaccgatagaataaatctcttaccccattggctataaataggcatgtctttgtggatccaacactactaatgaatttgcataaactgtggggcagaaaagtaatgaatcttctataaagatacagacacttgaaataccaagttttggagaaccagaattacagcatctgagttttgggaaagataataagcctggatttaagctatgcatatcttctgttatgccatcaggtacctgaccattctgacataaatttgtggcttacctatgaggtgtctacagctgaccaacatttacatagatagagaatgcattttgtgttagttgagtcataagaacatgaggcttatgatcctccatttagttactttgagctcmccaaacacactctttttggcatcagtcttggggaggtgtttttgtgtgtttgctaagcaggatgtaaggttctaaaggagagaaattttctttgtgcctgttgtgcctagaattgtgctagggatatagta

SEQ ID NO: 413931 - DNA, 572 bp, Homo sapiens
tcgctaattattcccttaggataattcctctctgaaatggctatagaaatttgtatataaactaaagattttcaagaatgtctcttttatttcattcttgacaacagtgataatcatgcttttaagtttctttctaactatgtaaaatataacatctcattaactgtatatttgaacttaatttattagttgtgcatagcaatatattttcataagtggatgtttaattaaataattacaagtatatgtgacatattatttgctgtctttttcttagtggtttgtaaaagctctgtatatattacagataggaagcatttatatactgcatacatgtttccctttaaattgctatttcactttaaattttacattactttttgawatacagaatatttacatttttgtacatgtcaaaatgttaatttatgatttcttgtaccatctttgttcctaggatgctctttctcaactgacatcacctgcatttagtccatttcagttcttccatggctttatgttttcagtaggttacattttaaaattcatctgtaatttattgcaatataagg

SEQ ID NO: 413932 - DNA, 385 bp, Homo sapiens
tccttctgtttaattaaaataccttccttttcacatttgtacaagtgttaaaattaaataacgtcttatatgtaataaagtaagtctctattctttmtaaaatgtcaagacaattctcatcagctttaaaattgtaagtaacctttagaatcctagtgacaaatacaaaaagaaggaagatgatattctattgaaattaaataatttgcctaaattaaaaaagtaatgtgggatgaattaatatgtttataatattgagttctccaacacattatccatacacacagcacgacattctgtttacataaatacacgtcccttttttcatctttttctaggttcctcatcaaagctgtaacattttcttcaaatagaacaagtgtat

SEQ ID NO: 413933 - DNA, 385 bp, Homo sapiens
tccttctgtttaattaaaataccttccttttcacatttgtacaagtgttaaaattaaataacgtcttatatgtaataaagtaagtctctattctttctaaaatgtcaagacaattctcatcagctttaaaattgtaagtaacctttagaatcctagtgacaaatacaaaaagaaggamgatgatattctattgaaattaaataatttgcctaaattaaaaaagtaatgtgggatgaattaatatgtttataatattgagttctccaacacattatccatacacacagcacgacattctgtttacataaatacacgtcccttttttcatctttttctaggttcctcatcaaagctgtaacattttcttcaaatagaacaagtgtat

SEQ ID NO: 413934 - DNA, 385 bp, Homo sapiens
tccttctgtttaattaaaataccttccttttcacatttgtacaagtgttaaaattaaataacgtcttatatgtaataaagtaagtctctattctttctaaaatgtcaagacaattctcatcagctttaaaattgtaagtaacctttagaatcctagtgacaaatacaaaaagaaggaagatgatattctattgaaattaaataatttgcctaaattaaaaaagtaatgtgggatgaattaatatgtttataatattgagttctccaacacattatccatacacacagcacgacattctgtttacataaatacacgtcccttttttcatctttttctaggtycctcatcaaagctgtaacattttcttcaaatagaacaagtgtat

SEQ ID NO: 413935 - DNA, 570 bp, Homo sapiens
tgatcagtctttacccgtcctttgtaatacagaccgtgagtcccatcttaagaatacaggacctcctactgaccacatcttatagtgggcctctttggaaaatgtagccacctcctccttttttacttccattcaacctggtcctatgtaaatagcttaccatcayatccaaagagatcttttaaataaagatgccatttctctttggatataatggtacaataagatcatctagttgaatgatattttctaaaagtcctttatgtcctgaggctaattgtaaatccagaaaatcttgatgctgaatcggttggtatggtagttcttaatggttagcaaagaaaaaaaatcgtaatttcagttagagttaaaattcatcaaaggctttagactgaaggtcacctgaccaggttcaacacagagcataatagctttatattgtgataaaagagagaaaatattctcagaacagactacaatgtaggcatatcaggctatactatgaggataaaatattcaaaatatcacttcataatgataataggactagggccaccaaaaattgaggca

SEQ ID NO: 413936 - DNA, 556 bp, Homo sapiens
gtctgccaggttaaaagagagctcagaaagttctcacattagcaattaaattgctagcctggaaccaactcacatcaaatattggccagaactagtcacatgacaccatccaaccacaaaaaagcctggaartgaaatctttccatgtgttggaaatacctgatgaactgcattaaacatgacctcacatataattgcatatctacattaattactcagaggttgcctttcaattattcctttctggtatggaggtgtcaatgaatttcaagtctcttacaattcatgtgatgtaaattgcttcatctcctcgtaactcaattttttatcactagacattgttttgggctaaatatatggagtattttgaatatgtttatcatcaagctagaagttgaccatacattcaccttcaattcccatattttcataagccaaataacttactagttaccaccaaattgagaatttgttctctcttcttcatgaatatgatattttatatttttcaattacaacacaacagaagagttcactaattggaaaatgccttccc

SEQ ID NO: 413937 - DNA, 556 bp, Homo sapiens
gtctgccaggttaaaagagagctcagaaagttctcacattagcaattaaattgctagcctggaaccaactcacatcaaatattggccagaactagtcacatgacaccatccaaccacaaaaaagcctggaagtgaaatctttccatgtgttggaaatacctgatgaactgcattaaacatgacctcacatataattgcatatctacattaattactcagaggttgcctttcaattattcctytctggtatggaggtgtcaatgaatttcaagtctcttacaattcatgtgatgtaaattgcttcatctcctcgtaactcaattttttatcactagacattgttttgggctaaatatatggagtattttgaatatgtttatcatcaagctagaagttgaccatacattcaccttcaattcccatattttcataagccaaataacttactagttaccaccaaattgagaatttgttctctcttcttcatgaatatgatattttatatttttcaattacaacacaacagaagagttcactaattggaaaatgccttccc

SEQ ID NO: 413938 - DNA, 527 bp, Homo sapiens
taatccaggatagtcttcctatctcaagatacctaatttaattacatctgcaaagtctcttttgtcatggtgggtaacatatgcacaagttccattgattaaaatgtgaatgtctttaaagggccgttgttctgcctgtcataagaacgtataggttaaaaaattaacaatataaattagaaaatgttttaaattgaatgaaaaaaccccacaacatatcaaaatatgtgggattcagtgaaagcagtgcttagagagacatttatagattttagtgcattaaaaaaaaagtaaggactcaaatctatgatactctttaaaaagaagagcagattaatacaaacatacagtgggaagaaaacaataaaaataatcacagatatagataaaattaaaaaagaaacacaataaagaaaattaaccaaaggaaaatctggtttttttaaagatatcaagaaaattgctaaatttctaaccagattgattaagaaagagaaaakaaattactaatattagaaataagaaag

SEQ ID NO: 413939 - DNA, 493 bp, Homo sapiens
caattctctccccaaataatctgtaaattcaacacaatcacaataaaaatctttgcattctgttttgtataagttggtgtcaaacaagcacatgtgataatgttaaaaactgttagatattagagaaatgcaaacgaaactataatgacataccgctgcacacccaccagaatggatatgattggtacaactgatrttgctgagttttggtaaggatatggagcatctgagaaatctatatattgctggtggaaatgcaaaatgttacaaccactttgcaaaacagtttgtcattttctcataaaattaaatatatacttaccatctgacagccattctgctctaggtatttatccaagagaaataaaaacatatgtccacacaaagacctgcatgtgactgtttatagcagctttttcataatatcaaaaaatctagaaacaatgtaactatccattaactggacaatcaatggataaacaaaatatagtcc

SEQ ID NO: 413940 - DNA, 539 bp, Homo sapiens
cttttctaattctcttttaggaggaaataataaaaggatcggaggatacttattcagcggcttgcagaaaagacctcaaaaacctatttattatgctgcggtctgcagggaatttgcttctggcgtttgatttcaactaagataaactaactaatgaaggaaaataagtttcagaatcaaagctcctccttctcattactaccagtctgagaaatgtttataaactctctgtcgtgcatctgacctttaaatagggtccctgtggagtgctctctctctctctctctctctctctccctctctgtcactcactcactccttcttgccttctcgcttaccccctttactctaaatatctcccttcttccattcccattatattcaatgagctcttttgtttttctttattccttttctcttctctttggctctaatctcttcttctccttgttccctttctattstaagatcaaaaaattaacattcctcttagggacaaatagtgccttaaggtgacttctatcagaagctctttatat

SEQ ID NO: 413941 - DNA, 564 bp, Homo sapiens
catgtttcaacagttcataattataaagcactgaacatttaaatggaagaccaagaacaacaacaacaaaagaaaatatcaatcaaatgctttttttcgatatgtagatcagcaaaatgaattacaagcatttcatttacacttcaaagatagaagatcttgaaatacctcaatcacatgaaacagaggttggcaaactacaacctgcagaataaatctggcctgccacctgttttggtaaataaagctttactggaacacaaacatgctcgttcatttgcatattgtctatggctgatttgagctacactagcagagttgagtaattcagacacaaaccagatggcctgcaaagcctaaaatatttaccgtctgctcctttaaagaaaatgtttttccagcccctgacatagaagaaggtaaatggaaactaygcttgtacctctgtgaataccagtcactcaagatgtgtaaaatatcaatggtattctcttcatattacctttgctatctttgctatttcatttggtgaccttgtattgagcattctggcttgaatatggg

SEQ ID NO: 413942 - DNA, 637 bp, Homo sapiens
taggatctcaaagtcttggacagttctggctctgtggctttgcagggtacagccgccctcccagctgccttcacaagctgatgttgagtgtctgtggcttttccaggcccatggtgcaagctgtcagtggatctaccattctagggtcagtaggatagtggccctcttctcacagctccactaggcagtgccccagtagggactctgtgtggggcctcccactccacctttctcttctgcactgccttagcagagattctccatgaggaccccacccctagagcaaacttctacctgggcatttaggtattttcttggttcttctgaaatctaggcagaggttcccaaacctcaattcttgacttctgtgcactcgcaggctcaacaccatgtggaagctgccaaggcttgaggcttgcaccctctgaagccatagcccgagctccacattggcccctttcagtcatggctggagcagctgggatgcagagcaccaagtccctaggctgtacacartgcagagacatttcccccattgtcttaaggattaatatttggctcctcattacttatgcaaatttttgcagctggcttgaatttctcctcagaaaatgggattttcttttctgttgcactg

SEQ ID NO: 413943 - DNA, 508 bp, Homo sapiens
ttaattaggaatgcagtcagatagccaataaatatgttttaaggatctcctattccttagggactctagaggagataaaggtttaaaaaatattttaaatcttttttaagaccatgtcaggatgggcatggcagctcattgttttarttccagcactttgggaggccgaggcagatggatcacttgagcccaggagttcgtgaccatcctgggcaacatggctgggtaatcctgtctctacaaaaaatataaaaattagctggttgtggtggtgtaaccctgtagtcccagctactagggaggctgaggtgggaagatcacttgagcccaggagatcaaggctgcagtgagctgtgagtgtgccactgcactccagcctaggtgacagagcaagacccagtatcaaaaaaaaaaaagttaaaattaaaattaaacatgttttctgttcagaaggatcttccaggtaagtggcctgacttccatagtttgttttttgagaagtaggaaa

SEQ ID NO: 413944 - DNA, 597 bp, Homo sapiens
ctcttgctttggggattaagtttcaacatatacaatttggggtacataaatatttagactatagcagtgagcaagaaataaatcattatttcaagtcactgagttttggcattgtttgttaatgcaagtatgactggttctattttgacagatgcagagccatacaattctattaaatcaataatttcaagagaaaaacattccaaaaaattaatgttcatatcttagaactatgtttaaccacattcaaagcaacaattttattttttcaagagagcaaaaagaatactcatttcaatacagaaaccactcaytctttcaaaaaattttgaatgtctctgatatgtcaggcattatgtcaagatccaccactacaatggtgaataacatttctagtccttttggagcctaagtttgaagagttaaaaacgaaattactcaattatatgtattaatgaatgttattagcatggtaagccaagagttttaggggaaaacataacagaatatttgatctagtctagggtagtagagagggttttaaaatttttgttttaagaggataagacgtcaaagttgccacttgaaagattagaa

SEQ ID NO: 413945 - DNA, 535 bp, Homo sapiens
ctccctgctgggcatgagcttatagggataggtggtgagggagagggaaaagttgtggtagattgtgctaaaaagcacgatggctctgtggtaaatcactgagacaagaccattgactccctccatttagggaatccctagaagttttcttcaccaactgtcttcaaacctgaacatttcatcacagaatgtccattgaaacttaggactttttttttttccccaattggttgtctggcctaactttaagccattaaagttgaaccaasaatcctgttgctaatagtagctgtttccagctgttgccagaatgtccttcacaagacagtatcatagaatttcccatttctgtgtgaacatctttttctcaaaacaagtaattaagctcatctgtacatatgcaaagcatcatcaatatacaggcagtagtaggattcatgttttcactcctacccagcacttcccatgtcctgtttctctgaagtcttctgagtgctattcctctttcagataattctctctattccattgccat

SEQ ID NO: 413946 - DNA, 572 bp, Homo sapiens
ctgtcttcaaacctgaacatttcatcacagaatgtccattgaaacttaggactttttttttttccccaattggttgtctggcctaactttaagccattaaagttgaaccaacaatcctgttgctaatagtagctgtttccagctgttgccagaatgtccttcacaagacagtatcatagaattycccatttctgtgtgaacatctttttctcaaaacaagtaattaagctcatctgtacatatgcaaagcatcatcaatatacaggcagtagtaggattcatgttttcactcctacccagcacttcccatgtcctgtttctctgaagtcttctgagtgctattcctctttcagataattctctctattccattgccatcatccaatgtgcttgaagtattattaatgacatttacttcatccttgtgtatgtaatgctgagtgtgtttaggacttttaaaattaatagtccattgtgtaaaagttaatggtgaactgtttttgaacccctggctctgaaacgcaactgggaaggaacagtttgtggccttctagagaaattctggcataaac

SEQ ID NO: 413947 - DNA, 544 bp, Homo sapiens
gacaagttcattcttgatgcagttctgtcraaaccatccctaagaacctcaggaaaatcacttgggcaagctccctgggttctcttttctgttaaatggaaataaatatatttggcctgctgatcttgcagccttgttcactgtggcatggccagtgcctgtaacaacacgtgggactgagcaggagctcagtacagctgtgaacacccagaatgaaagccttgcaagactcaaacacccagggctcttcctaagaagaaatctgaaataaatggaagtctattttcacttccttgcctcccattctcatgaaatttcactgttttactatcggcctttcccccctcccatgaccaggagctcttgagtcgtttccatttgttcttcttttgaaaagatacacttacactgtttatttaatttttatggtaggcaaaacttaatcatgggtcatagagatattagtatgttaaggctcagttttatttagagaaagggctctctttatttcatagctaaagccatgttttaaattattatagca

SEQ ID NO: 413948 - DNA, 525 bp, Homo sapiens
tcatttggtccattttttttcccccagagactgataacactttaagggagctgttgttgtggggtcatggggaaaagtgtccataaaatgatgaatatgctttcaccattaactaacagtttttgtttgttaaccttcatcaaaagtttcattctatatgaacaaggttcagaaaaccacctgtaaaatgatcctagattcttataaatgtttagcacaatrttgcttctaatagcatttcctaaagcagtgtaggtgttcattaaatatttttgaaagagtatgtcaatgaattaaaggtatgtgaaagatagcaactccatcatgtattcaaacaaaataggtatttcatgtttgagggctcagtcttaaagtagatatccagtttacttaaaattttgtatcttctctggaaagacaggatgctttgggttctattttctgagaccattgtattgaacacactaatttttattacttcacttctaaaactgaccagaatgagatacaagaagtagatcttgc

SEQ ID NO: 413949 - DNA, 557 bp, Homo sapiens
gaaacagttgtgactcttayccaataatcatatataaaattctatcctaattcataaaaaaaatgtagaaaggtagaaatcaactccaatgaaaaaaatacatatttgtgttacctattagtacataagagctgtttaatgttggcaatgtaaacttgttgcaccatctgaatgtactaacttgaaagagtaaggtttgctttattccctcaagatcaaaagattgctcttaggaagccccaaaaggcatgaactctctggaagaaataccaggcttggagctccctgaagtgtacatttgagcaccattagcaaaggagagatggtttgcctcaagtttcatgggaatatacaaggataaaggtcattgctaaggcagccacaactcaaaccacctagggatagaatgcctgaaatcaaaacctcctataagattggaaacaaaataaagagtaacactgatcacagcctgttttggcaatttccagcattagctgagccattgagacatccctaagacgtagcaacctcaagtcattgaagtcagccacaggtaa

SEQ ID NO: 413950 - DNA, 499 bp, Homo sapiens
gtaatttttatattcaatttgacctcattaagacattataaaagtgcttagttgaactaaaccaaaactttccactctcctaccctcaaatctcctcaccaatgaaatctatttaatttttcccatcattgaaacgatgttctcattcatcagtgtcgtctgaatgacacttttaagtttatcagtgagtacatgtcacatggaactaaycagtttaaccttagtagtgatcagctcctgagtcaatacctacatttacaaaaataagaaatctaaaaaacacttttgacagattttttttcagtatgttgatcttcatctaatgaatttctagaagcttaaactcataacaccaactttccacatttaacatgtactgcaaagcggatgtaaccatttggtattatcgaacacaagatttcactgaatctgaagagcggtcaaagtgcgactttacaattaaaggatcatcttgcagacagatgcctttttttattac

SEQ ID NO: 413951 - DNA, 564 bp, Homo sapiens
aaaattctcaccattactaatcatcaaggaaacacaggtcaaaaccacatgaactattatcttaccccagttagaatggctattattaaaaagacaaaaaataacatgctgaagagggtgcagtgaaaagggaactcttgtacactgttggcaggaatgcaaattagtacaccattatggataaaggtatagatatttctcacaaaactaaaaaatagaactaccatatgatctagaaatcccactactgggtatttatccaaaggaaaggaaattagtagatcaaagaaatacttgcattccctctgtttattacagcactattcacagtagcaaagatatggaatcaacctaaacgtccatcartagatgaatggataaaggaaatctggtatagatacataatggaatgctaatcagtcataaaaaagaatgaaatcctgtcatttgcagcaacatggatagaactggaggtttttatgttaagtgaaataagccaagcacagaaagacagatatcacatgttttcactcatatgtcaaagctaaaaatattgacctcaca

SEQ ID NO: 413952 - DNA, 586 bp, Homo sapiens
ctcatatttttaagcttcaaatatttctatgactaccctgggtaatattttaaagtattcataggatgaaaagcttaggcctaaaaagccataacttaaaatcacagagtttatacaattcaaaccctcagtaacgtttatctcctttcccctacagacttagtttctaagaacaaaatacagaaaaaagttcattatgtaaagcartcaacaccaggaattgatgacctcactgtgtgaaggccacagagtcccagagatgataattatgtaacacaaacaataatcacttaaattgaaattagtattatttacaaagcccctaagccatcatctccatgtatatttcacatgttttagtgaaccaggaaaatataatcaaaacaacactttgaaagtgatagtttaaaacaaagagaaaattaataaactccaacagttttcaaccaagtacagcaaaaattaagtatgaagttttaaaatatatatacagatggctgggtcattacttggagactctgtttagtaggctaagtgtgctgcagagagattgacaaaaataaaataaacaataacaaaaacacct

SEQ ID NO: 413953 - DNA, 619 bp, Homo sapiens
ccctgtacatacccctaggaaaaaggctgaatccaaggggctgagcagtgatggtttgcaggttctgcttggaacagaaccttatgttgcaggataagacacgctggcttggaattccagccagccattggtaacagcattgtgcttccctgggactcagctcccaggggcaggggcaggccgccatctctgctgtttgggtgrcttagccattatggcctttgggctttggagagtccaaaccaactgagagcaaaagggattcccccagtgcagcacagctgctctaccaaaacatagtcagactgcttctttaagtgggtccccaatcccgttactcctcagtaggtgggacctcccaaccagggcctccagccacccgcaccagtgttctctggccaacagagatttaaagactccctgggacagagctcccagagggaggggcaggccaccatctttgctgtttgggcaacttagcctttccagccttcaggctttggagagcccaagctgaccagggttagaagtggtaccccagcacagcacagctgctctacaaaaatgtggccagactgctttctaaagcaggcctcaatcccattcctcatcgctaggt

SEQ ID NO: 413954 - DNA, 604 bp, Homo sapiens
tgggtctccagctacctcctacaygtgtgtttgtgctgacaacaggcccatacctccctgggacagagctcccagagggaggggcaggctgccatcttttctgtctcacagccttcattgatgatatctccaggtactagaaaatctgaggtgactagggactggagtagacccccagcatagcacagcagccctaaggaaaagtggccagactgttacatggatacctgttcccctgtctccttaccaggcaggtcctccaggtctgggcctctagccactttctgccagagtgactgagccagtagcaactcagcagctccccagacagagcctttagaggcaagtgaaagcctctctgccactgcctctgcagtggaaacattcttgctacccttgaattaataaaggagcgaagaccctaagtaccttgtccacacctccaataggctgcagtcgaaccaaagagacaaggcaagtccatctcccacagtagggtcccacatacccacaattcttgtcaccagagagggaacccctggcttgggcccacagcacagaacagggctgattacactgagcgattgctaacctgtgtctttct

SEQ ID NO: 413955 - DNA, 542 bp, Homo sapiens
tccagcaaggcaacccctaaggccatgcaccagccctcacattttctccccagactgcagcttcccctgtgcccatggcatttccccacatcactttgctggcacaagtttgtacaggcgggttttgctttaattgccccaccagtacatgggagtgcaatatttcctctgactcctgtmgaccagcattgcaaaaggagccttggtgagcatacagccagcaagccccatccctgccagcaccctgcttttgtgctaatggtgcacagagaacaggggatcctcccacgcaggtggtcagcaccccatcccaaaccaacaccacatcctgtgcaacagcatacagtctccatcggggcaccacccgctccccctccaactgccttgcatctgccactgtggtgaatgcccacagggaggcaggcacccctatacccactaacacttggttgtggctgctgcaccttggtcaccttggtccccctggcatagtaaacttcaaacctcaaggagccagaaaacaaagtcggggctcaatacaa

SEQ ID NO: 413956 - DNA, 542 bp, Homo sapiens
tccagcaaggcaacccctaaggccatgcaccagccctcacattttctccccagactgcagcttcccctgtgcccatggcatttccccacatcactttgctggcacaagtttgtacaggcgggttttgctttaattgccccaccagtacatgggagtgcaatatttcctctgactcctgtcgaccagcattgcaaaaggagccttggtgagcatacagccagcaagccccatccctgccagcaccctgcttttgtgctaatggtgcacagagaacaggggatcctcccacgcaggtggtcagcaccccatcccaaaccaacaccacatcctgtgcaacagcatacagtctccatcggggcaccacccgctccccctccaactgccttgcatctgccactgtggtgaatgcccacagggaggcaggcacccctatacccactarcacttggttgtggctgctgcaccttggtcaccttggtccccctggcatagtaaacttcaaacctcaaggagccagaaaacaaagtcggggctcaatacaa

SEQ ID NO: 413957 - DNA, 529 bp, Homo sapiens
tcaaaataaagggatggagaaaaatctaccaagcaaatgaaaaacagaaaaaagcagggttgcaatcctagtttctgacaaaacagactttaaaccaaaaaagagtaaaaaaaaaagacaagggcattatgtaattgtagagggttcaattcagcaagaaaacctaactatcctgaatatatatcctaaatatatatgttctaaatatatatcctaaatatatatcctaaatatatatatatgttcccacacaggagcacacaggagcacccagatacataaagcaagttcttagagaccatcacagaaacttaaacttccacctaataataktgggagagtttaacaccccactgacaatattagacacttcattgagagagaaaattaacaaagatattcaggacatgaactcagctctggatcaaatggacctatggacacacagaactcaccacccaaaaacagcagaatatacattcttctcattgccagtggcacatactttaaaatcaatcacattgtcaga

SEQ ID NO: 413958 - DNA, 552 bp, Homo sapiens
gggaagatagaaaaaagggcaaaaggtagcaataaggtaattcactaagggggattctgaataattgatagttatactcaattgcatttgtaacccgataaataaaattaaagcaaaaataaaatatacgtttattccatgaagcagccaagaatgaaaaatcttcaaaatacaaaattggtgaaggtataagttaagatgaactctcatcagaatgcaaattactgtaattcctttgtaaaacaccttagtactactttataattttgaagaaaaatatatcttacctacagacattatttttgacatgacttcatgtctgtgcataaagaacaagaaggttcatcaagctattgtgtaagtggaaaagtgagaccaacctaaaggaacatcatgggatgactggaaaaattaaggtctgttcacaagatggcatactatatagattaaatccattaactacatctaaatgtatcaacatgagtragtctcaaaaacacaatgtttaatagtaattatcaaatgttacatataccatgacataatttagta

SEQ ID NO: 413959 - DNA, 478 bp, Homo sapiens
atgtttaactttataagaagttgataatactgatttgaggctctctggaggaaaaaaaatcgagtataaatataaacagggtagagaggactcaatctcactccaaaatatatccagtaagcattaaaaaaaaaaaaagattagcattaggagatatacctaatgctaaatgaygagttaatgggtgcagcgcaccagcatggcacatgtatacatatgtaactaacctgcacattgtgcacatgtaccctaaaacttaaagtataataataaaaaaaaagattaaaaaatttcagcattgtatgggtatatcacaacttgtttatccattcaccagttgttgtatatttaggttgcttccagtttctggcaatgataaataaggctgctatgaatattcatgtacaaatcattgtgtagacatgttttcctttctcttgggaagacacctcagaatgggattgctggattgtatgat

SEQ ID NO: 413960 - DNA, 599 bp, Homo sapiens
tagttaaaaatgtacagatgctctctgacttataatagggttaygtcctgataaatccatcataagtcaaaaatgcatttaatattcctaatgtacctcacatcatagtttggcctagcctaccttaaatgtgctcagaacactttcattagcttatataagatcacctaatacaaagcctattttataataaaatattgaatagctcacgtaatatactgactactatactcaagtacagtttcttctgaatgcatgtcactttctcaccattgtaaagtcaaacaattataagtcaaactatcacaagccagggaccatccatatgtatttcattcagaaaatgctggaaagagcatttcggagaatatctagatgagagaaggtagaaagccatgcacaaattcactgagagtttaaaaaaatacatgcatattgtggagatagaaatcaaatctatttgtctccatctgctgtattcttcccaaaatattatctcttcttatcccattgtactatattgcatttctttgaccatttattgtgtatctcttaatatttcccacttcatcattactaacctcactcactctgaactt

SEQ ID NO: 413961 - DNA, 523 bp, Homo sapiens
aacacaccatcacctacaatcttaccaaaaatagaatcaagcacgtgtcctagtcaaacctctggattcaactgtcatttggataaaacgcaaaggatagtgaaaatgtcgatcttcactgagagtctaaccagcaaatttcacagtgtggacatcaagtgacaaaaatcccaaatttttcaacaaatatattgtatgggaaagaaaactttgaaaagaaacctgtatgttagaagagattttaaaaacatgacaaatgaaaaaaaatgggcaagactaaaacttttaaaaaagtttgagacagggtctcactctgtcacccaggctggagtgcagtggtgtgaccatggctcactgtrgcctcaacctcctggctcaagtgatcctaccacctcagtcttccatgtagctgggactacagctgcgtgccaccacatctggctcatttttttttcttttttaagtagagacggggacttgctatgttgcccaggctagtctcaaactcctaagcacaagcgat

SEQ ID NO: 413962 - DNA, 599 bp, Homo sapiens
tagttaaaaatgtacagatgctctctgacttataatagggttacgtcctgataaatccatcataagtcaaaaatgcatttaatattcctaatgtacctcacatcatagtttggcctagcctaccttaaatgtgctcagaacactttcattagcttatataagatcacctaatacaaagcctattttataataaaatattgaatagctcacgtaatatactgactactatactcaagtacagtttcttctgaatgcatgtcactttctcaccattgtaaagtcaaacaattataagtcaaactatcacaagccagggaccatccatatgtatttcattcagaaaatgctggaaagagcatttmggagaatatctagatgagagaaggtagaaagccatgcacaaattcactgagagtttaaaaaaatacatgcatattgtggagatagaaatcaaatctatttgtctccatctgctgtattcttcccaaaatattatctcttcttatcccattgtactatattgcatttctttgaccatttattgtgtatctcttaatatttcccacttcatcattactaacctcactcactctgaactt

SEQ ID NO: 413963 - DNA, 599 bp, Homo sapiens
tagttaaaaatgtacagatgctctctgacttataatagggttacgtcctgataaatccatcataagtcaaaaatgcatttaatattcctaatgtacctcacatcatagtttggcctagcctaccttaaatgtgctcagaacactttcattagcttatataagatcacctaatacaaagcctattttataataaaatattgaatagctcacgtaatatactgactactatactcaagtacagtttcttctgaatgcatgtcactttctcaccattgtaaagtcaaacaattataagtcaaactatcacaagccagggaccatccatatgtatttcattcagaaaatgctggaaagagcatttcggagaatatctagatgagagaaggtagaaagccatgcacaaattcactgagagtttaaaaaaatrcatgcatattgtggagatagaaatcaaatctatttgtctccatctgctgtattcttcccaaaatattatctcttcttatcccattgtactatattgcatttctttgaccatttattgtgtatctcttaatatttcccacttcatcattactaacctcactcactctgaactt

SEQ ID NO: 413964 - DNA, 399 bp, Homo sapiens
taactctgttctgtttcattgtggttgtttagtttgcgtttttttttctccaactttgtgcttcatcrggaaaagctttggatcacaattcccagtgctgaagaaaaggccaaactctggaaaaaatttgaatattttgagccaaatgtgaggaccacaacctgtgagaacggaaaataaatcctgggaccccagactcactaagccaaagggaaaagccaagctgggaactggcttatgcaaacctgcttcccatctggttcctaaataagatagctattacacaaagacaaaaaagctacatccctgcctctacctccatcgcatgcaaaatgtgtattcagtgaacgctgaccaaagacagaagaatgcaaccatttgcctctgatttacccacac

SEQ ID NO: 413965 - DNA, 399 bp, Homo sapiens
taactctgttctgtttcattgtggttgtttagtttgcgtttttttttctccaactttgtgcttcatcgggaaaagctttggatcacaattcccagtgctgaagaaaaggccaaactctggaaaaaatttgaatattttgagccaaatgtgaggaccacaacctgtgagaacrgaaaataaatcctgggaccccagactcactaagccaaagggaaaagccaagctgggaactggcttatgcaaacctgcttcccatctggttcctaaataagatagctattacacaaagacaaaaaagctacatccctgcctctacctccatcgcatgcaaaatgtgtattcagtgaacgctgaccaaagacagaagaatgcaaccatttgcctctgatttacccacac

SEQ ID NO: 413966 - DNA, 396 bp, Homo sapiens
atcaaactagaaaatttaataaatactgtcagatttgtagacccaagaaaatataaactgccaatcacggaggaaaaaaatctctcaatgatcttatctttatatgattcccttgctgcctggagattgacatttccttggggataatctggtcataggattggtgaaggtggaagggaggcaacctccraaggtggggccctctgctcacctgggacagggagggcctgaggtaggtgtctgtgtgggctggggaggaggatgggagcagtgcttctagatgtttccactttctcctcattagataataacgaatgggtgatttccctagtcactgcagtgtgaggaaatctacaaaattaatttcacaatacgctttacaggataggtggagaa

SEQ ID NO: 413967 - DNA, 590 bp, Homo sapiens
gagaatacagtaaactctatgaggcaagctataaacatgtagcattgtgattagggctggttctccttctagagayatggtaggattgcaatttcataccatccttgaagttagagagagccacgtgactcatttagccaatgaactgtgagcagaatgacatgtcacttccagctgaagctttaacaatctgagagacattcatacattttccatgtgctgtagccttatacccaaagcctgggtcccaagtgaccatgacaggcagagctccctgttgagccacagagatttagagaatggctgttaacacagcataatccagcccatcctgactaatctgatattaacatgtataataaagaattctatcaatgctgagggaagatgactagttaaggtcctaggttgcaagtctcaaaacctcttctaaggattgtagacaggaaattaaatgacttctagtccctagagttcccaatctcctaccatcccatcctaatatgacagaagtaattcctgagttgcttctgaaaccagagcttccctcagaacccttagcctgccagatggcttcttggagagccctc

SEQ ID NO: 413968 - DNA, 590 bp, Homo sapiens
gagaatacagtaaactctatgaggcaagctataaacatgtagcattgtgattagggctggttctccttctagagacatggtaggattgcaatttcataccatccttgaagttagagagagccaygtgactcatttagccaatgaactgtgagcagaatgacatgtcacttccagctgaagctttaacaatctgagagacattcatacattttccatgtgctgtagccttatacccaaagcctgggtcccaagtgaccatgacaggcagagctccctgttgagccacagagatttagagaatggctgttaacacagcataatccagcccatcctgactaatctgatattaacatgtataataaagaattctatcaatgctgagggaagatgactagttaaggtcctaggttgcaagtctcaaaacctcttctaaggattgtagacaggaaattaaatgacttctagtccctagagttcccaatctcctaccatcccatcctaatatgacagaagtaattcctgagttgcttctgaaaccagagcttccctcagaacccttagcctgccagatggcttcttggagagccctc

SEQ ID NO: 413969 - DNA, 590 bp, Homo sapiens
gagaatacagtaaactctatgaggcaagctataaacatgtagcattgtgattagggctggttctccttctagagacatggtaggattgcaatttcataccatccttgaagttagagagagccacgtgactcatttagccaatgaactgtgagcagaatgacatgtcacttccagctgaagctttaacaatctgagagacattcatacattttccatgtgctgtagccttatacccaaagcctgggtcccaagtgaccatgacaggcagagctccctgttgagccacagagatttagagaatggctgttaacacagcataatccagcccatcctgactaatctgatattaacatgtataataaagaattctatcaatgctgagggaagatgactagttaaggtcctaggttgcaagtctcaaaacctcttctaaggattgtagacaggaaattaaatgacttctagtccctagagttcccaatctcctaccatcccatcctaatatgacagaagtaattcytgagttgcttctgaaaccagagcttccctcagaacccttagcctgccagatggcttcttggagagccctc

SEQ ID NO: 413970 - DNA, 590 bp, Homo sapiens
gagaatacagtaaactctatgaggcaagctataaacatgtagcattgtgattagggctggttctccttctagagacatggtaggattgcaatttcataccatccttgaagttagagagagccacgtgactcatttagccaatgaactgtgagcagaatgacatgtcacttccagctgaagctttaacaatctgagagacattcatacattttccatgtgctgtagccttatacccaaagcctgggtcccaagtgaccatgacaggcagagctccctgttgagccacagagatttagagaatggctgttaacacagcataatccagcccatcctgactaatctgatattaacatgtataataaagaattctatcaatgctgagggaagatgactagttaaggtcctaggttgcaagtctcaaaacctcttctaaggattgtagacaggaaattaaatgacttctagtccctagagttcccaatctcctaccatcccatcctaatatgacagaagtaattcctgagttgcttctgaaaccagagcttccctcagaacccttagcytgccagatggcttcttggagagccctc

SEQ ID NO: 413971 - DNA, 314 bp, Homo sapiens
tattaatgtgcctttctagtaacaggtttttagaaagtcaaatataaacaaatctgtctatttgtgtgtgtgcatgtggtagtggggagggaagaaaaaaggagggggagagaaagagaaataagaaccaagtttattatactgtatwcagggggaaaaaattttcccaaggtcctaacagaagagcaaagtgccactgtcaatagcctcagtagtgttagggttgcttttatttatttatttatttatttatttatttatttatttatttttccttttttttctttctctttttttcttcttttttttttctt

SEQ ID NO: 413972 - DNA, 517 bp, Homo sapiens
gcacaggagaaatgtattaatgtgcctttctagtaacaggtttttagaaagtcaaatataaacaaatctgtctatttgtgtgtgtgcatgtggtagtggggagggaagaaaaaaggagggggagagaaagagaaataagaaccaagtttattatactgtattcagggggaaaaaattttcccaaggtcctaacagaagagcaaagtgccactgtcaatagcctcagtagtgttagrgttgcttttatttatttatttatttatttatttatttatttatttatttttccttttttttctttctctttttttcttcttttttttttcttttctttcttttttttttttttttttttttttggacagagtctcacactgtcacctgggctggagtgcattggtgcaatctcgactcactgcaacttctgcctcccaggttcaagtgattctcctgcctcagccgcccaagtagctgggattacaggtgtctgccaccgtgcctagctaatttttttgta

SEQ ID NO: 413973 - DNA, 517 bp, Homo sapiens
gcacaggagaaatgtattaatgtgcctttctagtaacaggtttttagaaagtcaaatataaacaaatctgtctatttgtgtgtgtgcatgtggtagtggggagggaagaaaaaaggagggggagagaaagagaaataagaaccaagtttattatactgtattcagggggaaaaaattttcccaaggtcctaacagaagagcaaagtgccactgtcaatagcctcagtagtgttagggttgcttttatttatttatttatttatttatttatttatttatttatttttccttttttttctttctctttttttcttcttttttttttcttttctttcttttttttttttttttttttttttggacagagtctcacactgtcacctgggctggagtgcattggtgcaatctcgactcactgcaacttctgcctcccaggttcaagtgattctcctgcctcagccgcccaagtagmtgggattacaggtgtctgccaccgtgcctagctaatttttttgta

SEQ ID NO: 413974 - DNA, 582 bp, Homo sapiens
attattctgtgccaaatatggataatgactaatatccaacacagatattctcagctcagaagagcaattagcaaattcataaattaagtgcttgcttcctctttagtcaaatacaaacgtttgttaaaagatattattttgctttacactttttctctcagaaataarcagatgcttgaattcccacagtgctgcttgagcctcacaccatgtcatcctgccaggcacccagatccagttctagagtttcacatgatcgtgagtgttggttaataagtcaatgtgaactgggaggggagatttttcaggagtgccacagggctctccctttaatcacatacactccctgctttcattggaaagtgtataatgatgtcagagtgccccagaatggagctagttggaagactgccgtcatagggatgccttagtgaattaataaggttttaatttctggctctcaactttgtagatgtaaaagttgatttatcaatatgtgagaaaggatgaatctttctgaaggttatgtcatcacactcactaagcacacagagaataatgtctagaatctgagtgccatgt

SEQ ID NO: 413975 - DNA, 582 bp, Homo sapiens
attattctgtgccaaatatggataatgactaatatccaacacagatattctcagctcagaagagcaattagcaaattcataaattaagtgcttgcttcctctttagtcaaatacaaacgtttgttaaaagatattattttgctttacactttttctctcagaaataagcagatgcttgaattcccacagtgctgcttgagcctcacaccatgtcatcctgccaggcacccagatccagttctagagtttcacatgatcrtgagtgttggttaataagtcaatgtgaactgggaggggagatttttcaggagtgccacagggctctccctttaatcacatacactccctgctttcattggaaagtgtataatgatgtcagagtgccccagaatggagctagttggaagactgccgtcatagggatgccttagtgaattaataaggttttaatttctggctctcaactttgtagatgtaaaagttgatttatcaatatgtgagaaaggatgaatctttctgaaggttatgtcatcacactcactaagcacacagagaataatgtctagaatctgagtgccatgt

SEQ ID NO: 413976 - DNA, 550 bp, Homo sapiens
tagcacaataaaaataaatgtattaagtatgaacaacaaaaaagctagtaaaggttgaacaacaactatccttaggaaagtggaaataatgtattaataaatatgaaagcaggctagccacggtgactcacatctgtaatcccagcactttgggaggctgaggcaggcagatcacctgaggtcaggagttccagaccagcctggccaacatggtgaaatcttgtctctcctacaaatacaaaaactagccaggcttggttgtgcactcctgtaattcsagctacttgggaggctgaggcaggagaatctcttgaacctgagaggcagaggttgcagtgagccaagatcatgccactgcactccagctggggcaacagagtgacactccatctcaaaataaataaataagaaagcagaaactaataaactagaaaacagaaacatagaactaatttataaatcaaagcactatgccttgaaaagagggagaaaaattgtgaattaaggaagggaagagatggttggagaggaggtgggagaaggcagagat

SEQ ID NO: 413977 - DNA, 550 bp, Homo sapiens
tagcacaataaaaataaatgtattaagtatgaacaacaaaaaagctagtaaaggttgaacaacaactatccttaggaaagtggaaataatgtattaataaatatgaaagcaggctagccacggtgactcacatctgtaatcccagcactttgggaggctgaggcaggcagatcacctgaggtcaggagttccagaccagcctggccaacatggtgaaatcttgtctctcctacaaatacaaaaactagccaggcttggttgtgcactcctgtaattcgagctacttgggaggctgaggcaggagaatctcttgaacctgagaggcagaggttgcagtgagccaagatcatgccactgcactccagctggggcaacagagtgacactccatctcaaaataaataaataagaaagcagaaactaataaaytagaaaacagaaacatagaactaatttataaatcaaagcactatgccttgaaaagagggagaaaaattgtgaattaaggaagggaagagatggttggagaggaggtgggagaaggcagagat

SEQ ID NO: 413978 - DNA, 365 bp, Homo sapiens
taaggataatagaaggtccatccatattccagcaaaagacatgatatcattttttaatggcggcatagtattccatggtgtatatgtaccacattttctttatccaatctgtcattgatgggcatttaggttgatcccatacttttgctattgtgaacagtgctgcaatgaacatttgtatgcatgtgtctttatggtagaatggtttatattcatctgggtatatacccagtagtgggattactgggtcgaatggtagctctgcttttagctctttgaggaatcactttccttgcacaatgattgaactgatttgcacacccamcaacagtgtataagcattcccttttctccatagcctcact

SEQ ID NO: 413979 - DNA, 463 bp, Homo sapiens
caactactggggagactaatacaggagggttgcttgagcccaggagttcaaggctataatgtgctatgatcatgactgtgaacaaccactgtactgcagcctgggcagagtgacatagtgaaaccatatctctaaaaaaagagaaaatgtaatttaaatatttaaatacatatgtatatgtgtgtatatatgtatatatrttgcatatatcaaaaatggtttgtagtttccattcacagcacatagtaaaatgtcttaacctcctcgctcctccctatgtgtgtttttctaagtgtgtgtcttttttaccttaatttttctcttagtgtctcatagtcttctaaggtctccctctttcttctgtctttcacacacacacacacacacacacacacacacacacacacgcatacacacatgtaccttgaaaaatagcttttctttttcttaaaacttcccaaag

SEQ ID NO: 413980 - DNA, 463 bp, Homo sapiens
caactactggggagactaatacaggagggttgcttgagcccaggagttcaaggctataatgtgctatgatcatgactgtgaacaaccactgtactgcagcctgggcagagtgacatagtgaaaccatatctctaaaaaaagagaaaatgtaatttaaatatttaaatacatatgtatatgtgtgtatatatgtatatataktgcatatatcaaaaatggtttgtagtttccattcacagcacatagtaaaatgtcttaacctcctcgctcctccctatgtgtgtttttctaagtgtgtgtcttttttaccttaatttttctcttagtgtctcatagtcttctaaggtctccctctttcttctgtctttcacacacacacacacacacacacacacacacacacacacgcatacacacatgtaccttgaaaaatagcttttctttttcttaaaacttcccaaag

SEQ ID NO: 413981 - DNA, 463 bp, Homo sapiens
caactactggggagactaatacaggagggttgcttgagcccaggagttcaaggctataatgtgctatgatcatgactgtgaacaaccactgtactgcagcctgggcagagtgacatagtgaaaccatatctctaaaaaaagagaaaatgtaatttaaatatttaaatacatatgtatatgtgtgtatatatgtatatatattgcatatatcaaaaatrgtttgtagtttccattcacagcacatagtaaaatgtcttaacctcctcgctcctccctatgtgtgtttttctaagtgtgtgtcttttttaccttaatttttctcttagtgtctcatagtcttctaaggtctccctctttcttctgtctttcacacacacacacacacacacacacacacacacacacacgcatacacacatgtaccttgaaaaatagcttttctttttcttaaaacttcccaaag

SEQ ID NO: 413982 - DNA, 579 bp, Homo sapiens
tggtggcatatgctagtaatcccaactactggggagactaatacaggagggttgcttgagcccaggagttcaaggctataatgtgctatgatcatgactgtgaacaaccactgtactgcagcctgggcagagtgacatagtgaaaccatatctctaaaaaaagagaaaatgtaatttaaatatttaaatacatatgtatatgtgtgtatatatgtatatatattgcatatatcaaaaatggtttgtagtttccattcacagcacatagtaaaatgtcttaacctcctcgctcctccctatgtgtgtttttctaagtgtgtgtcttttttaccttaatttttctcttagtgtctcatagtcttctwaggtctccctctttcttctgtctttcacacacacacacacacacacacacacacacacacacacgcatacacacatgtaccttgaaaaatagcttttctttttcttaaaacttcccaaagctttcataaaattagccctcaagcactcttacgtatctcatccactcttcttcctctctccccttcctgaagccatttgtaacttactctatta

SEQ ID NO: 413983 - DNA, 559 bp, Homo sapiens
ctgtgaacaaccactgtactgcagcctgggcagagtgacatagtgaaaccatatctctaaaaaaagagaaaatgtaatttaaatatttaaatacatatgtatatgtgtgtatatatgtatatatattgcatatatcaaaaatggtttgtagtttccattcacagcacatagtaaaatgtcttaacctcctcgctcctccctatgtgtgtttttctaagtgtgtgtcttttttaccttaatttttctcttagtgtctcatagtcttctaaggtctccctctttcttctgtctttcacacacacacacacacacacacacacacacacacacacgcatacacacatgtaccttgaaaaatagcttttctttttcttaaaacttcccaaagctttcataaaattagccctcaagcactcttaygtatctcatccactcttcttcctctctccccttcctgaagccatttgtaacttactctattacactaggaaggggaagcaaatattcatattattttcttgttatatccttagccttactagacctttgtggtttctat

SEQ ID NO: 413984 - DNA, 559 bp, Homo sapiens
ctgtgaacaaccactgtactgcagcctgggcagagtgacatagtgaaaccatatctctaaaaaaagagaaaatgtaatttaaatatttaaatacatatgtatatgtgtgtatatatgtatatatattgcatatatcaaaaatggtttgtagtttccattcacagcacatagtaaaatgtcttaacctcctcgctcctccctatgtgtgtttttctaagtgtgtgtcttttttaccttaatttttctcttagtgtctcatagtcttctaaggtctccctctttcttctgtctttcacacacacacacacacacacacacacacacacacacacgcatacacacatgtaccttgaaaaatagcttttctttttcttaaaacttcccaaagctttcataaaattagccctcaagcactcttacgtatctcatccactcttcttcctctctccccttcctgaagccatttgtaacttactctattacactaggaaggggaagcaartattcatattattttcttgttatatccttagccttactagacctttgtggtttctat

SEQ ID NO: 413985 - DNA, 557 bp, Homo sapiens
cttttttttttttttttgatagtgactagctctgtcacctaggctagagtgcagtggtgcaaacatgactcactgcagccttgacctcatggactcaagtgatcctcaagtgatcctcttgcctccacaacatccagctaacttttaaaaaattttttgaagagaaggttttgccatgttgcctcagcctcctgaagtggtgggattacaggtgtgagccactgcacctggccaygttttctttccattcttatggaaggcagtattcagcaaaacagttaatcaattgagaatatattaggttgttataggaaccatgaaaaaataaaatagagtgtgtaaagaaggcttgatggccaggaagcttttacagggaagtgacattggaactgagaccaaatacttaaagaaggcagttctttgaagagttgatgggaaagtattccaagaagtgggaatggcaaggggaaaggacttaagatgtaacctcagaatgattaaggaggagcatggtacaagaggatgtcagaaacatagccaggaaagagagctatgct

SEQ ID NO: 413986 - DNA, 557 bp, Homo sapiens
cttttttttttttttttgatagtgactagctctgtcacctaggctagagtgcagtggtgcaaacatgactcactgcagccttgacctcatggactcaagtgatcctcaagtgatcctcttgcctccacaacatccagctaacttttaaaaaattttttgaagagaaggttttgccatgttgcctcagcctcctgaagtggtgggattacaggtgtgagccactgcacctggccatgttttctttccattcttatggaaggcagtaktcagcaaaacagttaatcaattgagaatatattaggttgttataggaaccatgaaaaaataaaatagagtgtgtaaagaaggcttgatggccaggaagcttttacagggaagtgacattggaactgagaccaaatacttaaagaaggcagttctttgaagagttgatgggaaagtattccaagaagtgggaatggcaaggggaaaggacttaagatgtaacctcagaatgattaaggaggagcatggtacaagaggatgtcagaaacatagccaggaaagagagctatgct

SEQ ID NO: 413987 - DNA, 505 bp, Homo sapiens
aacagttaatcaattgagaatatattaggttgttataggaaccatgaaaaaataaaatagagtgtgtaaagaaggcttgatggccaggaagcttttacagggaagtgacattkgaactgagaccaaatacttaaagaaggcagttctttgaagagttgatgggaaagtattccaagaagtgggaatggcaaggggaaaggacttaagatgtaacctcagaatgattaaggaggagcatggtacaagaggatgtcagaaacatagccaggaaagagagctatgcttaagtattaggattttattctttgcaaagaaaaagcccattgaagctttaaagcaaggccctaagagttaacataatttttttaaggtaccttaaaaattttgctgaatgaagaattcattgaagtgagtcaggaatgtatgattttggacaactgacacaatgcctgaggcatagtttcttcatatggaaattggagacaatgatcatatctaccttagc

SEQ ID NO: 413988 - DNA, 505 bp, Homo sapiens
aacagttaatcaattgagaatatattaggttgttataggaaccatgaaaaaataaaatagagtgtgtaaagaaggcttgatggccaggaagcttttacagggaagtgacattggaactgagaccaaatacttaaagaagscagttctttgaagagttgatgggaaagtattccaagaagtgggaatggcaaggggaaaggacttaagatgtaacctcagaatgattaaggaggagcatggtacaagaggatgtcagaaacatagccaggaaagagagctatgcttaagtattaggattttattctttgcaaagaaaaagcccattgaagctttaaagcaaggccctaagagttaacataatttttttaaggtaccttaaaaattttgctgaatgaagaattcattgaagtgagtcaggaatgtatgattttggacaactgacacaatgcctgaggcatagtttcttcatatggaaattggagacaatgatcatatctaccttagc

SEQ ID NO: 413989 - DNA, 562 bp, Homo sapiens
gttacacaattcgattttgtaggtctaaatgaggtggtctttctatgagttcctatggctaaaaatagtcacaattgtgtactccagtaaattgttagaatgaaggaaaatagtttgagtgatattatcaatctggtttttctgacttcagctgtgtgtcatgtttggttagtcagagaaacatctaatgtgaggcccctggaggacagctgataagtaagcataccaagtagaatggctactggaaaaagtgtgccagctagagagagagagaaaagagagagttaatttaccatttgctcaagtaaggaatgatccacaaattcaacaaaatctaagtagtcttaaaggacatgtcattgacagatttatcttctagtctcccactttgtctaatastgcttcaaaacaaagcaatttactgaacccagtggtctcattattctggaggtttataaggttaaaaatacctggagttttgggagcagcaatagcactgaagtgggatattagtagtgatgcgtgtgtttacagcacctgtgaacacacagagactgaagct

SEQ ID NO: 413990 - DNA, 565 bp, Homo sapiens
tagtcagagaaacatctaatgtgaggcccctggaggacagctgataagtaagcataccaagtagaatggctactggaaaaagtgtgccagctagagagagagagaaaagagagagttaatttaccatttgctcaagtaaggaatgatccacaaattcaacaaaatctaagtagtcttaaaggacatgtcattgacagatttatcttctagtctcccactttgtctaatagtgcttcaaaacaaagcaatttactgaacccagtggtctcattattctggaggtttataaggttaaaaatacctggagttttgggagcagcaatagcactgaagtgggatattagtagtgatgcgtgtgtttacagcacctgtgaacacacagagactgaagcttgaaggctgatgaccctgagttaggggaaaasataaaactttttattagatttttttaatgtcgagaagaaaattatttatctccatatttcctgaatattatcctgttacaattatgtcaatgattctcaccccagttatatattaaaattacctggagatatataaaaac

SEQ ID NO: 413991 - DNA, 565 bp, Homo sapiens
tagtcagagaaacatctaatgtgaggcccctggaggacagctgataagtaagcataccaagtagaatggctactggaaaaagtgtgccagctagagagagagagaaaagagagagttaatttaccatttgctcaagtaaggaatgatccacaaattcaacaaaatctaagtagtcttaaaggacatgtcattgacagatttatcttctagtctcccactttgtctaatagtgcttcaaaacaaagcaatttactgaacccagtggtctcattattctggaggtttataaggttaaaaatacctggagttttgggagcagcaatagcactgaagtgggatattagtagtgatgcgtgtgtttacagcacctgtgaacacacagagactgaagcttgaaggctgatgaccctgagttaggggaaaacataaaactttttattagatttttttaatgtcgagaagaaaattatttatctccatatttcctgaatattatcctsttacaattatgtcaatgattctcaccccagttatatattaaaattacctggagatatataaaaac

SEQ ID NO: 413992 - DNA, 565 bp, Homo sapiens
tagtcagagaaacatctaatgtgaggcccctggaggacagctgataagtaagcataccaagtagaatggctactggaaaaagtgtgccagctagagagagagagaaaagagagagttaatttaccatttgctcaagtaaggaatgatccacaaattcaacaaaatctaagtagtcttaaaggacatgtcattgacagatttatcttctagtctcccactttgtctaatagtgcttcaaaacaaagcaatttactgaacccagtggtctcattattctggaggtttataaggttaaaaatacctggagttttgggagcagcaatagcactgaagtgggatattagtagtgatgcgtgtgtttacagcacctgtgaacacacagagactgaagcttgaaggctgatgaccctgagttaggggaaaacataaaactttttattagatttttttaatgtcgagaagaaaattatttatctccatatttcctgaatattatcctgttacaattaygtcaatgattctcaccccagttatatattaaaattacctggagatatataaaaac

SEQ ID NO: 413993 - DNA, 591 bp, Homo sapiens
acacctatttcaagggacacatagaatttacctatatatacctacctcaagggtcatgtcagtttactattcccctaaacaacagcttaatagtataaactgctgaactgctgtctgcctaatatttattgtggctatacttcttcttttctgtattaaaggccactgctttcccagcttgctctttgttctccatcatctgttgtgggtcacttgtgctttctgwttttaacacccatgttgctgaagtcatttctccaattcatgatccatgaaactacttcagcagtgaaaatggcacccctcaggttcaagtcaacacttttatatttccctctaggtcaagatccaagctatggaagaaatcaggatatgtcaattttctagagcagccaagttttctaaaagtctacctagccatgtagttatgtagcctcactctcacttaaacaaagaaaattaaaaagcacaccagaaaagacttttcttgttaaaaacacatgtttattgtagaaaatatagtaaggaaaaagaagaaaatataaggcaactagaatttctctagttagagataactattatttatttgag

SEQ ID NO: 413994 - DNA, 594 bp, Homo sapiens
tacttcagcagtgaaaatggcacccctcaggttcaagtcaacayttttatatttccctctaggtcaagatccaagctatggaagaaatcaggatatgtcaattttctagagcagccaagttttctaaaagtctacctagccatgtagttatgtagcctcactctcacttaaacaaagaaaattaaaaagcacaccagaaaagacttttcttgttaaaaacacatgtttattgtagaaaatatagtaaggaaaaagaagaaaatataaggcaactagaatttctctagttagagataactattatttatttgagtgtgtgtatatatctatatatatattgacattcagctcttatgtactagatacacacatctactgtttcataagcttttttcacagaatagattataatcagttatgtttgttatcaccacaacattttcttcttgaagaccttctggaatgaggcatttgcttttctatctagagaccctatcctttcaaaaggtcctttatctgtggaaagagctattctggccacagttactgccaagaaacaaggtgttagaaaaggcctaaagttaagtgcagaac

SEQ ID NO: 413995 - DNA, 591 bp, Homo sapiens
acacctatttcaagggacacatagaatttacctatatatacctacctcaagggtcatgtcagtttactattcccctaaacaacagcttaatagtataaactgctgaactgctgtctgcctaatatttattgtggctatacttcttcttttctgtattaaaggccactgctttcccagcttgctctttgttctccatcatctgttgtgggtcacttgtgctttctgattttaacacccatgttgctgaagtcatttctccaattcatgatccatgaaactacttcagcagtgaaaatggcacccctcaggttcaagtcaacacttttatatttccctctaggtcaagatccaagctatggaagaaatcaggatatgtcaattttctagagcagccaagttttctaaaagtctacctagccatgtagttatgtagcctcactctcacttaaacaaagaaaattaaaaagcacaccagaaaakacttttcttgttaaaaacacatgtttattgtagaaaatatagtaaggaaaaagaagaaaatataaggcaactagaatttctctagttagagataactattatttatttgag

SEQ ID NO: 413996 - DNA, 571 bp, Homo sapiens
tgaggtggtttctaagatggagaataagacgaaaaatgtaagtacgttgtctgactgaattcaagaaagaagggtaaaagagaagaaagtagtggtcttatcattaaatgccacagagaggtaaagataaagacaacatattgttttgggtttagtaatttaagggttaccaaattccgttttggaggaggaacagattccatgtccactagaatggaatgaacaagaaatggaggaggaaaataggtastttttcaaaagttttcaaaaatatgaaaagaagaaatgaagtggtacttggaagagattgttgaaatgggagagactatggtggcttgtttagaagcagttgagatagatccaattgagatagagatattgactatataaacaaaagaatgacaaattaatagtgtaatggataacttgactttggcaaatattgtgaatttttgtgaaagtacaactaaaaggcaatgtcactccaataatcaccagagtaatcaatttgcttattgctgtccctttaaatatagttctctggtatcaactaacatgtttttaactaatg

SEQ ID NO: 413997 - DNA, 564 bp, Homo sapiens
tgtatatggtagtgaatcaggtcactgagtcagaaacttagagctgtaaggaaagtgaggtgctctccagtccagtgttctggaatttcttctgcagtggcccccaacagcaggtggcagcctcgtccatgattstattcttaagtgacatggtattactctttgtatttgcaatccatttcactgatggatagttctagagatctgaaatattgagatttagctcagtgttgtttatatgaagataaattccgctttccaacaactctcttgtatgtgtctaatgtctgccgcatggaatgtcacagattatgcttcatacttgtcttcctgagtcttctttatccagaacaccctgagtttttgaatggttgacatgccagctggctttctgcagatgtacttctcgcgtgtaaatttccttctctgtgaggtattcatattgaacatgacctccaagtgtgtttgggtctgtgcagaagacaataggactgtgatttctgatgattaaaacctggattgtatgttactgtgatcagaccctgagactgtgttagcaagttt

SEQ ID NO: 413998 - DNA, 564 bp, Homo sapiens
tgtatatggtagtgaatcaggtcactgagtcagaaacttagagctgtaaggaaagtgaggtgctctccagtccagtgttctggaatttcttctgcagtggcccccaacagcaggtggcagcctcgtccatgattctattcttaagtgacatggtattactctttstatttgcaatccatttcactgatggatagttctagagatctgaaatattgagatttagctcagtgttgtttatatgaagataaattccgctttccaacaactctcttgtatgtgtctaatgtctgccgcatggaatgtcacagattatgcttcatacttgtcttcctgagtcttctttatccagaacaccctgagtttttgaatggttgacatgccagctggctttctgcagatgtacttctcgcgtgtaaatttccttctctgtgaggtattcatattgaacatgacctccaagtgtgtttgggtctgtgcagaagacaataggactgtgatttctgatgattaaaacctggattgtatgttactgtgatcagaccctgagactgtgttagcaagttt

SEQ ID NO: 413999 - DNA, 571 bp, Homo sapiens
tgaggtggtttctaagatggagaataagacgaaaaatgtaagtacgttgtctgactgaattcaagaaagaagggtaaaagagaagaaagtagtggtcttatcattaaatgccacagagaggtaaagataaagacaacatattgttttgggtttagtaatttaagggttaccaaattccgttttggaggaggaacagattccatgtccactagaatggaatgaacaagaaatggaggaggaaaataggtagtttttcaaaagttttcaaaaatatgaaaagaagaaatgaagtggtacttggaagagattgttgaaatgggagagactatggtggcttgtttagaagcagttgagatagatccaattgagatagagatattgactatataaacamaagaatgacaaattaatagtgtaatggataacttgactttggcaaatattgtgaatttttgtgaaagtacaactaaaaggcaatgtcactccaataatcaccagagtaatcaatttgcttattgctgtccctttaaatatagttctctggtatcaactaacatgtttttaactaatg

SEQ ID NO: 414000 - DNA, 613 bp, Homo sapiens
tttttattgattgattgatggagacagaatcttgctctcttgcccaggctggaatgcagtggcgtgataatggtttctgcaacctccacctcctgggttcaggcaattctcctgcctcagcctcccgagtagctgggattacaggtgcctgccaccatgcccagctaattattgtacttttagtacagacggggttttaccatgttggccaggctggtctcgaactcctgacctcatgatctgcctgcctcggcctcccaaactgctgggattacaggtgtgagccactgtgcccagcctgtcytttctcttcacacccgcagttcatgatgaaatattaaatatgtactagtggatattactttgctgaatattgcctaatgaatattaagtatttattctcacctttcagacatgaacttatgaattcaacaggtgaagatttacaacttgataaatcaactttgtcaggtacgtcttcagtcaagtcagattagaagattatgtgaggtaattaacacttaacattgatttaatggtagcttccacatgaaatagtatgcctctaagtattaattatgtcctaggacaggagaattcatgttgtcaaaat

SEQ ID NO: 414001 - DNA, 571 bp, Homo sapiens
tgaggtggtttctaagatggagaataagacgaaaaatgtaagtacgttgtctgactgaattcaagaaagaagggtaaaagagaagaaagtagtggtcttatcattaaatgccacagagaggtaaagataaagacaacatattgttttgggtttagtaatttaagggttaccaaattccgttttggaggaggaacagattccatgtccactagaatggaatgaacaagaaatggaggaggaaaataggtagtttttcaaaagttttcaaaaatatgaaaagaagaaatgaagtggtacttggaagagattgttgaaatgggagagactatggtggcttgtttagaagcagttgagatagatccaattgagatagagatattgactatataaacaaaagaatgacaaattaatagtgtaatggataacttgactttggcaaatattgtgaatttttgtgaaagtacwactaaaaggcaatgtcactccaataatcaccagagtaatcaatttgcttattgctgtccctttaaatatagttctctggtatcaactaacatgtttttaactaatg

SEQ ID NO: 414002 - DNA, 571 bp, Homo sapiens
tgaggtggtttctaagatggagaataagacgaaaaatgtaagtacgttgtctgactgaattcaagaaagaagggtaaaagagaagaaagtagtggtcttatcattaaatgccacagagaggtaaagataaagacaacatattgttttgggtttagtaatttaagggttaccaaattccgttttggaggaggaacagattccatgtccactagaatggaatgaacaagaaatggaggaggaaaataggtagtttttcaaaagttttcaaaaatatgaaaagaagaaatgaagtggtacttggaagagattgttgaaatgggagagactatggtggcttgtttagaagcagttgagatagatccaattgagatagagatattgactatataaacaaaagaatgacaaattaatagtgtaatggataacttgactttggcaaatattgtgaatttttgtgaaagtacaactaaarggcaatgtcactccaataatcaccagagtaatcaatttgcttattgctgtccctttaaatatagttctctggtatcaactaacatgtttttaactaatg

SEQ ID NO: 414003 - DNA, 633 bp, Homo sapiens
gtactgggaggagggcgtgaagggctgcttgcrgtagttgtgtagcagcagcacaatggccgcagacaaggaaaacagtttctaggaattcctcgtatataattttatatttttgacaagattaatgacccatgctcccttcctctccatttctttttttggaattctgttggtatgtagttactatattttattaaaggaaattagccttatctcttattatattttattaaagaaaattattatattattcctttatatttttattaaaggattttattattattaaaggaaattagccttatctcttattatattttttatgaccttcaaagtagtgtctctgcttaaaagtgtaccctggccgggcgtggtggctcacacctgtaattccagcactttgggaggccgaggcgggtggatcacgaggtcaggagatcgagaccatcctggctaacacggtgaaaccccgtctgtactaaaaatacaaaaaattagcagggcatagtggcgggcgcctgtagtcccagctactcaggaggctcaggcaggagaatggcgtgaacccgggagacggagcttgcggtgagctgagatcgcaccgctgcactccagcctgggcgacagagcaag

SEQ ID NO: 414004 - DNA, 457 bp, Homo sapiens
gaaaatggatggacaagtaaatcccactcagcacccatagtccaggcatggggacctcaacacacctgagccccagacatcacctttcattgcgagtagctctgagatgacacttctgctgttcccaattccagcattaattggattagatagttattttatgaagaattttcatatgccacaatcctgaccatatcttcaagtgaacagaaaaattctattaaaaagtcaaccttctgtctcactctgttgcccagactggagtgyagtggtgcaattatggctcactgcagcctcaacctcctgggctcaagcaatcctcctgcctcagcctcacaagtagctgggactacaggtgcttgtcaccacacctcactaattttcccatttgtgttatatgtggattccacaggactgactttgaaaacttgagtatgcgtggattttggtatacaca

SEQ ID NO: 414005 - DNA, 515 bp, Homo sapiens
cctgaccatatcttcaagtgaacagaaaaattctattaaaaagtcaaccttctgtctcactctgttgcccagactggagtgtagtggtgcaattatggctcactgcagcctcaacctcctgggctcaagcaatcctcctgcctcagcctcacaagtagctgggactacaggtgcttgtcaccacacctcactaattttcccatttgtgttatatgtggattccacaggactgacttygaaaacttgagtatgcgtggattttggtatacacagaaatgggagagctggaactaatccccccatataccaagggacaaattgtatctgtttctacaattatacagtaggagacattatgttccatgacaatggcaatttttaacgacagtttttaattgagtgaaattaccataaaaataataatagtagcagctaatatttactgagctgttactaggtgcctataaatagcatagatttttaaattctccataattcttccttatttcacttaa

SEQ ID NO: 414006 - DNA, 515 bp, Homo sapiens
cctgaccatatcttcaagtgaacagaaaaattctattaaaaagtcaaccttctgtctcactctgttgcccagactggagtgtagtggtgcaattatggctcactgcagcctcaacctcctgggctcaagcaatcctcctgcctcagcctcacaagtagctgggactacaggtgcttgtcaccacacctcactaattttcccatttgtgttatatgtggattccacaggactgactttgaaaacttgagtatgcgtggattttggtatacacagaaatgggagagctggaactaatccccccatataccaagggacaaattgtatctgtttctacaattatacagtaggagacattatgttccatgacaatggyaatttttaacgacagtttttaattgagtgaaattaccataaaaataataatagtagcagctaatatttactgagctgttactaggtgcctataaatagcatagatttttaaattctccataattcttccttatttcacttaa

SEQ ID NO: 414007 - DNA, 515 bp, Homo sapiens
cctgaccatatcttcaagtgaacagaaaaattctattaaaaagtcaaccttctgtctcactctgttgcccagactggagtgtagtggtgcaattatggctcactgcagcctcaacctcctgggctcaagcaatcctcctgcctcagcctcacaagtagctgggactacaggtgcttgtcaccacacctcactaattttcccatttgtgttatatgtggattccacaggactgactttgaaaacttgagtatgcgtggattttggtatacacagaaatgggagagctggaactaatccccccatataccaagggacaaattgtatctgtttctacaattatacagtaggagacattatgttccatgacaatggcaatttttaaygacagtttttaattgagtgaaattaccataaaaataataatagtagcagctaatatttactgagctgttactaggtgcctataaatagcatagatttttaaattctccataattcttccttatttcacttaa

SEQ ID NO: 414008 - DNA, 633 bp, Homo sapiens
gtactgggaggagggcgtgaagggctgcttgcggtagttgtgtagcagcagcacaatggccgcagacaaggaaaacagtttctaggaattcctcgtatataattttatatttttgacaagattaatgacccatgctcccttcctctccatttctttttttggaattctgttggtatgtagttactatattttattaaaggaaattagccttatctcttattatattttattaaagaaaattattatattattcctttatatttttattaaaggattttattattattaaagsaaattagccttatctcttattatattttttatgaccttcaaagtagtgtctctgcttaaaagtgtaccctggccgggcgtggtggctcacacctgtaattccagcactttgggaggccgaggcgggtggatcacgaggtcaggagatcgagaccatcctggctaacacggtgaaaccccgtctgtactaaaaatacaaaaaattagcagggcatagtggcgggcgcctgtagtcccagctactcaggaggctcaggcaggagaatggcgtgaacccgggagacggagcttgcggtgagctgagatcgcaccgctgcactccagcctgggcgacagagcaag

SEQ ID NO: 414009 - DNA, 560 bp, Homo sapiens
tttaatgcttgccttgttcatgagcaccatgcattgcctctcctattaagttaagcaggtagacaggtgagagaagagccagtgtgatatcgggggaaattcacccctgatatttcatgtaggttcttttctattttccctgagtgtcagccagtctgagaaataaagggaaagagtacaaaagagagaaattttaaagctggatgtccaggggagacatcacacgtcggcaggttccgtgatgccccccaagccgcaaaaccaacaagtttttattagtgattttcaaaaggtgagggagtgtacgaatagggtgtgggtcacagagatcacatgcttcacaaggtaataaaatatcacaaggcaaatggaggcagggcaagatcacaggaccacaggacyggggcgaaattaaaattgctaatgaagtttcgggcgcgcattgtcattgataacatcttatcaggagaaagggtttgagagcagacaacccatctgaccaacatttattaggcgggaatttccttgtcctgataagcctgggagcgccacgcgaaccc

SEQ ID NO: 414010 - DNA, 633 bp, Homo sapiens
gtactgggaggagggcgtgaagggctgcttgcggtagttgtgtagcagcagcacaatggccgcagacaaggaaaacagtttctaggaattcctcgtatataattttatatttttgacaagattaatgacccatgctcccttcctctccatttctttttttggaattctgttggtatgtagttactatattttattaaaggaaattagccttatctcttattatattttattaaagaaaattattatattattcctttatatttttattaaaggattttattattattaaaggaaattagccttatctcttattatattttttatgaccttcaaagtagtgtctctgcttaaaagtgtaccctggccgggcgtggtggctcacacctgtaattccagcactttgggaggccgaggcgggtggatcacgaggtcaggagatcgagaccatcctggctaacacggtgaaaccccgtctgtactaaaaatacaaaaaattagcagggcatagtggcgggcgcctgtagtcccagctactcaggaggctcaggcaggagaatggcgtgaaccmgggagacggagcttgcggtgagctgagatcgcaccgctgcactccagcctgggcgacagagcaag

SEQ ID NO: 414011 - DNA, 556 bp, Homo sapiens
tgttcaacccggcccacaggcagccagagtttaaggttatctcccttgttccctgaaattgctgttatcctgttcttttttcaaggtgcccaggtttcatattgtttaaacaacttgtgcagttaacgcaattatcacagggtcctgcggggacattcatcctcagcttacgaagatgaccggattaagagattaaagacaggcatagaaaatcacaagggtattgattggggaagtgataagtgtccatgaaatcttcacaatttatgttcagagattgcagtaatgacaggcctaagaaattatagaagtattaatttggggaactaataaatgtccatgaaatcttcacaatttatrttcttctgctgtggcttcagccagtccctccgtttggggtccctgacttcctgcaacacgtttctctctactcacagacttctgaccaaatgtgtgtgcagagtttctacaccagttctccaactctctggatgccaaccgcgtatcccacaattccattctgacactacctagagttagcacagaacccacaggt

SEQ ID NO: 414012 - DNA, 556 bp, Homo sapiens
tgttcaacccggcccacaggcagccagagtttaaggttatctcccttgttccctgaaattgctgttatcctgttcttttttcaaggtgcccaggtttcatattgtttaaacaacttgtgcagttaacgcaattatcacagggtcctgcggggacattcatcctcagcttacgaagatgaccggattaagagattaaagacaggcatagaaaatcacaagggtattgattggggaagtgataagtgtccatgaaatcttcacaatttatgttcagagattgcagtaatgacaggcctaagaaattatagaagtattaatttggggaactaataaatgtccatgaaatcttcacaatttatattcttctgctgtggcttcagccagtccctccgtttggggtccctgacttcctgcaacacgtttctctctactcacagacttctgaccaaatgtgtgtgcagagtttctacaccagttctccaactctctggatrccaaccgcgtatcccacaattccattctgacactacctagagttagcacagaacccacaggt

SEQ ID NO: 414013 - DNA, 489 bp, Homo sapiens
gctgatctctaactcttggcctcaagcaatccttcctctttggcctcccaaaatgttgggattacagatgggagcccccatacccaccaatcacaaggatctttataagagaatgaggtaggagagtcagaattagagaaagtgatgtggtaatggaagaagaggtcagagagggagatttgaagatgctgcacttctggccttgaatatggagtcacgaggtaagtcaaggaatggrggtggcttctagaagctggaaaaggcaaaggagcacattctgtctagagcctcccccagaaggaatgcagcctctctgacaccttgactttagccttaatagacctagttgggcttctggcccccagaactgtaagatggtagatttgtggtgtttgatgccactaaatgtagggtactttgttgtagcaacaacaaaaaatgaacacgaagctgggacctcatgttacagttgctcacgcctgtaatccc

SEQ ID NO: 414014 - DNA, 489 bp, Homo sapiens
gctgatctctaactcttggcctcaagcaatccttcctctttggcctcccaaaatgttgggattacagatgggagcccccatacccaccaatcacaaggatctttataagagaatgaggtaggagagtcagaattagagaaagtgatgtggtaatggaagaagaggtcagagagggagatttgaagatgctgcacttctggccttgaatatggagtcacgaggtaagtcaaggaatgggggtggcttctagaagctggaaaaggcaaaggagcacattctgtctagagcctcccccagaaggaatgcagcctctctgacaccttgactttagccttratagacctagttgggcttctggcccccagaactgtaagatggtagatttgtggtgtttgatgccactaaatgtagggtactttgttgtagcaacaacaaaaaatgaacacgaagctgggacctcatgttacagttgctcacgcctgtaatccc

SEQ ID NO: 414015 - DNA, 618 bp, Homo sapiens
acacatcaagcgacatgtagagttcataaattctggccaaatggtcatatttcaaaactcatcagcagtaaggctctttacttgcactgacaaatatgaacgctggggaatttggaaatgatatataatatataatattatatatataatagatatataatatataatatatataatacatatataatatataatatatataatacatatataatatatatgtaatagatatacaatatataatatrtaatagatatatattatatataatagatatataatatataactttccatgtgattttcctcttaatttttttctagctgatccatatgaattcctcttattaagaaaaataaagcatccaggattcaatgaagaactgactatcaccttgttaatcattcagaaacatgttgcaggcttaagccatttttgatatagatactgaaacaattacttgctaagagcaaacttgaaggtatggataaggccctgagtcatcttcctgagctgaatgatagttaagctgaatgtacgtataaaatataattttctaaccacttgctcgccaacaaggaaaacttttaagtagagcagaacctgaatagacaagac

SEQ ID NO: 414016 - DNA, 547 bp, Homo sapiens
gcctcaaactcctgggctcaagtggttctctcacttcagtctcccaagtagctgggactacagacatgtgccaccatgtccagctaattttttatcatagagacgggatcttgccatgttgctccgactgggctcaaaactcctgacctcaagtgatcctcctgcctcagcctcccaaagtgctgggattacaggcaggcatgaccacctgtgcccagccccctattattattattttaaataatagctttattaaaatattcamataccattcactttatttattgaaatctgcaattcagtaggttttagaatattcacagagctgtgcatcgatcaccacagtcacttttagaacctttcattaccctatagagaaatccataccccttagccactacctcctactctccccacctacctttgcccccagccttaggcaaccattgattaatttttttgtcactatagatttgcctaatctggacaaatagaattgtacaatatgtgatcttttgtggctttttttccctcttagcacagtgtt

SEQ ID NO: 414017 - DNA, 547 bp, Homo sapiens
gcctcaaactcctgggctcaagtggttctctcacttcagtctcccaagtagctgggactacagacatgtgccaccatgtccagctaattttttatcatagagacgggatcttgccatgttgctccgactgggctcaaaactcctgacctcaagtgatcctcctgcctcagcctcccaaagtgctgggattacaggcaggcatgaccacctgtgcccagccccctattattattattttaaataatagctttattaaaatattcacatrccattcactttatttattgaaatctgcaattcagtaggttttagaatattcacagagctgtgcatcgatcaccacagtcacttttagaacctttcattaccctatagagaaatccataccccttagccactacctcctactctccccacctacctttgcccccagccttaggcaaccattgattaatttttttgtcactatagatttgcctaatctggacaaatagaattgtacaatatgtgatcttttgtggctttttttccctcttagcacagtgtt

SEQ ID NO: 414018 - DNA, 547 bp, Homo sapiens
gcctcaaactcctgggctcaagtggttctctcacttcagtctcccaagtagctgggactacagacatgtgccaccatgtccagctaattttttatcatagagacgggatcttgccatgttgctccgactgggctcaaaactcctgacctcaagtgatcctcctgcctcagcctcccaaagtgctgggattacaggcaggcatgaccacctgtgcccagccccctattattattattttaaataatagctttattaaaatattcacataccattcactttatttattgaaatctgcaattcagtaggttttagaatattcacagagctgtgcatcgatcaccacagtcacttttagaacctttcattaccctatagagaaatccataccccttagcyactacctcctactctccccacctacctttgcccccagccttaggcaaccattgattaatttttttgtcactatagatttgcctaatctggacaaatagaattgtacaatatgtgatcttttgtggctttttttccctcttagcacagtgtt

SEQ ID NO: 414019 - DNA, 618 bp, Homo sapiens
acacatcaagcgacatgtagagttcataaattctggccaaatggtcatatttcaaaactcatcagcagtaaggctctttacttgcactgacaaatatgaacgctggggaatttggaaatgatatataatatataatattatatatataatagatatataatatataatatatataatacatatataatatataatatatataatacatatataatatatatgtaatagatatacaatatataatatgtaatagatatatattatatataatagatatataatatataactttccatgtgattttcctcttaatttttttctagctgatccatatgaattcctcttattaagaaaaataaagcatccaggattcaatgaagaactgactatcaccttgttaatcattcagaaacatgttgcaggcttaagccatttttgatatagatactgaaacaattacttgctaagagcaaacttgaaggtatggataaggccctgagtcatcttcctgagctgaatgatagttaagctgaatgtacgtataaaatatrattttctaaccacttgctcgccaacaaggaaaacttttaagtagagcagaacctgaatagacaagac

SEQ ID NO: 414020 - DNA, 491 bp, Homo sapiens
ttaaaaatccaattaaaatgacaagaaaagaaatacccaaacaaaatggttacacaattttatgttcccaccagtaatgtwtgtgggttccaattcctccacatcttcactgacattttttttttctagataggggcttgctctgtctctcaggccgcagtgcaatgatgccatcacagttcactgcagccgtgacctcccaggcacaagtgattctctcatctcagcctcctgggtagctgaaaattacaggtgtacgccaccatgcctggctaatttttagatttttctgtagtggtgggattttaccatgttgcccaggctggtctcatactcctggcctcaagtgatctgcccacctcagcctccctaagttctggaattacaggctgccaccatgcccggccttcaccaacatttgccattatctgttttttttttcttcctttataccttaaagcagtataagaacaagtgtcttcaattatagg

SEQ ID NO: 414021 - DNA, 583 bp, Homo sapiens
gctcgccaacaaggaaaacttttaagtagagcagaacctgaatagacaagacatttctttcttttggtagaaaatgatttaccatcactgtgtagttaattgtagactaggtaattttaactttgtgatttattgccggagacattttcttctgtactgtaaagtgtgtgtcaaaaaaaaaatagcgattttggaggattaggggactttgataaattgcctgcaattctgrcagtatgaactgcatattaatttctgtctttcaagaacatttttatttattaattccttacaaaaactccctaaactttggaacagctctcaattgcctgtattcttttttttcttattatggtactcttctagagatttggcttgcatctgtgaataagccaggacatcttcagaaattgtctgattaaaaacaccaccagtggagtttcattaaatttgtattgctctgactagtgaaacacacacatctatgttgctgaggatattttactgcagttcgagttgtaataatagctctgtttaagatccgtcagtcacttgaatcttctctaaggctttgtatgttaga

SEQ ID NO: 414022 - DNA, 542 bp, Homo sapiens
tagacacagtaatttgcttgtatggaattttgcctgagagacctcattgcagtttctgattttttgatgtcttcatccatcactgtccttgtcaaatagtttggaacaggtataatgatcacaataaccccaagcataatatttygttaattctcacagaatcacatgtaggtgccacagttatccccattttatgaatggagtgatgaaaaccttaggaataatgaatgatttgcgcaggctcacctggatattaagactgagtcaaatgttgggtctggtctgactttaatgtttgctttgttcatgagcaccacatattgcctctcctatgcagttaagcaggtaggtgacagaaaagcccatgtttgtctctactcacacacttccgactgaatgtacgtatggagtttctacaccagattcttcagtgctctggatattaactgggtatcccatgactttattctgacactacctggagttagcacagaccccacaagttaggggctcagtcccacgaggccatcctcacttcagat

SEQ ID NO: 414023 - DNA, 534 bp, Homo sapiens
tttggtttcccagggggcagtgctgagctctttgccagtgggaaatgggatgctggtgatttccagtaggtgacctcacagtgactcaagctaccacttactgttgattgtgacgaaatgccagctgaggcacatgccttgggagctaagtggttgctgcccttgaccactgtgaagactggtgtgggaagggtcgytttggatgcacttgagcaggggtccccaacccctgagccatggagccgcaaggagccacacagcaggaggtgagcggtgtcgagtgagggagtgagggaagcttcgtctgtatttacagccactcccctttgctcacattcccgcctgagctccaccttctcagatgagcagcagcattagattctcataggagaacgcaccctgttgtgaaccgtgcatgtgagggatcgaggttgcgctgtccttatgagaatctaatacctattgatctgttactttctcccatcacgctcaggtgggaacatccagttgcaggaaaacaagcttaacacgccc

SEQ ID NO: 414024 - DNA, 563 bp, Homo sapiens
actgaattttatgtcttagcgtagatggtttattactttctggtttttctttagtaagaatcctataaaaacactagtattttctctgagtttaaaattcaatacatgcctactgatatggttaggctttgtatccccacctgaatctcatcttgaattgtaatccccatagyccccataatcccacaggtcaagggagagaccaggtggaggtaattgaatcatgggggcagtttcccctgtgctgttcttgtgatagtgagttctcacgagatttgatggttttataagggattctttcccctttgctcggcacttcttcatgctgccttgcgaagaagctggcttgcttcctctttgtcttccgccatgattgtagatttcctgaggcctcccaagctgtgctgaacggtgagccaattaaacttctttcctttataaattacccagtcttgggcagttctttatagcagtatgaaaacagaaaaatacacctactatgtaaaacttaaaatacaaaaaaacaaaacattatctcactaacataggagctaatattttgg

SEQ ID NO: 414025 - DNA, 534 bp, Homo sapiens
tttggtttcccagggggcagtgctgagctctttgccagtgggaaatgggatgctggtgatttccagtaggtgacctcacagtgactcaagctaccacttactgttgattgtgacgaaatgccagctgaggcacatgccttgggagctaagtggttgctgcccttgaccactgtgaagactggtgtgggaagggtcgttttggatgcacttgagcaggggtccccaacccctgagccatggagccgcaaggagccacacagcaggaggtgagcggtgtcgagtgagggagtgagggaagcttcgtctgtatttacagccactcccctttgctcacattcccgcctgagctccaccttctcagatgagcagcagcrttagattctcataggagaacgcaccctgttgtgaaccgtgcatgtgagggatcgaggttgcgctgtccttatgagaatctaatacctattgatctgttactttctcccatcacgctcaggtgggaacatccagttgcaggaaaacaagcttaacacgccc

SEQ ID NO: 414026 - DNA, 534 bp, Homo sapiens
tttggtttcccagggggcagtgctgagctctttgccagtgggaaatgggatgctggtgatttccagtaggtgacctcacagtgactcaagctaccacttactgttgattgtgacgaaatgccagctgaggcacatgccttgggagctaagtggttgctgcccttgaccactgtgaagactggtgtgggaagggtcgttttggatgcacttgagcaggggtccccaacccctgagccatggagccgcaaggagccacacagcaggaggtgagcggtgtcgagtgagggagtgagggaagcttcgtctgtatttacagccactcccctttgctcacattcccgcctgagctccaccttctcagatgagcagcagcattagattctcataggagaacgcaccctgttgtgaaccgtgcatgtgagggatcraggttgcgctgtccttatgagaatctaatacctattgatctgttactttctcccatcacgctcaggtgggaacatccagttgcaggaaaacaagcttaacacgccc

SEQ ID NO: 414027 - DNA, 563 bp, Homo sapiens
actgaattttatgtcttagcgtagatggtttattactttctggtttttctttagtaagaatcctataaaaacactagtattttctctgagtttaaaattcaatacatgcctactgatatggttaggctttgtatccccacctgaatctcatcttgaattgtaatccccatagtccccataatcccacaggtcaagggagagaccaggtggaggtaattgaatcatgggggcagtttcccctgtgctgttcttgtgatagtgagttctcacgagatttgatggttttataagggattctttcccctttgctcggcacttcttcatgctgccttgcgaagaagctggcttgcttcctctttgtcttccgccatgattgtagatttcctgaggcctcccaagctgtgctgaackgtgagccaattaaacttctttcctttataaattacccagtcttgggcagttctttatagcagtatgaaaacagaaaaatacacctactatgtaaaacttaaaatacaaaaaaacaaaacattatctcactaacataggagctaatattttgg

SEQ ID NO: 414028 - DNA, 496 bp, Homo sapiens
acatcagcattccttttctcattgcctctcctctctctttttaaagctggcaatgtcacatttctctgaccattctttcattgtcacatctctctctggactcagctaagaaaggttctccatttttaagaactcatgtgattagactgggcccatctggrtaacccaggaagatctctccatctcggtttgcatccttaatcacatctgataagcctttattgcattcagtgtaacatattcacaggttccagggttaggcatgggcatctttgagggccattattctccctaccacattatttgcctagcatctttcattacattgtccatctatttacttactgatttctaatgacatccaaatcagttacaacattttatgtaagcattgtttttatttttatgttattccactagtctatttttctactcatgaattatggtacatgagtttatttttgcaactttaagctcaataacatgttttaagatt

SEQ ID NO: 414029 - DNA, 604 bp, Homo sapiens
atcaggaaaacagaagacatcctatgtattataatgataaaagtttaatattaattagggccttatgctattattggaagagcttggtgaatagatattagaaaagcagctagacaaaatcagaagaggtctgttttatatcagagatcttagcctgacagtctagagtgtgggcacagaacccaagcttataggaatttctgaaaggtctgtaaatcttatccagatggacagtgggagctcataaaggattctgcaagccatcacatctgtcaaacctgctatgtctaatccttaagcctgctttatgtgaagacctcctcttcactcctcatttccagctctcatgagtttctttcataggcaaacccaracctggaacaatgtgcctgaagacttcgggtgacacagtacccagacttaaataggaggggagccatggtggaagtggccatccagcacaattttcttggtctttactcatagttgtgattccttaaaaaaattaaccacattaaaatatgtgtttcataatctacatctaataatacaaatatttaaagtcttttcaagtttgaatacgctacccatgttgctgctaccc

SEQ ID NO: 414030 - DNA, 609 bp, Homo sapiens
cttgcaaatttggaagccacacagattgtgtgagttcaggctgaaacctgtttgagagctggattctggctataaactccacagggaacattttctctctccactcagagctgagaccatagggaaatttatttgctagctcactttgaaggtttattttatttattttttaaatttctagtacacgtgctcactgaaggtgtaatacttatgtgagaatctcaaaatcagttgtgttctttgtatgaccctggttttgtttcctcctgctctcttactttcagtgtgtctcagtatgtctgctcaatatgtcatcttaaatttcaactgagggtggatcttcttcccagctcactcacatggttcttagctagattcagtttctctccatttgtaggactgaggacctcagttcttcacttagggttggctacaggtaatcrtcaatttcttgtaacaggacttacactgtgccactgacagcatgccagttggcttcattcaaatgagagggcaagagaaagagagagagggagagggcacaagatgaaattcacagtatcttataaactaatctcagaagtggcatctcatttcttttgttctatt

SEQ ID NO: 414031 - DNA, 531 bp, Homo sapiens
tctttgtatgaccctggttttgtttcctcctgctctcttactttcagtgtgtctcagtatgtctgctcaatatgtcatcttaaatttcaactgagggtggatcttcttcccagctcactcacatggttcttagctagattcagtttctctccatttgtaggactgaggacctcagttcttcacttagggttggctacaggtaatcgtcaatttcttgtaacaggacttacactgkgccactgacagcatgccagttggcttcattcaaatgagagggcaagagaaagagagagagggagagggcacaagatgaaattcacagtatcttataaactaatctcagaagtggcatctcatttcttttgttctattctattcaatagaaacaagtacctgggaccagcttacactataggaaagagattatataagggtataaataccaagaggtagagatcatcaagagccattctggtagcagccacaatatcttatccagaatatttcttattcaggccttcaaatgtgctg

SEQ ID NO: 414032 - DNA, 531 bp, Homo sapiens
tctttgtatgaccctggttttgtttcctcctgctctcttactttcagtgtgtctcagtatgtctgctcaatatgtcatcttaaatttcaactgagggtggatcttcttcccagctcactcacatggttcttagctagattcagtttctctccatttgtaggactgaggacctcagttcttcacttagggttggctacaggtaatcgtcaatttcttgtaacaggacttacactgtgccactgacagcatgccagttggcttcattcaaatgagagggcaagagaaagagagagagggagagggcacaagatgaaattcacagtatcttataawctaatctcagaagtggcatctcatttcttttgttctattctattcaatagaaacaagtacctgggaccagcttacactataggaaagagattatataagggtataaataccaagaggtagagatcatcaagagccattctggtagcagccacaatatcttatccagaatatttcttattcaggccttcaaatgtgctg

SEQ ID NO: 414033 - DNA, 449 bp, Homo sapiens
aatgaaccttccttccatacaatttcttctcctaaattgtactctggctctcttatcayatacaaacgtctatgttaggtatttgtgtctgtcttgattcttggtaggcttttaaactctgtgaatgttggactgtgatgtagacatcatttcaccgcacactctgtaaccaccaaaccttagcagcttattcagtgagcacatacttggctcttaatgagtattgcttaaattgatgaattgaattagtattttaccttctctgttgcttagctaagcagaagaatttgtcatttttttaatgtagtgactggttctattaaaagttacctttgtctatatcattttgttatactaaagcacaaatgtataaggtcaaaaaacattctcaagattttgtttaaaccacagccctcagttgtgtatatttatctcttgttttcatatgc

SEQ ID NO: 414034 - DNA, 611 bp, Homo sapiens
ggcatctcatttcttttgttctattctattcaatagaaacaagtacctgggaccagcttacactataggaaagagattatataagggtataaataccaagaggtagagatcatcaagagccattctggtagcagccacaatatcttatccagaatatttcttattcaggccttcaaatgtgctgtcttttctggtctaatggaaatgaaccttccttccatacaatttcttctcctaaattgtactctggctctcttatcatatacaaacgtctatgttaggtatttgtgtctgtcttgattcttggtaggcttttaaactctgtgaatgttggactgtgatgtagacatcatttcaccgcacactctgtaaccaccaaaccttagcagcttattcagtragcacatacttggctcttaatgagtattgcttaaattgatgaattgaattagtattttaccttctctgttgcttagctaagcagaagaatttgtcatttttttaatgtagtgactggttctattaaaagttacctttgtctatatcattttgttatactaaagcacaaatgtataaggtcaaaaaacattctcaagattttgtttaaacca

SEQ ID NO: 414035 - DNA, 564 bp, Homo sapiens
gtggattagaatgaactccgtggattagaatctcagaccataggcaaacatttacttgttttagaataagcacatttgagtctgcaataagtattactatttttaagttgaaaatgtaattggtttctaataataaccatattggctagcattatttcaatcgtgtttaatgttttccaatgtcatttcatgtcagatatctctcttgattcttagtaacaatttggacaagacagcaaatgctattgtccaagttttctaaagaagaatctgaagtgaaatgacatcaagagacctatcaagacctgtatccaggaaaaggtaaatctgagctgaaattgtakcccttgtaaattacctacgtgacataccagatagtgttcatgatccatttagtactctgttctaaaaatgagacaatatccatttattcacttgttcatttatttagtgtttgttcagcccttactgcatattccaggcactattctgactgtggcaggagtgaacaaacaggcatggttcttacttgcatgtaattacagtcttatagtgaaaacaagt

SEQ ID NO: 414036 - DNA, 564 bp, Homo sapiens
gtggattagaatgaactccgtggattagaatctcagaccataggcaaacatttacttgttttagaataagcacatttgagtctgcaataagtattactatttttaagttgaaaatgtaattggtttctaataataaccatattggctagcattatttcaatcgtgtttaatgttttccaatgtcatttcatgtcagatatctctcttgattcttagtaacaatttggacaagacagcaaatgctattgtccaagttttctaaagaagaatctgaagtgaaatgacatcaagagacctatcaagacctgtatccaggaaaaggtaaatctgagctgaaattgtagcccttgtaaattacctaygtgacataccagatagtgttcatgatccatttagtactctgttctaaaaatgagacaatatccatttattcacttgttcatttatttagtgtttgttcagcccttactgcatattccaggcactattctgactgtggcaggagtgaacaaacaggcatggttcttacttgcatgtaattacagtcttatagtgaaaacaagt

SEQ ID NO: 414037 - DNA, 553 bp, Homo sapiens
attcttagtaacaatttggacaagacagcaaatgctattgtccaagttttctaaagaagaatctgaagtgaaatgacatcaagagacctatcaagacctgtatccaggaaaaggtaaatctgagctgaaattgtagcccttgtaaattacctacgtgacataccagatagtgttcatgatccattyagtactctgttctaaaaatgagacaatatccatttattcacttgttcatttatttagtgtttgttcagcccttactgcatattccaggcactattctgactgtggcaggagtgaacaaacaggcatggttcttacttgcatgtaattacagtcttatagtgaaaacaagtgttaaacaacaaaatctcccaattattttaaaattataaacttgattcgatactatgtggccatataattgttcctaatttggttggagaagggaggcagttagggaagccttccctgagttagtgccatttaacctgaattatgatagatgataagtaatttgtcaggggaaaaatactccaggaataaagaacag

SEQ ID NO: 414038 - DNA, 473 bp, Homo sapiens
cttgtaggccatgctaaggatttgggatgttaatgtcagtacaaacaattgagtcgtaagcagaaagtaaaagcatgattccatcaaatgttattctctaaacagtaattttataaatacaggttaaatgtgtgtggtcccagctactcaggaggtcccagctactcagtattccttttcaacaaatattaggtgcctactattagccaggtacagcccttagctactttgaatgaagcatatattacaaactggcagaatttcttaaacaaagaatctaaagttgtttatacaccrtaatctcggtattttataaatttcttgaaattatttttatgtacactgctttgcagaattttaactggctttgaaataaacaatgacaatagtcctccatgttactagtttcaaattttcccaatacctactaagacattacttaatccacagatttactgtcaatagtttgtatc

SEQ ID NO: 414039 - DNA, 608 bp, Homo sapiens
gaaattaatatttcaaattaaagcaaaatcacaaatttatactttatattatgaatgagattcacaaaaggagcatgataatatattctgttgtcatcgcatacaaaataataacatagagtatgaatcaataatttttcaaatacaaagctattacaattaggaatacaaagaaatcataattaggaatacttctacaatattaacacacaatagtggtaacacttgcaaaatgatggtggtggttttttttktttttttttttccccgacagagtcttgctcttgttgcccaggctggagtgcaatggcatgattttggctcactgtaaactccacctcctgggttcaagcgattctcctgcctcagcctccctagtagctggtattacaggtgcctgccaccacacccagctaatttttgtatttttagtagagatgggggtttcaccatgttggccagcctggtcccgaactcctgaccttaggtgatccaccagcatcggcctcccaaagtgctgggattacaggtgtgagccactgtgtccagccagtggtgggtctcatatctcaatgtggacttttactaactcccaatgcctcagtttc

SEQ ID NO: 414040 - DNA, 608 bp, Homo sapiens
gaaattaatatttcaaattaaagcaaaatcacaaatttatactttatattatgaatgagattcacaaaaggagcatgataatatattctgttgtcatcgcatacaaaataataacatagagtatgaatcaataatttttcaaatacaaagctattacaattaggaatacaaagaaatcataattaggaatacttctacaatattaacacacaatagtggtaacacttgcaaaatgatggtggtggttttttttgtttttttttttccccgacagagtcttgctcttgttgcccaggctggagtgcaatggcrtgattttggctcactgtaaactccacctcctgggttcaagcgattctcctgcctcagcctccctagtagctggtattacaggtgcctgccaccacacccagctaatttttgtatttttagtagagatgggggtttcaccatgttggccagcctggtcccgaactcctgaccttaggtgatccaccagcatcggcctcccaaagtgctgggattacaggtgtgagccactgtgtccagccagtggtgggtctcatatctcaatgtggacttttactaactcccaatgcctcagtttc

SEQ ID NO: 414041 - DNA, 637 bp, Homo sapiens
aaggctgcaatgagctgtgattgcaccactgcactcaagcctgggtggtagagtaagaccctgtctcaaaaaaaaaaaaaaaaaaagaaaaatcactaagcaaaataagacatgtgaaggatcatgtcaaaggwaagaaaaattaggggaacattaaaagctttcttcccaagccactaaatcaacttgactaacaaaattaccacttgatttagtattagaaaattacattacatatcaaacataaacccattaatcaaatactaaagaaatttctgagttaaatggtataatgttagcttatgccagagctgaccttgaaagattgttcaaatatggctcagtgtgattgaaagttctgtgtgaatatgtttttggaaagatccaacagcaacaccttagtgtatgtttttgaaataaaatatatctgagtagcagcaaagttattctcaaatttccattttatagctggagatgttataccgtgacgtacatgataggacccaatatggatcaatcccttttagaagtcaatcaggaagaggggagcagttaaaacagttgcttggtttacaaacattagaacaattttcttattcacaccatctgattattgtatgttattttttccccaacg

SEQ ID NO: 414042 - DNA, 637 bp, Homo sapiens
aaggctgcaatgagctgtgattgcaccactgcactcaagcctgggtggtagagtaagaccctgtctcaaaaaaaaaaaaaaaaaaagaaaaatcactaagcaaaataagacatgtgaaggatcatgtcaaaggaaagaaaaattaggggaacattaaaagctttcttcccaagccactaaatcaacttgactaacaaaattaccacttgatttagyattagaaaattacattacatatcaaacataaacccattaatcaaatactaaagaaatttctgagttaaatggtataatgttagcttatgccagagctgaccttgaaagattgttcaaatatggctcagtgtgattgaaagttctgtgtgaatatgtttttggaaagatccaacagcaacaccttagtgtatgtttttgaaataaaatatatctgagtagcagcaaagttattctcaaatttccattttatagctggagatgttataccgtgacgtacatgataggacccaatatggatcaatcccttttagaagtcaatcaggaagaggggagcagttaaaacagttgcttggtttacaaacattagaacaattttcttattcacaccatctgattattgtatgttattttttccccaacg

SEQ ID NO: 414043 - DNA, 637 bp, Homo sapiens
aaggctgcaatgagctgtgattgcaccactgcactcaagcctgggtggtagagtaagaccctgtctcaaaaaaaaaaaaaaaaaaagaaaaatcactaagcaaaataagacatgtgaaggatcatgtcaaaggaaagaaaaattaggggaacattaaaagctttcttcccaagccactaaatcaacttgactaacaaaattaccacttgatttagtattagaaaattacattacatatcaaacataaacccattaatcaaatactaaagaaatttctgagttaaatggtataatgttagcttatgccagagctgaccttgaaagattgttcaaatatggctcagtgtgattgaaagttctgtgtgaatatgtttttggaaagatccaacagcaacaccttagtgtatgtttttgaaataaaatrtatctgagtagcagcaaagttattctcaaatttccattttatagctggagatgttataccgtgacgtacatgataggacccaatatggatcaatcccttttagaagtcaatcaggaagaggggagcagttaaaacagttgcttggtttacaaacattagaacaattttcttattcacaccatctgattattgtatgttattttttccccaacg

SEQ ID NO: 414044 - DNA, 637 bp, Homo sapiens
aaggctgcaatgagctgtgattgcaccactgcactcaagcctgggtggtagagtaagaccctgtctcaaaaaaaaaaaaaaaaaaagaaaaatcactaagcaaaataagacatgtgaaggatcatgtcaaaggaaagaaaaattaggggaacattaaaagctttcttcccaagccactaaatcaacttgactaacaaaattaccacttgatttagtattagaaaattacattacatatcaaacataaacccattaatcaaatactaaagaaatttctgagttaaatggtataatgttagcttatgccagagctgaccttgaaagattgttcaaatatggctcagtgtgattgaaagttctgtgtgaatatgtttttggaaagatccaacagcaacaccttagtgtatgtttttgaaataaaatatatctgagtagcagcaaagttattctcaaatttccattttatagctggagatgttataccgtgacgtayatgataggacccaatatggatcaatcccttttagaagtcaatcaggaagaggggagcagttaaaacagttgcttggtttacaaacattagaacaattttcttattcacaccatctgattattgtatgttattttttccccaacg

SEQ ID NO: 414045 - DNA, 657 bp, Homo sapiens
tggctcagtgtgattgaaagttctgtgtgaatatgtttttggaaagatccaacagcaacaccttagtgtatgtttttgaaataaaatatatctgagtagcagcaaagttattctcaaatttccattttatagctggagatgttataccgtgacgtacatgataggacccaatatggatcaatcccttttagaagtcaatcaggaagaggggagcagttaaaacagttgcttggtttacaaacattagaacaattttcttattcacaccatctgattattgtatkttattttttccccaacgtttagactacacaatgagttaagaatgataaaaataagctcaccaatatactatgtacatatttaccaaaatctgtgcatgcttatacatataaacacagctgataatttattagttaggctcatttgtaatttttgtcactatagaccagttttttatttaaattgaagattagtatacattttaaatgattagtcaaaataaaaaatctaaaatgtgctctaaatacctcttaggtcagaaaaaaaaagtcaaaagctagagtatagagaaattaagaaacgccctaaatttctaatctgacaaaaattcatacaagatttaaatattttaatggaaaatagaacagaactaat

SEQ ID NO: 414046 - DNA, 585 bp, Homo sapiens
aaaaacaaacaaaaaaaagataatgggagaatgttgaaaactcagagagaagagcaactctcacagatagggatccagataacattagcagctgatttctcrgcagaaaccttgaaggccagtaggcagtggattatatatttaaaataatgaagaaacctgtcaattgagaaatatatagctggaaaacttatccttcaaaaatgaaggagaaattaagacatttccggatttttttttaaaactgaaaaaaatccatttatccctgaatttgacattcaggaagtgttaagtccttcaggttgaaataaatgaactctaggcaataactatataagtaaataagcaagctgtatgaatatacaaagctctctggtaaaggtaaatacataaacaaacataaaaacagtcctattgtaattttggtttgtaactctgctttttattttctacataatttaaaaggcaaatgcataaaatgtaattgtaaatctgttagctggtatacaatgaataaagatataatttgtcacatcaataacataaaaagagtagagctatatatatagcagtagaattttggta

SEQ ID NO: 414047 - DNA, 585 bp, Homo sapiens
aaaaacaaacaaaaaaaagataatgggagaatgttgaaaactcagagagaagagcaactctcacagatagggatccagataacattagcagctgatttctcagcagaaaccttgaaggccagtaggcagtggattatatatttaaaataatgaagaaacctgtcaattgagaaatatatagctggaaaacttatccttcaaaaatgaaggagaaattaagacatttccggatttttttttaaaactgaaaaaaatccatttatccctgaatttgacattcaggaagtgttaagtccttcaggttgaaataaatgaactctaggcaataactatrtaagtaaataagcaagctgtatgaatatacaaagctctctggtaaaggtaaatacataaacaaacataaaaacagtcctattgtaattttggtttgtaactctgctttttattttctacataatttaaaaggcaaatgcataaaatgtaattgtaaatctgttagctggtatacaatgaataaagatataatttgtcacatcaataacataaaaagagtagagctatatatatagcagtagaattttggta

SEQ ID NO: 414048 - DNA, 590 bp, Homo sapiens
gtgtgactgggttccagtgaaactttatttacaaaagatttgtcccatgagtcaaatttaccacctccagatctagagaaacasttttgagcccttttattttgctcaacagttaagcatggctccatgtcccttatatttagtcagaactcggtatgttttaaggaaagaatggttacacgaagacatacattcattcatttatacaacacattttcagtgttgaatgataaattttggaatagttaacagatgataaaagtgttgttttcagtcatccctatccaatgaagtaaaaaaaaaagtgttgaatgggaagaaatcaagaatagttatacgaatatcaccattgcattaaagctctcttccttgtttctaaaagaatatcttgacacacattaagctcactgacccccacaccatgaatgagggcatcttcaacaatggtggatgacgtcttagtttccctcaactcagttaatctaagtaagctcatggtatcactttcctgtcctagagggaacatatttcctgcatttttctttttttccttactttccatcaccaagtaactcttctgatattttttc

SEQ ID NO: 414049 - DNA, 595 bp, Homo sapiens
gatcagtccttgtctggtctggctctgccccactctccttctcacctagttggaatccctagctacttttcagtagaggagagtgtgtaccccaatcccagcttggttcagatctgcatttaactcatggaacctggctgctccccaggttctgaagaaaaaaacggtctctctgtgggtatgataaaggatgggcctgtccccaggaccctgtgagagggaagcccaatgtcccaccaggttggcagggctggggaagggaaagtgttatggcagccccaagaaaaaaaagaggcagcagagggagcaggasagcgctcacatggaactcatgccactgcctgaggggagggaggagtgcacgccagtgacgtcagggggcagagaggcgcagttccagggcggctttccccctcacttcctgccatgttactctgatcgcctccacgtgagcctgcccactttgtgcccaggggcctgtagaaaaccacagctccccatggttatggccccaggagtggggcagagcagggaggagtcctgcacagaggagaggcaggggcaggagggagtgggcctcaaactccaggagggg

SEQ ID NO: 414050 - DNA, 421 bp, Homo sapiens
gcaggagagcatagtggttactaggaagggaaggactttgggactagactgcctcggctggagtcctctttctgcttcatagccacgtgatcctaggcatgttacctgtgcctcagttttcactctrtcaatatgtaataactgaatctgtctttgtggtgaggattcagtgagttaacatatttgaagtgcttaaaaatgaggcttgtgtccatagattaatgagtgaatacacaaatggtgatatggacatacagtggagtattagtcataaaaaggaaggcagagctgatccatggcaccatgtgacagaacctcaaaagcattaggttaagtggaagaagccagacacaggtcacctattgtgtaattccatttataggaaatatacagaatatgtaaatccgtggagaaagaaagc

SEQ ID NO: 414051 - DNA, 500 bp, Homo sapiens
agggaaggactttgggactagactgcctcggctggagtcctctttctgcttcatagccacgtgatcctaggcatgttacctgtgcctcagttttcactctgtcaatatgtaataactgaatctgtctttgtggtgaggattcagtgagttaacatatttgaagtgcttaaaaatgaggcttgtgtccatagattaatgagtgaatacacaaatggtgatatggacatacagtggagtattagtcataaaaaggaaggcagagctgatccatggcaccatgtgacwgaacctcaaaagcattaggttaagtggaagaagccagacacaggtcacctattgtgtaattccatttataggaaatatacagaatatgtaaatccgtggagaaagaaagccgatttccaggggctaaggggaggggagaatgggaagtggctgcttcatgggtacaaggtttcattttgagctgatgaaaatgttgtggaactacatagagatag

SEQ ID NO: 414052 - DNA, 570 bp, Homo sapiens
tcatcatctatggttgataaaggtatagcartatttctatttcctcatgataatgaaggtcaattacaactgccagtataataacttatttctttgtctgccaacctacatacacaaggaagccaaaatgacagggagctactaaaactttattcttattggaatgcttactatgtacccagaagaagcattctccctactccagcagagcttaatgctgtaggtccaggaagctcaaattctccaagggagttttagtgagaggagccactctcaccctctgcccttggtttacaaacctgtatattctaggacccaatatcttacaatgtccattggttcaaagtataacatgttaaagcacagagccccaactctgaaaagtaccatccctaaattggcatttagttgcacctttatatccacctttaaaagaaatatcttttaatgttctatcagactgatagattctgtttaatatagtatattatagcaccagtggatcatttggttgtatgcatattattgtaccttctctgctacaaaatatattcctttgtcctaaggtgt

SEQ ID NO: 414053 - DNA, 570 bp, Homo sapiens
tcatcatctatggttgataaaggtatagcaatatttctatttcctcatgataatgaaggtcaattacaactgccagtataataacttatttctttgtctgccaacctacatacacaaggaagccaaaatgacagggagctactaaaactttatkcttattggaatgcttactatgtacccagaagaagcattctccctactccagcagagcttaatgctgtaggtccaggaagctcaaattctccaagggagttttagtgagaggagccactctcaccctctgcccttggtttacaaacctgtatattctaggacccaatatcttacaatgtccattggttcaaagtataacatgttaaagcacagagccccaactctgaaaagtaccatccctaaattggcatttagttgcacctttatatccacctttaaaagaaatatcttttaatgttctatcagactgatagattctgtttaatatagtatattatagcaccagtggatcatttggttgtatgcatattattgtaccttctctgctacaaaatatattcctttgtcctaaggtgt

SEQ ID NO: 414054 - DNA, 570 bp, Homo sapiens
tcatcatctatggttgataaaggtatagcaatatttctatttcctcatgataatgaaggtcaattacaactgccagtataataacttatttctttgtctgccaacctacatacacaaggaagccaaaatgacagggagctactaaaactttattcttattggaatgcttactatgtacccagaagaagcattctccctactccagcagagcttaatgctgtaggtccaggaagctcaaattctccaagggagttttagtgagaggagccactctcaccctctgcccttggtttacaaacctgtatattctaggacccaatatcttacaatgtccattggttcaaagtataacatgttaaagcacagagccccaactctgaaaagtaccatccctaaattggcayttagttgcacctttatatccacctttaaaagaaatatcttttaatgttctatcagactgatagattctgtttaatatagtatattatagcaccagtggatcatttggttgtatgcatattattgtaccttctctgctacaaaatatattcctttgtcctaaggtgt

SEQ ID NO: 414055 - DNA, 613 bp, Homo sapiens
agctcaaattctccaagggagttttagtgagaggagccactctcaccctctgcccttggtttacaaacctgtatattctaggacccaatatcttacaatgtccattggttcaaagtataacatgttaaagcacagagccccaactctgaaaagtaccatccctaaattggcatttagttgcacctttatatccacctttaaaagaaatatcttttaatgttctatcagactgatagattctgtttaatatagtatattatagcaccagtggatcatttggttgtatgcatattattgtaccttctctgctacaaaatatattcctttgtcctaaggtgtgttacaaagaacattaggcattctatgcatctttggatagtttaatggccaagrcattgatggcaggagagtcaaagccacaggtggaaaacacatttatcccagtaagaacaaattgctattcttccactgtagagagggtaaacaatgtgccattacgttgccaattgaatgcctcaatcatgtcaagggctgaacatctatgactgtttctgaaaggtcaaacattcaacagaggctgtagctagaactgccttaatgataagagatcatg

SEQ ID NO: 414056 - DNA, 549 bp, Homo sapiens
ctaatcaatgattccttaaattattcacaataaaaaaaaagattagaatagtttttttaaaaaaaaagcccagaaactaatctaagttttgtctggtaataaaggtatattttcaaaagagaggtaaatagatccacatactgtggagggaataaaatactttttgaaaaacaaacaacaagttggatttttagacacatagaaattgaatatgtacatttataaatatttttggattgaactatttcaaaattataccataaaataacttgtaaaaatgtaggcaaaatgtatataattatggcatgaggtatgcaactttargcaaggaagcaaaagcagaaaccatgaaaaaagtctaaattttaccatattgaatttaaattttcaaaaacaaaaataaagacaaagtgggaaaaatatgtatgcttcatgtgtgacaagccactgatacctattaaatatgaagaatattataaatcatatcaataaccacaacattcaagctgtcagtttgaatagacaatgtaaatgacaaaactacatact

SEQ ID NO: 414057 - DNA, 549 bp, Homo sapiens
ctaatcaatgattccttaaattattcacaataaaaaaaaagattagaatagtttttttaaaaaaaaagcccagaaactaatctaagttttgtctggtaataaaggtatattttcaaaagagaggtaaatagatccacatactgtggagggaataaaatactttttgaaaaacaaacaacaagttggatttttagacacatagaaattgaatatgtacatttataaatatttttggattgaactatttcaaaattataccataaaataacttgtaaaaatgtaggcaaaatgtatataattatggcatgaggtatgcaactttaggcaaggaagcaaaagcagaaaccatgaaaaaagtctaaattttaccatattgaatttaaattttcaaaaacaaaaataaagacaaagtgggaaaaatatgtatgcttcatgtgtgacaagccactgatacctattaaatatgaagaatattataaatcatatyaataaccacaacattcaagctgtcagtttgaatagacaatgtaaatgacaaaactacatact

SEQ ID NO: 414058 - DNA, 554 bp, Homo sapiens
taaattcagtgaagttgcagaatacaaaatcaacatacaaaaatcagtagtgtctctatacactaataaggacttaacagagaaagaagttaagaaaacaataccactaacaatagaatccaaaaaataaaatacttaggaataaattttaccaaacatctgtacactaaaaactataaaacattgaaaaaagaagttgaataagacacatataaatagaaagctatctcatgttaatagattagaaaaagtaatattgttaagatgtcctcactacttaaagcaatttatagatctaatgcatttattgcaatctcttcaaaatcccaaaggtatttttgacagaaataaaaaaaaaattctaaaatatgcatgaaaccacaaaagactgtgaatagctaaagcaatcttgagcaagatgaacaacactggaagcatcacactaccttatttcaaaatctactacaaagctatagtgatcaaagcaacatgatactgtcataaaaacacayagataaacctatggaatggaataaagagcacagaaataagtc

SEQ ID NO: 414059 - DNA, 556 bp, Homo sapiens
tgtaaaagtatattaattttattgatattttaaaagaaccaacttttarttttgttgatctctgtataattttttaattctcaatttcatttatctctgctctaatcttcatttccttccttctgctagctctggattttgtttgctcttccttttacggtttattgagtaaagtttggttattgatttgacatgtttcttttttaaaatgtaggtgttacaactctgagcactgcttttgatatatcacacccatcttgttatatatttgttttcaatcgtctctaaacattttctaatttccctcatgatttgttctttgattcattggttggtaaatactgtgttgtttaatttccaaatatttgtaaattttctagtttttcttttgttattgatatcttatttcattccattgtggccagtgaagatactttgcatgatttcaatctttttaagtttattgagcttatcttatggcctaacatatcatctgtgctggagaatgttccatgttcacttgagaagaatgtgtactctgcagtttttgagagaa

SEQ ID NO: 414060 - DNA, 556 bp, Homo sapiens
tgtaaaagtatattaattttattgatattttaaaagaaccaacttttaattttgttgatctctgtataattttttaattctcaatttcatttatctctgctctaatcttyatttccttccttctgctagctctggattttgtttgctcttccttttacggtttattgagtaaagtttggttattgatttgacatgtttcttttttaaaatgtaggtgttacaactctgagcactgcttttgatatatcacacccatcttgttatatatttgttttcaatcgtctctaaacattttctaatttccctcatgatttgttctttgattcattggttggtaaatactgtgttgtttaatttccaaatatttgtaaattttctagtttttcttttgttattgatatcttatttcattccattgtggccagtgaagatactttgcatgatttcaatctttttaagtttattgagcttatcttatggcctaacatatcatctgtgctggagaatgttccatgttcacttgagaagaatgtgtactctgcagtttttgagagaa

SEQ ID NO: 414061 - DNA, 556 bp, Homo sapiens
tgtaaaagtatattaattttattgatattttaaaagaaccaacttttaattttgttgatctctgtataattttttaattctcaatttcatttatctctgctctaatcttcatttccttccttctgctagctctggattttgtttgctcttccttttacggtttattgagtaaagtttggttattgatttgacatgtttcttttttaaaatgtaggtgttacaactctgagcactgcttttgatatatcacacccatcttgttatatmtttgttttcaatcgtctctaaacattttctaatttccctcatgatttgttctttgattcattggttggtaaatactgtgttgtttaatttccaaatatttgtaaattttctagtttttcttttgttattgatatcttatttcattccattgtggccagtgaagatactttgcatgatttcaatctttttaagtttattgagcttatcttatggcctaacatatcatctgtgctggagaatgttccatgttcacttgagaagaatgtgtactctgcagtttttgagagaa

SEQ ID NO: 414062 - DNA, 556 bp, Homo sapiens
tgtaaaagtatattaattttattgatattttaaaagaaccaacttttaattttgttgatctctgtataattttttaattctcaatttcatttatctctgctctaatcttcatttccttccttctgctagctctggattttgtttgctcttccttttacggtttattgagtaaagtttggttattgatttgacatgtttcttttttaaaatgtaggtgttacaactctgagcactgcttttgatatatcacacccatcttgttatatatttgttttcaatcgtctctaaacattttctaatttccctcatgatttgttctttgattcattggttggtaaatactgtgttgtttaatttccaaatatttgtaaattttctagtttttcttttgttattgatatcttatttcattccattgtggycagtgaagatactttgcatgatttcaatctttttaagtttattgagcttatcttatggcctaacatatcatctgtgctggagaatgttccatgttcacttgagaagaatgtgtactctgcagtttttgagagaa

SEQ ID NO: 414063 - DNA, 515 bp, Homo sapiens
ggctctattcttttttgttgtcattctttcattttcctgctcttcagactgaatcatttcatttgatctatcaagttcactgattcttttttccagctgctcaaatcttctattggaaccctaagtaaaaagtaactttttacttattgtacttttcagcctcagaatttttttgtacctttwaaaaaattcatatttcttatttatttatatgtcattctcttgggtttctttagctctttaagtttatttaagacagttatataaagtttttgtctaatattttcaatatctgcttactcagggagagtctcatttatttcttctgtaaatgggccatagttttgtgtttatttgcatgcttcttaatttttgttgaaaactggacattttggatattataatgtgtttattctggaaaccaaatttttcccttcttcaaggttatttttgttacccactgtgggatgtagtttttatttgtttagtaacttttgtaaactggttttgtaata

SEQ ID NO: 414064 - DNA, 515 bp, Homo sapiens
ggctctattcttttttgttgtcattctttcattttcctgctcttcagactgaatcatttcatttgatctatcaagttcactgattcttttttccagctgctcaaatcttctattggaaccctaagtaaaaagtaactttttacttattgtacttttcagcctcagaatttttttgtacctttaaaaaaattcatatttcttatttatttatatgtcattctcttgggtttctttagctctttaagtttatttaagacagttatataaagtttttgtctaatatttycaatatctgcttactcagggagagtctcatttatttcttctgtaaatgggccatagttttgtgtttatttgcatgcttcttaatttttgttgaaaactggacattttggatattataatgtgtttattctggaaaccaaatttttcccttcttcaaggttatttttgttacccactgtgggatgtagtttttatttgtttagtaacttttgtaaactggttttgtaata

SEQ ID NO: 414065 - DNA, 591 bp, Homo sapiens
cttcattttttcttgctgtgagcctaggaattactaaaggtgagttattagtgtcttctcaggccttttctgagcatgtgtcccaccttggccatgcttatggatttccaaatttttcattgtatgtaagcacttttgagtattcgaatttcccaaaggaactttctctcctgctttttcctcaagttttcagtacagtatatcttgcctcaattgtaatattttgcckcaaatggctgagagttgttaatttgcctttggacgatctgatttctaaaggtttggtggaattctctgtgaaaacatctaaacctagtgtttgtgtgtgtgttataattccatgacaactgtatttctctatggaaattgctcacataagtgcggtacttctttttttttttttttttttttgaagtcagttgtggtgaattgtatttttctagaaaattacccattccctctagctttcaatgtttttcatagatgtgaacaacattgtttttaatgattttttatttgctgattatcaatagttatttctctcaccattccttattcatttttgtgctttctcttttttttattcatgat

SEQ ID NO: 414066 - DNA, 591 bp, Homo sapiens
cttcattttttcttgctgtgagcctaggaattactaaaggtgagttattagtgtcttctcaggccttttctgagcatgtgtcccaccttggccatgcttatggatttccaaatttttcattgtatgtaagcacttttgagtattcgaatttcccaaaggaactttctctcctgctttttcctcaagttttcagtacagtatatcttgcctcaattgtaatattttgcctcaaatggctgagagttgttaatttgcctttggacgatctgatttctaaaggtttggtggaattctcygtgaaaacatctaaacctagtgtttgtgtgtgtgttataattccatgacaactgtatttctctatggaaattgctcacataagtgcggtacttctttttttttttttttttttttgaagtcagttgtggtgaattgtatttttctagaaaattacccattccctctagctttcaatgtttttcatagatgtgaacaacattgtttttaatgattttttatttgctgattatcaatagttatttctctcaccattccttattcatttttgtgctttctcttttttttattcatgat

SEQ ID NO: 414067 - DNA, 483 bp, Homo sapiens
ccttctcctaaaaatgcacatcctatgactgaaaagacaggtaaaagagatgcttttaattacaaaactttccctgtcgtggttgcttctctctatccttctaaactccctttcaatttcttctcttctgtaacatatttgtgcccaaaatcttctgctttctgaaatattttatctttttcttccacactatctcttattttcmaattttaatcattaaattatattatgtcttataaaactaatcccacatataaacccctatgataatttcagtttgtccctagtatgaagttctttaaagatgtgtagttttctaactttcatgctctccaattaattataaacttcattttccactctgaaaaggagatgtctgatctcagctatttccatcctatttgaaaaccagatttagttttaaaccagaggaagggaatctcaagtctttacctcccacagtctggtgtgattctctctctt

SEQ ID NO: 414068 - DNA, 483 bp, Homo sapiens
ccttctcctaaaaatgcacatcctatgactgaaaagacaggtaaaagagatgcttttaattacaaaactttccctgtcgtggttgcttctctctatccttctaaactccctttcaatttcttctcttctgtaacatatttgtgcccaaaatcttctgctttctgaaatattttatctttttcttccacactatctcttattttccaattttaatcattaaattatattatgtcttataaaactaatcccacatataaacccctatgataatttcagtttgtccctagtatgaagttctttaaagatgtgtagttttctaactttcatgctctccaattmattataaacttcattttccactctgaaaaggagatgtctgatctcagctatttccatcctatttgaaaaccagatttagttttaaaccagaggaagggaatctcaagtctttacctcccacagtctggtgtgattctctctctt

SEQ ID NO: 414069 - DNA, 602 bp, Homo sapiens
tctttcccacttctatacaaaactataattctgaacatcctttttgtttaatataagtctgcatttcctgtttgaagatatgtgtcccagaccctaaatgactgacaaattttaaatctccaataggaaagatgacaaactctatggaaacttggcttctgaagaactcctagaagctttccaaagtcatcagtgtttcctaagaaggcagagaaatcaaacacatggtcttttcctcyagacaagctcctttgggtcatcaggatttcttcaacaataaaatgtaataattccaaatgtttgtaacagaatgggtaggactttcttcacttatttaaatactcccttttttatgcaactgagttttcatcaacaagtacaagcttgtgaaggagtactttaaaatgcaatttctctctatttttgtgggggctaatattttatttctcatattgacaatttattatgctgtttttaaaaagttcattcatcaagtatttcttgagctttttctatgagacaggcactgttttaggcaagtaattatgcactgaacaatgcaaaaagtttccctgcactcatggactttaattttacattta

SEQ ID NO: 414070 - DNA, 398 bp, Homo sapiens
actcatggtcttatctcaatacttagtgtcttcatgtaacatatgtcctttaggatagttatagtccgttttctttccaggagagacagatgagaatgcagaaatgttaaagtgcaagggacggaagcttccagctgtgcccacctgtaacctgacgtagacagttccaccgtttgcttcattaatcatgccaaaggctctaatgcaaatgtggtacagagtcacatgtttttgtatctacatgatagaaactataacttcatccctatatagaagggtatatagcatatgcctcagtgataaatataagtgaatcmttgatcagtaggaaaccattttaaaagtctttcataacagaacaaaatccctgaaaacattttcttctcaatctctgagtt

SEQ ID NO: 414071 - DNA, 620 bp, Homo sapiens
cttctcattccactccaattgagtggtatccggattatgaagtggaggcctatygccgcagacaccacaacagcagccttaacttcttcaactggttctctgaccacaacttcgcaggatctaacaagattgctgaggtgagtcctcactgggaaacatgaggaatgaccccgtgtgttcccagctgcttgggtcacctttctgagccctgatgaggcctttcccgattgagtcccctgacagatcctatgtaaggacctgtggcgcaatcccctgcaatactacaagaggatgaagccacctgaagagggaacagagacgtcaggtgagccgttagttggcactggagctgtttgatgcccagtataagggggttgacacacctgcctattcagggagcctgggtgctcatttcagaaatgtagaaattgaggctcctttcgtacatgtagaaattccttgagaggaagacagagagtgacagaatccaggacgttcatggcattgggctgaaaaggcacgttagagactgcactgcaaagcgggtgatagctgtggagtcttaagcccagtgaagaatcgtccatttccagaatcaatgagaagtaaagctgaaaatc

SEQ ID NO: 414072 - DNA, 581 bp, Homo sapiens
tgtactgaatataggtaagtactgctcagttttctccatgagcttcatcctcagggccacgtttcttattctgacaacacttagggatgctttcctggtaggaatactgctgttcttaattgcatacatggtgactctcttattcaggcctcagaggtgatccaccaccttcacagcaatggtccttccccaggagcttcccctgagaaacgggccatccagaccatactgctgctggtaagtttctctgtggtcctctgttgggtggatttcatcatctccttctcctcagcaatgttgtgggcatatggcccaatcaaccagcaagttcagagtcttgtagtcaatgtctatgccrtgatcagtcctctggtgctcctcacttcagataaaagaagaaccaatattctgaaaaatacacaacagaagtgtcatagatttaatatcaattaataataaaaataattcttggaaaaatgagttcttctgccatcagttaaatcattccagtagcagataacttactttaattaattaaaatatgtaaaagtatacttttattatatctaaataattttgaa

SEQ ID NO: 414073 - DNA, 581 bp, Homo sapiens
tgtactgaatataggtaagtactgctcagttttctccatgagcttcatcctcagggccacgtttcttattctgacaacacttagggatgctttcctggtaggaatactgctgttcttaattgcatacatggtgactctcttattcaggcctcagaggtgatccaccaccttcacagcaatggtccttccccaggagcttcccctgagaaacgggccatccagaccatactgctgctggtaagtttctctgtggtcctctgttgggtggatttcatcatctccttctcctcagcaatgttgtgggcatatggcccaatcaaccagcaagttcagagtcttgtagtcaatgtctatgccgtgatcagtcctctggtgctcctcasttcagataaaagaagaaccaatattctgaaaaatacacaacagaagtgtcatagatttaatatcaattaataataaaaataattcttggaaaaatgagttcttctgccatcagttaaatcattccagtagcagataacttactttaattaattaaaatatgtaaaagtatacttttattatatctaaataattttgaa

SEQ ID NO: 414074 - DNA, 561 bp, Homo sapiens
tatctcattgtggttttgatttgcatttctctgatggccagtgatgaattatactcatatttttattaccttttgtttatctggtgatatttattcttctaaatattataattcactattatttttgtcagttcagcctaatgccaaacactgtgcattgaatttatttatttttcaattgttcaacttctttgtggttcttttccaaatatgcttgttaagtttatagtttcttgctttgccaaaatattttcattttctattttttaccatttacttcacttaagcattttaaacacattttcaatatctgaattttatgtgatgtctagtttcttctaattcttcatcttggtagcttcttttgtacttcatagtatgtgaraaattataatttaaaaataattttggttttgtatttgagagattttgtacaaaataactttagtcagtactttttttgttgtttattccaagaaggtagttgaataatccccaaagcctgaggtccctgtgatcatccagtacctggaggcggcactggcttctcactttgattac

SEQ ID NO: 414075 - DNA, 666 bp, Homo sapiens
tggcacaagtggcaaagtagcttgcattgcactctggactttttgcaggccttctattattctgtgcccaatttaaaagtagcagytttccattacattcattgaatgggccacggtatcatactcaaactaggaatgggtttctcataacccaaagaaacctgccagctcttgcgcctttttttgatgtaggagaatgtatacgtaaccactttttcttcattctaaaaggtatattataacatgccccatattattggactcctagaaatatcactagcacagaaatgagatcaaacagagacctcttgtgggggcccatgggcacacaaccataaaagttaaaaacaaaaacagaaacaaagaaaaaacaaacaaacaaaaacttcagtttctttacactgtgaacaaatgtacattaaaatgttgtaataaaacagtgactaaaagtaactaatgtaataatagtcaaacaccgtgatgccatgtctgagactcataaatattttcaattccatgctagcaacactaacttcaggggacacgcccctagcacagcagttgttaacatacagttgctctgtgtgcagtagcagtggcctgtcttaggccagcaacatcacatacatacatacatcttctttgtcaatactctaaagctttcca

SEQ ID NO: 414076 - DNA, 666 bp, Homo sapiens
tggcacaagtggcaaagtagcttgcattgcactctggactttttgcaggccttctattattctgtgcccaatttaaaagtagcagttttccattacattcaytgaatgggccacggtatcatactcaaactaggaatgggtttctcataacccaaagaaacctgccagctcttgcgcctttttttgatgtaggagaatgtatacgtaaccactttttcttcattctaaaaggtatattataacatgccccatattattggactcctagaaatatcactagcacagaaatgagatcaaacagagacctcttgtgggggcccatgggcacacaaccataaaagttaaaaacaaaaacagaaacaaagaaaaaacaaacaaacaaaaacttcagtttctttacactgtgaacaaatgtacattaaaatgttgtaataaaacagtgactaaaagtaactaatgtaataatagtcaaacaccgtgatgccatgtctgagactcataaatattttcaattccatgctagcaacactaacttcaggggacacgcccctagcacagcagttgttaacatacagttgctctgtgtgcagtagcagtggcctgtcttaggccagcaacatcacatacatacatacatcttctttgtcaatactctaaagctttcca

SEQ ID NO: 414077 - DNA, 554 bp, Homo sapiens
gatcctgctatgtcagcatcccaagtagctaggaatacaggcatgcaccatcatgcctcattttttttttttttttatttttagtagccatgtggyctcactatgttgcccaggctgctcttaaactctgacgctcaagtgagcctcctgtcttgtcattccaaaaggatggaattacacaggcttaagccattgtgctcagccaagattttaccttcaattagcacacatcttatttcagaaaaaaataataataaagtctgggaagaaaatgcattgaagtatggataaaacaaacttggcacaggttgttgagcctgggtaacagttgtattatactgttttattttgtatatgttttaaattttctgtaataaaacatgtatacaaatacaaagttgatcttcagtgttagctcttaagaccttagtgactttgaggagcaaaaagagagaaagtggggttgcttggaacagctccagtctgcagctcccagcaagaccaatgcagaaagcgggtgatttctgcatttccaactgaggtatccagttcat

SEQ ID NO: 414078 - DNA, 600 bp, Homo sapiens
tttttaacccatatttggcatcttcatagaattcacaaatcaatggatattatgttcaaagttctgagttaaaatatctgtcaattttgaattgcatccctagttaaaaattttttaagatcaaagataaaatgtaaaataattcatataagtaatacaaactaagtttacttcagttatttacttgtttaataaacttattaattacattagtcattacataaataaaatgctgcttcctattgtgaacatataatttgtgaagcatataatgttcaaaattttgtctctaaaacaggtaacattttgaatgaagagaacaaaaatttaatgattggtataaaaataaatttcaggaaaatgaaaggtttgyatgatgacataattaacataatagaaaggacagaaatctcaatatttgtttttacacattttggagggaaagtaaccctgagatattaaagtgcagaaaataatattaattatattcttgagttttcaaacccctctttccttggtacttacagaacatccagcacaggcccaggattccctgggtgtttctgccaaggagactatccagcggaattaaagcggaaa

SEQ ID NO: 414079 - DNA, 645 bp, Homo sapiens
tcaatggatattatgttcaaagttctgagttaaaatatctgtcaattttgaattgcatccctagttaaaaattttttaagatcaaagataaaatgtaaaataattcatataagtaatacaaactaagtttacttcagttatttacttgtttaataaacttattaattacattagtcattacataaataaaatgctgcttcctattgtgaacatataatttgtgaagcatataatgttcaaaattttgtctctaaaacaggtaacattttgaatgaagagaacaaaaatttaatgattggtataaaaataaatttcaggaaaatgaaaggtttgcatgatgacataattaacataatagaaaggacagaaatctcaatatttgtttttacacattttggagggaaaktaaccctgagatattaaagtgcagaaaataatattaattatattcttgagttttcaaacccctctttccttggtacttacagaacatccagcacaggcccaggattccctgggtgtttctgccaaggagactatccagcggaattaaagcggaaagccatgtgcacaaagatggatggatgctcacctctaagagatcagtgggtgcaggttgcagagggagttgggtgagtgcagttt

SEQ ID NO: 414080 - DNA, 545 bp, Homo sapiens
cccctttcacaatgcagccatttaactgggggtggtgcctctgtgggtcctccagccttcagagtgggattgttaccctgggccaccaagggaagcggaagcacagggccagtgggtggcaaagttagagactctgtgattgggaaatatcaccttagacccagcacggcccgttcaggacatagcgcctcttgggctccatccatgggctgttctttccatggggcgctttggttgcagtcagccacctgtggggtgggggtggagcaccaggaggagcaagtgttatgggatccacagggggaaggaggggatattccccytttgccccaccctgggcacaaaagctttgttctctgatgtgtgtgggcatcagggcctgtgtgggtatgggtggggttgcctcttttcttgaccaagaaagaaccatttctgggtctcctgggaggcttatgggcactacatgtacctgggagctgagtggagtgtgtgagggctctgcaggactctcccctgctgcctcctctccagtgggagccaggcca

SEQ ID NO: 414081 - DNA, 181 bp, Homo sapiens
cagattgctgggcaaagctcttttctgctgagagtcagatttaaaagatggttgataacttattcttttcctyttttaaacatggtttagatgtgtagcttgggttcttaaattctgtgcaggtaaatattgtgctcaagttttttatgtcacatgactatttagtctgaagggtgcactt

SEQ ID NO: 414082 - DNA, 181 bp, Homo sapiens
cagattgctgggcaaagctcttttctgctgagagtcagatttaaaagatggttgataacttattcttttcctctttwaaacatggtttagatgtgtagcttgggttcttaaattctgtgcaggtaaatattgtgctcaagttttttatgtcacatgactatttagtctgaagggtgcactt

SEQ ID NO: 414083 - DNA, 186 bp, Homo sapiens
ttttattcctcgcagacatattggtggtcagccaatcaggtgctggtattgaggggaaaaggcgcaaatgcatctttccctcttgtttctctcacrcttgtgaaaggagaatatccctaagtagaagtaaaacccaccctattgaggtagtgtatgaacttgcaaagccaaatacacatcagacac

SEQ ID NO: 414084 - DNA, 577 bp, Homo sapiens
tactaaatgtctttagaatttagtttttwaaaaataaaaatgtatattttataaacttttctttctttgggaggctgaggggagggtaataataaaagggaatataccaagtttctaatagtgtttatttctagatggaaaaggtagtgaaacatttaaattttctctctttgtatatcagtttttctacaagaaccataaattatataatatttaatttttacttttaactctttaaaggggttgataatatgttatactacaaagaggtcaagaagaatgcctgagaacaggctacctgcaaatataatgattgggagtactgggataagagttaagagaaaaatgagtattgagtccagtaagatactacagagcaaatgaaagggaagcatcaggcgcaggttactgcagatgctgacaactacagatccagacagctgtactgcaggaattctcaatcttggcactactgacattttgggttggacaattctttactgtgaggagtgtcttgttcgttgaaggatgcttggcagcatccctggcctttacccattagatgccagttagcctc

SEQ ID NO: 414085 - DNA, 577 bp, Homo sapiens
tactaaatgtctttagaatttagtttttaaaaaataaaaatgtatattttataaacttttctttctttgggaggctgaggggagggtaataataaaagggaatataccaagtttctaatagtgtttatttctagatggaaaaggtagtgaaacatttaaattttctctctttgtatatcagtttttctacaagaaccataaattatataatatttaatttttacttttaactctttaaaggggttgataatatgttatactacaaagaggtcaagaagaatgcctgagaacaggctacctgcaaatataatgattgggartactgggataagagttaagagaaaaatgagtattgagtccagtaagatactacagagcaaatgaaagggaagcatcaggcgcaggttactgcagatgctgacaactacagatccagacagctgtactgcaggaattctcaatcttggcactactgacattttgggttggacaattctttactgtgaggagtgtcttgttcgttgaaggatgcttggcagcatccctggcctttacccattagatgccagttagcctc

SEQ ID NO: 414086 - DNA, 550 bp, Homo sapiens
aatgacagccagtaagttgtaaatcattctgtgtgccagtattttrcaagcattgacttaattaacctttataatcccatgagaccgatactacaggttgtgtatcacttatccaaaatgcttgggaccagaagcgttttggatttggggctttttcaaattttagaatatttgcattgctcatcagttcagcatccctaatctgaaaatccaaaatccaaaaattggttcaatgagcatttcctttgagcatcatgtcagcattcaaagtttcaaacttcggagtatttgagatttcagatttttggattagggatattcaatctgtatcattattgttaccgtttggaaacaaaatgaaataacttgctagtgccaaatagttaataaggggtaatgtcagtatttgacactaggcagcatgttctactgcctttctaaatacccactctcatttatccattaaagactctgtccccaaattcccaagtaccttcctaatctggttaaccaggttggaccatatctgacatgggatattttaccagta

SEQ ID NO: 414087 - DNA, 550 bp, Homo sapiens
aatgacagccagtaagttgtaaatcattctgtgtgccagtattttgcaagcattgacttaattaacctttataatcccatgagaccgatactacaggttgtgtatcacttatccaaaatgcttgggaccagaagcgttttggatttggggctttttcaaattttagaatatttgcattgctcatcagttcagcatccctaatctgaaaatccaaaatccaaaaattggttcaatgagcatttcctttgagcatcatgtcagcattcaaagtttcaaacttcggagtatttgagatttcagatttttggattagggatattcaatctgtatcattattgttacmgtttggaaacaaaatgaaataacttgctagtgccaaatagttaataaggggtaatgtcagtatttgacactaggcagcatgttctactgcctttctaaatacccactctcatttatccattaaagactctgtccccaaattcccaagtaccttcctaatctggttaaccaggttggaccatatctgacatgggatattttaccagta

SEQ ID NO: 414088 - DNA, 565 bp, Homo sapiens
acatgtgtgagcaccagggccactgcttttactgcactacccacaatgagtttcaaatggaaaagtaaaggataaagcaattcaaaatttagaagaggaagaagagagaaactaagttcaatagcctttaatcttgtcagactgagtacttytacctacccctagtatcatatgccccatctgtcctgaaactaaatcctaacctctttagcaggctgagaaagagggaaaaaagaaccttttacaagatatgataatagatctatgtcctttcaagaataacactgattcagtgaacagtctcagtgaaagtactcagtcaaaacccattgagcaagctcatacagatgagatatttgtaggttattgtattgtcttaatgattctagtatcataacacagaggttatcaaaatgtcattcaaataagcctgataaaatacagtttatttcccataagcaaagtcaccttactcaaatcactgtgactgtatgacattgctatgggagctctaaaaacaaactattgtgtaatgagtgagcagtccttttacttggtagcagag

SEQ ID NO: 414089 - DNA, 565 bp, Homo sapiens
acatgtgtgagcaccagggccactgcttttactgcactacccacaatgagtttcaaatggaaaagtaaaggataaagcaattcaaaatttagaagaggaagaagagagaaactaagttcaatagcctttaatcttgtcagactgagtacttctacctacccctagtatcawatgccccatctgtcctgaaactaaatcctaacctctttagcaggctgagaaagagggaaaaaagaaccttttacaagatatgataatagatctatgtcctttcaagaataacactgattcagtgaacagtctcagtgaaagtactcagtcaaaacccattgagcaagctcatacagatgagatatttgtaggttattgtattgtcttaatgattctagtatcataacacagaggttatcaaaatgtcattcaaataagcctgataaaatacagtttatttcccataagcaaagtcaccttactcaaatcactgtgactgtatgacattgctatgggagctctaaaaacaaactattgtgtaatgagtgagcagtccttttacttggtagcagag

SEQ ID NO: 414090 - DNA, 565 bp, Homo sapiens
acatgtgtgagcaccagggccactgcttttactgcactacccacaatgagtttcaaatggaaaagtaaaggataaagcaattcaaaatttagaagaggaagaagagagaaactaagttcaatagcctttaatcttgtcagactgagtacttctacctacccctagtatcatatsccccatctgtcctgaaactaaatcctaacctctttagcaggctgagaaagagggaaaaaagaaccttttacaagatatgataatagatctatgtcctttcaagaataacactgattcagtgaacagtctcagtgaaagtactcagtcaaaacccattgagcaagctcatacagatgagatatttgtaggttattgtattgtcttaatgattctagtatcataacacagaggttatcaaaatgtcattcaaataagcctgataaaatacagtttatttcccataagcaaagtcaccttactcaaatcactgtgactgtatgacattgctatgggagctctaaaaacaaactattgtgtaatgagtgagcagtccttttacttggtagcagag

SEQ ID NO: 414091 - DNA, 565 bp, Homo sapiens
acatgtgtgagcaccagggccactgcttttactgcactacccacaatgagtttcaaatggaaaagtaaaggataaagcaattcaaaatttagaagaggaagaagagagaaactaagttcaatagcctttaatcttgtcagactgagtacttctacctacccctagtatcatatgccccatctgtcctgaaactaaatcctaacctctttagcaggctgagaaagagggaaaaaagaaccttttacaagatatgataatagatctatgtcctttcaagaataacactgattcagtgaacagtctcagtgaaagtactcagtcaaaacccattgagcaagctcatacagatgagatatttgtaggttattgtattgtcttaatgattctagtatcataacacagaggttatcaaaatgtcattyaaataagcctgataaaatacagtttatttcccataagcaaagtcaccttactcaaatcactgtgactgtatgacattgctatgggagctctaaaaacaaactattgtgtaatgagtgagcagtccttttacttggtagcagag

SEQ ID NO: 414092 - DNA, 444 bp, Homo sapiens
tgagaaagtagttgtgtaactttgaaaaagtctaggggcaaaggttatagtagtccattagagcttaaaatttccttgaaatctcttatctcagttccatcaataaattcgtcttgtgaccttgggcaaaccataacttctgtgtgtcagcgcccttatctatgaaatgcagataacagcagtacctacaamaacacagagtggttgtgaggaataagtgatctcattagaatcataccttggcacagtggacacttcaatatcaatcataggtagttgcagtggaatatattttattactattcatgttttctcacagaaaaagaaaggaccctagtgtaactactaagaataaggatcaaaggtgaagtagccttaagaagggaataaacatttgaaacagggatgcagggggatggagtagaagagtaaggttggcaattt

SEQ ID NO: 414093 - DNA, 444 bp, Homo sapiens
tgagaaagtagttgtgtaactttgaaaaagtctaggggcaaaggttatagtagtccattagagcttaaaatttccttgaaatctcttatctcagttccatcaataaattcgtcttgtgaccttgggcaaaccataacttctgtgtgtcagcgcccttatctatgaaatgcagataacagcagtacctacaacaacacagagtggttgtgaggaataagtgatctcattagaatcataccttggcacagtggacacttcaatatcaatcataggtagttgcartggaatatattttattactattcatgttttctcacagaaaaagaaaggaccctagtgtaactactaagaataaggatcaaaggtgaagtagccttaagaagggaataaacatttgaaacagggatgcagggggatggagtagaagagtaaggttggcaattt

SEQ ID NO: 414094 - DNA, 587 bp, Homo sapiens
atttccttgaaatctcttatctcagttccatcaataaattcgtcttgtgaccttgggcaaaccataacttctgtgtgtcagcgcccttatctatgaaatgcagataacagcagtacctacaacaacacagagtggttgtgaggaataagtgatctcattagaatcataccttggcacagtggacacttcaatatcaatcataggtagttgcagtggaatatattttattactattcatgttttctcacagaaaaagaaaggaccctagtgtaactactaagaataaggrtcaaaggtgaagtagccttaagaagggaataaacatttgaaacagggatgcagggggatggagtagaagagtaaggttggcaatttattgacactaaagggtactggcctcaaaataaataaaaaggaatgttgaaagcagtgaggctctgcctgagtttggacattaatattaatttctactcacatttagtagataatatttacttccatagcaaaatgtcagatggcctataattacaagacaaaatacagcagccttgttctaataacctcaaagtgacttattactacaattg

SEQ ID NO: 414095 - DNA, 586 bp, Homo sapiens
ctttgttctcgttaaaacaaaatataatatttacaatttaaggtgttactctatgaaaataatgaaacaagagtaactagagtcagtaatacaacactgtacattaacctaataagcaggttaaaataacccatgtctttcttatctttgaggtctcactgatgaaagccatatattccgtcactaytcatgaatgttaaatttcaagcctaacaataaaacattcatcaaatatttgttcataaggttttgaagaaagtcacaataatatctgtttataatagctaatgtcaggtttcttcaggtctttgggattgggctcctacagtatttataatagaaggatctgagaagtcctgctttaaagataattgcttatctttgctttactcagcatctcaactttgtatccgtttcttattaatctctagattttctgagactaaaagtagtagtatctgacactttataagtgatcattaaatttttatcaaataaatgaatgaggaatgcaaagataagatgtagtctttgcccttaaaaagtttagtatggtagaagaagtaagatatgcaaacaaacaatg

SEQ ID NO: 414096 - DNA, 586 bp, Homo sapiens
ctttgttctcgttaaaacaaaatataatatttacaatttaaggtgttactctatgaaaataatgaaacaagagtaactagagtcagtaatacaacactgtacattaacctaataagcaggttaaaataacccatgtctttcttatctttgaggtctcactgatgaaagccatatattccgtcactattcatgaatgttaaatttcaagcctaacaataaaacattcatcaaatatttgttcataaggttttgaagaaagtcacaataatatctgtttataatagctaatgtcaggtttcttcaggtctttgggattgggctcctacagtatttataatagaaggatctgagaagtcctgctttaaagataattgcttatctttgctttactcagcatctcaactttgtatccrtttcttattaatctctagattttctgagactaaaagtagtagtatctgacactttataagtgatcattaaatttttatcaaataaatgaatgaggaatgcaaagataagatgtagtctttgcccttaaaaagtttagtatggtagaagaagtaagatatgcaaacaaacaatg

SEQ ID NO: 414097 - DNA, 573 bp, Homo sapiens
gcaagtgtttccaggactactttgaagaagcttcccaaaatgatttgaaaggtagatgaaattaagaaattcttatgttcatgttgtcctctccataaaaagaaaattaagaaattctagtaaataaaggatgacatagggcaatatgccagattacatcaacatttaaaggtggcccataggaaaggatcctaataaagcagcttcaacacaaccaggtaaatcaggaggcaacagcacaaaaagtgaggaagagtttcaaggaaaaatrgtcaataatgccaaataagttaaagaaaaatacaatcagaatgccttttactgacctttaataaaagtagttttgcattaaggggagaagccaaatggtgagaaattaagtgctggatgggaaatttaaaagtagaagtttattttttctttatatctggctgtaaaatgaagaaaagatatcacaccaaaatgttttgccaagggagggcgctattctttgttttactttttcatcagcttaatctggtgaagatttaatctgtgaagaacaatccagatcaggcgtccccaaccgcccag

SEQ ID NO: 414098 - DNA, 547 bp, Homo sapiens
agcttcccaaaatgatttgaaaggtagatgaaattaagaaattcttatgttcatgttgtcctctccataaaaagaaaattaagaaattctagtaaataaaggatgacatagggcaatatgccagattacatcaacatttaaaggtggcccataggaaaggatcctaataaagcagcttcaacacaaccaggtaaatcaggaggcaacagcacaaaaagtgaggaagagtttcaaggaaaaatagtcaataatgccaaataagttaaagaaaaatacaatcagaatgccttttactgacctttaataaaagtagttttgcattaaggggagaagccaaatggtgagaaattaagtgctggatgggaaatttaaaagtagaagtttattttttctttatatctggctgtaaaatgaagaaaagatatcacaccaaaatgttttgccaagggagggcgctattctttgttttactttttcatmagcttaatctggtgaagatttaatctgtgaagaacaatccagatcaggcgtccccaaccgcccagtc

SEQ ID NO: 414099 - DNA, 589 bp, Homo sapiens
tgttttctgattttcttcatcctctgatcctctaccctgaactgagcctcagtgtctgttgttctcttatttgtgtccacgtgttctcattattttgctcccacttataagtgacaacatacagttttttattttctgttcctgcactagttttctaaaaataacggtctctagttccatcgacgttgctgcaaagtacatgatgttgttctttcttatagttgcatcctatttcatggtgtttacataccacattttccttatccagtctaccattgaagacatacaggattatttcttgtttttgctattgtgaatcgtgctgtaataaacatacgcgtgcatgtgtgttcatggtagaaaaacttacattcactgggtatrttcccaattgcgggattgggaatggtaattctgttttcaggtttttgaaaaaatgccaagctgcttttctcaatggttaaataaatttatactttcaccagcagcatataagcattcaatttctccacaacctcacaagcatctgtttttgtttttgtttttactttttattctaattgtttttatttgaattatttcttttttt

SEQ ID NO: 414100 - DNA, 274 bp, Homo sapiens
tctgtgactggcagaagtgattcaagktaggtcatgaaaggggacaccatttctccgtggtcctcctgggatgcttgctctttgaacccagccaccatgctgtgaggaagcccagatcacagggagaggccacattttgatgttccaatcaacagtcccagcgcaggtttcagatgacagccaacatcagttgccagacatgggactcaagaaggctttgcgaagactccagctccagccactgcaacagcatgagagacccctactgaccatc

SEQ ID NO: 414101 - DNA, 623 bp, Homo sapiens
tgatgaaggtttctccctttattctaaacagtgtgtaccttgtagtactatctgccatcaaatttctaaatgctttctgcttttttaatactctttaaaaattagcaaatacagttatactttcagttaagattatattttttcccattggattttttctttatcttttaaattcttaacactgactatgtgaagtaatacgctgtataccctgaactcagctatgagrtatttaacatatcatgggatatataaataaattaacttccatcaattcctagactacttacactgaaattatggaccaaagctttctaattcaattcccaagtggtattaaaaccaaactgtattgtatttcaagaaactttatccatggttacaaaagtttaaaaacttatcaaacacgtgggaaaactgcaatttaaagataaatgattaggtttcctatttttttaagaccaactacaatgtgaaccataactacactaactgggtgttctctatcaaagtcaacactgcaaacaacaaagggtatcatctggccaagaaaaagataatttctgattccaattcaacacagctcctgtgtaacaggtgtttctctagttctcagctccaca

SEQ ID NO: 414102 - DNA, 623 bp, Homo sapiens
tgatgaaggtttctccctttattctaaacagtgtgtaccttgtagtactatctgccatcaaatttctaaatgctttctgcttttttaatactctttaaaaattagcaaatacagttatactttcagttaagattatattttttcccattggattttttctttatcttttaaattcttaacactgactatgtgaagtaatacgctgtataccctgaactcagctatgagatatttaacatatcatgggatatataaataaattaacttccatcaattcctagactacttacactgaaattatggaccaaagctttctaattcaattcccaagtggtattaaaaccaaactgtattgtatttcaagaaactttatccatggttacaaaagtttaaaaacttatcaaacacgtgggaaaactgcaatttaaagataaatgattaggtttccyatttttttaagaccaactacaatgtgaaccataactacactaactgggtgttctctatcaaagtcaacactgcaaacaacaaagggtatcatctggccaagaaaaagataatttctgattccaattcaacacagctcctgtgtaacaggtgtttctctagttctcagctccaca

SEQ ID NO: 414103 - DNA, 623 bp, Homo sapiens
ttaaccaaccctcaaaccttaataaacctaagagaatttattttaaaaaaatttttttgagttggagyctccctgtgtcacccaggctggagtgcagtggcatgatctcagctcactgtaacctctgccttccgggttcaagcgattctcctgcctcagcctcctgagtagctgggattacaggcgtgtgccaccacactggctgatttgtgtatttttagtagagatagagtttcaccatgttggccaggctggtcttgaactcctgacctcaggtgatccacctttgtcagcctcccaaagcctaagagaacttatattacagagaccctagaaacaaaaaaaaagtgacaaaacctttaagcacatctcaggccttacataatatctgatcattcattctagagagaaactctacaaaagcaaagaatgtggtaaagctgttaactagtcttgaacccttattatacataagagaattaatactgaagagaaaccctgcaataagcaatatggtaatgtctttaaaaagtcctcaaacctgaataaatgtaagataattgatattggagagaaacgctgcaattgtagaaaaaaatgtggcaaaccctttaactgattct

SEQ ID NO: 414104 - DNA, 623 bp, Homo sapiens
ttaaccaaccctcaaaccttaataaacctaagagaatttattttaaaaaaatttttttgagttggagcctccctgtgtcacccaggctggagtgcagtgkcatgatctcagctcactgtaacctctgccttccgggttcaagcgattctcctgcctcagcctcctgagtagctgggattacaggcgtgtgccaccacactggctgatttgtgtatttttagtagagatagagtttcaccatgttggccaggctggtcttgaactcctgacctcaggtgatccacctttgtcagcctcccaaagcctaagagaacttatattacagagaccctagaaacaaaaaaaaagtgacaaaacctttaagcacatctcaggccttacataatatctgatcattcattctagagagaaactctacaaaagcaaagaatgtggtaaagctgttaactagtcttgaacccttattatacataagagaattaatactgaagagaaaccctgcaataagcaatatggtaatgtctttaaaaagtcctcaaacctgaataaatgtaagataattgatattggagagaaacgctgcaattgtagaaaaaaatgtggcaaaccctttaactgattct

SEQ ID NO: 414105 - DNA, 623 bp, Homo sapiens
ttaaccaaccctcaaaccttaataaacctaagagaatttattttaaaaaaatttttttgagttggagcctccctgtgtcacccaggctggagtgcagtggcatgatctcagctcactgtaacctctgccttccgggttcaagcgattctcctgcctcagcctcctgagtagctgggattacaggcgtgtgccaccacactggctgatttgtgtatttttagtagagatagagtttcaccatgttggccaggctggtcttgaactcctgacctcaggtgatccacctttgtcagcctcccaaagcctaagagaacttatattacagagaccctagaaacawaaaaaaagtgacaaaacctttaagcacatctcaggccttacataatatctgatcattcattctagagagaaactctacaaaagcaaagaatgtggtaaagctgttaactagtcttgaacccttattatacataagagaattaatactgaagagaaaccctgcaataagcaatatggtaatgtctttaaaaagtcctcaaacctgaataaatgtaagataattgatattggagagaaacgctgcaattgtagaaaaaaatgtggcaaaccctttaactgattct

SEQ ID NO: 414106 - DNA, 623 bp, Homo sapiens
ttaaccaaccctcaaaccttaataaacctaagagaatttattttaaaaaaatttttttgagttggagcctccctgtgtcacccaggctggagtgcagtggcatgatctcagctcactgtaacctctgccttccgggttcaagcgattctcctgcctcagcctcctgagtagctgggattacaggcgtgtgccaccacactggctgatttgtgtatttttagtagagatagagtttcaccatgttggccaggctggtcttgaactcctgacctcaggtgatccacctttgtcagcctcccaaagcctaagagaacttatattacagagaccctagaaacaaaaaaaaagtgacaaaacctttaagcacatctcaggccttacatawtatctgatcattcattctagagagaaactctacaaaagcaaagaatgtggtaaagctgttaactagtcttgaacccttattatacataagagaattaatactgaagagaaaccctgcaataagcaatatggtaatgtctttaaaaagtcctcaaacctgaataaatgtaagataattgatattggagagaaacgctgcaattgtagaaaaaaatgtggcaaaccctttaactgattct

SEQ ID NO: 414107 - DNA, 550 bp, Homo sapiens
aagctgttaactagtcttgaacccttattatacataagagaattaatactgaagagaaaccctgcaataagcaatatggtaatgtctttaaaaagtcctcaaacctgaataaatgtaagataattgatattggagagaaacgctgcaattgtagaaaaaaatgtggcaaaccctttaactgrttctccatgcttactcactgaaaaattttatactggagagaaattctgcttacataaaactgtgacagagcatttaagcacacctcaaacttttctaaaaaagagaaatcatactggtgagagactctagaaatgtgttaaaggtggcaaggactttaaatggtagtcacacattatggtaggtaagatagtttatactgaagaagactcctacaaatatgaagaatgtggcaaaacttttaacaaattctcacaccttatggtacaggaaagcatttatactagagaaaaattgtacaaatacaaagaatgtgaaaagccattaatatcaggtcacatcttactcaatatcagaaagtttatactta

SEQ ID NO: 414108 - DNA, 550 bp, Homo sapiens
aagctgttaactagtcttgaacccttattatacataagagaattaatactgaagagaaaccctgcaataagcaatatggtaatgtctttaaaaagtcctcaaacctgaataaatgtaagataattgatattggagagaaacgctgcaattgtagaaaaaaatgtggcaaaccctttaactgattctccatgcttaytcactgaaaaattttatactggagagaaattctgcttacataaaactgtgacagagcatttaagcacacctcaaacttttctaaaaaagagaaatcatactggtgagagactctagaaatgtgttaaaggtggcaaggactttaaatggtagtcacacattatggtaggtaagatagtttatactgaagaagactcctacaaatatgaagaatgtggcaaaacttttaacaaattctcacaccttatggtacaggaaagcatttatactagagaaaaattgtacaaatacaaagaatgtgaaaagccattaatatcaggtcacatcttactcaatatcagaaagtttatactta

SEQ ID NO: 414109 - DNA, 550 bp, Homo sapiens
aagctgttaactagtcttgaacccttattatacataagagaattaatactgaagagaaaccctgcaataagcaatatggtaatgtctttaaaaagtcctcaaacctgaataaatgtaagataattgatattggagagaaacgctgcaattgtagaaaaaaatgtggcaaaccctttaactgattctccatgcttactcactgaaaaattttatactggagagaaattctgcttacataaaactgtgacagagcatttaagcacacctcaaacttttctaaaaaagagaaatcatactggtgagagactctagaaatgtgttaaaggtggcaaggactttaaatggtagtcacacrttatggtaggtaagatagtttatactgaagaagactcctacaaatatgaagaatgtggcaaaacttttaacaaattctcacaccttatggtacaggaaagcatttatactagagaaaaattgtacaaatacaaagaatgtgaaaagccattaatatcaggtcacatcttactcaatatcagaaagtttatactta

SEQ ID NO: 414110 - DNA, 550 bp, Homo sapiens
aagctgttaactagtcttgaacccttattatacataagagaattaatactgaagagaaaccctgcaataagcaatatggtaatgtctttaaaaagtcctcaaacctgaataaatgtaagataattgatattggagagaaacgctgcaattgtagaaaaaaatgtggcaaaccctttaactgattctccatgcttactcactgaaaaattttatactggagagaaattctgcttacataaaactgtgacagagcatttaagcacacctcaaacttttctaaaaaagagaaatcatactggtgagagactctagaaatgtgttaaaggtggcaaggactttaaatggtagtcacacattatggtaggtaagatagtttatactgaagaagactcctacaaatatgaagaatgtggcaaaacttttaacaaattctcacaccttayggtacaggaaagcatttatactagagaaaaattgtacaaatacaaagaatgtgaaaagccattaatatcaggtcacatcttactcaatatcagaaagtttatactta

SEQ ID NO: 414111 - DNA, 458 bp, Homo sapiens
ggatgagaaataaggaaagtaaccaagaccatctcccaccttgaggctcatgaggtgaaacaaaagctcccgcttgagagagttatatgccacaggggaaatgaccctcaaagagacaagtttcattcagagtaaggaggccgaaaaaatgggtaccaaaaagtagttgagaactccgtctgctttttctggttctgtacataaggagcttggaagttgccactccattctaagaagtaaaaaactgaacagatctcatctttaagagcaggatctgatctttaagagcagtaaggacacaaggcaatgatccagcaattgctcttcttgatgtttacccagctaagttaaaaacttagatccacagaaagtcttgcacacaggtatttgcagcagctttgtttataaytgccaagatatggaagcaatcacaatgtccttcagtagtcgaatggata

SEQ ID NO: 414112 - DNA, 489 bp, Homo sapiens
  misc_feature (1)...(489): n = A,T,C or G
nnnnnnnnnnnnnnataccatgccacacctaccagagtggctgaaatttaaaaagacagccagaacaagtgttggcaaagatgtggaaaaatctttggtgatgatggaaaagagatttattttgctggtagaaacygctaatggaaaaggttaagcatagagttacaattttttttggggggggggcacagggcctggctgtgtcacctaggctggagcacagtggcacgatctcagctcacagcaacctctgccacccacactcaaacaatcctcccaccagagccttctacctcaccgttacccttgcaatggaaagaaaaagccttatcagatatgccttatcagatacataatttgcaaatattttctagagtagctatttctagagtggctgggactataggtgccaccatgcccagctaatttttgtattttttttagagacactgtctcaccttattgcacaggctggtctgggaatcctga

SEQ ID NO: 414113 - DNA, 605 bp, Homo sapiens
ttttactattttggggatatgacttgtgatagatgcagtatattagtaaaataattcatatatagttactaaatgattacacatatattagtggttcgtgcccaaatattattttactggtactggactgtgattcttaaaaygtggaaattattgtgccttaatactaatcttacacttgttcccacatagcagtagaagtcaactgtgcttagcatggttccatacgttggtagtaattatcagttatttggtttttgtattaaagataaatggattccttcagtagattaagatgtaggaaaagtgttataacaatttaacaaaatatacaatattttctttatatgttcatacatattagtcagttttagagcaatattctccaccatatatgaccttctgacttgaagccaagaacactagcagaatgtctgcattgaaaacataagtaaacattctttcatctcagggaaagtatctgaatgcctatgcacttttccattatttatttattggtgtcatcagctaaactgttctcagcattaaattgatttatatggttgaaatagtaatgcctgcatctagaaaaataacatgataat

SEQ ID NO: 414114 - DNA, 583 bp, Homo sapiens
gtgcccaaatattattttactggtactggactgtgattcttaaaatgtggaaattattgtgccttaatactaatcttacacttgttcccacatagcagtagaagtcaactgtgcttagcatggttccatacgttggtagtaattatcagttatttggtttttgtattaaagataaatggattccttcagtagattaagatgtaggaaaagtgttataacaatttaacaaaatatacaatattttctttatatgttcatacatattagtcagttttagagcaatattctccaccatatatgaccttctgacttgaagccaagaacactagcagaatgtctgcattgaaaacataagtaaacattctttcatctcagggaaagtatctgaatgcctatgcacttttccattatttayttattggtgtcatcagctaaactgttctcagcattaaattgatttatatggttgaaatagtaatgcctgcatctagaaaaataacatgataatatcattgcaaacttattcagtgaaattttacaaagggttctaatgtgaaaacatcttgattaaacttcaaaaaag

SEQ ID NO: 414115 - DNA, 566 bp, Homo sapiens
taaaactcgatcatcgtgtctaacatgttgccttattatttgggcttaattagagtgatgagacggggctgagagcagcaattccagcagtgcagtgatgcaacatctgcggagaagcagggctcagccagmtgagcaattatgttgaacgacacataaagccaggatctttgcatctgacagctgtctggccagccccgcctccattcaggcttgtgaaagcctgacctataagctcccttctccaccttccaaagtagtgggaactgatcagacccttcaaagaagagcatagcaaagccaccactgtggggaacatcctgctgtcatggtttttagtcactgggtgaaaggaagtgggagcatttggtagcaaaagaaaatgaattctcctttgggtcttggatttatggtcaggtgtggtcatgatgctgctatggatcatgccagaaaaactcagtcctctttgaaatgccgccactcatctcttcagttacaaataacctgaaattgggcatttctgcctctgctcccatggagaggcaggatgcatggggctaacattc

SEQ ID NO: 414116 - DNA, 559 bp, Homo sapiens
tttatttctggaataaattttagtcaagttattagaacttattcagaagtgtccacaggaagagcttttcctcactcaccatctatgctgatctgcacgtggtcagaatgaagcaaagaactccaagcaatcttatcttctaaccacggtatgcacatgtttgtactcatcctgaacttctttgggcctgggacactcaacgtcatctcatacatcaagttttattaacctcaagagggaactcaagggaaaaaggaggagggccagggtatgtattcaaataggatgcttgcacttcttttaggagatatgatgaggcctgcctaggagtcacgttaatcagtctcatctcaacttctaatattagctgaaaatctgtgtgttcacatatgttgataaaacycagtgaattatctcaaatccagcatctcagggtgtctgtttctgctgcatagacacgcatattcttgaaagtgtcagtagcactgaaggtgccactgaggaaatagcacttcatccttctgcatgatcctgcaagatagaaagaatcatggattat

SEQ ID NO: 414117 - DNA, 538 bp, Homo sapiens
ggatgttgagtgttatctgtgcagactgcaacaaaacagccataccaacttcttttctagttcaagggattgctctacaaattacctaatttagcatgagtttctctgctctggtgttytgaaacatgaagagagttttcgaagtaagagaaccaatttgaaaaaggctctagcagttggtaatgggccaggagacaatggggctttcccagttgtgaaatgaaaacaacagtgaacaagggcgtggtcacatgtaagcagggctgtacacctgggcctcaatggccagaaagagagtccctaggcagggtttgggtgagcagatggtcccagggcactcagagatctgaaggggttcagaaaggccacttggcctagccttccataaaggaagcagcttcagtttaaaattttgacattttctatgataaaaaagctaatcattaagtcactgtgtctattcacatgtattagaggcattaattcattaagagcaaacatttaaaatacatcatattttgttagccttattgtggta

SEQ ID NO: 414118 - DNA, 538 bp, Homo sapiens
ggatgttgagtgttatctgtgcagactgcaacaaaacagccataccaacttcttttctagttcaagggattgctctacaaattacctaatttagcatgagtttctctgctctggtgttctgaaacatgaagagagttttcgaagtaagagaaccaatttgaaaaaggctctagcagttggtaatgggccaggagacaatggggctttcccagttgtgaaatgaaaacaacagtgaacaagggcgtggtcacatgtaagcagggctgtacacctgggcctcaatggccagaaagagagtccctrggcagggtttgggtgagcagatggtcccagggcactcagagatctgaaggggttcagaaaggccacttggcctagccttccataaaggaagcagcttcagtttaaaattttgacattttctatgataaaaaagctaatcattaagtcactgtgtctattcacatgtattagaggcattaattcattaagagcaaacatttaaaatacatcatattttgttagccttattgtggta

SEQ ID NO: 414119 - DNA, 568 bp, Homo sapiens
attttataagcaataaatccttaatctcttaaggaggcagcatgctatgttggaataggaatcagagagcagtttgtcctctaactagctctgtaatactgggtaaatgtggcaggcactcttgattgtctacccaaaagccattcttctaggctaatagctcccctcattagtcaactccccacagcttgacaaattctcaccccagggatggaatcatgattggtccaagctagtcaaaggacacccctgtcctttgtcaatgaatgggttagtggtgatcatgtgatccagtctggccaatgagatgagaggggaagacagctggggcctttcttcaaaaaacttctttgcactgtaaaaagatcccagcactttggcaggctgaggtgggatcacttgagctcaggagttccagactatactgggcaacatggcgaaacctcatctctacaaaaaaatacaaaaatttgccaggcatggcggcatgcacctgtagtcccagctactcatgaggctgaagtaggaggattgcttgrgcccaggaggtggaggctacggtgagctg

SEQ ID NO: 414120 - DNA, 583 bp, Homo sapiens
ttaataaacttgaattttaataataatgaactgaaattttagtaattaataatcactgtgaggaaataatttaaaaaaaattcatttaatgtttgaaaggcaaacattaagttagagaagttagagacaatatattgctctggagagatttatggatttatctcctgtggcacctgtgattatattctaggatggtgaaggaaaagtagaaatgattctcctccccagagaagatttgtttacattccagagtaaaggtttttctccctctctggagggaagaatgagcagatatgtcagcagtctatagaagctctgagcttcataatttgagggttcctatcctgtgtatatgtgtgcatgtggtgcatgtgcaaggaaacatcaggcccttattgagttgccctgtggggacaaggttaagatgctcartgaataataaatggtcttttctctgatccagagatcttgtgtttcctgtcaaaaaaaaatatatatatatatgtacatacacacgtgttcacacacacattacccaaataggacatcaccaacagttcttagatttgaaagaataaccctc

SEQ ID NO: 414121 - DNA, 545 bp, Homo sapiens
cagtgaataataaatggtcttttctctgatccagagatcttgtgtttcctgtcaaaaaaaaatatatatatatatgtacatacacacgtgttcacacacacattacccaaataggacatcaccaacagttcttagatttgaaagaataaccctcaaagataaagtgtctcatgaattgaaataaacatattgcttattccctgctatgatggttaattttatgtctgggcgatggggtacccaagatatttgatcagcacccttctagttctgtctgtgagggtgtttgggggtgraattaacatttatttgaattggtagacagagtaaagcagattgccctctctaatgtgggcgggcctcctccaattagttgaatctctgaactgaacaaaactgctgaccctcctttaagtagaagagagttcttcctgcttgactgccttcaaactgagacactggcttttatcttgcctttggacttaaactgaaacatcaggttttcctggatcttaagcctgctggcctttagactggaacaaaac

SEQ ID NO: 414122 - DNA, 588 bp, Homo sapiens
tcccaagatacactacagacacaaggcaggatttggcagccaaagggtgtagtgggggagtggtagaaacacggagaaggcttaacccctcaatccctggctgcctggccttaatttagaggctgaccaacagaagctgaaatttaccctattgaccacactgtaagcctagtatcgagtaatgagcagcaacagtctatgggggagaggcaagaacgtggaaagggaccctcttctgtggtgcagtcatgcaaagactgctgaaagctaagggtggagcaaaaacattgagaaaaacccactagcrgccaaggccccacactaagcacaagatatcggtggcccattgcagaaggtatttgaagcctatggtaaactgagaataacaattgtcacagtaagacccaaacaaactcaaccagtcacttgattgatttaattctcacattaaaagtctgacaggatgaaaagtggacacttttagaaataaatactatttactttcgtctctattgtccttttacaaacaacatccagcattcaatcaacaattacaagacccataaaacaacaacaacaaaaagactc

SEQ ID NO: 414123 - DNA, 602 bp, Homo sapiens
aatatcagtgaaaataaaagacatttcttaattttaatcaacttagaagataattgtctaaagcatgcataacacaatttttcttaaaggaccagatartaaataatttatacttgagggctatatagtctctgttgtaactactcttctttgctgctatagcgtgaaaacaaagacaatatgtaaacaagtaggtgagctgtaaaccaataaaatgtatttatagaaacaggtgactggctcacataatttgctaacatcttttctaaagcaaaatttgtaacaatgtatcatatggttataacctgtataaaatatataaccaaaatagtatgaaagatggaaaggaggaaaagaatgtacgctgttctaagtttctaatactgtacaagaaattgtataaaattatttaaaggtaaactgtgataagttattcataaaaatgtatattgtaaactgcacaataactactagaaaaattaaaagaggtatagtttgtaagtcaataatgtaaataaaatggaatcataaaaatctttatccaaaagaaggcaggaaaagagagaaaaatgaacaaagaacagataagacaaataactgac

SEQ ID NO: 414124 - DNA, 575 bp, Homo sapiens
agaatcttaatccactaaggactcctctagcaccatccatcttctaggtcatactgcctgagcatcagggcagcttgcactgcagtctggacctgttacaggatcctctcttgttctgggcaacacataccacacttgaaaatggcagcttcccaggtcattcaataaatgatccagtatccaaataagactaccaagtacagtgcctctttcttagtggtaggaggtgtgggtgcaataatttgtcatttatattaaaggggaattttcccacatgttccagttgattggattttttttttttgagatggaatatctctcttttgcccaggctgatttcggcccactgcaacctctgcctcacaggctcaagcgattctcctgcctcagcctcccaagtagctgggactacaggcacccaccaccacacccagctmatttttgtatttttcgtagaggcggggttttaccatgttgcccagagtggtctcaaactcctgagctcaggcaatccacccgccacgacctcccaaagtgctagaattacaggcatgagccaccgtgcccggcccagt

SEQ ID NO: 414125 - DNA, 606 bp, Homo sapiens
aagctgcatttgtaggtataaaattattacctggggtaaagtgccatattattgactgatttgatctaatgaatattacaagtagactgaagtgtgagtacttagttcgggctgctatcaccaaacaccaaagactgggtggcttgtatgcaacatatttatttctcacagttctagaggccgaaagtctgagatcaggggataccagtctgagatcaaggtctagtgagggccctctttcttgttgcagactgtcaacttttcattgtatcctcacatggcagaaagatgactctctgtggcctactttataagggcactaatcccattcatgagggctctatcctcatgacctaattaccacccaaagtccccacctcctaatactattaccctggggggttaggayttcaacatatgtatttgcaggaggacccaaacattcagtccacaactatctccctcctgctgttctccctaatctacattagaatacacaattctaatgtattatgtgtgtatgaatgagggcattggatattagggatgccttacttttcttttttaaattgtttaaaattttactttaacttctgggatacatgt

SEQ ID NO: 414126 - DNA, 579 bp, Homo sapiens
atctcattgatttgctgagcatatttctcagatgtaatggttttgacagggttcagaaacctgtagtgcatcagactagcagcagaccagcaaccagtgaccataacctttttttggtgcaagtttggctttaagaagtgctttggagcttcttcttgattcaaccactgagctgatcactgctggttgtataaaatccacttttcatcgcacatcacaatccaaccaagaaatggtgccttgttgttgcatagaataagagaagatgacacttcaatatgacaatttttatcattttcgttcagctcatgaggcacccacttcttgagctttttcacctttccaatttgcttcaaatgctgaacaaccatagagtggtcgataytgagttcttcagcaacttcttgtgtagttgtaagaggatcagctttgatgattgctttctgttggtcattggcaacttccagtggccagccactatgcttctcatcttcaaggctgtcatgtcctttgcaaaacttcttgaaccaccacttcattgtacatttcttagcagctcctgggccaaatgtgttgttg

SEQ ID NO: 414127 - DNA, 579 bp, Homo sapiens
atctcattgatttgctgagcatatttctcagatgtaatggttttgacagggttcagaaacctgtagtgcatcagactagcagcagaccagcaaccagtgaccataacctttttttggtgcaagtttggctttaagaagtgctttggagcttcttcttgattcaaccactgagctgatcactgctggttgtataaaatccacttttcatcgcacatcacaatccaaccaagaaatggtgccttgttgttgcatagaataagagaagatgacacttcaatatgacaatttttatcattttcgttcagctcatgaggcacccacttcttgagctttttcacctttccaatttgcttcaaatgctgaacaaccatagagtggtcgatactgagttcttcagcaacttcttgtgtagttgtaagaggatcagctttgatgattgctttctgttggtcattggcaacttccartggccagccactatgcttctcatcttcaaggctgtcatgtcctttgcaaaacttcttgaaccaccacttcattgtacatttcttagcagctcctgggccaaatgtgttgttg

SEQ ID NO: 414128 - DNA, 586 bp, Homo sapiens
aataaatttgataggcatctacagaattctccaccccaaaacaacagaatatacattcttctcgtagccacatgacacatactctaaaatagatcacatactctaaaactgatcacatgatcagaagtaaaatactcttcagcaagcataaaataattgaaatcataataaataatcttatggatcatagcasaatcgaattagaaatcaagactaagaaattcactcaaaatcctcaagaccatacaattacatggaaattgaacaacctgccactgaatgacttctgggtaaataataaaattatggcagtaattaagaagttctttgaacctaataagaacaaagatatatcagaatctctgggacacagctaaggtagtgttaagaatgaaatttatagcactaaatgcccacatcagtaagttagaaaaatctcaagttaaacctaacatcacaactaaaagaaatagagagccaagagcaaacaaatctcaaagctaccagaagacaagaaatgaccaaaatcagagctgaactgaaggagatcgagatacgaaaaactattcaaaagatcaacaaaccc

SEQ ID NO: 414129 - DNA, 586 bp, Homo sapiens
aataaatttgataggcatctacagaattctccaccccaaaacaacagaatatacattcttctcgtagccacatgacacatactctaaaatagatcacatactctaaaactgatcacatgatcagaagtaaaatactcttcagcaagcataaaataattgaaatcataataaataatcttatggatcatagcagaatcgaattagaaatcaagactaagaaattcactcaaaatcctcaagaccatacaattacatggaaattgaacaacctgccactgaatgacttctgggtaaataataaaattatggcagwaattaagaagttctttgaacctaataagaacaaagatatatcagaatctctgggacacagctaaggtagtgttaagaatgaaatttatagcactaaatgcccacatcagtaagttagaaaaatctcaagttaaacctaacatcacaactaaaagaaatagagagccaagagcaaacaaatctcaaagctaccagaagacaagaaatgaccaaaatcagagctgaactgaaggagatcgagatacgaaaaactattcaaaagatcaacaaaccc

SEQ ID NO: 414130 - DNA, 597 bp, Homo sapiens
atgggtttctaatgaaagtagtaaaaaatttacaaatatctcttaagcttatcaaagagacaacattaaggaaactagttctagtcctgcctgtgatactcccaagctgaatgtctttgtgtaaattatttaaaatgctggatttcatttatagtaaaacaagatagatggactaatctctagattttccaycaaccttttaaatacaaatacttaatcagttataaaaactaaaattgcgagaacttttaaaatgtacagttactgtaaatacagaaatctactttcagtttaagaatccctatctctcagaacacaattctagctttcctaaaagttcacagaatagagcttaccaaacactcacttccttcatctcttccaatttcccctctgttctttacagcccatttacttacaaaggaatttcaggttgcttaaaatcaaacacactgttaataataaaactacatctctaaaataggagagaatgtgagagaggaagagatgggatttgagcaaagagtgagacacagagaataaaaaaagagacttacagaccatgatgttagggtgggggcagtaattacgtgtgca

SEQ ID NO: 414131 - DNA, 569 bp, Homo sapiens
tatatcacccatgaaaactggattatatatagcatatataatatgtacatatatgcatatattataagctattctacttaaaatgtttaataatagttttttttcttttttggtgcctataattgactggtcatttctgctagcttttctacaatgaatgctgaaatacttctgtatatgctgtcaatcagaaaactaccctggagcattagaaaaattcaacaagagacttgatttaatcaatcacattgtcggactttgaaaatatatcaaaggcactgatttttaaaaatcatctttttctcaagaagaaaatggaaaaacaaattatcttcattcagtgagccccaagtttggggtttgagggggcttacagacattgmaaaatcaagtcttgtgttatatttttctcccaggtgactttttttgaggtttatgggcaatctggctggtaagacatgattccctctaagaaaatataggtgctcaaacaggtaacctctcctgctactgtttttatatgtgtgtttaacttcatttaagatttgtttctgctttgagaagcatct

SEQ ID NO: 414132 - DNA, 557 bp, Homo sapiens
tcaaattaacaacctaatgatgcatcttaaagaactagaaaacaaagagcaaaccaaagccaatattagtaggagaaaagaaataataaagatcaaagcagaaataaatgaaattgaaacaaaacaatacaaaatatcaattaaacaaaaaggtggyttattttaaaaaaataaaattgataaacatttagccaaagacataaagatagaagacccaaataaataaaatgagagataaaaaggaggtattacaactgatactgcagttcagagaatcattagagactactatgagcaactacatgccagtaaattggaaaacctagaagaaatagattgaatcctagacacatacaacctaccaagaccaaatcatgaagatttccaaaatctaaatagaccaataacaagtaatgagttcaacaccataataaaaagtatcccagtaaagaaaaatcagagacccaaagccttcaactgctaaatttcacccaaaatttaaagaactaatattaatctaatcctattcaaacaattccaaaaaaataaagaagcaa

SEQ ID NO: 414133 - DNA, 557 bp, Homo sapiens
tcaaattaacaacctaatgatgcatcttaaagaactagaaaacaaagagcaaaccaaagccaatattagtaggagaaaagaaataataaagatcaaagcagaaataaatgaaattgaaacaaaacaatacaaaatatcaattaaacaaaaaggtggtttattttaaaaaaataaaattgataaacatttagccaaagacataaagatagaagacccaaataaataaaatgagagataaaaaggaggtattacaactgatactgcagttcagagaatcattagagactactatgagcaactacatgccagtaaattggaaaacctagaagaaatagattgaatcctagacacatacaacctaccaagaccraatcatgaagatttccaaaatctaaatagaccaataacaagtaatgagttcaacaccataataaaaagtatcccagtaaagaaaaatcagagacccaaagccttcaactgctaaatttcacccaaaatttaaagaactaatattaatctaatcctattcaaacaattccaaaaaaataaagaagcaa

SEQ ID NO: 414134 - DNA, 568 bp, Homo sapiens
ccttcaactgctaaatttcacccaaaatttaaagaactaatattaatctaatcctattcaaacaattccaaaaaaataaagaagcaaatacttccttactcattctgtgaggccagtattaccctgataccaaaatcagacagagacatcaaaataagaaaactacaggccaatgttccacatgaatactgatgcaaaaatcctcaacaaaatactcacaaaccaaattcaacaacacatttaaaagataattcatcatgaccaagagggatttatgccagggatgcaagaatgattcagcaaatgcaaataaatcaatgtgatatatcatttcaaaagaatgaaggacaaaaacatgcaatcatttcaaccgaaggtaaaaagcattagataaaattcaacctcctttcataataaaagccctaaaaatgtggtatagaagtatatatctcaacacaataaaaaccatatatgacagacacacagctagcatcatactgaatacagaaaaactgaaaactttttytcaaagatctggaacaaaccgaaacatccactttcaccacta

SEQ ID NO: 414135 - DNA, 562 bp, Homo sapiens
ttgtctcagggaaatctccctgagagggccaaagcttcttgaaagcaggcatgcgtagttgtaaagaaaacaaaacaaagttctgaggtgtttcactgccatcttcaaatggatcaaagttcggcatgatggactttaggagaagtccctctgttgctggtttttccttagtaaccatcatgcacaccacccccctcatcttccagttgtaccagccagctgtctagcaacttgcttggtttctgcttaaaaggactgtaagtttccctccttttacactcaatgcaagtgtgtckctctttaactgtcttagtctgttcccattgctataacaaaataccatagaatcattaattgataaggaagtccaagagcacagtgccagcagatttggtgtctggcgaaggttgtctcttcttcaagatggtgtctttttgctaaattctcatatggcagaatgttatatccacacattgtggaatggagaaggcaaaaggcactaggggggttccttcaacttctgttataagagcactaatgtattcttgagggcagagcgatc

SEQ ID NO: 414136 - DNA, 590 bp, Homo sapiens
tacaattgactggcactatgactttgagccaggttccttacctctttgagcctcattgacaaaagcagatagtaatagtactgagttttaytggaattaatttatgacagtttttggcacctactgaatcccatgaatattagttgcttattattattaataatcattactcttaaataattatattctgattttttgctgtctcaaaagcgtggggtggtgtacagtaagattttcaggtagtaaatggagttctaagagtagaacttaaagccttccctgtatatctccaagtggtctttcctagtagcactgccctcttctcacctggctagggaaggttatctagaactcatacggggaaggcaggtcaaaagacagaggtttttcttttaagaattggctatcagagctcagcctaccctagtttgtcctcctcagggacttcacttatacaactctctgctgcagatctatgggctttggagaaatgactcagaatttctttttgatttggttaactaatggcatgtaggaccattcttgttgatggtattgttattaatataacaccatgatagcttagagct

SEQ ID NO: 414137 - DNA, 351 bp, Homo sapiens
gaattttacatgaggcaagagcaacctgctggggccactgccttcagtattaaaagatacctatgttttggactttatasaggaaataattccatttcttagtatttttaaaattatggtaaaatacacataaaatttactaggtgtatagttcactggcagttattaacactgttgtacaaccatcatcactgtccatttttaaaaatgtttcactatctaagcagaaactcttgtactcattaaacaacaacctcccaactccctcttcccttagtccctggtaacctctaatttcactttctgtccctatgcatttgccaattctagatatctcatgtaagtggaatc

SEQ ID NO: 414138 - DNA, 593 bp, Homo sapiens
taaggtatcccttttcctcaactgtatttaatagatgttttaaatcagctaaggtaggggcatagtcagtaaaagtcagcaattagtttgctgtgttgatttagatggaaaatactgcttttttttttcactgtggtaatttggactctttaaatgaagtgcccaataaagatttttatttctataacatgctttagctatatttacaattagagattttcttagtttgtgtttattattagaatttccatttaaaaataatttttaacaagccatttatgatttatatgataatatagtttcttttgstgttttaaaaaattctaaaagtaataagatttgcatagtgcctatacttttagattcactgtttttccacacaaagtccatgtttgtatttttcagtaaatatgtattctaaaataaactaggcactttttatttaggcatagtaaaccatgaattcctctttactccatcacttagaattcctatctgaagcatgatagtaggagagccctctcctgataacagtatatctgtactacaagtatgctagtaaggaaccctactaaaaacagctattttgaaga

SEQ ID NO: 414139 - DNA, 645 bp, Homo sapiens
catcttttctttctctctctacataaacacataaacaaattatagtaggtaggtaatgggagattactgaattgcactgcttaattttcttaatttacaactgggactgatgggtggcagctagtcctgactcatacaggttttgcaccatcaaaggtttatatcctctaaaataaaagtgacaagaaagagagtgaactatcagaataattcctcccagctgcaagatttggagctaagcaytgtcaaaggcaaagtgtgcctgatccagttaagaactccctcattctttatggaatttgagtattaaatgaagccccaagatttctgggttcaggttccaattgtttactaactaaaataaaagagcccacaaaactgttcaggaggcattgtgcttcaaatcattcttaccaaacatgttgatgagttaagtataaattaatcagaaacatatggttcaaatttctgtgaaaatccacagggtatattaagggaattaaagagaaatgtgttaggccaaacatatttaagaatttagcaaaactgaaatctaccaaaatagtttaacattttctggtgcatctattccagtttattcttttttaatagtgtgttttctcagttgccttaaacttgcatttt

SEQ ID NO: 414140 - DNA, 612 bp, Homo sapiens
gcaattttaattaaggtttttgggaaagtctaactaaaaagatatttgaggaaagagctgaaagatgtgaaagagtgagccatgtggaagagtggacaggaatacagcaagctccaagtagctcctggtgtgtcaaaggagcacctaggagggtagtgtggctggaacacttactagggacttagaaacaggaggcatgtctcagaaggccacaaaacgacatggtggatcctcatgtcattatcccctagacccaggacttacttaccacagaaaatctgtctaaggacaggcagcatttatggtaagtatacgtttatgataatatcaaagttgttttgacctaaggacaggatttgcagtaagcatgtgaaagtagaaatctaagaggcattctcagaattgcagttcatcagaagtcaacatggcagattagcatccaggatggaggtacttcaaccgccacaaactccatgtaagatgaactcaaagtgacccacaccaggacatataatgaagctttagaaagacaaatgcaaagagagaattttgaaagcaccaaaagaaaagcaattcatcacayagaagggaacctcaataacattattgggt

SEQ ID NO: 414141 - DNA, 570 bp, Homo sapiens
ttctggctgagttttcaaggtccttgcactgattatttctcagcttgtgggcttatttaccttcaatctttgaggctgctgacctttggatttttttaaaaatcttttatcctatctgatgatcttcaggatttgattgtcatataaggtggattcagctgacaggcttcatttctggaaaattttaggggccaaccctcagctcctaactcctggattaagcgttcttactctgggagacttgtattggtcctcaactttgttctcttgctccttgaaattaggaatccactgcacttggggagctaaggtgttcccagtgttgggttggttgctacactccaatgggtggtgtcaggcaaagtgtttcatagkgcagtgacagcaggctctgtccacattagcctgtgccaataacagcagtagtggcagctgatgcagagtgctagcaggtgcctgggtgccctcctctcactcaggggcagggcactggtaggcacaggtctagtttccttctctatgccctgcaggcagggatgttcactcagcataggggaggatccattgttc

SEQ ID NO: 414142 - DNA, 665 bp, Homo sapiens
tcaaccacttatccatcagctcacaccctcttggatgatccatctttgactctcaaatctcagcctccaattccaacttcctaatttccttttggaaaccacacaacacccaggattgatgtagagtaaaaaaggaagaccttagtcacyggtgattaggactgaattaaggggtggaagtagaagtcaagagaataaggtgaaaacctgtaaagtgtgcaaaattgctttattggaaatggaaggagacaaataaaaatgtattcgccatggtttctctttaagataagactgtatgcagttaggagaataacttttgtatgtctcttggcccaggtaataccagtaataaaggggagagagagtgtaatcctgctaattcaaattttctgttctgttctttccatggagtatttaaataagggttcaacctccaaatatccttctccactcacttcattcaccttcacattaaaagacgcatacatacacacatacacaattgtgtcaaggaaatacttaatgatcatctattagaaaatgtccaaaattattagcctgcatcaggctgtaactgcatacatcctagaggatgtggtccatagataaaactaatcttatgaagttttacctttcctgactactttgttcattaatgatttgcc

SEQ ID NO: 414143 - DNA, 665 bp, Homo sapiens
tcaaccacttatccatcagctcacaccctcttggatgatccatctttgactctcaaatctcagcctccaattccaacttcctaatttccttttggaaaccacacaacacccaggattgatgtagagtaaaaaaggaagaccttagtcaccggtgattaggactgaattaaggggtggaagtagmagtcaagagaataaggtgaaaacctgtaaagtgtgcaaaattgctttattggaaatggaaggagacaaataaaaatgtattcgccatggtttctctttaagataagactgtatgcagttaggagaataacttttgtatgtctcttggcccaggtaataccagtaataaaggggagagagagtgtaatcctgctaattcaaattttctgttctgttctttccatggagtatttaaataagggttcaacctccaaatatccttctccactcacttcattcaccttcacattaaaagacgcatacatacacacatacacaattgtgtcaaggaaatacttaatgatcatctattagaaaatgtccaaaattattagcctgcatcaggctgtaactgcatacatcctagaggatgtggtccatagataaaactaatcttatgaagttttacctttcctgactactttgttcattaatgatttgcc

SEQ ID NO: 414144 - DNA, 665 bp, Homo sapiens
tcaaccacttatccatcagctcacaccctcttggatgatccatctttgactctcaaatctcagcctccaattccaacttcctaatttccttttggaaaccacacaacacccaggattgatgtagagtaaaaaaggaagaccttagtcaccggtgattaggactgaattaaggggtggaagtagaagtcaagagaataaggtgaaaacctgtaaagtgtgcaaaattgctttattggaaatggaaggagacaaataaaaatgtattcgccatggtttctctttaagataagactgtaygcagttaggagaataacttttgtatgtctcttggcccaggtaataccagtaataaaggggagagagagtgtaatcctgctaattcaaattttctgttctgttctttccatggagtatttaaataagggttcaacctccaaatatccttctccactcacttcattcaccttcacattaaaagacgcatacatacacacatacacaattgtgtcaaggaaatacttaatgatcatctattagaaaatgtccaaaattattagcctgcatcaggctgtaactgcatacatcctagaggatgtggtccatagataaaactaatcttatgaagttttacctttcctgactactttgttcattaatgatttgcc

SEQ ID NO: 414145 - DNA, 598 bp, Homo sapiens
tccttctttgcaactgcctcagtacaagctgygtcagcatatgctagggagcagtgaccaggctccaactacttttttttgcttatcaactcaaagaagcaacttctctacttcatacatactaacacaactatgataggcagtgagaacagaaaactgaaagatgtgaaaaggaatgtgttctcataaaacctacacagttagatatatgggccgggcatggtggctcacgcctgcaatcccagcacttcgggaggccaaggcgggtggatcacctgaggtcaggagttcaagactggcctggccaacatgttgaaaccctgtctctactaaaaatacaaaaattagtcaggcatggtggcacatgcctgtagtcccagctacacaggaggctgaggcaggagaatcactccaacccaaaagatggaggtgcagtgagctaagatcatgccactgcactccagcctgggtgacagagtgagactcaaaaaaaaaaaaaaaaaaaccaaaacaaaacaacctgtacaggtagatatatgagggctagagcagaaaacaaatgaaataatgaagtttatggggattctgagaaagcatg

SEQ ID NO: 414146 - DNA, 598 bp, Homo sapiens
tccttctttgcaactgcctcagtacaagctgcgtcagcatatgctagggagcagtgaccaggctccaactacttttttttgcttatcaactcaaagaagcaacttctctacttcatacatactaacacaactatgataggcagtgagaacagaaaactgaaagatgtgaaaaggaatgtgttctcataaaacctrcacagttagatatatgggccgggcatggtggctcacgcctgcaatcccagcacttcgggaggccaaggcgggtggatcacctgaggtcaggagttcaagactggcctggccaacatgttgaaaccctgtctctactaaaaatacaaaaattagtcaggcatggtggcacatgcctgtagtcccagctacacaggaggctgaggcaggagaatcactccaacccaaaagatggaggtgcagtgagctaagatcatgccactgcactccagcctgggtgacagagtgagactcaaaaaaaaaaaaaaaaaaaccaaaacaaaacaacctgtacaggtagatatatgagggctagagcagaaaacaaatgaaataatgaagtttatggggattctgagaaagcatg

SEQ ID NO: 414147 - DNA, 614 bp, Homo sapiens
atttggaaaatataatctataatgaggagaaaaatcaactgaaactgaactaaaaattatacaaataatagaattagtaaacaaagatattatgttcaagaagcttaagaaatttaattgtgaatagaaacatgggagatggtttttaaaactcaagtcaaatcaaacttctagaaataaaaaaatacaatgtctgagacaaaaaatacaatgcatgggattaaaagcagaatagatatgacaaaagaaaagattagtgaaactgaatacatgttaatagaaattattyaacattttcatatgttatagaaaagacagatcagtagtttgcacctgatttaaccaattatgcagtttgcttttagctacataaccagtggcttatcaaagacctcttggtaaatttgactccctgagaccaaagtaacttgctctatcttggtgattcaaaatctgaagcttaaacacatcttgtccaaaaaaagatctgtgatgtttcctaaaaaattaaatatagaattaccaagtaatccagcaattccacttataagcatataccaaaaacaaaaattgaaagcggggccttgaaaagatatttttatgcttgtgttcat

SEQ ID NO: 414148 - DNA, 614 bp, Homo sapiens
atttggaaaatataatctataatgaggagaaaaatcaactgaaactgaactaaaaattatacaaataatagaattagtaaacaaagatattatgttcaagaagcttaagaaatttaattgtgaatagaaacatgggagatggtttttaaaactcaagtcaaatcaaacttctagaaataaaaaaatacaatgtctgagacaaaaaatacaatgcatgggattaaaagcagaatagatatgacaaaagaaaagattagtgaaactgaatacatgttaatagaaattattcaacattttcatatgttatagaaaagacagatcagtagtttgcacctgatttaaccaattatgcagtttgcttttagctacataaccagtggcttatcaaagacctcttggtaaatttgactccctgagaccaaagtaacttgctctatcttggtgaytcaaaatctgaagcttaaacacatcttgtccaaaaaaagatctgtgatgtttcctaaaaaattaaatatagaattaccaagtaatccagcaattccacttataagcatataccaaaaacaaaaattgaaagcggggccttgaaaagatatttttatgcttgtgttcat

SEQ ID NO: 414149 - DNA, 585 bp, Homo sapiens
tctagaaataaaaaaatacaatgtctgagacaaaaaatacaatgcatgggattaaaagcagaatagatatgacaaaagaaaagattagtgaaactgaatacatgttaatagaaattattcaacattttcatatgttatagaaaagacagatcagtagtttgcacctgatttaaccaattatgcagtttgcttttagctacataaccagtggcttatcaaagacctcttggtaaatttgactccctgagaccaaagtaacttgctctatcttggtgattcaaaatctgaagmttaaacacatcttgtccaaaaaaagatctgtgatgtttcctaaaaaattaaatatagaattaccaagtaatccagcaattccacttataagcatataccaaaaacaaaaattgaaagcggggccttgaaaagatatttttatgcttgtgttcatagcagcattattcacaataactaaagaagaaacacatgttcatcaacagatgaatgaataagcaaaatataatatagacatatgcagtattacgcagccttaaaaagcaatgaaattctgatatatgctacaataaggat

SEQ ID NO: 414150 - DNA, 585 bp, Homo sapiens
tctagaaataaaaaaatacaatgtctgagacaaaaaatacaatgcatgggattaaaagcagaatagatatgacaaaagaaaagattagtgaaactgaatacatgttaatagaaattattcaacattttcatatgttatagaaaagacagatcagtagtttgcacctgatttaaccaattatgcagtttgcttttagctacataaccagtggcttatcaaagacctcttggtaaatttgactccctgagaccaaagtaacttgctctatcttggtgattcaaaatctgaagcttaaacacatcttgtccaaaaaaagatctgtgatgtttcctaaaaaattaaatatagaattaccaagtaatccagcaattccacttataagcatataccaaaaacaaaaattgaaagcggggccttgaaaagatatttttatgcttgtgttcatagcagcattattcacaataactaaagaagaaacacatgttcatcaacagatgaatgaataagcaaaatataatatagacatatgcagtattacscagccttaaaaagcaatgaaattctgatatatgctacaataaggat

SEQ ID NO: 414151 - DNA, 566 bp, Homo sapiens
ataagtgaggtgaaggaacaatagaaaggaattggatttctgtgggggtttttttgttttttgttgttgttgttgttgtttggtgtgggcatagaatgaaatttaagaggcaatatagtgaggtggataggaatatggagcctaaggtcatacttcctctgatcattttctagctgtgtgaccttgagcaagttgattgacctttgtgtaccataatttctttatcagtatcttggaaacctagcaaatagtaaacatcatgtgaatgtgtaatgtgtaatttgattttatttctattcacactttcattgaagtctgaggaaaatccctatttcattaatttaatgcatttataatgttattcctaagttttggataagatacttatttcaaaaacaaaaaaggaaatgaaaacaagaaccccataacaaaaaaaaactatatgttacagtgaaaaaagtattttttatctacaatttcttgacccacatatagttattttttagaaataaacatcaatttctaaaragtaattttgtgaacagatcctacattaaatccctcaa

SEQ ID NO: 414152 - DNA, 538 bp, Homo sapiens
tctcaccccaccaaacaaacaaacccgaaaacaccttgaacggggaaaaytcatacctgtcaggcctagaattgcttttatcttaagacttatcattttcttaactctcaagttaagatttctttgactgtgaagtactgacttctaaatataactccatagactcccaataattactagacttggaaacaaatgagtattttattgttccaaaaataaaagactgccaaaagaatgggcatttgccaccatcccattcatttaaaagaacatgccactgactttgaaagtaattctagaagaagatgttaaaaagcttcaccaatggcagcattataaaaatgtgtacagggggctgacaacatcattcacttttcatttgtatatgtatattctaccctattttcaaactctcatttggaaatacaagttccggtattaaaaaagacccagtcttgtaagtttattacactattattgtatactaaaataatttttaccactccacattaataagataaatacaacaaattccttc

SEQ ID NO: 414153 - DNA, 538 bp, Homo sapiens
tctcaccccaccaaacaaacaaacccgaaaacaccttgaacggggaaaattcatacctgtcaggcctagaattgcttttatcttaagacttatcattttcttaactctcaagttaagatttctttgactgtgaagtactgacttctaaatataactccatagactcccaataattactagacttggaaacaaatgagtattttattgttccaaaaataaaagactgccaaaagaatgggcatttgccaccatcccattcatttaaaagaacatgccactgactttgaaagtaattctagaagaagatgttaaaaagcttcamcaatggcagcattataaaaatgtgtacagggggctgacaacatcattcacttttcatttgtatatgtatattctaccctattttcaaactctcatttggaaatacaagttccggtattaaaaaagacccagtcttgtaagtttattacactattattgtatactaaaataatttttaccactccacattaataagataaatacaacaaattccttc

SEQ ID NO: 414154 - DNA, 538 bp, Homo sapiens
tctcaccccaccaaacaaacaaacccgaaaacaccttgaacggggaaaattcatacctgtcaggcctagaattgcttttatcttaagacttatcattttcttaactctcaagttaagatttctttgactgtgaagtactgacttctaaatataactccatagactcccaataattactagacttggaaacaaatgagtattttattgttccaaaaataaaagactgccaaaagaatgggcatttgccaccatcccattcatttaaaagaacatgccactgactttgaaagtaattctagaagaagatgttaaaaagcttcaccaatggcagcattataaaaatgtgtacagggggctgacaacatcattcacttttcatttgtatatgtatattctaccctattttcaaactctcatttggaaatacaagttccggtattaaaaaagacccagtcttgtaagtttattacactattattgtatactaaaataatttttaccacyccacattaataagataaatacaacaaattccttc

SEQ ID NO: 414155 - DNA, 631 bp, Homo sapiens
ccgtctttactaaaaatacaaaaattagctgggcctggtggtaggtgcctgtaaccccagctactcaggaggctgaagcaggagaatcactyggactcaggacgtggaggttgcagtgagccgagattgcaccactgcactccagcctgggtgatagagcagcaagactccatctcaaaaaaagaaagaaaaaaaatttaaatgtgaaaaaagagtttatttgggctgaatttgaagactgcaacctgggagacatagattcaagttgccctaaatatatgctccttaaaaatatttttgatgaaagaatacaaaacataaattacattaaatcttgattctttaagtacctactttttaatattctgtttacaaaaggggaagtatgtgtaaatcaccactgatgccatccagaaatacaattatttcttggaaaaaagcttttgtacatttgttgagttgcaggctgaactggacattttttcccttggactgtcatcttaaattaaaacaatgacaaaaacactatggttattcacatttgagtattaggcatatctgtttccagtgatacaatccatgcttttaagtgaaaagtagaatgctagagatttttatctgctgtaatgag

SEQ ID NO: 414156 - DNA, 417 bp, Homo sapiens
tatgttttttaatgtagtcaaatttattcatctgtttctttatgatttcctttatctatttgacatggcagacactaagaaaaatcctccacgttaacttggaaccccttgacaccactatgtaatgactttccttcccatagagaacagactaaattttattcagaatgtaataaaccccaagtaaattactgagtgatatttaatatcctgatctaaagttgggatttagattttattttcatatccaaatatttttacactacttgccaaaagtaggtcatgccamatgagaaagatccctatctcttttgaaatgagatactaattcaaaacatcttctaactactctcataagttagaaattttaggtcacataaaaaaaaatgaattaaacagtgttctgaaggaattcat

SEQ ID NO: 414157 - DNA, 632 bp, Homo sapiens
tccttataagaagtcagccatgtgaagaaacaaacacacagagagaatgccatgtgacaacaaagktagagattggagtcctgaagctgcaagccaaagataccaaagattgccagcaaaccaccagactctgggaagaggcaaggaaggattgatttccctgcaggtttcagagggagcatggcctcgctgacaccttgattttggactttagcctcctgaactgtgagacaattaagtttctattgtttaaagccactcagtttgtagtacattgttatggtagctctaagaaatgaatacgattatcttttttgattgacttttttatatcattttgggtgaccccgtttatgtctgtttcatttcctcttctcaaggattttttttcagttgctctgtgaagaatagtttctttaatatatgatgcttttttatggtcaggctacctttgattttcagaatctatcttgtttcagctgaatcatactataaactacctcctttcttctctatcctgtactagtagttgctgtctctaaacagtacaacctcaaccttctaaggtgactctctttcacccacagattcactttctgggacccttcattgtaattcccctttgttggtgt

SEQ ID NO: 414158 - DNA, 632 bp, Homo sapiens
tccttataagaagtcagccatgtgaagaaacaaacacacagagagaatgccatgtgacaacaaagttagagattggagtcctgaagctgcaagccaaagataccaaagattgccagcaaaccaccagactctgggaagaggcaaggaaggattgatttccctgcaggtttcagagggarcatggcctcgctgacaccttgattttggactttagcctcctgaactgtgagacaattaagtttctattgtttaaagccactcagtttgtagtacattgttatggtagctctaagaaatgaatacgattatcttttttgattgacttttttatatcattttgggtgaccccgtttatgtctgtttcatttcctcttctcaaggattttttttcagttgctctgtgaagaatagtttctttaatatatgatgcttttttatggtcaggctacctttgattttcagaatctatcttgtttcagctgaatcatactataaactacctcctttcttctctatcctgtactagtagttgctgtctctaaacagtacaacctcaaccttctaaggtgactctctttcacccacagattcactttctgggacccttcattgtaattcccctttgttggtgt

SEQ ID NO: 414159 - DNA, 614 bp, Homo sapiens
tttctcatctctcttcaccctcctctcattcagtttgaaccaatggtattggctttctaagtatttatcttttacttatgattcagagtttagtacttgatttttcagcttattatattctctgatgcccatcttcgagataatcaatgaagtgtttcttcttttcctctccccactccatttttccamtttttgatttttttatttctacattatcagatcatacagcatttatccctaatccagtatttgtcttttgttgtgtaacaaattaccctcaaaacttaatagtttaaaactacaagtatttattatctcacacagtttctaaggatggagagtccacaaatagtttagctggatggttcaagcttagggtctctcatgaggtagcaatcaagatgttgactggggtagcagtcatctgacagctaaattggagctggtagagccatttctaagatctttctatggatgcctcatttccttgatggtgattggcagtaggtctcagttcttcatcatatgggtatttctataaggctgcttgagcatcctcttggcgtggcagctgggttcccccagagtcagtgacccaagacaaagaaaaaaag

SEQ ID NO: 414160 - DNA, 280 bp, Homo sapiens
gagaagtcagaagctagaatgaatttgtagatgactttggaatagtgtattagtcatgtgtttattattattaataataatcctctagatccctaytagtctctataattttcagaacttttctgagtttcacataatattcacaaatattagacagggcaggtatggtgactcccattttgctcatgtgggacctgacactcaaagagtaagtgattatctcaaaggtgcaaggctgctacattgcagaccttgtcttgcaatgctactcataacacag

SEQ ID NO: 414161 - DNA, 280 bp, Homo sapiens
gagaagtcagaagctagaatgaatttgtagatgactttggaatagtgtattagtcatgtgtttattattattaataataatcctctagatccctactagyctctataattttcagaacttttctgagtttcacataatattcacaaatattagacagggcaggtatggtgactcccattttgctcatgtgggacctgacactcaaagagtaagtgattatctcaaaggtgcaaggctgctacattgcagaccttgtcttgcaatgctactcataacacag

SEQ ID NO: 414162 - DNA, 280 bp, Homo sapiens
gagaagtcagaagctagaatgaatttgtagatgactttggaatagtgtattagtcatgtgtttattattattaataataatcctctagatccctactagtctctataattttcagaacttttctgagtttcacataatattcacaaatattagacagggcaggtatggygactcccattttgctcatgtgggacctgacactcaaagagtaagtgattatctcaaaggtgcaaggctgctacattgcagaccttgtcttgcaatgctactcataacacag

SEQ ID NO: 414163 - DNA, 280 bp, Homo sapiens
gagaagtcagaagctagaatgaatttgtagatgactttggaatagtgtattagtcatgtgtttattattattaataataatcctctagatccctactagtctctataattttcagaacttttctgagtttcacataatattcacaaatattagacagggcaggtatggtgactcccattttgctcatgtgggacctgacactcaaagagtaagtgattrtctcaaaggtgcaaggctgctacattgcagaccttgtcttgcaatgctactcataacacag

SEQ ID NO: 414164 - DNA, 507 bp, Homo sapiens
tctgattattttccattgctacattataagccacattctgttgaaaaaaaaaaagagaaataagcagctgctactctttctttaatctttctgtgttttgtaaaaaaaaaaaaaaaaaaaaaaaaaaaaaaaaaaaaaggatttttagtatccaacctttccaacaagtcaaatatataattctccatctgtaraaattacatctgcagttggcacaagtcatttcagccagtgtctccagcaggctaacaactggcattagtggcggatgtttttagctttttccttgttagtgtaggctttgattttgtgggatttctttgtcatcataaaaaggcctaactggggccacctattgtgagtttgttttggaggacatgtcagtaaagcaaagttccactccccctctgattagatgccttctgaaagctgctgaaatgcaaatgtgaaaagagttttggttttctaataaactttttattgcttattttcaaaatcatttgccat

SEQ ID NO: 414165 - DNA, 589 bp, Homo sapiens
agtcaaatatataattctccatctgtagaaattacatytgcagttggcacaagtcatttcagccagtgtctccagcaggctaacaactggcattagtggcggatgtttttagctttttccttgttagtgtaggctttgattttgtgggatttctttgtcatcataaaaaggcctaactggggccacctattgtgagtttgttttggaggacatgtcagtaaagcaaagttccactccccctctgattagatgccttctgaaagctgctgaaatgcaaatgtgaaaagagttttggttttctaataaactttttattgcttattttcaaaatcatttgccattttgtacaatgtaatgaaaattaaaattggctatggaaaccacttagacctcaagagctttcaaactattcagctatttaaaacaatatgggaagaatttaagtatttttttaaagaaaggcttgccaaaattctatattgttcatgtttatcttattgttttatgagttcttttcttaatagcaatgtaagaaattattcttatgacttcatgttcatcttccaatttttatgtttcataatcatga

SEQ ID NO: 414166 - DNA, 589 bp, Homo sapiens
agtcaaatatataattctccatctgtagaaattacatctgcagttggcacaagtcatttcagccagtgtctccagcaggctaacaactggcattagtggcggatgtttttagctttttccttgttwgtgtaggctttgattttgtgggatttctttgtcatcataaaaaggcctaactggggccacctattgtgagtttgttttggaggacatgtcagtaaagcaaagttccactccccctctgattagatgccttctgaaagctgctgaaatgcaaatgtgaaaagagttttggttttctaataaactttttattgcttattttcaaaatcatttgccattttgtacaatgtaatgaaaattaaaattggctatggaaaccacttagacctcaagagctttcaaactattcagctatttaaaacaatatgggaagaatttaagtatttttttaaagaaaggcttgccaaaattctatattgttcatgtttatcttattgttttatgagttcttttcttaatagcaatgtaagaaattattcttatgacttcatgttcatcttccaatttttatgtttcataatcatga

SEQ ID NO: 414167 - DNA, 507 bp, Homo sapiens
tctgattattttccattgctacattataagccacattctgttgaaaaaaaaaaagagaaataagcagctgctactctttctttaatctttctgtgttttgtaaaaaaaaaaaaaaaaaaaaaaaaaaaaaaaaaaaaaggatttttagtatccaacctttccaacaagtcaaatatataattctccatctgtagaaattacatctgcagttggcacaagtcatttcagccagtgtctccagcaggctaacaactggcattagtggcggatgtttttagctttttccttgttagtgtaggctttgattttgtgggatttctttgtcatcataaaaaggcctaactggggccacctattgtgagtttgttttggaggacatgtcagtaaagcaaagttccactccccctctgattaratgccttctgaaagctgctgaaatgcaaatgtgaaaagagttttggttttctaataaactttttattgcttattttcaaaatcatttgccat

SEQ ID NO: 414168 - DNA, 589 bp, Homo sapiens
agtcaaatatataattctccatctgtagaaattacatctgcagttggcacaagtcatttcagccagtgtctccagcaggctaacaactggcattagtggcggatgtttttagctttttccttgttagtgtaggctttgattttgtgggatttctttgtcatcataaaaaggcctaactggggccacctattgtgagtttgttttggaggacatgtcagtaaagcaaagttccactccccctctgattagatgccttctgaaagctgctgaaatgcaaatgtgaaaagagttttggttttctaataaactttttattgcttattttcaaaatcatttgccattttgtacaatgtaatgaaaattaaaattggctatggaaaccacttagacctcaagagctttcaaactattcagctatttaaaacaatatgggaagaatttaagtatttttttaaagaaargcttgccaaaattctatattgttcatgtttatcttattgttttatgagttcttttcttaatagcaatgtaagaaattattcttatgacttcatgttcatcttccaatttttatgtttcataatcatga

SEQ ID NO: 414169 - DNA, 634 bp, Homo sapiens
aagagaagaaaacgaggagagatttttgggaaggaaactgacatttgtgacagggttaagttttcaaatacagctcagtgttttaatataagatcttgattaatctttacctcagccccaggacccagaatgattgtacagatcacttgcttcctgcatttggaggccagtagtcttgtaccctgagtatgagcaccagaaacaagaaactatctttttacttatgcaaaagagtcattttcttgccaagccattagctagagggactgcattagctcagagtcgatgccctttactaattcatgcaaaacttcctgaaatgttagtggcggtctcctttctccaacaggtttgtactgttaccccaatttaagacataaagaaaccaactgcagwcagattaagtacattactgaaagtcatttaataaactaagagttaattttaatatctcagtatgtctactttcaagactcttactcttaccatttggccatgcttgataagtctgggccttcggtaaccaagtctctggatggaatgaactgcttcctaactacagctgatgctgcccatatataggtgtttaattaaagcctggaagccaagactagtgcctacctcttctgtccct

SEQ ID NO: 414170 - DNA, 575 bp, Homo sapiens
agtttttagaatgtattaccattgctttaaatgtaattaattatgtttatatatttaatttttaataattgctgtgtttggcaactggcttctgaaaatttarcaattgaacctcaagagctggtgtgagatggctccagtacaacaccagaacttgagcaaagagtgggcagaaaagtaatgcagacagaggagacaatacatgggaagtctctgaattgagaaatagcttgatacattaaacccattattagcaatcccatcatgctgatgctctccatctgctatgggttgccttgtgtcctgcagaaatatatgttgaagtcctataccctggcatctatgaatgtgacctcatttggaagttgggtctttgcaggtataatcgagttaagatgaggtcagttagggattgctcaaatccagtatgactgttgtcttcataagaaaagagaaatttggacacagacacacacacacacataaaagatgaacacatgaagatagaaacacacagggagaatgccatgtgatgacagagacagagattggagcgatgcatttgtaacccaagg

SEQ ID NO: 414171 - DNA, 575 bp, Homo sapiens
agtttttagaatgtattaccattgctttaaatgtaattaattatgtttatatatttaatttttaataattgctgtgtttggcaactggcttctgaaaatttaacaattgaacctcaagagctggtgtgagatggctccagtacaayaccagaacttgagcaaagagtgggcagaaaagtaatgcagacagaggagacaatacatgggaagtctctgaattgagaaatagcttgatacattaaacccattattagcaatcccatcatgctgatgctctccatctgctatgggttgccttgtgtcctgcagaaatatatgttgaagtcctataccctggcatctatgaatgtgacctcatttggaagttgggtctttgcaggtataatcgagttaagatgaggtcagttagggattgctcaaatccagtatgactgttgtcttcataagaaaagagaaatttggacacagacacacacacacacataaaagatgaacacatgaagatagaaacacacagggagaatgccatgtgatgacagagacagagattggagcgatgcatttgtaacccaagg

SEQ ID NO: 414172 - DNA, 593 bp, Homo sapiens
tttggtaatgaggaactgttacttgtatgtgaattaaagtgctcttcttattttaaaaaattgaaataattttgatttttgccttctgattatttaaagatatatatatgtttattgggccccttctttattttaataaaacagtgagaaatctacattaactgactcctttaggcttcagaaacacatttttattttcttcagaaaggatgatattccccyatattttacatttctgctccaaaatacattatggacttcaaatagaaaacaacctttagctctttcctgtcatagctctgacgatattttttaaggtcactgagaacaagggcccagcgtctaagtgcctgtctcaagatgtgtccattaaatattttaatgatgataactatattaacatcttttcaccttctaaaaagtatcttattagagaaagtttaaaatgcaatcaaacatttgaagtttgaacaattatctgaatattagcctttctgtagttctagtaaaataactcatttccattttccttgcctattaagatttcaaattagaatgttcagataatcctactacttaaattttggggccct

SEQ ID NO: 414173 - DNA, 595 bp, Homo sapiens
tatttggtaatgaggaactgttacttgtatgtgaattaaagtgctcttcttattttaaaaaattgaaataattttgatttttgccttctgattatttaaagatatatatatgtttattgggccccttctttattttaataaaacagtgagaaatctacattaactgactcctttaggcttcagaaacacatttttattttcttcagaaaggatgatattcccccwtattttacatttctgctccaaaatacattatggacttcaaatagaaaacaacctttagctctttcctgtcatagctctgacgatattttttaaggtcactgagaacaagggcccagcgtctaagtgcctgtctcaagatgtgtccattaaatattttaatgatgataactatattaacatcttttcaccttctaaaaagtatcttattagagaaagtttaaaatgcaatcaaacatttgaagtttgaacaattatctgaatattagcctttctgtagttctagtaaaataactcatttccattttccttgcctattaagatttcaaattagaatgttcagataatcctactacttaaattttggggccct

SEQ ID NO: 414174 - DNA, 593 bp, Homo sapiens
tttggtaatgaggaactgttacttgtatgtgaattaaagtgctcttcttattttaaaaaattgaaataattttgatttttgccttctgattatttaaagatatatatatgtttattgggccccttctttattttaataaaacagtgagaaatctacattaactgactcctttaggcttcagaaacacatttttattttcttcagaaaggatgatattcccccatattttacatttctgctccaaaatacattatggacttcaaatagaaaasaacctttagctctttcctgtcatagctctgacgatattttttaaggtcactgagaacaagggcccagcgtctaagtgcctgtctcaagatgtgtccattaaatattttaatgatgataactatattaacatcttttcaccttctaaaaagtatcttattagagaaagtttaaaatgcaatcaaacatttgaagtttgaacaattatctgaatattagcctttctgtagttctagtaaaataactcatttccattttccttgcctattaagatttcaaattagaatgttcagataatcctactacttaaattttggggccct

SEQ ID NO: 414175 - DNA, 428 bp, Homo sapiens
ttcggtgtttaaatcatttacatttaatttaatgaaaatacagttggctttaaatctagcagttcaccattgctttgtacttatctatttgttctttctttgttttattttctttttttaccttgatttgggttgagtattttttataattccacttttttctctaaagttagacatgcctctgtattttttttttcttyttagtaattgctttaggttgttggttcctgaactggattccttagaccagcatcaattggaatcttgttagaaaagcaaattcttgagccctatccaagatctgccaaatcagaaactagggatggggagacctaactatttgtgttctatgaagtctctaaaatgattctgatgaagccaaaattaaagaaacattgttctaagtttacagtatacatcattagctt

SEQ ID NO: 414176 - DNA, 344 bp, Homo sapiens
gtttcccacacatctaatctatttgcagtagtcctatttctgcctgcaatatgcaatgactttggcatgtctctacttcattctaacrtgccctcactgtcacatcacagccatctctctatttcagttctagactaagtcataatcttctgttgttgaaactactgcaatagccacttaacttaattctaactcccccacttgccttcttctaatccacagagcaattaaagtgaccatttaaaaagatgcttataacacttcagaagcttaatatttctctccagttaaattccaaatcctcaacaaaaacctcctgttttagcccctgcctgcctttccag

SEQ ID NO: 414177 - DNA, 344 bp, Homo sapiens
gtttcccacacatctaatctatttgcagtagtcctatttctgcctgcaatatgcaatgactttggcatgtctctacttcattctaacatgccctcactgtcacatcacagcmatctctctatttcagttctagactaagtcataatcttctgttgttgaaactactgcaatagccacttaacttaattctaactcccccacttgccttcttctaatccacagagcaattaaagtgaccatttaaaaagatgcttataacacttcagaagcttaatatttctctccagttaaattccaaatcctcaacaaaaacctcctgttttagcccctgcctgcctttccag

SEQ ID NO: 414178 - DNA, 568 bp, Homo sapiens
agacattaagtaaaaaagaagaccaggagctatagatattaaaatttttattaaaaacatttacaagtacacatggaaaaaacattttttattgctagtagtctaatgttagtagtcttgaatttaatgctgctctatattagaaaatgaattaactagctggtgttaaattatctmtaaaactaggatggtggccatggaaggagaaaaggacagatgtgagaaacctcaaaatgagaaaattaagaggacttagtgacataaataatagagaggaaaaatcaaaattcacattcaacttgaaattgttttttccctaagttttcctttttgtctaactagactaataactagtcttttctctaactagactattacctaatttttaagtactaaaaagtaatgcgttgatcatatacttaattaactgtttccatttagtttttctttataatattttaaggaaaactattaagattctttttatggttctaagtacccctaacaatactcaatatttcctattaggcatggcttttaggtataacaacacaatgagaattacatt

SEQ ID NO: 414179 - DNA, 568 bp, Homo sapiens
agacattaagtaaaaaagaagaccaggagctatagatattaaaatttttattaaaaacatttacaagtacacatggaaaaaacattttttattgctagtagtctaatgttagtagtcttgaatttaatgctgctctatattagaaaatgaattaactagctggtgttaaattatctctaaaactaggatggtggccatggaaggagaaaaggacagatgtgagaaacctcaaaatgagaaaattaagaggacttagtgacataaataatagagaggaaaaatcaaaattcacattcaacttgaaaytgttttttccctaagttttcctttttgtctaactagactaataactagtcttttctctaactagactattacctaatttttaagtactaaaaagtaatgcgttgatcatatacttaattaactgtttccatttagtttttctttataatattttaaggaaaactattaagattctttttatggttctaagtacccctaacaatactcaatatttcctattaggcatggcttttaggtataacaacacaatgagaattacatt

SEQ ID NO: 414180 - DNA, 599 bp, Homo sapiens
gtgtcaggggtgcccagtatcacctaggtttactaatcctctaaggatactcaagatctcagtatagttttactcacagctatgatttactacaatgaaagaatacaaagcaaaatcagcaaagggataaagtgtgtgrggtgaagtccaggggaaatcaggcacaagcttccaagagtccttttcagtggagccgcacaggatacacttaattcctccagcaacaagttgtgacttgcatgaagtgttgtctataaaggaagttcttttagacactcagtgcccaaggtttttattggaggttcatcacagtagcatcttgcctagcacatatcacaattccagagtcccagaaaaaaagcaggtgttcagtataaaccttattgtttgcacgaaagttttgtaacattcagtcattgttatcatttagggtaatgagaattgtcctgaaatttcaagttcccaaatgccagccaagagacaagcttgcaagcacacttttctaaaaaggatatcagtctcaggcctggtgtattaactttttttctgcacacagatatatgtgtaatcctttacacacgaagaatcatagctattaa

SEQ ID NO: 414181 - DNA, 599 bp, Homo sapiens
gtgtcaggggtgcccagtatcacctaggtttactaatcctctaaggatactcaagatctcagtatagttttactcacagctatgatttactacaatgaaagaatacaaagcaaaatcagcaaagggataaagtgtgtgaggtgaagtccagggraaatcaggcacaagcttccaagagtccttttcagtggagccgcacaggatacacttaattcctccagcaacaagttgtgacttgcatgaagtgttgtctataaaggaagttcttttagacactcagtgcccaaggtttttattggaggttcatcacagtagcatcttgcctagcacatatcacaattccagagtcccagaaaaaaagcaggtgttcagtataaaccttattgtttgcacgaaagttttgtaacattcagtcattgttatcatttagggtaatgagaattgtcctgaaatttcaagttcccaaatgccagccaagagacaagcttgcaagcacacttttctaaaaaggatatcagtctcaggcctggtgtattaactttttttctgcacacagatatatgtgtaatcctttacacacgaagaatcatagctattaa

SEQ ID NO: 414182 - DNA, 599 bp, Homo sapiens
gtgtcaggggtgcccagtatcacctaggtttactaatcctctaaggatactcaagatctcagtatagttttactcacagctatgatttactacaatgaaagaatacaaagcaaaatcagcaaagggataaagtgtgtgaggtgaagtccaggggaaatcaggcacaagcttccaagagtccttttcagtggagccrcacaggatacacttaattcctccagcaacaagttgtgacttgcatgaagtgttgtctataaaggaagttcttttagacactcagtgcccaaggtttttattggaggttcatcacagtagcatcttgcctagcacatatcacaattccagagtcccagaaaaaaagcaggtgttcagtataaaccttattgtttgcacgaaagttttgtaacattcagtcattgttatcatttagggtaatgagaattgtcctgaaatttcaagttcccaaatgccagccaagagacaagcttgcaagcacacttttctaaaaaggatatcagtctcaggcctggtgtattaactttttttctgcacacagatatatgtgtaatcctttacacacgaagaatcatagctattaa

SEQ ID NO: 414183 - DNA, 407 bp, Homo sapiens
gaaaaaaagcaggtgttcagtataaaccttattgtttgcacgaaagttttgtaacattcagtcattgttatcatttagggtaatgagaattgtcctgaaatttcaagttcccaaatgccagccaagagacaagyttgcaagcacacttttctaaaaaggatatcagtctcaggcctggtgtattaactttttttctgcacacagatatatgtgtaatcctttacacacgaagaatcatagctattaataaatgtgaccaataaaaatttcacaccctgtccaaattattgttctctattccctattcttgaaggcagaagaaagaaagggacgagaggaaaggccgaccaatcaaaatagaaaagcatctctgtctcctacagaaatgccgaagttggttcaaaacc

SEQ ID NO: 414184 - DNA, 433 bp, Homo sapiens
atggtgaagttttgtgtatgttctgactgctccacctgccagccatcctccttccctcacgyctccatcaccaacagtcctcctccctctcttcaggcctccccattctctggcacatagcaatattgaaattaggtcaattaataaccctgcagtggcctataaatgttcaattgaaaggaagagtcactttaaatcaagaggtaggaataattacctagaggtaggaataatattagataaatattagaggtaagaataataatgaggaaagcatgtccaaagccaacatagctaggccttttatgtgaaatacagtcaagctgtaaatgcaaaagaaaaattcttgaaggaaattaaaagtgctactccagtgaacacataaatgataagaaagtgaaacagccttattgccgatatggagaaagtttta

SEQ ID NO: 414185 - DNA, 433 bp, Homo sapiens
atggtgaagttttgtgtatgttctgactgctccacctgccagccatcctccttccctcacgtcyccatcaccaacagtcctcctccctctcttcaggcctccccattctctggcacatagcaatattgaaattaggtcaattaataaccctgcagtggcctataaatgttcaattgaaaggaagagtcactttaaatcaagaggtaggaataattacctagaggtaggaataatattagataaatattagaggtaagaataataatgaggaaagcatgtccaaagccaacatagctaggccttttatgtgaaatacagtcaagctgtaaatgcaaaagaaaaattcttgaaggaaattaaaagtgctactccagtgaacacataaatgataagaaagtgaaacagccttattgccgatatggagaaagtttta

SEQ ID NO: 414186 - DNA, 433 bp, Homo sapiens
atggtgaagttttgtgtatgttctgactgctccacctgccagccatcctccttccctcacgtctccatcaccaacagtcctcctccctctcttcaggcctccccattctctggcacatagcaatattgaaattaggtcaattaataaccctgcagtggcctataaatgttcaattgaaaggaagagtcactttaaatcaagaggtaggaataattacctagaggtaggaataatattagataaatattagaggtaagaataataatgaggaaagcatgtccaaagccaacatagctaggccttttatgtgaaatacagtcaagstgtaaatgcaaaagaaaaattcttgaaggaaattaaaagtgctactccagtgaacacataaatgataagaaagtgaaacagccttattgccgatatggagaaagtttta

SEQ ID NO: 414187 - DNA, 433 bp, Homo sapiens
atggtgaagttttgtgtatgttctgactgctccacctgccagccatcctccttccctcacgtctccatcaccaacagtcctcctccctctcttcaggcctccccattctctggcacatagcaatattgaaattaggtcaattaataaccctgcagtggcctataaatgttcaattgaaaggaagagtcactttaaatcaagaggtaggaataattacctagaggtaggaataatattagataaatattagaggtaagaataataatgaggaaagcatgtccaaagccaacatagctaggccttttatgtgaaatacagtcaagctgtaaatgcaamagaaaaattcttgaaggaaattaaaagtgctactccagtgaacacataaatgataagaaagtgaaacagccttattgccgatatggagaaagtttta

SEQ ID NO: 414188 - DNA, 546 bp, Homo sapiens
ggattacccaagtagatttctcttttaatygaatgaataccttattgctcttctagaagcagtcattctttccagtttcaaatgtatggtcagagattattgacttgattatcattttaagtgtacaaaaatgttttgttaatttcttcgttacatatgattagtattgattaatgtctgagataatgctatacccttgcttattttggtggtctaaatagccacttattccacaggtgtttgtgttgtgctacaacagaattaaatacataacatccacatgtaattaatgtaaactttctgccattgatcccttcagcagttaatgaattagcaataattgtgagtaaatattcaataaaggacttgtagcatgtatcacatgatgtttctatgaatcttgggtataaattcccctgttgtctactggaaaagttttctacagtgagaagatatggttatcttttaggattaaaaatgagaagacagggccatatattattgtggatttgcctcagtcacataatatattgacttctcacagtg

SEQ ID NO: 414189 - DNA, 546 bp, Homo sapiens
ggattacccaagtagatttctcttttaatcgaatgaataccttattgctcttctagaagcagycattctttccagtttcaaatgtatggtcagagattattgacttgattatcattttaagtgtacaaaaatgttttgttaatttcttcgttacatatgattagtattgattaatgtctgagataatgctatacccttgcttattttggtggtctaaatagccacttattccacaggtgtttgtgttgtgctacaacagaattaaatacataacatccacatgtaattaatgtaaactttctgccattgatcccttcagcagttaatgaattagcaataattgtgagtaaatattcaataaaggacttgtagcatgtatcacatgatgtttctatgaatcttgggtataaattcccctgttgtctactggaaaagttttctacagtgagaagatatggttatcttttaggattaaaaatgagaagacagggccatatattattgtggatttgcctcagtcacataatatattgacttctcacagtg

SEQ ID NO: 414190 - DNA, 546 bp, Homo sapiens
ggattacccaagtagatttctcttttaatcgaatgaataccttattgctcttctagaagcagtcattctttccagtttcaaaygtatggtcagagattattgacttgattatcattttaagtgtacaaaaatgttttgttaatttcttcgttacatatgattagtattgattaatgtctgagataatgctatacccttgcttattttggtggtctaaatagccacttattccacaggtgtttgtgttgtgctacaacagaattaaatacataacatccacatgtaattaatgtaaactttctgccattgatcccttcagcagttaatgaattagcaataattgtgagtaaatattcaataaaggacttgtagcatgtatcacatgatgtttctatgaatcttgggtataaattcccctgttgtctactggaaaagttttctacagtgagaagatatggttatcttttaggattaaaaatgagaagacagggccatatattattgtggatttgcctcagtcacataatatattgacttctcacagtg

SEQ ID NO: 414191 - DNA, 546 bp, Homo sapiens
ggattacccaagtagatttctcttttaatcgaatgaataccttattgctcttctagaagcagtcattctttccagtttcaaatrtatggtcagagattattgacttgattatcattttaagtgtacaaaaatgttttgttaatttcttcgttacatatgattagtattgattaatgtctgagataatgctatacccttgcttattttggtggtctaaatagccacttattccacaggtgtttgtgttgtgctacaacagaattaaatacataacatccacatgtaattaatgtaaactttctgccattgatcccttcagcagttaatgaattagcaataattgtgagtaaatattcaataaaggacttgtagcatgtatcacatgatgtttctatgaatcttgggtataaattcccctgttgtctactggaaaagttttctacagtgagaagatatggttatcttttaggattaaaaatgagaagacagggccatatattattgtggatttgcctcagtcacataatatattgacttctcacagtg

SEQ ID NO: 414192 - DNA, 454 bp, Homo sapiens
ttgggatgggaaactataaaaaaaacagaaaacaaaaaacaacaacaacaaactcmtccaaaattagaaaaccaaaattcccatttccctgaagaaatgtaatggtgatcttctggcaagtgtgtcaagttctgagttgcaaacaaacaagttccaccttatttttatgaaaaggctacccagttacccactttgtcactactcttagagtcaaggttcacgatgtggtttggatttgtgtccctgcccaaatctcatgtttaattataatccccaatgttgaaggaggggcctgctaggagctgattgaaccctggggccgaattttcccccttgctgttcttgtgatagtgcatgagatgggaagacagtatctgagtgtttaaaaatgtatagcacctgcccctttgctctcttcctcctgctcctgtcatgtaagacatgcctgctttca

SEQ ID NO: 414193 - DNA, 580 bp, Homo sapiens
ttttctttataaattacccagtctcaggtagttctttatagcattgtgagaatggactaatacagttcaggatttgcaatttaaggaaacatgcggtgcattctatcatactctgtattattagtagatcttttataatacggtacmtttcaaatgtgttcctccccaaccacaaagccttttatttacctaaacggtcttgccatgtcaaaggcaaggctactgttcagtaaactcctctaaatcagaatgtcattagaagaaatttaaattatatgtaaaggaataaaagctgaaaatcgaagacttttgttttgaaaagttgagcttacaaatttgcaagtgtcattttctgtatttccgaaatactgtaaaatttatttattataaagtttaatattagaaataaaagcttattactaaaaaaagtaatgttaagaaagacaaataatatagcaaacactcaaaattgtaatttcactatataaattcattttctacaataatcagaggaaaattaaaattactgttcaaaatttggaggtgaaagcagggatcaactgtctattaaagttactaa

SEQ ID NO: 414194 - DNA, 580 bp, Homo sapiens
ttttctttataaattacccagtctcaggtagttctttatagcattgtgagaatggactaatacagttcaggatttgcaatttaaggaaacatgcggtgcattctatcatactctgtattattagtagatcttttataatacggtacatttcaaatgtgttcctccccaaccacaaagccttttatttacctaaacggtcttgccatgtcaaaggcaaggctactgttcagtaaactcctctaaatcagaatgtcattagaagaaatttaaattatatgtaaaggaataaaagctgaaaatcgaagrcttttgttttgaaaagttgagcttacaaatttgcaagtgtcattttctgtatttccgaaatactgtaaaatttatttattataaagtttaatattagaaataaaagcttattactaaaaaaagtaatgttaagaaagacaaataatatagcaaacactcaaaattgtaatttcactatataaattcattttctacaataatcagaggaaaattaaaattactgttcaaaatttggaggtgaaagcagggatcaactgtctattaaagttactaa

SEQ ID NO: 414195 - DNA, 661 bp, Homo sapiens
aactgggcattttctgtggtacctggtccctcagttgaactgcttggatttccggacatcatcttttttcctggacataaattttctcaccgatttctttatcccccttgatgcctgcatatccaccaactcctattcttcctcagtcccttctctacaatgaaatctgtgtggtcttttacaaatgataatctgttcatgttatcattcaccatccaagatacaaatagttactttctaccactcttaggaaaaaaacacaaatctccctaacatggcctctgctaccctgcatgatttggcctcagttcaccttcctagactcatctcgagctatttgctccttgatccctatagacatattggtcaatttttaggtccttgaatttgtcgcatacttccgatcaawgattctttccaaattccattctatccttcagaaatattcttctaccatttctctaaacagtcattcttcaactcttgaaggatgcaccatcaaagacttttcctcaggccacagacaggatgaggcttccccattaaatcctgttaccatattacatgcttccatatttgccagtccataactataggttgatttctgaaattgctagttagtgtctatctccaccactagactccaaatactatagggcag

SEQ ID NO: 414196 - DNA, 423 bp, Homo sapiens
taagtaggaaaagaatttgctgagaggctattgagtagctcacaaaatcatggagcagcaggctcagaaacaggtgagaataagcaagaaggrcatcagctaagacagctgccaaaaccatgctatagaacacagggcacttgctgggcaatggattcctttgctggtacatctggctttgctgaccctgaaaactgaatattgttataccaactgccactgcccatttctaggatggtttctgattatccctgcttctttgtgtcactatctcctgtttcgaagtcatgaatgagtatgtcagattggcagaatatttatcatatggtcatactctaactttagaaaaagccgagaaacaaagtttaagtatctaaaccattgtcattggaggtaagctctgtctcccatcaagactcatta

SEQ ID NO: 414197 - DNA, 477 bp, Homo sapiens
tacataaaatggtgggtaaatttctaataaaggatggatatacagtcaaaatggctaacaaaataaatcaataggaaatacttccattttgaaattattttcatgacttttatcttttcacagcttgatgtttayttttcttttgacagaacgatttcgagatttactactgcctccatctagtcaagactccgaaattctgcccttcattcaatctagaaattatcccaagtaagcaaaaggagttcactgggttttgatgaggcagtgggcatagtgcagggagagatttgggcgggcaaaaacaaaatgtaatctttcttaagatttctgaaaatcctgaataacttaccctaactaactaagacatcttctgcaatataatgtctcaggctccttgcagctgggtcatagaagaaatacttacttgtaattgcaacccagctttgactgaggagctgctgcacagtgcagaca

SEQ ID NO: 414198 - DNA, 477 bp, Homo sapiens
tacataaaatggtgggtaaatttctaataaaggatggatatacagtcaaaatggctaacaaaataaatcaataggaaatacttccattttgaaattattttcatgacttttatcttttcacagcttgatgtttacttttcttttgacagaacgatttcgagatttactactgcctccatctagtcaagactccgaaattctgcccttcattcaatctagaaattatcccaagtaagcaaaaggagttcactgggttttgatgaggcartgggcatagtgcagggagagatttgggcgggcaaaaacaaaatgtaatctttcttaagatttctgaaaatcctgaataacttaccctaactaactaagacatcttctgcaatataatgtctcaggctccttgcagctgggtcatagaagaaatacttacttgtaattgcaacccagctttgactgaggagctgctgcacagtgcagaca

SEQ ID NO: 414199 - DNA, 477 bp, Homo sapiens
tacataaaatggtgggtaaatttctaataaaggatggatatacagtcaaaatggctaacaaaataaatcaataggaaatacttccattttgaaattattttcatgacttttatcttttcacagcttgatgtttacttttcttttgacagaacgatttcgagatttactactgcctccatctagtcaagactccgaaattctgcccttcattcaatctagaaattatcccaagtaagcaaaaggagttcactgggttttgatgaggcagtgggcatagtgcagggagagatttgggcrggcaaaaacaaaatgtaatctttcttaagatttctgaaaatcctgaataacttaccctaactaactaagacatcttctgcaatataatgtctcaggctccttgcagctgggtcatagaagaaatacttacttgtaattgcaacccagctttgactgaggagctgctgcacagtgcagaca

SEQ ID NO: 414200 - DNA, 477 bp, Homo sapiens
tacataaaatggtgggtaaatttctaataaaggatggatatacagtcaaaatggctaacaaaataaatcaataggaaatacttccattttgaaattattttcatgacttttatcttttcacagcttgatgtttacttttcttttgacagaacgatttcgagatttactactgcctccatctagtcaagactccgaaattctgcccttcattcaatctagaaattatcccaagtaagcaaaaggagttcactgggttttgatgaggcagtgggcatagtgcagggagagatttgggcgggcaaaaacaaaatgtaatctttcttaagatttctgaaaatcytgaataacttaccctaactaactaagacatcttctgcaatataatgtctcaggctccttgcagctgggtcatagaagaaatacttacttgtaattgcaacccagctttgactgaggagctgctgcacagtgcagaca

SEQ ID NO: 414201 - DNA, 607 bp, Homo sapiens
agagatacacaaacataaataccacaatattcccatcagatggttaatgaacacaatgctatgtagtctgaaggaaatagaaacctttgaaaaggcttcacaaagataccgtttttttggggtgaacgttgagggaagaggctggcggaggtgtcagtattaaaggaatatccggggtagggcttgttcggggaacagtgtgtcggtgtggctggagcagagttcatgtgcagagttgctgcaggagacaagcctggaaaggaaggcagccatcatcatttatagaagattggagtaaggggggtttcttcatttggttcatgggaaactggtttttttaaagttttatttatttattgtagagatgggatcttgttacrcccaggctggtcttgaacttctggcctcaagcagtcctcatgacttggcctcccagagtcctgggattacagatgtcagcaccactgtacatgtagcagcatctagaattcgtggtttgagggctgactaaccagtctgtgatctgaactgacagataaggaagttataagacaagtgataattgatgagttagtaatttaataaggagtctaggaaagtagagtaa

SEQ ID NO: 414202 - DNA, 525 bp, Homo sapiens
atttagttcaaccaaagtttataaaagtaggacataatacgttttccacttaagagtgagacagcctttattatgaaacggtaaattgttaggaatactagtcctattcaagtttcaaggcttattcctaataaaatactcaaactgtggttaaaatttatgttaatggtggtttgccgcagtaaaatatcagcgtctttttcaacaatacattgttggctaaaattaaccggacctggtctgtacatctgaagtataaaatatctttattaaacatacccattagtggcatacctagtcaaaaagtaagcagaatttcacatgcaaattgtatacaatctgtaaaaattgtattccataagaatgtgacagttgagtacggtttttggggggcttttttggtgtaccataataatgtcatctggtttcttttctgaacatccagtcaccatamtgtccggcttgtaactttagtagatcgtagattgtattattttggtatccccaacagctcttgtacagtgc

SEQ ID NO: 414203 - DNA, 509 bp, Homo sapiens
tgatatgcaccagttcccactgacagacgtaacagctggcatccattctgagctgtcagtcactgtaccatagtagttgttaaagattttgaccaatacctatcccttgctttatgtgatatgagctgaccgcatatttggattctcttctatgcaaatattcttcctgaactttttttttcagttccactctgggtttccaaagttgaagataaacagrgtgtggtgaacctttattatttttacctgcccagcatctactgactctacttctggtaaaagcccccagatttgtttggggctcatccctcctcatctcagtccgtgaggtcccaggagggctgacttcatctcagacatgtgtttcagacctggccacatcgattcaggagcatttgattccatcatattcattagaggtcctaaattatttcctgggaccactggccttgaagtaagttttcatttccactggtcttggagttgtaagcatggagggtctggggcac

SEQ ID NO: 414204 - DNA, 564 bp, Homo sapiens
gtgggtggctgggttggggatcctagaccwactacacgaagatggggataaaacaagctgggctcgcatgtaatcccagcactttgggaggccaaggcgggtggatcacgaggtcaggagatcaagacaatcctggccaatatggtgaaaccccgtctctactaaaaatataaaaattagctgggcagggtggcacatgcctgtagtccttgctaccggggaggctgaggcaggagaatcacttgaacctgggaggcggaagttgcagtgagctgagatcacgccactgcactccagcctggtgacagagtgagactccatttcaaaacaaacaacaacaaaaaaaccaaggtgggctccagagctggggggaggggtaactaagggaaaggaagagaatatgaaactcatcaaggaagcaggaaggaaagaaaacgttatctggtagctgcttttatgagtctctctgcgagatgcatttctcctgtgagatgcacgtaattttcattttccataaaaggtagagagacgtgagaaaattacccaaatcaagcaattagcaaa

SEQ ID NO: 414205 - DNA, 564 bp, Homo sapiens
gtgggtggctgggttggggatcctagacctactacacgaagatggggataaaacaagctgggctcgcatgtaatcccagcactttgggaggccaaggcgggtggatcacgaggtcaggagatcaagacaatccyggccaatatggtgaaaccccgtctctactaaaaatataaaaattagctgggcagggtggcacatgcctgtagtccttgctaccggggaggctgaggcaggagaatcacttgaacctgggaggcggaagttgcagtgagctgagatcacgccactgcactccagcctggtgacagagtgagactccatttcaaaacaaacaacaacaaaaaaaccaaggtgggctccagagctggggggaggggtaactaagggaaaggaagagaatatgaaactcatcaaggaagcaggaaggaaagaaaacgttatctggtagctgcttttatgagtctctctgcgagatgcatttctcctgtgagatgcacgtaattttcattttccataaaaggtagagagacgtgagaaaattacccaaatcaagcaattagcaaa

SEQ ID NO: 414206 - DNA, 523 bp, Homo sapiens
ttagcttttggtggttttggataagcctccttgtctctctgggattcagtttcatcactcacaagttgagagcttggattatcatctctatggtggtctccagaaactgaaatattttgtgattatttgactatataagcgaggttcaggctcaggcagcaaggagtagaagccagttgctgatttgctgatcttataattccaggccacttcttagctctaagtgtctctactttagggtcaagcaaaccttttatgatggactgtttaataagacagggatcacttatgattaaatccactgctttctgcacttcaaacattttattttacattattctaaagctttctgaattattgctttgttctgtaatggtagcagtttctggtctattttaggattgttggcagttgttgtcatctctctagakctggctggacagtttggcatgccggtactgtatcggagaaatggtatgttgagaggacaagtttcttctgttgttgctattgattattttgt

SEQ ID NO: 414207 - DNA, 523 bp, Homo sapiens
ttagcttttggtggttttggataagcctccttgtctctctgggattcagtttcatcactcacaagttgagagcttggattatcatctctatggtggtctccagaaactgaaatattttgtgattatttgactatataagcgaggttcaggctcaggcagcaaggagtagaagccagttgctgatttgctgatcttataattccaggccacttcttagctctaagtgtctctactttagggtcaagcaaaccttttatgatggactgtttaataagacagggatcacttatgattaaatccactgctttctgcacttcaaacattttattttacattattctaaagctttctgaattattgctttgttctgtaatggtagcagtttctggtctattttaggattgttggcagttgttgtcatctctctagagctggctggacagtttkgcatgccggtactgtatcggagaaatggtatgttgagaggacaagtttcttctgttgttgctattgattattttgt

SEQ ID NO: 414208 - DNA, 520 bp, Homo sapiens
ccagttgctgatttgctgatcttataattccaggccacttcttagctctaagtgtctctactttagggtcaagcaaaccttttatgatggactgtttaataagacagggatcacttatgattaaatccactgctttctgcacttcaaacattttattttacattattctaaagctttctgaattattgctttgttctgtaatggtagcagtttctggtctattttaggattgttggcagttgttgtcatctctctagagctggctggacagtttggcatgcyggtactgtatcggagaaatggtatgttgagaggacaagtttcttctgttgttgctattgattattttgtgtttggacagtcaaagaaatattttatacaaaagcaaattaccaaaaaaagaggaattcagaaaccctttatgttcaggattctgtttacccgttggaagctcattcacagataaaatggaaatgcgctcagctcagctggttacattaagagggtgtttccgtgttca

SEQ ID NO: 414209 - DNA, 589 bp, Homo sapiens
actacatcttcaaggctcaactctgacttggtggaggaagactaccactgtgctttaataagtaagcataggtccagctggtgtggactaatatcctcgctcagctgctccatatccctgacactagaaaaaaagccaaggtgacaatttccatcagtccagggaaaaaaggccatggagtygaaaagcaatttgagttatagaaaatatagtactgtttcttgcacacttatgttggtggactattattcatacttgctagctttgtacatttttatttctttttcattagatacatattaagaatatagaaaagcatacaaatgccaccaatagttctaacattattttatccaatttttgaggtacaaaaagtaaatgaatggggccaggcgccagtggctcaagcctgtaatcccagcactttgggaggccgaggcgggtggatcacctgaggttgggagttcgagaccagcctgaccaacatggagaaaccccatctctattaaaaatacaaaattagccaggtgtggtggtgcatgcctgtaatcccagttacttgggaggctgaggcaggagaatctcttga

SEQ ID NO: 414210 - DNA, 589 bp, Homo sapiens
actacatcttcaaggctcaactctgacttggtggaggaagactaccactgtgctttaataagtaagcataggtccagctggtgtggactaatatcctcgctcagctgctccatatccctgacactagaaaaaaagccaaggtgacaatttccatcagtccagggaaaaaaggccatggagttgaaaagcaatttgagttatagaaaatatagtactgtttcttgcacacttatgttggtggactattattcatacttgctagctttgtacatttttatttctttttcattagatacatattaagaatatagaaaagcatacaaatgccaccaatagttctaacattattttatccaatttttgaggtacaaaaagtaaatgaatggggccaggcgccagtggctcaagcctgtaatcccagcactttgggaggccgaggygggtggatcacctgaggttgggagttcgagaccagcctgaccaacatggagaaaccccatctctattaaaaatacaaaattagccaggtgtggtggtgcatgcctgtaatcccagttacttgggaggctgaggcaggagaatctcttga

SEQ ID NO: 414211 - DNA, 561 bp, Homo sapiens
catcagcttagttcattcccactgcttaggtcagcagtcctctggaagaccttcgtagtccaagtaatattgattcaggaagaaagagctgtgattcttttagtgaaatgtcgcagtggggtctttgtttgttttccagaaggcagacacaggcttcctrtcgggggaatctcctttgcttatgcccactcagtagtagaggtgtctttgctctgacatcctccctagcccgccgcattactcccacattgccttggaagtactccaagttatcattgctttttgtctccctggaagccaagttttaattccacttcctattatcccatcactctgtctcttggacattcttcctttgatacagaactgtcaggcccctttgtaaagtgtaaacttattacagtccctttactcaccccggcactaatgtcttgacttcaaataaatgtcccgaagctctgttggctggcctttacggagcagcacatttttaagttactttccatctactgtcctcttttactttgtttaagatgtaaaatgagggcaaagaatcagggg

SEQ ID NO: 414212 - DNA, 632 bp, Homo sapiens
gtactcaatacatatttactaaacagttgagtatttgaggttatttctgcttggattacagagtccttcatttaaatcaataacatttctcccctaaaaaaggagatcccagaagtctatttccttttttattactaaaaaatgttttaaagtggtattttcttattcatggcaacacattttttaaaagggactttatttgtgatagttattgcatttttttctgtaaaattttacatttggccccttattcattttctcaaatttgtttgatttacttttcatgtttctctaaaagattaacttcctcctttctaaaaaagtcaatattattcatggttgaagttgtattttcttaaatgttagcacattctatcctcttgcatcttatttgccatggtagttcctttactgcayggagaatctgaaacagatttagatagaattgggtcacagattattaaataaccagcctctctacctagtcctgtaaaatttacagatgaaaatatatttcctttttttttgtccatcactgcagagcatttctcacccctgaaactgaatggaaatttgttcatgatctgaatttattcagtggtatctcttatttgtaccccttgttgaggtca

SEQ ID NO: 414213 - DNA, 572 bp, Homo sapiens
cccacagtggtattttctatatgagcatttggtgccctattgctgattccaggcagcataaactttgtacagctgacattttctgactcaactcctgctataattgaaattactttattaaacaagcttgaatcatttcaattacttcgtggcctggagtgctgttggcgtacatgatgactacatgctgattaaattagagctcgtacaccccagaaagatgtgcataccagcaaatggctttctctttcttcagtataaaaaaaagctctctctaattcatattcactggatagatccctttgggtkgtatattaatattcataagataaaccacatagctaaagcagaaaattaaagtcaagtctcttaataaagaagcaagagtaatgactacagtaaaatctccaaaaatgccattatccctgtgaagagtgaacactactactgtacatgtgttgaaactgagcaagagaacaataaaaagtgaattattgcagtgatttggattttaaaatccgctagagaggaatgagcaaacataaacacttagactagtagaaaaggatatc

SEQ ID NO: 414214 - DNA, 572 bp, Homo sapiens
cccacagtggtattttctatatgagcatttggtgccctattgctgattccaggcagcataaactttgtacagctgacattttctgactcaactcctgctataattgaaattactttattaaacaagcttgaatcatttcaattacttcgtggcctggagtgctgttggcgtacatgatgactacatgctgattaaattagagctcgtacaccccagaaagatgtgcataccagcaaatggctttctctttcttcagtataaaaaaaagctctctctaattcatattcactggatagatccctttgggtggtatattaatattcataagataaaccacatagctaaagcagaarattaaagtcaagtctcttaataaagaagcaagagtaatgactacagtaaaatctccaaaaatgccattatccctgtgaagagtgaacactactactgtacatgtgttgaaactgagcaagagaacaataaaaagtgaattattgcagtgatttggattttaaaatccgctagagaggaatgagcaaacataaacacttagactagtagaaaaggatatc

SEQ ID NO: 414215 - DNA, 555 bp, Homo sapiens
tctgattcagtagttagttcttaggtggggactgtgaatctgtatttctaacagattctcaggtgatgctgatgttgttggtctagggtccacactttggcagtcactggcatactcacagttgctacatatgccctataagtatttagtaggtaggctactggagaggctttgattttcaggaaatgggcaatactctgaaatatacaatggtaatggtatctactttggacctctctgttgaaaagaaagataagtttctttgcattttgggtaatcttctggggctgtcataacaaaatacaacagacttggtggcttacacaggataaatttgttttctcatggttctggaggctagaaatctaagattaaggtgctggaaatttggtttctgatgagatctttcttcctgtcttatagatgggtgccytcttgtgtcctcacatgatcttttctccatgtgttgagagagaaaaagaaagatctctgggctctcttcttcttcttataaggatactagtcctgtggaattggggcccatcattttgactt

SEQ ID NO: 414216 - DNA, 622 bp, Homo sapiens
cagctcggtgtccaacaattcaatttgattctgacattaacttccagaattagcatggaccatacaggttaagggtttaggccctcaagactgttcctactttagatgctagttgcaagtcccaggaaccacctgtacttctgaccaatcagctataaatccaaggattcccacaacttctctctcagttttgataattctgtagaatgacacacagaactcaggaaaatgctttacgtacttttactggtatataataaagaatacaactcaggaayggtgaaatagaggagacacacagggcaaggtgtagggggtaggtggtgacacagagcttttatgccctctcaggacatagcaactcctcagatcagcaaaccagaggctctccaaaccctgtgatttaggggtttccatggagatttcattaaataggctaaatcactggccagtggtgattgagctcagtcttcaggttctctcttccctgaaacttagagagtgggcctgaaagttctaactctctaatcatgaactggtatttctagggaccagcccccattctgaagctatctaggggcccctacagtgaatcatctcagcatacataacacactcatcc

SEQ ID NO: 414217 - DNA, 622 bp, Homo sapiens
cagctcggtgtccaacaattcaatttgattctgacattaacttccagaattagcatggaccatacaggttaagggtttaggccctcaagactgttcctactttagatgctagttgcaagtcccaggaaccacctgtacttctgaccaatcagctataaatccaaggattcccacaacttctctctcagttttgataattctgtagaatgacacacagaactcaggaaaatgctttacgtacttttactggtatataataaagaatacaactcaggaacggtgaaatagaggagacacacagggcaaggtgtagggggtaggtggtgacacagagcttttatgccctctcasgacatagcaactcctcagatcagcaaaccagaggctctccaaaccctgtgatttaggggtttccatggagatttcattaaataggctaaatcactggccagtggtgattgagctcagtcttcaggttctctcttccctgaaacttagagagtgggcctgaaagttctaactctctaatcatgaactggtatttctagggaccagcccccattctgaagctatctaggggcccctacagtgaatcatctcagcatacataacacactcatcc

SEQ ID NO: 414218 - DNA, 558 bp, Homo sapiens
tttacgtacttttactggtatataataaagaatacaactcaggaacggtgaaatagaggagacacacagggcaaggtgtagggggtaggtggtgacacagagcttttatgccctctcaggacatagcaactcctcagatcagcaaaccagaggctctccaaaccctgtgatttaggggtttccatggagatttcattaaataggytaaatcactggccagtggtgattgagctcagtcttcaggttctctcttccctgaaacttagagagtgggcctgaaagttctaactctctaatcatgaactggtatttctagggaccagcccccattctgaagctatctaggggcccctacagtgaatcatctcagcatacataacacactcatccttcaacagattccaaggattttaggagctctgtgccaagaactggaaataaagacaaaatttattgtttattatactacagtggcaaaaggagattctgttcttggcctctgggctcttattgatctactgtcatggatgccactgactggggctggtgtcacaggca

SEQ ID NO: 414219 - DNA, 622 bp, Homo sapiens
cagctcggtgtccaacaattcaatttgattctgacattaacttccagaattagcatggaccatacaggttaagggtttaggccctcaagactgttcctactttagatgctagttgcaagtcccaggaaccacctgtacttctgaccaatcagctataaatccaaggattcccacaacttctctctcagttttgataattctgtagaatgacacacagaactcaggaaaatgctttacgtacttttactggtatataataaagaatacaactcaggaacggtgaaatagaggagacacacagggcaaggtgtagggggtaggtggtgacacagagcttttatgccctctcaggacatagcaactcctcagatcagcaaaccagaggctctccaaaccctgtgatttaggggtttccatggagatttcattaaataggctaaatcactggccagtggtgattgagctcagtcttcaggttctctcttccctgaaacttagagagtgggcctgaaagttctaactctctaatcatgaactggtatttctagggaccagcccccattctgaagctatctaggggcccctacagtgaatcawctcagcatacataacacactcatcc

SEQ ID NO: 414220 - DNA, 453 bp, Homo sapiens
tgaggctcatccttggattcaagcaccttggtcaggaacaatgaaaacctatggaagggctttcatcaggggaatgtggtgcataccactgacttgggcttttgttttgcgaagatacctctggaggctggttggagaatagactagaaagggcttagtagttgtggataaatcaggtggtagttagcagttaaaccaaccaggccagagaggtgtaacttgaaggccctgctctagtgtcaccccctctgtgaggtgagctcagccaaatggagagagaggcaaggatggaagttggacttgatggtccatacattttattcctacattacaaatcccccagatggtgaggtcctcctggtccctggagcaaagtgagtgattcattctatagkcatcacagcctttgttaattctgctgccctgcttgaccatgatttcatgcctgtaaag

SEQ ID NO: 414221 - DNA, 521 bp, Homo sapiens
aacattggcctttttctgtctttggattcaaatggaaaaatcagttcttttggggtcatgagtctgctggctttcagactgtaactacagattgactctcctgagtctccagcttkctggctgcagatcttcgaacttttcagcctccatcatcctgtgagccaatttcttattttaaaagaatctctctctcttgctctgtgtatttctcttcctctctctctctctgcttttctctccatctctatatatgtatatgtataatatgtatatataacacatatatagataaagatagatagttggaaaatatctctctctataggaaattttatatatatatatatatatatatatatatatatatatatatatatataatctcttctctattctctgtaaaaccctgactaatgcagagatgattaggaaagggtttccaaataagattttattatcccacttgagatccttagagaaagcagtcatgatccaaactaatgggtaaagacatctagtta

SEQ ID NO: 414222 - DNA, 521 bp, Homo sapiens
aacattggcctttttctgtctttggattcaaatggaaaaatcagttcttttggggtcatgagtctgctggctttcagactgtaactacagattgactctcctgagtctccagcttgctggctgcagatcttcgaacttttcagcctccatcatcctgtgagccaatttcttattttaaaagaatctctctctcttgctctgtgtatttctcttcctctctctctctctgcttttctctccatctctatatatgtatatgtataatatgtatatataacacatatatagataaagatagatagttggaaaatatmtctctctataggaaattttatatatatatatatatatatatatatatatatatatatatatatataatctcttctctattctctgtaaaaccctgactaatgcagagatgattaggaaagggtttccaaataagattttattatcccacttgagatccttagagaaagcagtcatgatccaaactaatgggtaaagacatctagtta

SEQ ID NO: 414223 - DNA, 597 bp, Homo sapiens
tagatcagctgggacattttaattaaaatttcaaaatgtagggagcagaaaatttcttcwcactcttatttatccaagttaaaataaaaactctgtcattaaaaagggaaatacatttctatttcctcaaaagaagagaaggaaaggtgaattatgtagtagcatttgtttgcttacagataagtgtgtaaaaaggagaatttgagcataggatttttccaatcagttgttttaattatcatttaagagaactttgaggaattgtttagatttaaaatataattttgcctggatttcattatacaaatttttataagctaaatattttaaaatagtagtcatggaaagtattatgagtaattaagatgatataaaaataaaagaacaagaatcttttgggagatgttatttctaaatgttgactagctatactagaattcttacaaaatatttgggtaaataaagggattctgcatctgtgcttgttatagtaggatttctatggagtgactctgtgtggaggggagacagctaatcaaatatatcaagtatgttaacaaattacttggaaaagggtatcttaactgaagttttatt

SEQ ID NO: 414224 - DNA, 570 bp, Homo sapiens
gtagggttgatatctgtggtcaatatatttagttattcagcaaatagtttcgagcttctgctgtctataggtgctatgcttaatgcaaagtataaaatataggtctggtccttgttctcaaagagcttacaatctagtacgggagttttaaaaaattagagttcaaaggagaatatggtaggcatcgctgtgggttggcagagagcctctactcatcagagtcacacagtgactcagcatgatggagcttcatcatcttgaatgctgctgcttactgaatgctgagggacaagggtacccaagcatttctcaccacactgacaaatgaatgttaarcatagaagtctttatcacttccgctatcactcaaggtccagagcaagtcatagggccttaagtcaagcagaaagtgcagatctaccatgtgcaatgctacatggaactggaaatgagtggcaagcagaattcatgatgattccaataattaatcctcttctgttggtatacctggatgaccttattttgtgggataagatttaatgagaagaatatttagcagagatagtttga

SEQ ID NO: 414225 - DNA, 570 bp, Homo sapiens
gtagggttgatatctgtggtcaatatatttagttattcagcaaatagtttcgagcttctgctgtctataggtgctatgcttaatgcaaagtataaaatataggtctggtccttgttctcaaagagcttacaatctagtacgggagttttaaaaaattagagttcaaaggagaatatggtaggcatcgctgtgggttggcagagagcctctactcatcagagtcacacagtgactcagcatgatggagcttcatcatcttgaatgctgctgcttactgaatgctgagggacaagggtacccaagcatttctcaccacactgacaaatgaatgttaagcatagaagtctttatcacttccgctatcactcaaggtccagagcaagtcatagggccttaagtcaagcagaaagtgcagatctaccatgtgcaatgctacatggaactggaaatgagtggcaagcagaattcatgatgattccaataattaatcctcttstgttggtatacctggatgaccttattttgtgggataagatttaatgagaagaatatttagcagagatagtttga

SEQ ID NO: 414226 - DNA, 570 bp, Homo sapiens
gtagggttgatatctgtggtcaatatatttagttattcagcaaatagtttcgagcttctgctgtctataggtgctatgcttaatgcaaagtataaaatataggtctggtccttgttctcaaagagcttacaatctagtacgggagttttaaaaaattagagttcaaaggagaatatggtaggcatcgctgtgggttggcagagagcctctactcatcagagtcacacagtgactcagcatgatggagcttcatcatcttgaatgctgctgcttactgaatgctgagggacaagggtacccaagcatttctcaccacactgacaaatgaatgttaagcatagaagtctttatcacttccgctatcactcaaggtccagagcaagtcatagggccttaagtcaagcagaaagtgcagatctaccatgtgcaatgctacatggaactggaaatgagtggcaagcagaattcatgatgattccaataattaatcctcttctgttggtatacctggatgwccttattttgtgggataagatttaatgagaagaatatttagcagagatagtttga

SEQ ID NO: 414227 - DNA, 554 bp, Homo sapiens
agtcctccttgttctatattcaactttatttatttatttatttaattttttttttttttgagatggagtctcactctgtcatccaggctggagtgcaatggcacgatcttggcccactgcaacctctgtctcccaggttcaagcgattctcctgcctcaggctcctaagtagctgggattacaggtgcccaccatcatgcccagctaatttttgtatttttatagagacggggtttcaccatgttggccaggctggtcttgaactcctgacctcaggtgaactgcccacctcggcctcccaaaatgctggtattacaggcatgagccawcacgcgcagccaatattcaaatttaatacatgtttttgtcctcctgcatccactcactcccagcctggaacatggaatcacatggcagggttctgtctgatggaacatgaatgaacaatatattgcactaacagacctggctatcaaacatctcaaacttttataggctctttctctatccatttggctggatggaaactcccacagccttgaatatggctatgc

SEQ ID NO: 414228 - DNA, 585 bp, Homo sapiens
acctggctatcaaacatctcaaacttttataggctctttctctatccatwtggctggatggaaactcccacagccttgaatatggctatgccacaagatgaaagagatcaaatctctgcctcacccatgggaggtgaactgccttagcaggaacatgcacactgaactttaggctttaagtgagccagaaataaacctttgttgtgcaaaactcctgagaatgttgttagcattacttaccctaacaaatatcctaggtattcaattaaatctgtttaaaatgattgattgaatgaatgaattcaagaaataacgcagaaatatttaaataaatgtgatggaacccatgagcaggaaagataaaactaggaataggaaaagatggttttaagagttaaagaagcatagagacaagaaagagaataagaagaaactaagtgaagtgtctctactacccctgcccccaccccaatcacaaacagaattcacttcgcctgctgttctctgccctccttttgtcaatcagccataaaaaatcacaaacagggaagagttttaaatagtttctgctgctgctggacaact

SEQ ID NO: 414229 - DNA, 585 bp, Homo sapiens
acctggctatcaaacatctcaaacttttataggctctttctctatccatttggctggatggaaactcccacagccttgaatatggctatgccacaagatgaaagagatcaaatctctgcctcacccatgggaggtgaactgccttagcaggaacatgcacactgaactttaggctttaagtgagccagaaataaacctttgttgtgcaaaactcctgagaatgttgttagcattacttaccctaacaaatatcctaggtattcaattaaatctgtttaaaatgattgattgaatgaatgaattcaagaaataacgcagaaatatttaaataartgtgatggaacccatgagcaggaaagataaaactaggaataggaaaagatggttttaagagttaaagaagcatagagacaagaaagagaataagaagaaactaagtgaagtgtctctactacccctgcccccaccccaatcacaaacagaattcacttcgcctgctgttctctgccctccttttgtcaatcagccataaaaaatcacaaacagggaagagttttaaatagtttctgctgctgctggacaact

SEQ ID NO: 414230 - DNA, 568 bp, Homo sapiens
aggggtccacatgtaggttttcccttcccttgtgggaagagaatcatccctgtgctttgccctttcctatagaaacgtggttggatacccacatttatacaaagtctggctataactattttcccatgagttttgtgaaccrgggattaaaaaaaataataaaagaaattcagcaacaaaatcttggtctttaaagctctgggattcatttgaatcaaatgttgccatggtttcaagagtctgaaatcaacatttcaaggtaatcccaagatctagatattgctgcagcattcaggtatcaaggaacaatcaaagtgccatactccattagtgacagaactctgttaaggttgtgcaagtgcctcaaattggtattcagcttaatcactgataccgtattactaattatagcatgacaccatacaaaagtggtactttttaaaaggctggcaaatggcattattttaataagtcattaggaaattgctttttgaggatgcaatgaaagtacaagtttctcaattaggggaattatgtggagttgatgagatatttgagcacgcatgat

SEQ ID NO: 414231 - DNA, 611 bp, Homo sapiens
tcccagtttgtcatctgtgggtgagattaattgaagtcaaataggaacaatagccattaacacattggggtctgatgaacaatgcttagattggaggaagttatatatatacatatatatatacacacacacacacatatacatacagtatgtatatacataacatacatagcatcattcttaagaccagttggaaaatgtctggtsacattaatgggacggcatatatgggcataagtggctcagggcctatagatgaaacttttcctccctgaaacttcgggacagattatacattatctacttgagttaccaaagatacagagcccaactctgtattttaggaaattaaactatgaaataagattcttaaaaattaaaaaagacatgaatactgcttagtcattttgttaggtgtttgaggtaacttgtagtctgaagacattacgacttcagtcttacacagagcaaaattcgtggaatgactcggttgatctcagcatgtaggagaacagacacatttttcaaaagcagcaattgacttgttaaaggtttgacatatcacaaacattttgattttgtgatcagactggatagtgatttacttatcc

SEQ ID NO: 414232 - DNA, 571 bp, Homo sapiens
aggaattcagagggcaaagaggaggaaacacaaagatgtaataaaggctatagtggttgctaaaacgacaagaaaaacaaatggaaatcatttgatttgcactgcacctgtgagagaagamattatggtccctttttacatctgaatctcacaggtctattttgagagttgagagatctgtgtgaggtacctaattcactcttctcaaacagccttcactttaagagaactcaactgtgaaatttatagaaattatttctgaagctaagaagaaagttcaaataccttttgcttttcactatttcatcaaaactcttctaaaatcccgagacacaatgtagtgtggtgtgattaagataggccaagtcataggttgctataattattaaaaaccttggtttatccttgtgtacaaggaatagaatctctcaacctatctcatgtcattaaccttcccaaggagcagggtaatgtggttactgcttttggtacctgaaagattccaagacttgaggcactgagaaacaaagtgtttggctgagggatcagataagagaatagcagacgaacc

SEQ ID NO: 414233 - DNA, 416 bp, Homo sapiens
taaatggttgatgggtagatgggtggaaaagtggatgagtggatgagttaatgagaagagtgagtgagtaaacaaaaataaattgacaactcaggaaataatattctgtcaggtcatgtgttctcattttaggtttgggaaatctggccaaggtaattggaaagtacrgtagaattcattgacatatctggatattcagaaaggcttaagataatactgcagatggtaaaataaaaagttagagagccagttaattgtttctccatagatacacatacagttaacttcaactcacttgtttatttatctatgattatcctcagctcaagcatcattttttcagagataactttccaggctcccaatcccacacatggtctaggtcagggcatttattaaacaatctcaaagaatca

SEQ ID NO: 414234 - DNA, 583 bp, Homo sapiens
gtacggtagaattcattgacatatctggatattcagaaaggcttaagataatactgcagatggtaaaataaaaagttagagagccagttaattgtttctccatagatacacatacagttaacttcaactcacttgtttatttatctrtgattatcctcagctcaagcatcattttttcagagataactttccaggctcccaatcccacacatggtctaggtcagggcatttattaaacaatctcaaagaatcatgtactgttgcttcatcacactggtctctgcatattcttatgtatacaatagtttgtgttatttatttttagattcatgcctgtctcccctagaagaatataagatcaaaaagaagagtcggagcctcatctgtttttgcttcccagagatagcatcaacatctaagacagtatttggcatgtaaaaggtgctaaataaatatttgttgaataggtaaagagaagcactcctgtctcactgactgaaatactgtgaatatgcaagaagcaatgctttttcagaactctgtaaatgtttgctattcaaaaaaaaaaggtttttaccgctca

SEQ ID NO: 414235 - DNA, 583 bp, Homo sapiens
gtacggtagaattcattgacatatctggatattcagaaaggcttaagataatactgcagatggtaaaataaaaagttagagagccagttaattgtttctccatagatacacatacagttaacttcaactcacttgtttatttatctatgattatcctcagctcaagcatcattttttcagagataactttccaggctcccaatcccacacatggtctaggtcagggcatttattaaacaatctcaaagaatcatgtactgttgcttcatcacactggtctctgcatattcttatgyatacaatagtttgtgttatttatttttagattcatgcctgtctcccctagaagaatataagatcaaaaagaagagtcggagcctcatctgtttttgcttcccagagatagcatcaacatctaagacagtatttggcatgtaaaaggtgctaaataaatatttgttgaataggtaaagagaagcactcctgtctcactgactgaaatactgtgaatatgcaagaagcaatgctttttcagaactctgtaaatgtttgctattcaaaaaaaaaaggtttttaccgctca

SEQ ID NO: 414236 - DNA, 577 bp, Homo sapiens
aagtgtcacatgctttcaaacaaccagatatcggaagaacgaactcactatcacgaggactgcaagagggaagtccactccatgattcaatcacctcccaccaggcccctcccctgacacatgrggattacaatttgagatgagatttaggtggggacacggagccaaaccatatcagtctttcaatctgtaactcaaataatttatgaccctttcctgcccctcacccccacactagaccttgggaaagccatgtgcaggaagatatgccacttgcagcaagggttttctcattttatgtagagtagtacaaaagataaataagacaacatattccgggatttggggtctttttcttcacttaagaatcagagaccagtgcatgctactgatgtaactcataaaaaataatgggtgagacaagaggccagaggtccctgcacatgcgatcaataaggccagaagaaaggagaaatccccatgacaggcaaatccttgatgagcttctctgttccaaccactgggacacagtacagtaaatggcaaatgaatagggaaaataggaaaaaaaaaaatg

SEQ ID NO: 414237 - DNA, 577 bp, Homo sapiens
aagtgtcacatgctttcaaacaaccagatatcggaagaacgaactcactatcacgaggactgcaagagggaagtccactccatgattcaatcacctcccaccaggcccctcccctgacacatggggattacaatttgagatgagatttaggtggggacacggagccaaaccatatcagtctttcaatctgtaactcaaataatttatgaccctttcctgcccctcacccccacactagaccttgggaaagccatgtgcaggaagatatgccacttgcagcaagggttttctcattttatgtagagtagtacaaaagataaataagacaacatattccgggatttggggtctttttcttcacttaagaatcagagaccagtgcatgctactgatgtaactcataaaaaataatgggtgagacaagaggccagaggtccctgcacatgcratcaataaggccagaagaaaggagaaatccccatgacaggcaaatccttgatgagcttctctgttccaaccactgggacacagtacagtaaatggcaaatgaatagggaaaataggaaaaaaaaaaatg

SEQ ID NO: 414238 - DNA, 577 bp, Homo sapiens
aagtgtcacatgctttcaaacaaccagatatcggaagaacgaactcactatcacgaggactgcaagagggaagtccactccatgattcaatcacctcccaccaggcccctcccctgacacatggggattacaatttgagatgagatttaggtggggacacggagccaaaccatatcagtctttcaatctgtaactcaaataatttatgaccctttcctgcccctcacccccacactagaccttgggaaagccatgtgcaggaagatatgccacttgcagcaagggttttctcattttatgtagagtagtacaaaagataaataagacaacatattccgggatttggggtctttttcttcacttaagaatcagagaccagtgcatgctactgatgtaactcataaaaaataatgggtgagacaagaggccagaggtccctgcacatgcgatcaataaggccagaagaaaggagaaatccccatgacaggcaaatccttgatgagcttctctgttccaaccactgggacacagtacagtaaatggcaaatgaatagggraaataggaaaaaaaaaaatg

SEQ ID NO: 414239 - DNA, 610 bp, Homo sapiens
caaatgctaaatgacgagttaatgggtgcagcacaccacatgctacatatatacctatgtaacaaacctgcacgttgtgcacatgtaycctagaacttaaagtataatttaaaaaaaaaaaaaaaagaaatgcacatggagaaaaccaagacactcctgtcaactgctaagctccaagtagatgaccagtacctactgccagcagtgtaagcacaccaatttgcacgtttcagccctgtcaggtccctagatgtctgcagcccagatgacatgacatcacatagaagagaagaatagcctggctgagcccagtcaacccacaaagttgtaacagaaaataaaatgtttgctgttttgtgccattaaatttaaagatggtttattgcacagtaataactagaacacaacccttctctggcccctgggtttctggaacaggatgattcttatcattaattggggaaagttttacttgcaacatcatttgtttaaaggatttaattgagaaaagttttcttttgttctttcttccttgatgaaaaggtaaagctgaaatatttcaaagcaaaccataattactatgttgactgacccttctacaaagagctga

SEQ ID NO: 414240 - DNA, 565 bp, Homo sapiens
aaaaccaagacactcctgtcaactgctaagctccaagtagatgaccagtacctactgccagcagtgtaagcacaccaatttgcacgtttcagccctgtcaggtccctagatgtctgcagcccrgatgacatgacatcacatagaagagaagaatagcctggctgagcccagtcaacccacaaagttgtaacagaaaataaaatgtttgctgttttgtgccattaaatttaaagatggtttattgcacagtaataactagaacacaacccttctctggcccctgggtttctggaacaggatgattcttatcattaattggggaaagttttacttgcaacatcatttgtttaaaggatttaattgagaaaagttttcttttgttctttcttccttgatgaaaaggtaaagctgaaatatttcaaagcaaaccataattactatgttgactgacccttctacaaagagctgataggtgaatattatgtttcagatgaaagctacctagaattagcctcaaccctttatggaacaacaatttccaagactagttaacggtgagactggg

SEQ ID NO: 414241 - DNA, 565 bp, Homo sapiens
aaaaccaagacactcctgtcaactgctaagctccaagtagatgaccagtacctactgccagcagtgtaagcacaccaatttgcacgtttcagccctgtcaggtccctagatgtctgcagcccagatgacatgacatcacatagaagagaagaatagcctggctgagcccagtcaacccacaaagttgtaacagaaaataaaatgtttgctgttttgtgccattaaatttaaagatggtttattgcacagtaataactagaacacaacccttctctggcccctgggtttctggaacaggatgattcttatcattaattggggaaagttttacttgcaacrtcatttgtttaaaggatttaattgagaaaagttttcttttgttctttcttccttgatgaaaaggtaaagctgaaatatttcaaagcaaaccataattactatgttgactgacccttctacaaagagctgataggtgaatattatgtttcagatgaaagctacctagaattagcctcaaccctttatggaacaacaatttccaagactagttaacggtgagactggg

SEQ ID NO: 414242 - DNA, 565 bp, Homo sapiens
aaaaccaagacactcctgtcaactgctaagctccaagtagatgaccagtacctactgccagcagtgtaagcacaccaatttgcacgtttcagccctgtcaggtccctagatgtctgcagcccagatgacatgacatcacatagaagagaagaatagcctggctgagcccagtcaacccacaaagttgtaacagaaaataaaatgtttgctgttttgtgccattaaatttaaagatggtttattgcacagtaataactagaacacaacccttctctggcccctgggtttctggaacaggatgattcttatcattaattggggaaagttttacttgcaacatcatttgtttaaaggatttaattgagaaawgttttcttttgttctttcttccttgatgaaaaggtaaagctgaaatatttcaaagcaaaccataattactatgttgactgacccttctacaaagagctgataggtgaatattatgtttcagatgaaagctacctagaattagcctcaaccctttatggaacaacaatttccaagactagttaacggtgagactggg

SEQ ID NO: 414243 - DNA, 565 bp, Homo sapiens
aaaaccaagacactcctgtcaactgctaagctccaagtagatgaccagtacctactgccagcagtgtaagcacaccaatttgcacgtttcagccctgtcaggtccctagatgtctgcagcccagatgacatgacatcacatagaagagaagaatagcctggctgagcccagtcaacccacaaagttgtaacagaaaataaaatgtttgctgttttgtgccattaaatttaaagatggtttattgcacagtaataactagaacacaacccttctctggcccctgggtttctggaacaggatgattcttatcattaattggggaaagttttacttgcaacatcatttgtttaaaggatttaattgagaaaagttttcttttgttctttcttccttgatgaaaaggtaaagctgaaatatttcaaagcaaaccataattactatgttgactgacccttctacaaagagctgataggtgaatattatgtttcagatgaaagctayctagaattagcctcaaccctttatggaacaacaatttccaagactagttaacggtgagactggg

SEQ ID NO: 414244 - DNA, 596 bp, Homo sapiens
attttcttgcatagggtctgagaaagaaatctacacttctggaaggaaactgaggtagaggatgagtaatcactctattcaaaagcatgatcatacctggtggcagtactcacaatctgagaaactctaattgtatctttatttctcaaaaacacacttgtcttttatcaatacataagtcaaggttatttttctttgttctacagcrcaatctcagcctaattctttatctgatcgttttccactttgtcataaaagaaaagaatacaggttccatttttagcttgagaaaaatggaaaattccctctctgtagcaagctggaaagtggctcttataacaaaataattacctaattaaagtactcacttgaatcagttaccacaagcccaattaaatcgaactgccaacaggaatatataatacctgataaggaagagttagtgagtagatagacacagagcatgaagatcatgctctccatttaacttagggaagatattatgtattcttccctttaaaaggtgctatattttcccaatgaaatgttgtttcttaatatgccaatgaagctacatacctggtagtgagaatgtt

SEQ ID NO: 414245 - DNA, 551 bp, Homo sapiens
aacaataaatgtcatggattataaaatgaatcctaktaaatgttgaaatttaatatgttaaaatgtgaccagaaggtgcatcctagaattgaagaaataaaatatttctgtctagatttgttatgaaaagaaaattatagataataattaaaagtttagaaaatacatcccataagaaaaagatttttttttaactgagagtacttagctgggagaacagattaagaggcaattttataacaagctttaaatttatgaagcactcttaaatggaagaggatggcagcctttttctcataattctaagaaaacagaagaagaaaaaagaaagcaaatgggtttaaatcataaagtaagggctttaatttagacataaattaaatatatttttggccagaaatactttcaaaaattattaaaaatggctggggagtctctttctccagagatgccatcagaatgtttcaagctgagaaacgagcttttagataaattttgttgagcaaagatacacggcctggtgggacaggagacaaaaaacattttggagg

SEQ ID NO: 414246 - DNA, 593 bp, Homo sapiens
ttaactatcactaaggaaaaaaacagtaccaccatttataacaataaatgtcatggattataaaatgaatcctagtaaatgttgaaatttaatatgttaaaatgtgaccagaaggtgcatcctagaattgaagaaataaaatatttctgtctagatttgttatgaaaagaaaattayagataataattaaaagtttagaaaatacatcccataagaaaaagatttttttttaactgagagtacttagctgggagaacagattaagaggcaattttataacaagctttaaatttatgaagcactcttaaatggaagaggatggcagcctttttctcataattctaagaaaacagaagaagaaaaaagaaagcaaatgggtttaaatcataaagtaagggctttaatttagacataaattaaatatatttttggccagaaatactttcaaaaattattaaaaatggctggggagtctctttctccagagatgccatcagaatgtttcaagctgagaaacgagcttttagataaattttgttgagcaaagatacacggcctggtgggacaggagacaaaaaacattttggaggtaa

SEQ ID NO: 414247 - DNA, 593 bp, Homo sapiens
ttaactatcactaaggaaaaaaacagtaccaccatttataacaataaatgtcatggattataaaatgaatcctagtaaatgttgaaatttaatatgttaaaatgtgaccagaaggtgcatcctagaattgaagaaataaaatatttctgtctagatttgttatgaaaagaaaattatagataataattaaaagtttagaaaatacatcccataagaaaaagatttttttttaactgagagtacttagctgggagaacagattaagaggcaattttataacaagctttaaatttatgaagcactcttaaatggaagaggatggcagcctttttctcataattctaagaaaacagaagaagaaaaaagaaagcaaatgggtttaaatcataaagtaagggctttaatttagacataaattaaakatatttttggccagaaatactttcaaaaattattaaaaatggctggggagtctctttctccagagatgccatcagaatgtttcaagctgagaaacgagcttttagataaattttgttgagcaaagatacacggcctggtgggacaggagacaaaaaacattttggaggtaa

SEQ ID NO: 414248 - DNA, 602 bp, Homo sapiens
taaaatataattcaaatctcagctccacgcttctttaatttttgataatgagcatttggtgttcaagagtacatagcgttataaattgaggcagctaataaccctaagaattagctcctttgaaatcagtgacaagagtaccctctcagactttttttttctcttgaccttgacgttccacaactgcaaatattgctgatgcttttaatttcctaatgatagttctcctttaagtgattctaaagaacagaagtctgtctctggaaacagcctctgattaaacccaccaccttcttcaattcaccggaatcacccaatcattctgcccttgaccccagaacctggatttgaccacagagtgtaatgaaagggggaagggaggggatgattgaactctgcagtaagatgtgccttaacagcatggtcccatcagaagtcccctagtttaacaactctacacctgaggctgggcttccatgagattttttatgctgaggcaccttctctactgaaggcagyaagtgggtattgtcctaaagaaaatcctctaattagcacaaggagtcttaagaaagtgtaacctaaaatgtagtcagtgccac

SEQ ID NO: 414249 - DNA, 538 bp, Homo sapiens
aaagctccttaccacaaacatttcaaatgatgctaataaagcctattctctctgtcatggtgagactttggagaatttaggaatcaataatgtcctataaggtctygcttgtcctcccataggttatctttcaaagcggactatattctcatctgtctcagaagccacttacaaatataactttcacaaagtttgccaacacattttatttatagttcccaacaggatcatccctttctgaaatgagttccataagtataaaaatctctagactaagagtagtgatgataaatatctctagactaaaagtagtgattataaatataatcaacctattctactactctcaattttcagaattgatttggacatagttaactcttgtttcccatttaactcttttatttgtgttattttgttatgcttgttattgcttacttccattttctatacatgtgacaatatacattatcatcagccacaaggcaaaaaaatgattctaacattcatatgctggagcaatcaagaagagccaaga

SEQ ID NO: 414250 - DNA, 565 bp, Homo sapiens
gcatggtggtgggcgcctgcaattccagcaacccaggaggctgaggcaggagaatcgcttgaacctgggaggcagaggttgcagtgaaccgaggttgtgccattggactccagcctgggcaataagagcaaaactcagtctcgaaaaaataaacaaacgaacaaataaacaaataaataaataaataaatttggatttgttttacattcagtcttctcyatttccagaacgcagatgaaatgagggtgacatcagggatctatctgaagctttacactgcatgaaacttcctctggaccctaggggcttgccactagaccagcctacaagctattgtacagtttgaaagatttttttagagcaacatagttgctttattaattttttaaaaagagctttttttctgatatgtctgtgtctagagtcaggatagaaaatatgcagatatattctacatttatctaatgtcactatattccatgctataaacattaataacgtcttcagagtcaggggaaaatgtaaggagagtgtgataaagacagagcctagaataaaagaaaaa

SEQ ID NO: 414251 - DNA, 565 bp, Homo sapiens
gcatggtggtgggcgcctgcaattccagcaacccaggaggctgaggcaggagaatcgcttgaacctgggaggcagaggttgcagtgaaccgaggttgtgccattggactccagcctgggcaataagagcaaaactcagtctcgaaaaaataaacaaacgaacaaataaacaaataaataaataaataaatttggatttgttttacattcagtcttctccatttccagaaygcagatgaaatgagggtgacatcagggatctatctgaagctttacactgcatgaaacttcctctggaccctaggggcttgccactagaccagcctacaagctattgtacagtttgaaagatttttttagagcaacatagttgctttattaattttttaaaaagagctttttttctgatatgtctgtgtctagagtcaggatagaaaatatgcagatatattctacatttatctaatgtcactatattccatgctataaacattaataacgtcttcagagtcaggggaaaatgtaaggagagtgtgataaagacagagcctagaataaaagaaaaa

SEQ ID NO: 414252 - DNA, 601 bp, Homo sapiens
ataaaataaataagcaagtaatagtgttacaaatgccattagtactctgaaatgagtgtataaaagatgttaggaataaagaatgtgcaatctatgaagagttttagggagaagagtgaaatgacataatttatatttctaacagaccacagtgacagtttgtggaaaatggaaggttgcaagtgtgaaagtgagcaagtgaaagtcattctctgctgcaggagagygacataagctggccttgcttgacttcaaaatagttttcagtgtgatcaattcaccatttccatgtggaggaggtctgttgttcagactctttgggggctaaaaaaggttctttatgatgagagctggtaagtcaatgaaacagatcccaactccaagttggatcatggggtgatgcagcagaagactccaaaagtcacagatgaaagaagtttgcgccaaatttagaataaagagatttagaaggctgctggtcggtttgaggcacagatttcagatggcacaggaggagatagcaagcagtgttggacaggtcttcatgtaaggaaggagccaggacccgctcctaccagaaacccgagctctgccatttgat

SEQ ID NO: 414253 - DNA, 601 bp, Homo sapiens
ataaaataaataagcaagtaatagtgttacaaatgccattagtactctgaaatgagtgtataaaagatgttaggaataaagaatgtgcaatctatgaagagttttagggagaagagtgaaatgacataatttatatttctaacagaccacagtgacagtttgtggaaaatggaaggttgcaagtgtgaaagtgagcaagtgaaagtcattctctgctgcaggagagcgacataagctggccttgcttgacttcaaaatagttttcagtgtgatcaattcaccatttccatgtggaggaggtctgttgttcagactctttgggggctaaaaaaggttctttatgatgagagctggtaagtcaatgaaacagakcccaactccaagttggatcatggggtgatgcagcagaagactccaaaagtcacagatgaaagaagtttgcgccaaatttagaataaagagatttagaaggctgctggtcggtttgaggcacagatttcagatggcacaggaggagatagcaagcagtgttggacaggtcttcatgtaaggaaggagccaggacccgctcctaccagaaacccgagctctgccatttgat

SEQ ID NO: 414254 - DNA, 589 bp, Homo sapiens
tgggcttttgcaagagatgctgcagacagaaaaactatgttagacctgtgcacatgtttatatctgtgtgtgtatatacatacatacatatatatgaccattttaatttatttaatttatgaatcatttttctataatacaaatttcttgcaaaawataatgctatagcctacgagttcttacaaagtcacaaacaagaactagcgacatgtacttgacataacgtgaagtcctgtgctctgtgctctctgcagggagagatgaggtgattcttcagaagctgatcaaaattccctgcctccctcagggtagctgagcctcggaacagcgggagcactgcgccatctggtgggcagatgcactgcatcaacgttcattagcagaggcttttacacacacacacacacacacacacacacacacacacacacacacatgcttttcaaggaagactcgagaacaaatcccgaagctgagtgacaactacaaaataccatcaattaaagatattatctggtaagtttcacaacagattataaatgaacaggattgaaatgtggtaccactgtaaatctttaatttttcagtt

SEQ ID NO: 414255 - DNA, 589 bp, Homo sapiens
tgggcttttgcaagagatgctgcagacagaaaaactatgttagacctgtgcacatgtttatatctgtgtgtgtatatacatacatacatatatatgaccattttaatttatttaatttatgaatcatttttctataatacaaatttcttgcaaaaaataatgctatagcctacgagttcttacaaagtcacaaacaagaactagcgacatgtacttgacataacgtgaagtcctgtgctctgtgctctctgcrgggagagatgaggtgattcttcagaagctgatcaaaattccctgcctccctcagggtagctgagcctcggaacagcgggagcactgcgccatctggtgggcagatgcactgcatcaacgttcattagcagaggcttttacacacacacacacacacacacacacacacacacacacacacacatgcttttcaaggaagactcgagaacaaatcccgaagctgagtgacaactacaaaataccatcaattaaagatattatctggtaagtttcacaacagattataaatgaacaggattgaaatgtggtaccactgtaaatctttaatttttcagtt

SEQ ID NO: 414256 - DNA, 589 bp, Homo sapiens
tgggcttttgcaagagatgctgcagacagaaaaactatgttagacctgtgcacatgtttatatctgtgtgtgtatatacatacatacatatatatgaccattttaatttatttaatttatgaatcatttttctataatacaaatttcttgcaaaaaataatgctatagcctacgagttcttacaaagtcacaaacaagaactagcgacatgtacttgacataacgtgaagtcctgtgctctgtgctctctgcagggagagatgaggtgattcttcagaagctgatcaaaattccctgcctccctcagggtagctgagcctcggaacagcgggagcactgcgccatctggtgggcagatgcactgcatcaacgttcattagcagaggcttttacacacacacacacacacacacacacacacacacacacacacamatgcttttcaaggaagactcgagaacaaatcccgaagctgagtgacaactacaaaataccatcaattaaagatattatctggtaagtttcacaacagattataaatgaacaggattgaaatgtggtaccactgtaaatctttaatttttcagtt

SEQ ID NO: 414257 - DNA, 558 bp, Homo sapiens
tggggtcgtctagtacccagtccttcctgcctcatcacatgagactcatcacttgtttttcatgtgtctgtctccttcaccaaatggagcttctggaagacaaaacacatgtcccattctttgaatcatgagtgcttatgtttartgacacaccttcaaatactccgtgctgctttgtctttctcccttggtcattgtattagtctgttctcacactgctatgaagaaatggccaagactggataatttgtaaaggaaagggaagaagcgggcaccttcttcacagggaagcaggacagagtgagtacaagcagggtaaatgccagatgcttataaaaccaacagatcttatgagactcactgtcatgagaacagcatggggaaaactgccttcatgatttgattaccttcgtctagtccagcccttgacccaaggagattatggggattacaactcaagatgagattttggatggggacacagagccaaaccatgtcattccaccccagcccctctcaaatctcatgtcctcacatttcaaaacacagtcatgcctt

SEQ ID NO: 414258 - DNA, 611 bp, Homo sapiens
aatgaatctgagtcagtaagacctgactcagcctccttgtaatacatttaatcatttattcatccatcatcattattatcatgcacctgccctgtgccacagaaccagcagttgtggaaagacaggattctaccaagggagaggctggcattccagctctacccctgtcctcggcaatacttatagacatctatttaatgggataagaatgggatgttccctacaatccttatgtactgagtggtggagatcagaactgcaaataggtggcacacttctgcccttcattccacagtgcccgtgggagataatgttagtggcgtgcaagacgaacgtgctattgtcaagacraacgtgctattgttagtgcagatggaaagagtgtgatatggtggaaatgcatagtcttagtgtcatcgcacctgatttcactacttggtgtaattttggacaagacatttagcccctgagatatccagattcctgctcaactgtaaagtggggataatggtatcttacaaggttgtttctaaacattctatgaactaattactgtatataagtacctagcataatacttgataccaagtaagtgctttataaatgttatt

SEQ ID NO: 414259 - DNA, 611 bp, Homo sapiens
aatgaatctgagtcagtaagacctgactcagcctccttgtaatacatttaatcatttattcatccatcatcattattatcatgcacctgccctgtgccacagaaccagcagttgtggaaagacaggattctaccaagggagaggctggcattccagctctacccctgtcctcggcaatacttatagacatctatttaatgggataagaatgggatgttccctacaatccttatgtactgagtggtggagatcagaactgcaaataggtggcacacttctgcccttcattccacagtgcccgtgggagataatgttagtggcgtgcaagacgaacgtgctattgtcaagacgaacgtgctattgttagtgcagatggaaagagtgtgatatggtggaaatgcatagtcttagtgtcatcgcacctgatttcactacttggtgtaattttggacaagacatttagcccctgagatatccagattcctgctcaactgtaaagtggggataatggtatcttacaaggttgtttctaaacattctatgaactaattactgtatataagtacctagcataatrcttgataccaagtaagtgctttataaatgttatt

SEQ ID NO: 414260 - DNA, 637 bp, Homo sapiens
tttagttctgaattttcttgaagtttgagttgccagcagacatccaatagagatgtttgaggatacagatggagttctaagttcarggaagtgataggattggagagaaatatggatggataatataaatatggataaatatggatatcattaacatatggatggtagttaatgagacagggtcataaaaattaaaaaagttacatatttgtaaagctgtacataaattaattggggtctttgcgtattcttcagtatgcaggggctttttttatagcaatctcacaatatttttcttctttgtgctttactaatatttcataccatttaaaaatgggataagatgagatacttactatctactaatactttacatattttgctcttcccataacatattacaggaatatctcagttgccaaatctattgataggtttatcacctatgtcatacttaactatgtgttgggaattgtgcaagcaactggagaaataatgaaaaaaatgcattcccagcttcagtgagtcatatattttcaatggagtgttgtcagcgtaatgataaagatatgcacagggaatcgtggaatcccaggggaaagatgcctaatccatcctgtaggagccagcaaagaat

SEQ ID NO: 414261 - DNA, 637 bp, Homo sapiens
tttagttctgaattttcttgaagtttgagttgccagcagacatccaatagagatgtttgaggatacagatggagttctaagttcagggaagtgataggattggagagaaatatggatggataatataaatatggawaaatatggatatcattaacatatggatggtagttaatgagacagggtcataaaaattaaaaaagttacatatttgtaaagctgtacataaattaattggggtctttgcgtattcttcagtatgcaggggctttttttatagcaatctcacaatatttttcttctttgtgctttactaatatttcataccatttaaaaatgggataagatgagatacttactatctactaatactttacatattttgctcttcccataacatattacaggaatatctcagttgccaaatctattgataggtttatcacctatgtcatacttaactatgtgttgggaattgtgcaagcaactggagaaataatgaaaaaaatgcattcccagcttcagtgagtcatatattttcaatggagtgttgtcagcgtaatgataaagatatgcacagggaatcgtggaatcccaggggaaagatgcctaatccatcctgtaggagccagcaaagaat

SEQ ID NO: 414262 - DNA, 556 bp, Homo sapiens
tggggtttacgccattctcctgcctcagcctcccgagtagctgggactacagacgcccgccactacgcctggctaatttttttgtacttttagtagagacagggtttcatcgtgttggccaggatggtctcgatcttctgatcatgtgatctgcccacctcagtctcccaaagtgctggttccttttttttttataattcagtaaccccagcgtaatctctgaataatatttgtgtcaggcttatttgtctatgatctgtccagaacagatactctccaagtctggttattgctattcaaatcttttcctttgcmgtctcattatctatcctctcatcctgtatccttctcttcctccttccttccaagaagtgctcaagaacttagagatcacctcctcaattacaggctccgagatttagggaagttgtgagcagttcacaaatttcatccacataggtctgggttagagtcctagttcagcaattcaccagttgtgtgactataagcaaactgcttcacgtctctgatcttctgcctctttacttacaaacgc

SEQ ID NO: 414263 - DNA, 566 bp, Homo sapiens
acaatgatggtgattttatataccctgggtccccaagtgtcttaggaagaagactggagcatgggagagtagtagttaagagattgttctatggggtgagaccctctaacatttttactagcattgtaactctgaatgtattacttaccccctctctgatcttcggtttcctgataaagtgggatttgacaactatatcagaaggttatttggaggaataagtaagataatgcatgtaaaatgcttagtatagtgcttggcatcaggkaatacagaataaatgattcatatttgtgctgatgtctgttgtcatccactgccaaccttttctatcctgctctgagctccagcacatgatatgattagaaccacagagtcaaacagacctgaattcagatctttgctcctctgttaaccagctgactttagcacaacatgtgtgactttaagcaccatgagccttagtttcctcttctttaaaaaggaaatgctaacttcaaacccagtgagtgtcggtagggtaactgtgatgatgcgtttaaacacttagcactggtgtagagcat

SEQ ID NO: 414264 - DNA, 600 bp, Homo sapiens
tggtgtttgtggaatgcacaaatgccagtgagaaggcttgaagtgaacactggaagtggagtcaaaaagctggttcaagtctaggctccaaaacctgatgcaagttgcttctagccacactgagcttcaacatcctcatttgtgaaaccgaaaataagttatctgtgctgctgtgtttactccatgagattatgtaggtgaaggtgctgtatcacctttaaaattatgtagaaaactaacaggttttgatatttattgcttgttttattataaaagaaaaaaaaaaaaagaggaagcccatgctagccacatgaaagaacaggggaaacagagacagtcacagtttcctggttagttcccagctgtttaagttattccagcggagatctcagacatcattttgtagcagatacttctccgatgtacttttataaactacrgacccacagagccagaaaatatggcaataataaatacagtcactaagttttggggtagcttgtgatgtcacattagagaactccaacatattcaacctctccaggtgttcacttgaagccgcttcactagggttcgtgtgtcagggagacatggccactc

SEQ ID NO: 414265 - DNA, 644 bp, Homo sapiens
acctgatttacagggaaatctgagagtaccctgtactcccagggtctgaaggccagcaagtgatagggtaagatttgaactctgctgagtttctcttcaaagcccaatgtctatcacagaacaaggaaaccaacatttaaggaaccttcattatgatggatagggaaaagagaacaacctgctaaaactaaaacaaatattctatactttagctctcagtccctggcttgcttgaacttattaaacacccagttattcctcactgatgtgggtgacagcagttgcagcagcccacaagtttcaggtgggtccaacctcaagcccatttctaaaactctgtgggatctttatatgtgatggtgaccatatctgaccccctgcttcttggaggtgctagtttttctttatttggaaatccaattcatccaaagtagctggagctttgaatgaagaccaactcctttcatagcaaattattcatgtattcaggcaatgattcagcagcaggtagcaaatgctgactgtgtgcaaagggcttgactgtctcacttcagagaattagaaaggaagtcagacatttagtccyaggctcaagggaaagatcagatgcaaatccacatgaaccctcctaccagaagtgaatg

SEQ ID NO: 414266 - DNA, 577 bp, Homo sapiens
ggattacaggcatgagccactgtgcccagcttgttggacattcttgataacactcagccatagtgctacccattgtctacatcaatgttttttcaagcttttcagggtgcagtggagcccttttattaatttaaaatgcaatcttatgatgaaatccaaaagataaaactgatgaaaatgggtatgctctgcttgacttgggaatgaaaggactcaagcttccctttgctccccttagatacttctgaaaaacttgaagtcctggaggcatggcttggaaacctgtagcagcagttgctttatccactctgtggtttgccttcccggctagatttctgtttgcaaacagctaggcctgtcctcctttgatcagcaaacattagctccacagtagattgtggtctgacttcaacttctcctgcgatgttccagcactgccattaattgatccatgtcccactaaatcacaaaatatatcacacagaccctggcttggaacagttggtctctgaacttgatgtcaagccagtgacaaatccctcaactgatccatgamaaactttgtgagtcagctagt

SEQ ID NO: 414267 - DNA, 464 bp, Homo sapiens
attctctggaaattctgaattattaggttcttatgaggcttcagagtctatttttgcgatgctcttcaggttatccaacggctatgatcaccccaggttgagaaacagtccacatattaccttgggcttttctctattgcagtgataccaacaytcactgtatatcaaaatcgcctggatagttttgttttgttttgttttaagttagctttccatcttcaagatttggattcaattttagggaaagagcccagacttttttttcaaaaaagctcctaggtgattcttaagtgcagcctgggatagaaaaccttgctttaccccagtgcttatcatatgcattttgatttccatgaagaggtacttctcttcttcattagactgtaagttctttgaaggcatctgctttgtcaccaaatctcttcttcctaacaatagtggtgtctcagtctgttttgtgttgc

SEQ ID NO: 414268 - DNA, 464 bp, Homo sapiens
attctctggaaattctgaattattaggttcttatgaggcttcagagtctatttttgcgatgctcttcaggttatccaacggctatgatcaccccaggttgagaaacagtccacatattaccttgggcttttctctattgcagtgataccaacactcactgtatatcaaaatcgcctggatagttttgttttgttttgttttaagttagctttccatcttcaagatttggattcaattttagggaaagagcccagacttttttttcaaaaaagctcctaggtgattcttaagtgcagcctgggatagaaaaccttgctttaccccagtgcttatcatatgcattttgrtttccatgaagaggtacttctcttcttcattagactgtaagttctttgaaggcatctgctttgtcaccaaatctcttcttcctaacaatagtggtgtctcagtctgttttgtgttgc

SEQ ID NO: 414269 - DNA, 464 bp, Homo sapiens
attctctggaaattctgaattattaggttcttatgaggcttcagagtctatttttgcgatgctcttcaggttatccaacggctatgatcaccccaggttgagaaacagtccacatattaccttgggcttttctctattgcagtgataccaacactcactgtatatcaaaatcgcctggatagttttgttttgttttgttttaagttagctttccatcttcaagatttggattcaattttagggaaagagcccagacttttttttcaaaaaagctcctaggtgattcttaagtgcagcctgggatagaaaaccttgctttaccccagtgcttatcatatgcattttgatttccatgaagaggtacttctcttcttcattagactgtaagttctttgaaggcatctgctttgtcaccaaatctcttcttcctawcaatagtggtgtctcagtctgttttgtgttgc

SEQ ID NO: 414270 - DNA, 619 bp, Homo sapiens
tcttcaaaaaatattgtagaatgaacatttcatcaccccattgttgccttgggtgattacatgaattgggaaaacaaacaaatgaataaaaattactgctttaaaataacacaatctaaaataggaggggagtatgtttttctggatttgaagtacgggattcaattgtaatactgaaagaataaacttgctgattcaagcacttattttataaagactatttcctgctaccattcaaagctgtggcaaaaataataatatatgatttcaaattactttgagtcactgcatgtgtaactgacaaggaagtgagamagtgggtatcttttgttatctaaaaaattacctttcttctataaattctctgagaatccagaggacagaatgctgagctgaataattctgattgggacagaaacctttgagctactttgtaaaattacttgctttatttttttctgccaaagggggaaatctacttctgaatgaatgagtgggtaattgaaaatatgataggattacagaagacaataaaaataaatgtaatttaaaaaggccaaagatcatctccaacttgtacataaataatgaagctacgtcaggtgagtaatgagaggaa

SEQ ID NO: 414271 - DNA, 619 bp, Homo sapiens
tcttcaaaaaatattgtagaatgaacatttcatcaccccattgttgccttgggtgattacatgaattgggaaaacaaacaaatgaataaaaattactgctttaaaataacacaatctaaaataggaggggagtatgtttttctggatttgaagtacgggattcaattgtaatactgaaagaataaacttgctgattcaagcacttattttataaagactatttcctgctaccattcaaagctgtggcaaaaataataatatatgatttcaaattactttgagtcactgcatgtgtaactgacaaggaagtgagaaagtgggtatcttttgttatctaaaaaattacctttcttctataaattctctgagaatccagaggacagaatgctgagctgaataattctgattgggacagaaacctttgagctactttgtaaaattactygctttatttttttctgccaaagggggaaatctacttctgaatgaatgagtgggtaattgaaaatatgataggattacagaagacaataaaaataaatgtaatttaaaaaggccaaagatcatctccaacttgtacataaataatgaagctacgtcaggtgagtaatgagaggaa

SEQ ID NO: 414272 - DNA, 571 bp, Homo sapiens
tgattgggacagaaacctttgagctactttgtaaaattacttgctttatttttttctgccaaagggggaaatctacttctgaatgaatgagtgggtaattgaaaatatgataggattacagaagacaataaaaataaatgtaatttaaaaaggccaaagatcatctccaacttgtacataaataatgaagctacgtcaggtgagtaatgagaggaaagtctttcttctttacagcaaacttgggcacaytgacaaggtagtccagagcttatagtgatggggaaaagtactgctgacataaacccaaacagatgagggccaggcctaattagttttccagcatgaagatgaattagtgaggctgtcccttaataaacagatgccacattttggtggccgtgcaaaaccaggaggcccaaagtgttgacaagaataagtggaatgtacatgttctagagagggattagcacacttattgaatatctactatgggccaagctctggcccaacgattttttaaaattgtggtattacttccatctactcttctaaacgcagatttaatttttgc

SEQ ID NO: 414273 - DNA, 571 bp, Homo sapiens
tgattgggacagaaacctttgagctactttgtaaaattacttgctttatttttttctgccaaagggggaaatctacttctgaatgaatgagtgggtaattgaaaatatgataggattacagaagacaataaaaataaatgtaatttaaaaaggccaaagatcatctccaacttgtacataaataatgaagctacgtcaggtgagtaatgagaggaaagtctttcttctttacagcaaacttgggcacattgacaaggtagtccagagcttatagtgatggggaaaagtactgctgacataaacccaaacagatgagggccaggcctaattagttttccagcatgaagatgaattagtgaggctgtcccttaataaacagatgccacattttggtggccgtgcaaaaccaggaggcccaaagtgttgacaagaataagtggaatgtacatgtyctagagagggattagcacacttattgaatatctactatgggccaagctctggcccaacgattttttaaaattgtggtattacttccatctactcttctaaacgcagatttaatttttgc

SEQ ID NO: 414274 - DNA, 621 bp, Homo sapiens
cagtgccagaagctttggcctggctatgaatcatctctgcagatccaagacctgcacagtggacatgcttcatgccaaagaagcctggtaccagaagctccttggtttgatagaaaattcaaaaatagatgcatctgaagatcccatcagcacagctccctgctrtggccatggaagaaccctctggcacaattttgatttacgagtccctggcatgacctaatttaacttctttcattcgcatgataaatgaaaatgccagaatggagtccaaagggctttctccactcactgacaggcacctcagccagtggctgcctggtggtggcagtggaggtggcactctgttgacccagctgggacactcttcagccttcatgtggagatgtgttggcttcagaaccagctgttttatatttcctctgctcattggagacattttcaggtcatgtccagtttctagaaagaacttagggaaggcgatgtcaaggagccctaagctggactaaaagaggatgcaaaatggcattttcaagagaatggcagcatcagatcactagggaacatactaagtatgaacaatccagagtctgccctcagaaatttggattcagcaggttt

SEQ ID NO: 414275 - DNA, 560 bp, Homo sapiens
atgcctgtcctgggccatctgcagcagcccctagyaggccttgctacatctactcttgccaccccagcaatcagatctcctaaaggaatagtatttttgaaaatattaatcaagatacctcattcctctgctataaatcctctaaggtcttcctattgcacttagaataaactcgaaattccatacctgacttccttcataagacccacccccctgccaactgttatgtagtgtcactggcctctttgctttttcaacacattaagctcattcatgtctcagattctgtgcattgctgttcctactgattactcagcttccagcacccacacacagacatccccaggactcattccctcactcattcagctataaatgtcacctcctaagacccatctcttacctaaaatagctcctgtcttgctctctgccttcatcctatgccattttcacatatccatgtttggcatgatcttgtgtgtgtgtgtgtgtgtgtgtgcatgtgtgtgcgtgtgtgtgtgtaaatttagttgttcactgtctgtccctgtagtagggta

SEQ ID NO: 414276 - DNA, 560 bp, Homo sapiens
atgcctgtcctgggccatctgcagcagcccctagcaggccttgctacatctactcttgccaccccagcaatcagatctcctaaaggaatagtatttttgaaaatattaatcaagatacctcattcctctgctataaatcctctaaggtcttcctattgcacttagaataaactcgaaattccatacctgacttccttcataagacccacccccctgccaactgttatgtagtgtcactggcckctttgctttttcaacacattaagctcattcatgtctcagattctgtgcattgctgttcctactgattactcagcttccagcacccacacacagacatccccaggactcattccctcactcattcagctataaatgtcacctcctaagacccatctcttacctaaaatagctcctgtcttgctctctgccttcatcctatgccattttcacatatccatgtttggcatgatcttgtgtgtgtgtgtgtgtgtgtgtgcatgtgtgtgcgtgtgtgtgtgtaaatttagttgttcactgtctgtccctgtagtagggta

SEQ ID NO: 414277 - DNA, 558 bp, Homo sapiens
tcagcagctgctccaagaaccctaggctctgtcagatatgtgcaccccatgtataaaagctgtttcccatagtgtagttcggtttcttcactctatggattagctagggccgattaagtaaccaatttatgtactcagagctgtttaaatgcatgctgtgtctgcatgatagatggcgatgttcttctctgaaccaccattccttccccaggatattttccccctcaaaaataaatacgaaaaagagtctaaaataatactgcaagagaaacaggaaattcaaaacttttctcagctaattctaacaaagtcttaaaaaccagatggcatgaataattctacctgtgcgagggctgacagagatgtgggtcagaagcctgctggaagctagggtggtacagcgaaagcacaacggccttggagtcggagagacctgggttcaaattccaggtgggcacctattagcttcagtcctgggcaagtcaaagtactcctttgttctttgctctagtaraaaggggataatagtgtttcattttcaggttgatgtgaagttta

SEQ ID NO: 414278 - DNA, 555 bp, Homo sapiens
tcactgtcttatcattttcattgaactgttctgaagctatgtttcatctggtgccatttgcattttctacatcatgtgactccaattctctagtatctgctttcagctctgttttcaacttttcgatgtgggaccaagtgtattctctcagagacttggttttccagtctatgaggttgagaattgcaccttctagcccacatcgcagggcttttaggagattttgctacagcaatgtatgcagaagcattttggcaactaaatagatgtagaatttttatgatcaatttaaaggtactattaacactattcaacatttatgttgcttcttcatcaggtttaaaargcatcatttacatttttgtttgtgagtcttttttatagaatatttgactgaagcccagcaaggttaaaaatttgcataagatcacaggactatttgcaaggtgcccgctgaaagccactcagttcctggtgctcccttcaccctgttccctgttctctgccaggcttgtaatcatattggggagacccagcaatgaggccagcagtttc

SEQ ID NO: 414279 - DNA, 555 bp, Homo sapiens
tcactgtcttatcattttcattgaactgttctgaagctatgtttcatctggtgccatttgcattttctacatcatgtgactccaattctctagtatctgctttcagctctgttttcaacttttcgatgtgggaccaagtgtattctctcagagacttggttttccagtctatgaggttgagaattgcaccttctagcccacatcgcagggcttttaggagattttgctacagcaatgtatgcagaagcattttggcaactaaatagatgtagaatttttatgatcaatttaaaggtactattaacactattcaacatttatgttgcttcttcatcaggtttaaaaggcatcatttacatttttgtttrtgagtcttttttatagaatatttgactgaagcccagcaaggttaaaaatttgcataagatcacaggactatttgcaaggtgcccgctgaaagccactcagttcctggtgctcccttcaccctgttccctgttctctgccaggcttgtaatcatattggggagacccagcaatgaggccagcagtttc

SEQ ID NO: 414280 - DNA, 603 bp, Homo sapiens
ttgaattgctcaatagaaaagtgagggaggatatttcacatactgccagagtaggaaaagcatgaccaaaagcaaggtggtaggagaagtgtcagaatccctggggaacaaggcatcaacaggactagcaggtctgccatgctctgagggtggcagaggattggtaactaagcatagagccaaactgtggaggaacctgagggtacgcaaaggaattttgacttgagtgtttcyctctgggcatcagatttctcacctgtaaatgagctgatgtgctctatttaaggatgctaactgcctagccagtggaccgtcattctgtcactctgtgtcagtagtggacattcttggtaccctgcccagactccctttcctgggctggtgcacatactgcccagctgctgtgagtgtcagctgctaatgactgacagctgctcccttcttccaagaatagccctctgctgaggagagccaccagcgtgggggtatgaaccattcccatccccacatccatagccaatgaccaaccgccagtgtacgagaggttagccccctgcctcaattcacactgcagtggcccaggttggtccccagctgagacca

SEQ ID NO: 414281 - DNA, 603 bp, Homo sapiens
ttgaattgctcaatagaaaagtgagggaggatatttcacatactgccagagtaggaaaagcatgaccaaaagcaaggtggtaggagaagtgtcagaatccctggggaacaaggcatcaacaggactagcaggtctgccatgctctgagggtggcagaggattggtaactaagcatagagccaaactgtggaggaacctgagggtacgcaaaggaattttgacttgagtgtttccctctgggcatcagatttctcacctgtaaatgagctgatgtgctctatttaaggatgctaactgcctagccagtggaccgtcattctgtcactctgtgtcagtagtggacattcttggtaccctgcccagactccctttcctgggctggtgcacatactgcccagctgctgtgagtgtcagctgctaatgactgacagctgctcccttcttccaagaatagccctctgctgaggagagccaccagsgtgggggtatgaaccattcccatccccacatccatagccaatgaccaaccgccagtgtacgagaggttagccccctgcctcaattcacactgcagtggcccaggttggtccccagctgagacca

SEQ ID NO: 414282 - DNA, 603 bp, Homo sapiens
ttgaattgctcaatagaaaagtgagggaggatatttcacatactgccagagtaggaaaagcatgaccaaaagcaaggtggtaggagaagtgtcagaatccctggggaacaaggcatcaacaggactagcaggtctgccatgctctgagggtggcagaggattggtaactaagcatagagccaaactgtggaggaacctgagggtacgcaaaggaattttgacttgagtgtttccctctgggcatcagatttctcacctgtaaatgagctgatgtgctctatttaaggatgctaactgcctagccagtggaccgtcattctgtcactctgtgtcagtagtggacattcttggtaccctgcccagactccctttcctgggctggtgcacatactgcccagctgctgtgagtgtcagctgctaatgactgacagctgctcccttcttccaagaatagccctctgctgaggagagccaccagcstgggggtatgaaccattcccatccccacatccatagccaatgaccaaccgccagtgtacgagaggttagccccctgcctcaattcacactgcagtggcccaggttggtccccagctgagacca

SEQ ID NO: 414283 - DNA, 565 bp, Homo sapiens
gtgcatacatgggtttatagatttaaattgaaatgtaacaaacattaatttgcacagagcactgtgctggttactaaagaatagaggaaggactataaagattaataacaaaattatattttcatatctaagaccagttgtttaagataggktcagggagttgatagagaaggtcagtttttgcatgtgtgagaaagaaccaggcagacttttgataaattcgtgctgacatttcaggtttaaatctggatgatccccaaatacaaacagtgccatttctatcaagtagttttcttgtcccagaattttgctgagcaaaacgtccctcatacaacgaaagataataagatatgcaaaaaagtagaatttgacttatagttaagagaaaactcaagcaaagaaaattggcttacagatgataaaaaatgagaattcaattgacttagagatgacaaaaaaatgagaattcacaaattagaactttaactatgataaatattttttaaatcctcagaaaaagttggacacaatcagcaaagaaatggggaatttcagaagagatttg

SEQ ID NO: 414284 - DNA, 530 bp, Homo sapiens
acagagcctcagtgacctgtatgacaatattgagcagtcactcttaygtgtaattataatttcagaatgagaggagagagataatgggacagaaaattattttgatgaattattttgatgacttattagctgaagcattttccaaatttgattttttaaaacgtgtatgccaagaagttcagtgaattccaagtagaataaaaacaaagaaaccactcctaggcacatcatagctaaattcctaaaaatccaggtaatggaaaatattaaaagcagcaggacacacacacacacacacacacacacacacacacacacacggacacacaacataagtgggaaacatagtaagataaacagaagacttctcaagagaatcatgggagagcagaaggcaatggaagtactttaaggtacttaaagatgaaaaggcctgtcaatcgaaaattctctatttcagtaaaaatatttttcaaaaataaaggaaagtaactaaatattcaggtaaattaaaatggagacaatttgtt

SEQ ID NO: 414285 - DNA, 530 bp, Homo sapiens
acagagcctcagtgacctgtatgacaatattgagcagtcactcttatgtgtaattataatttcagaatgagaggagagagataatgggacagaaaattattttgatgaattattttgatgacttattagctgaagcattttccaaatttgattttttaaaacgtgtatgccaagaagttcagtgaattccaagtagaataaaaacaaagaaaccactcctaggcacatcatagctaaattcctaaaaatccaggtaatggaaaatattaaaagcagcaggacasacacacacacacacacacacacacacacacacacacggacacacaacataagtgggaaacatagtaagataaacagaagacttctcaagagaatcatgggagagcagaaggcaatggaagtactttaaggtacttaaagatgaaaaggcctgtcaatcgaaaattctctatttcagtaaaaatatttttcaaaaataaaggaaagtaactaaatattcaggtaaattaaaatggagacaatttgtt

SEQ ID NO: 414286 - DNA, 467 bp, Homo sapiens
aacacagtgagttgctccccagtctagtaggatcactaagggggcacagagacatggcctggtgatgkggtgaggtggggcaggacttcctcgagaaggtatcaaatgtgagacctgatctgagacccgaaaaatgagctttagagggccagaggacatgaggtgttgaggaaatggagaaagagaattagcaaacactcctggcaaagcaccagtccaaagtgaagacagaacagtggagcttagaaagctggaaatttctttgcaaagctggagagcggaatggagtgtcaggaggagctatctgagcaatgaggctgggagagtagagtgcagattacaaagggctacaggcaccgggctggggacctcaggctatgtgcctcctcagggctatgtacagcctgttaccaaaagttttaaactggggaatgagtgactttgcttaaaacccttgaaatgcccca

SEQ ID NO: 414287 - DNA, 645 bp, Homo sapiens
tctgccacttaatagctgtgtaagctgcgaaagtcgcttgaattttcctagctttgtgttacttacgtgtaaagtaggctacctcttttgcaggtgatcatgaagattctgtgaaagcaggtatgyaaagcatttagtacagtcctggcatatagtaaatgctcaatacactaacttgtttgtgttgtttttgtcatggatattattatacagtttcaactatggtttcgataagcctttgtggttttctaatcagcaaacccaatcatgttgcctttgctaatacaaaaaaatgcgttttgaattccaaataactttcttacaaactcttttggaacaaaactgttttcttaaataagaacagcctcatgtcacacacatataataatggagaagtatttgcctcctattttttctccattgactttctattgctttcagtcatatgaatttgggtttttaatgaaacactagcctacaaatattttgagtgttccacttgcacttattttaaaactgattttgaaaagtttctagtgagtctttcaaaaatggaaaatattacaatgtagaaagtcactgatgaggttattcatcaaggcagagcattttgcatgactagcttcacctcattcagtagagtca

SEQ ID NO: 414288 - DNA, 579 bp, Homo sapiens
atttgtccagggtcacagtgctaataaggatagaacctacaacttgaatgtaggatttttgagttcaaacttagtgccattttcagtacatcactgttgattcttaatgagaaacatagtctttcccaaggaatttctatgtgttgggaaacatgatatgaaatccatttcccagctgagaatcttctttcattcctttacattctatttaaaaatgacccctttttcattccaactcccaattaagctatttggtttgttctacctgctacttaactatatattttgtgtcacaatatcttggtttcaggtcctaaacttttatttaggcagcagtgaggatggtgtttccaacacaaattgagaaggaattatatataataagatatgctttaagcaaggagcaagatgattatttcattcctttttatgactgagtagcattctatggtatatacataccacgttttctttatccactcattgattgatgggcatttgtgttgattccatgattttkcaattgtgaattgtgctgctgtaaacatgtgtgtagaagtatctttttcgtataatgac

SEQ ID NO: 414289 - DNA, 617 bp, Homo sapiens
atctgccttcagctggcaaggccagcaatatacctctactgtccaacctcagtggtatatcagttctccggctttgtgtcataatcttattcagagagagcttgatcactttttgcttccgcaaggtatcacactggtccattacattgatgatattatgctgattggatccagtgagcaagaagtagcaagcacactggacttattggtgagacatttgcatgccagaggatgggaaataaatccaagtaaaattcagggaccttctacctcagtaaaatttctacaagtccagtggtgtggggcctgttgagatattatttctaaggtgaaggataagttgctgccatttgsgccctcctacaaccaagaaagaggcataacacctagtgggtctatgtggattttggaggcaacacattcctcatctgggtgtgttactccagcccatttatttagtgaccccgaaggctgccagttttgagtagggtccagaacagtagaaggttctgcaacaggtccaggctgctgtgaagctgctgtgccacttgggccatacaatacagtagatccaatggtgcttgaggtgacagtggcagatagggatgctgtttgga

SEQ ID NO: 414290 - DNA, 617 bp, Homo sapiens
atctgccttcagctggcaaggccagcaatatacctctactgtccaacctcagtggtatatcagttctccggctttgtgtcataatcttattcagagagagcttgatcactttttgcttccgcaaggtatcacactggtccattacattgatgatattatgctgattggatccagtgagcaagaagtagcaagcacactggacttattggtgagacatttgcatgccagaggatgggaaataaatccaagtaaaattcagggaccttctacctcagtaaaatttctacaagtccagtggtgtggggcctgttgagatattatttctaaggtgaaggataagttgctgccatttgcsccctcctacaaccaagaaagaggcataacacctagtgggtctatgtggattttggaggcaacacattcctcatctgggtgtgttactccagcccatttatttagtgaccccgaaggctgccagttttgagtagggtccagaacagtagaaggttctgcaacaggtccaggctgctgtgaagctgctgtgccacttgggccatacaatacagtagatccaatggtgcttgaggtgacagtggcagatagggatgctgtttgga

SEQ ID NO: 414291 - DNA, 593 bp, Homo sapiens
ttagcaagttgtgtacttttatttccatgtaaggggaagtcagtctctttcagaggagtaggacagtaatattcatcttcagttttgcctgcctttcatcttctgataacagaatccctctttcttgaggggaacctattctgagtagttcatggtattcatccttcctatccatcataggcaaggcatacaacccaggcttggcacgttagaggacagctttctccgtaaccataatgattggctcagagtttgaccaattagagcatttgctcagacttctgctagaacttttgggaatatggcattctctcccctctaagattcctagttgtaaagacgaggttagccaagagttgtgccacatatgtgtcgctatttagcaaaagctgaccttacagaagtaaagtaaagcagagtgtccactgatggaaccctttttttaaartcctgatgatgtcatttgggccttcatgacaggcactgctgtcctgaagttccctgtgtgccaaaaaataatcctcctttttctgtgcgtcttttatagctatcttgaagaataattgacatactattgtctgcatatatgtaaa

SEQ ID NO: 414292 - DNA, 611 bp, Homo sapiens
aatgaatctgagtcagtaagacctgactcagcctccttgtaatacatttaatcatttattcatccatcatcattattatcaygcacctgccctgtgccacagaaccagcagttgtggaaagacaggattctaccaagggagaggctggcattccagctctacccctgtcctcggcaatacttatagacatctatttaatgggataagaatgggatgttccctacaatccttatgtactgagtggtggagatcagaactgcaaataggtggcacacttctgcccttcattccacagtgcccgtgggagataatgttagtggcgtgcaagacgaacgtgctattgtcaagacgaacgtgctattgttagtgcagatggaaagagtgtgatatggtggaaatgcatagtcttagtgtcatcgcacctgatttcactacttggtgtaattttggacaagacatttagcccctgagatatccagattcctgctcaactgtaaagtggggataatggtatcttacaaggttgtttctaaacattctatgaactaattactgtatataagtacctagcataatacttgataccaagtaagtgctttataaatgttatt

SEQ ID NO: 414293 - DNA, 612 bp, Homo sapiens
atgtctattctggctgtttcaaagccttttttgctcccttcctcatgctctgttggtctctgggctgctaatgtgcctggttagcttacagataagtcttagatgcattcgaggagaggctactataaacycaaacctgctagttttggattaggtaagtgtgcagggtttgggggtcagcctcatgtatctgtgaggtagatgggaagacagagcatgcaggcagcagaacactgtcctagtccatccctactgctacagcaaaacacctaagaccaggtaatttataaagtacaggaatttatttctcacaattctggaggctggaagtccaagatcaaagccccagcaggtttggtgtctggtgagggcccagtctatgcctccaagacggcaccttgtggctgtgtcctcacatggcagaaggtaaaaaggcaaaagggcctggctagttcccttagcccttttataaggtactgatcccacccatgagggagaagccctcacgggctaatcactcctaaaggccctacctcttagtactgttgcattggggattcagtttcaacatgaattttggaagcaacacaagcatccaaactatagcaaacc

SEQ ID NO: 414294 - DNA, 524 bp, Homo sapiens
aagtcccatcttagataataaggtttgcaaatatattcttatgtttgtggtttgtcttccaccttcctaatactgtgttttgaagcataaaagtttttaaaattttgatgaaatccaacttttctatgttttctttggttacttttgcttargatatctcagaaattgttgcttagtctagggacataaaaatttatgcctatgttttctaagagttttacagtattggcctttacatttaggtcattgatcaattttgagttgatttttgtattttgtgtgagatagagagtccaaattaattctttttcatgtggaaatctggttgtcacagcaccatttcttaaaaagattgctcccccattgaattgtcttggcatctttataaaaaaatcagttgactataaatgtatgggtttatttctggattcttaattctgtttcattgatctatatatctgtccttatgctattatcatactattttgattgtgatggcttttgtagtaaattttgatatcagg

SEQ ID NO: 414295 - DNA, 524 bp, Homo sapiens
aagtcccatcttagataataaggtttgcaaatatattcttatgtttgtggtttgtcttccaccttcctaatactgtgttttgaagcataaaagtttttaaaattttgatgaaatccaacttttctatgttttctttggttacttttgcttaggatatctcagaaattgttgcttagtctagggacataaaaatttatgcctatgttttctaagagttttacagtattggcctttacatttargtcattgatcaattttgagttgatttttgtattttgtgtgagatagagagtccaaattaattctttttcatgtggaaatctggttgtcacagcaccatttcttaaaaagattgctcccccattgaattgtcttggcatctttataaaaaaatcagttgactataaatgtatgggtttatttctggattcttaattctgtttcattgatctatatatctgtccttatgctattatcatactattttgattgtgatggcttttgtagtaaattttgatatcagg

SEQ ID NO: 414296 - DNA, 593 bp, Homo sapiens
taccaacatcattttttaaagaattagaaaaaataatcctaaagttcatatgaaacaaaaaaaaaaaaaaagaaaaagcctgaatagctaaagcaatcctaagtaaaaaggacaaatctggaagcatcacattatatagctttaacttatattacaaaactatagtaactaaaacagcatggtactagaagaaaaacagacacataatcaatggaatagaatagataacccagaaataaagccacatacccacaattaactaatgttgacaaaaacaaacaatggggaaaggacaccttattcaatgaatagcgctgggagaattagctagccatatgcaaaattaaactcggacccttatctctcaccatacacagtaattaattcatgatatattaaagacttaaatgtaakacctgaaactataaaaagcctggaagaaaacctagggaaaaactctactgaatattggcctagacaaacaacttacgacaaaaaccccaaaagcaaatgcaacaaaaacaaaaatagacaaataggacttaaactataaaggttctgtacaacaaaatatataatcaacatagtaaaca

SEQ ID NO: 414297 - DNA, 584 bp, Homo sapiens
aagtttttttaaaaaggaatgaatttttgatatatactataacgtgaatggaccttgaaaacattacatttactgaaataaaccagacagagaaaggcaaatattgaatgattctacttacatgaggtccccagaataggcaaattcagagagagaaaaagctgaatagagggcaggggaagagtaggcaagggggagaaattgtttagtgggtacagagtttatgttgaggatgatgaaaaatttggggtatagatagtggtgataggtatacagcattatgaatgctgtacattatgtacattatgaatgctgtaaccaaatgtgtacatttggttaaaattataaatggttaaaatttgtatattttacaayggttaaaattataaatattatgttatgtacattttaccactgtttaaaaaaggattgataaattaatactgtactaaagcaaacacatcaaaatgttaattgtagaataaaaaattatggaaggaagagcatggaagattaatttggctaaagaaaagaatgtaaatgttacaactttgacaacataaacatgtagttgacaaaagata

SEQ ID NO: 414298 - DNA, 532 bp, Homo sapiens
aaaatgttcattcaaaatgatttagggggatttaatttatttgttgttttgtttttctttggtatgtttttgtctttccatatttcctggacaacaaattttgaagcccagtaaatgaagcaaaatatatcttgcattctactcaaattaatctcaggaacacatagattgttttccaagggtagagatacataaggctttacaaataaaagggatttcaagtgaatccattttttaaaatgacagttgcctgattaacagtagtgaatgtttattgagcacttactatgtgccagccacagtgttaaatactttatatgtattgtctcatttaatcctcccagcccacctgagatagctagggcctctgtacaatgtgaatsatgcctcctacagttgcacaacatggtagccctcaggttaggcatcattttccctttctcagataaagaaatggaggcacagaatgattcggcaccttgccaccaacctacacagttggtgcataatactgacaggtctcaaaccaagc

SEQ ID NO: 414299 - DNA, 600 bp, Homo sapiens
ttcagggactgtcttccagcatgggctctgttatgggctgaattgtgtcctcccaaaatttctgtgtcgaagtcctaaccgccagtacctcagaatgtgactatatttggagatggggtctttacagaaaattaaggttaaatgaggtcaccaatccattatgacttaaaagaagaggagattcagtcacaggcaggcataggggaagaccgtgtaaagacaaagaggagaagacagtcttttacaagccacagagaaaaaccttggaagaarccaatgctgcagacaccttgatctcagacttctcacttctggaactgtgaaatcatacattctgttgcttaagtcacccaatcggtggtcttttatttcagcagccctagctctaggctgtaagtgttcaagggccgttgcttgtgacaggggaggatttcaatttgagttcttcacctagtaagctctctgtttcttttctcttgtatttgtttcttgcccactcaaaaattctctattcattcttcagggtctaattcaaagtgtcctcatcagtgtgccctccctgggccccaggaggtgactgcctctccctctgttcttggc

SEQ ID NO: 414300 - DNA, 562 bp, Homo sapiens
tactgtctagtgtcctttcacttcatcctgaagagctccttttagtatttcttgtagtgcagatctgctagtgataaacttggttttatttgagaatgctaatttattccatatttttgaaagacagttttgctggatattcatggttgagagttctttccttttcagtacattgaatatatcattacactgccttttggactccacagtttctgatttaaaccagttttaaatcttattgaggaacacatttatgtgatgaattccttctmccttgctgcttttaagattctctttttgactctggcttttttcaaaacactttttttctagatatagggtctaactctgtcacccaggctgaaatgcagtggcgaaatcatagctcactgtagccttgaactcctgggctcaagtgattctcccatttcaaccttctgaatattagggattacaggtacttgccacaatgccaggcttatctttggcttcagacttacggtttataatgagtctcaagtgtggatctatttgagtttatcctacttaagagtttattgag

SEQ ID NO: 414301 - DNA, 553 bp, Homo sapiens
gctttcaaatgcaaccaacttaatctagaaactatggttagctgtcttaattaagagttaatatgataagtagggtatttatgtgaatattcaaacaaaatcatctcagtgaaatgcagcattgtttaagttatatcttaaatcttggtatgttgcattcaagctgaggagcctgatggaggataacatattctcctctaatttgtatagtatatgaaagtttacaggtttttttgtggagtgggaagatggttttttttttttcctcttcttctgaccttagtatattttttaaaggtcttaarccaagggaattaaactaatatttattaaggactgctatctgtactcggtaatttacatcttttttttatttgattttcacaacatatctgtgtagtagggggtaggtatgtgtaatctcagttttacagactaggaaactgagaaattaaactgctgtgattagccagtgataaacacaaccagtaaatgagaaagcttggacttgaaggtaaacccaactctgcctctcaactagataagtggttaa

SEQ ID NO: 414302 - DNA, 553 bp, Homo sapiens
gctttcaaatgcaaccaacttaatctagaaactatggttagctgtcttaattaagagttaatatgataagtagggtatttatgtgaatattcaaacaaaatcatctcagtgaaatgcagcattgtttaagttatatcttaaatcttggtatgttgcattcaagctgaggagcctgatggaggataacatattctcctctaatttgtatagtatatgaaagtttacaggtttttttgtggagtgggaagatggttttttttttttcctcttcttctgaccttagtatattttttaaaggtcttaaaccaagggaattaaactaatatttattaaggactgcyatctgtactcggtaatttacatcttttttttatttgattttcacaacatatctgtgtagtagggggtaggtatgtgtaatctcagttttacagactaggaaactgagaaattaaactgctgtgattagccagtgataaacacaaccagtaaatgagaaagcttggacttgaaggtaaacccaactctgcctctcaactagataagtggttaa

SEQ ID NO: 414303 - DNA, 570 bp, Homo sapiens
actgctactgtgactcttaactgtacaatttgcctgttttaaagccattaaattatatgtaaggactggggacaaaaggagttagccatgccccttacctatgctggaacaagtcaaacttctattctgttttgacatttctacttggtttaaaayccaaggagccttctctatttgtggccaatcctttcaccaatgcctcctcactaactggtctaggacttgtatcacaggctatctatcccctgacatctacatacgccctggcaatctctctcttccagtaccagtctatggccattccatctttcctggggtgaggagcattattcaattaatcccccttcttgtgggacttggcatgatagctggtgcagaaactggaattgctggaatcacaaaagcctccttaatctattgccaactctcaaaggaaatagccgacaatattgatgccgtggctaaaaccttaattatgcaaggataaataggttctttagcagctatagtcttctaaaattatcaaggactagatatgttaatggtggcacaggaaggaattttgtttag

SEQ ID NO: 414304 - DNA, 642 bp, Homo sapiens
acacaatggtatgtcattgtttataacgtccaggcagagaaataaaatgcatcttcatgtgaaaaaacagtaaaatcattaagattttttttaaaaagaggtctcagtgcctggatggagttagggttccctcagcagctgcagctgctttctctcattggattggccatagctctagttttataccagcctcttgtgtgccaaactttaaataattctagagagctaagagcacagacaggattagcaaagcatcacttgctgcaccagcatggctggcaatgccatgccactcagttctcgtgactttgccaggttttaggggccctatactttcctccagacctgagaaggctcccacctttcttgaggcccttcacctttgcttaaggccttgattctagagaaacagccacttgcctagagctaatgacatcataagccccagaatcccaccaaggtctaaggctcaaagcttcttcccaygattcagcagttaaaagccaataatccagtataaaaagctattcataatgatggatataattttttccaaactttcatggttaaaacccacataggctcacttcagaagacactaccgaagatcaacatcaccctgcctggtcttatcagttgccc

SEQ ID NO: 414305 - DNA, 524 bp, Homo sapiens
tccagtactggtaacttttaaagtgctgtccaatttccatcctcatttggtagtcagaacaacctggagaagaatggggcatatgtcattgatacatttgagacagaaagaacctccagctcagagaagctgagtgatttgcatatggcctcacagtcagctaatggcagagctggccctggaaccaggtttctggcttgcagcccagtgccctttccaattgtggttgtagcagtctgtctggttcaaacacttccttcttcctgggtgagataatgctccttccttcttcccttattcaggacttgtgctatgaattgggatgaattgcattatcctgccaccttaatacaccatcccctcttgaagaaagtggtgcttccactacatgactgtttgggtgctgtggccaagatcagaaygtagtctagagtaccagctcagcacccagtctgtggtttgcagaaagtacaagtctatggcttcacccctccccagtttctgtgcaccccccatactttcca

SEQ ID NO: 414306 - DNA, 585 bp, Homo sapiens
ggcattgcaccactggggcagaggctgtcagtctccttgcccacatcccctaggtctcagcagtgctgtttactgtgacttcctgcygaaagccccttcacctctctgctgagggctttctctgactgtagaaaaatgttcggtcccctgcatacaacaagctagaagtgcttggagttaacacacctgggagcagccctgaaccagcgacaaaaaagagtttgaggataagcactgtcagccccttgccctgaagtgggacaacttggagccttgctctaaaatatctttcagagggacaatgaggcgcagctacccaccgtgttaatatgtccattaacacaccctgcatagctcccttcccttccctgtctcatttccccatttccttggaggtgtttcctgggatctcctctgaaataaaccgctggcacctggtttcatgtgctgcttccgagaaaccaaagacagttttttaacaggaaatcaggctttgaagttgggctttgtggagagggaaaagggcaaagtctggaggattttgaccataaagtcttacccacagggagagaagctctcctgtct

SEQ ID NO: 414307 - DNA, 601 bp, Homo sapiens
cactgggtctgggccccagttccagaggccgtgccaggccctcctctgccagctgtccctcacttatccctcctttcctgcccccctctagccctcatttcwtaaggcttagtgatgctatttttttcccacatgcctatgctcagctcagttcacgcacaaatgcaattccattgattaatctcagccactcacggagcacattctgtgccaggccctgtgtcaggctgtcccactgcacaactccagggagcaccattacccaagaatacagtaccagtgatgcccctggcattgtggaaacagtgcctctgctctctgcacttggtacagggggagaagaagctcacggggtccttgcagaccatgagaggtgctctctgtcttcacagtatgcccccctcaaccaacagggccaaggcctcagggtgcttccctgtcagatggcaaagtgctggtggcgggggtgtggaaggagaccctatgtggacaggctaaatgctcaattccaagaggaaaggattgttatgtaggtgagtaggtctgaggaggatggtgacaggaacccaagggtggagaaaagaaaggaaggcaaatgaag

SEQ ID NO: 414308 - DNA, 601 bp, Homo sapiens
cactgggtctgggccccagttccagaggccgtgccaggccctcctctgccagctgtccctcacttatccctcctttcctgcccccctctagccctcatttcataaggcttagtgatgctatttttttcccacatgcctatgctcagctcagttcaygcacaaatgcaattccattgattaatctcagccactcacggagcacattctgtgccaggccctgtgtcaggctgtcccactgcacaactccagggagcaccattacccaagaatacagtaccagtgatgcccctggcattgtggaaacagtgcctctgctctctgcacttggtacagggggagaagaagctcacggggtccttgcagaccatgagaggtgctctctgtcttcacagtatgcccccctcaaccaacagggccaaggcctcagggtgcttccctgtcagatggcaaagtgctggtggcgggggtgtggaaggagaccctatgtggacaggctaaatgctcaattccaagaggaaaggattgttatgtaggtgagtaggtctgaggaggatggtgacaggaacccaagggtggagaaaagaaaggaaggcaaatgaag

SEQ ID NO: 414309 - DNA, 601 bp, Homo sapiens
cactgggtctgggccccagttccagaggccgtgccaggccctcctctgccagctgtccctcacttatccctcctttcctgcccccctctagccctcatttcataaggcttagtgatgctatttttttcccacatgcctatgctcagctcagttcacgcacaaatgcaattccattgattaatctcagccactcacggagcacattctgtgccaggccctgtgtcaggctgtcccactgcacaactccagggagcaccattacccaagaatacagtaccagtgatgcccctggcattgtggaaacagtgcctctgctctctgcactkggtacagggggagaagaagctcacggggtccttgcagaccatgagaggtgctctctgtcttcacagtatgcccccctcaaccaacagggccaaggcctcagggtgcttccctgtcagatggcaaagtgctggtggcgggggtgtggaaggagaccctatgtggacaggctaaatgctcaattccaagaggaaaggattgttatgtaggtgagtaggtctgaggaggatggtgacaggaacccaagggtggagaaaagaaaggaaggcaaatgaag

SEQ ID NO: 414310 - DNA, 601 bp, Homo sapiens
cactgggtctgggccccagttccagaggccgtgccaggccctcctctgccagctgtccctcacttatccctcctttcctgcccccctctagccctcatttcataaggcttagtgatgctatttttttcccacatgcctatgctcagctcagttcacgcacaaatgcaattccattgattaatctcagccactcacggagcacattctgtgccaggccctgtgtcaggctgtcccactgcacaactccagggagcaccattacccaagaatacagtaccagtgatgcccctggcattgtggaaacagtgcctctgctctctgcacttggtacagggggagaagaagctcacggggtccttgcagaccatgagaggtgctctctgtcttcacagtatgcccccctcaaccaacagggccaaggcctcagggtgcttccctgtcagatggcaaagtgctggtggygggggtgtggaaggagaccctatgtggacaggctaaatgctcaattccaagaggaaaggattgttatgtaggtgagtaggtctgaggaggatggtgacaggaacccaagggtggagaaaagaaaggaaggcaaatgaag

SEQ ID NO: 414311 - DNA, 615 bp, Homo sapiens
ctggagaatttgggctgagttcaagaccttaaaagaaggccattcctgtttatatttgatgtggtaattatagcaccgaggctcagggagttccagtcacttgtccgaggtcagacagcaagcaagtggcagggcaagatttaaacacaggtttccgacctccaggcccatgtcttttcctttaacacactttggtatcagttatttgtgtcagcttgaacatacatattaagtctccaaaacgttcataagtttgtagttagttatttccattgtagaaatttattctatgaaaattatcatgtattaagattttactcagatttaacaccaggtccaggtacttggtcctgacaaagctctgagaggcccaggtgcggtaggggtggcttcatgttaaaaataaaaacaatttaaatattcagctrtaagggaatttttgtataacgtagtgaacaactttgtagttcccagaccagcaagatcagcattattgggcaaattgttagaaatgcagattcttgtcctagctgatacttcttgattcagaaactcttggagtgaggctcagaattcctaaagccctcaaggtaattttgatacctgctagagttt

SEQ ID NO: 414312 - DNA, 602 bp, Homo sapiens
ctgggtaacatgacgggctaagatattaagaaaacaaacaaacaaacaaaccagtgggctatttcttgatgtttcttgagttactgtggcctcatcaggaaagaatagtttctctgtccctccaaccaatccaagaaagagaggccggtattgtgttttkaaggtcccacttcttttttttactcctcttactccaccagggaagtaaagagctattgtgactcacatcctttgagggggctttaagctggaccacctctgaagtggaggggaagaggacccagactttagcttaaagagggagtatggcccattcgtacctcctgccaggcagaatccctggtagaatcaccttcgaggggatagggtagggattcctgggggctaaatgccaagatccacaaccttgaaagctgtattagttgtctagggctgctttaccacaaaccacgcgacttaaaacaacggaaatgtgacatctcatagttctggaggctagaactccaaaaatgccagcagagccatgctccctctgaaacctgaaaggcaatcctttgccccttcccagcttctgatggtatgccagcaatctttggcattcc

SEQ ID NO: 414313 - DNA, 570 bp, Homo sapiens
aagacctagtaaagatcactgatgaaggtgtctacactaaacaacagattttcaatctaggactttcaaaggtagagaggagaagtcaatgcctggcttcaaagaacaggctgagtctcttgttaggaactaatgcagctggtgccttgaagttgaagccaatagtcatttaccttccctacaatactagggcactcaagaattatgctaaatcgactctgcctgtgcttcattagtggaacaacaaagcctggatgacagcacatctgtttacagcacagtctcttgtayattttaaacccactgttgagacatatagctcagaaaaaaagattcctttcctaatattactgctcactgacaatgtacctagtcacccaagagctctgatttagatgtacaaggagattaatgttgtttcaatacccacaacacaacatccattctgcagctttcaagtcttattattttaaaaatacattttgtaaggctatagctgccatagatagtgattcttctgatggatctgggcaaagtaaatttaaaagcttctggaaaggattgaccatt

SEQ ID NO: 414314 - DNA, 571 bp, Homo sapiens
ccaatgttgtgccagcaagagcaaaggcaaatgggcaagtcaaagtaggcttcttgtaaaaggtcttccattactgggttttactagaggcccttgcggaccatcacatctcaaaaggggggaaagctcgtatgaggcagtgccagctacctttcgggaatcaccttgggcagaaggcctttttgcmaaaagactcggcagcccgggccccgtaggttcggcgcatcggcagcgctcggcgcccgggttccttcctccgcgccacccggaagcctcggcgcgacccagtccccctccccctcccctcgccggctagggtggtgcgtgccggcaggccggtcaaggaggcgggacacgtcggcgctaccaccgccaccgccgccgccgcccctcctcccgttccagctgccgctgccgcttcctgggctgagtccgcccgcggtcccggcggcgccaggtgcgttcactctgcccggctccagccagcgtccgccgccgccgtagctgccccaggctccccgccccgctgccgagatggcgacgcgctcctgtcgggagaaggctcagaagc

SEQ ID NO: 414315 - DNA, 440 bp, Homo sapiens
ttggcgccgagcgtgaagtcgagcatgctgtgccgtgctgctgccatagtgaggcgaggccctgtgccatgcctgggggaggggcggcaggagactggggggccgcgtggcgtgtcaggctgcggccagtggggagtgccgaccattagcaagattaaccaagaaaagaagaaagaaaatccaaataacctcactaagaaatgaaacaggagatattacaactgacaccactgaaatacaaaagatcattcaaggctactatgagtacctttatacacataaatagaaaacctagaaaagrtggataaattcctggaaaaatacaaccctcctagcttaaatcaggaagaattagataccctaaacagaccaataacaagtggcaagtttgaaataggaattaaaaagttaccaacaaaagaaagtccaggaccagacag

SEQ ID NO: 414316 - DNA, 350 bp, Homo sapiens
acaggaatgaaaggacaaatatctggaccatagaattagtgttccctcttgtctgcatagaagagaggggtggagaacgagtcaagtatgtttgcttgtttgagtttcaagctggagcaactagggaagactatgatagtagaaggaggagcaggcattacatcactttcacmtaattaaggtgctttaatatctcttaagtcataaggaataaggttaggtcaggtagtatgtgaacaaggctgtaaagtttgtctggaagattcagcatctgtaaactgtctcccatcaaagacaaattggttctcagtttcatagctatattttctttgttgagtgttttatgattc

SEQ ID NO: 414317 - DNA, 350 bp, Homo sapiens
acaggaatgaaaggacaaatatctggaccatagaattagtgttccctcttgtctgcatagaagagaggggtggagaacgagtcaagtatgtttgcttgtttgagtttcaagctggagcaactagggaagactatgatagtagaaggaggagcaggcattacatcactttcacctaawtaaggtgctttaatatctcttaagtcataaggaataaggttaggtcaggtagtatgtgaacaaggctgtaaagtttgtctggaagattcagcatctgtaaactgtctcccatcaaagacaaattggttctcagtttcatagctatattttctttgttgagtgttttatgattc

SEQ ID NO: 414318 - DNA, 643 bp, Homo sapiens
gggagtaggaattaagagttttagagatgataaaattttaaatgcctattcgatatcactgagttccttaaagggccttttgcctttcatgtctagggcctcagcaccaggggcagtgcctgaaatgtattaggcactcaataaatgggagtggatggatggatggcagccataagatcccagatgaagctgtttatattcgtttgtaataaagtaaaccaggtrgtttgtgaaacacagaagcagaatagagaaagcagagagtgaaattaaaggtcatatttcaactacaacttgatctcagatgggacctgttctatataaagtatgttttaggtcacctgcccaccagattgagatcaaaatttgaaatattcaccacactgacagacccggtgaccacgttatattccctagatgtttggggatgaaattaagcattaaaaactgctctttgaattttttttctctattgtaaagatgggaccaaggcatttatatggaacttttccatagtctactgagtttggcatatgactgaataagaatgtgaaaggaatttgaaatggtacaaataggaagaaatagctaagtcatttaatatttaatgtaattcaataacttattgagcttctactttgtt

SEQ ID NO: 414319 - DNA, 529 bp, Homo sapiens
caggtgtggtggctcatgcctgtaatcccaacactttgggaggccaaggtgagtggatcacttgagctcaggggttggagacccagcctgggcaacatggcaagaccccatctatactgaaaaatacaaaaattagccaagggtggtggcagttcctgtaatcccagctattcrggaggctgaggcacaagagttgtttgaacccagaaggcataggttgcagtgagcagagatcacaccattgcatttcatgctgggtgacagagtttctgtctcaaaaacacaataacagttttggatttatagaaaaattgtgaagacagtacagagagctcccatatacccaacacccaatttctcttcttaacatcttaccttagtatatttgttacccttaatgaaccaacaatgatgtggtattattaactaacgaacgtctatactttattaagatttccttagtttttacttaatgttctttttctgtcccagggtcccatccaggataccacattacatttagttgtca

SEQ ID NO: 414320 - DNA, 578 bp, Homo sapiens
ccctgccattggattagttcaggacctcgttgtctgttaccttaatcaatgcagtagttattttacattccagttgaaccctaactttacctccagaattatcttttaaaaaatgattatgccactcccctcatagtgggagtaattccctctgaagattataaaacaaagaaacaaacaaagataattccttagcctggaatacaatgtcctccactataaagtcccaacttaccatgtgcagccttatgtckcagtattccatccggctacattcactctctcagctgtcctttcatgaaacttgtctatttgggtataaatccacaagctctgatatcaacatatctgcctggtctttatcagaaaacattcttgttaaccaatttcatacttatccccaccaccagttcctgattttatttctctctgagaccatgaagccttcctcctctccttcagaaccaatgcttggggcttcttctccagctttgagctgcagcttccctctttctccttgaccattctagtatatagctttccagtaccttccccagacatgcccccacagcccttca

SEQ ID NO: 414321 - DNA, 574 bp, Homo sapiens
agtagtagatgtctgataaaataaggtaccatattgctttccctttctcttcacataaatcagagagataataactatctttctctggattccaaaatttcagtgaagccaagacaaattttgttcttcctttttgccatgtgtttgagggagttttaattggcaatccttggtgtatatggcccaatgaacaggctgactccttgatacttgtataaaatattgctctttctgaaactgaaattggaaataaaagggtccaagtttgaacaatcaaagtctgtcaatgaagattcacatctgccaagtctatttcccttttaacaagttagaagggctctctcgtcaaaccctggacccatgtgcatgcaatatacagtcacatttttagcatggcacatttgttctttctgccagccattttatgaagctcagcaacttaatgctgcagcacttctgaaatccatatgggagaaataytctggcagccctcatttcagcaaggcagcaggggccctgtaatttctcacaaatgaagggagtgaaagagtagatcaacataatagaatatgtt

SEQ ID NO: 414322 - DNA, 535 bp, Homo sapiens
gaattaccatgtaggttgatagagacctagggttgagcrcttctccgaccaagcagctccaccagtagacatcctgcaacacccagtgtgggtattcaggactagcaaccagctcacaatgcagcaaacagtaccttttttcaaaagcaattcaagaaagcaacttctcagaaggttgtctgcagttggagtcataaaagagggttttttggccaggcatggtggctcacacctgtaatcccagcactttaggaggccaaggtgggcggatcacgaggtcacgagaccagcctggccatcatggtgaaaccccgtctctactaaaaatacaaaaaaattagcctggtgtagtggcgtgatcctgtagtcccagctactcgggaggctgagacaggagaattgcttgaacccgggaggtggaggttgcagtaagctgagatcatgccactgcactccagcctgggtgacagagcaagactctgtctcaaaaaaaaaaagggattttttccccctcttctacgtcaatttcatggta

SEQ ID NO: 414323 - DNA, 535 bp, Homo sapiens
gaattaccatgtaggttgatagagacctagggttgagcacttctccgaccaagcagctccaccagtagacatcctgcaacacccagtgtgggtattcaggactagcaaccagctcacaatgcagcaaacagtaccttttttcaaaagcaattcaagaaagcaacttctcagaaggttgtctgcagttggagtcataaaagagggttttttggccaggcatggtggctcacacctgtaatcccagcactttaggaggccaaggtgrgcggatcacgaggtcacgagaccagcctggccatcatggtgaaaccccgtctctactaaaaatacaaaaaaattagcctggtgtagtggcgtgatcctgtagtcccagctactcgggaggctgagacaggagaattgcttgaacccgggaggtggaggttgcagtaagctgagatcatgccactgcactccagcctgggtgacagagcaagactctgtctcaaaaaaaaaaagggattttttccccctcttctacgtcaatttcatggta

SEQ ID NO: 414324 - DNA, 560 bp, Homo sapiens
cattaacactatgcagcctaatgtaatgaaaatactttagaaaccttttgtttttctcctgtccacaatacaatgtagtcttcataacatggaatttttaggaacaatacaaactataggtccagaagtcttgacctgcaaattaaatctagtccacaaaaaatttaactctgtatatatttatatttacattttaatgtatgcagagctacatgtgtgtatgtgtcatgtgtatatatatgttagctttgtatatatgtgtatatataaaataggtatgtgtatgtatacatataatgtgtgtatgtgtctttgtktatatatatatgtatatacatatacacacacacatacacacacacgtatatttaagctctgtatactgtatatatattctgccaaacctgacaagcactcaaaatggtgcttctgaatcttcttcagatactggagatctctaccatcatctgaccactataggcctacgaaacatgctaaaatgtctgcgccagtataggaagctggtgggttttaataatctttttgcagagctaggctag

SEQ ID NO: 414325 - DNA, 560 bp, Homo sapiens
cattaacactatgcagcctaatgtaatgaaaatactttagaaaccttttgtttttctcctgtccacaatacaatgtagtcttcataacatggaatttttaggaacaatacaaactataggtccagaagtcttgacctgcaaattaaatctagtccacaaaaaatttaactctgtatatatttatatttacattttaatgtatgcagagctacatgtgtgtatgtgtcatgtgtatatatatgttagctttgtatatatgtgtatatataaaataggtatgtgtatgtatacatataatgtgtgtatgtgtctttgtgtrtatatatatgtatatacatatacacacacacatacacacacacgtatatttaagctctgtatactgtatatatattctgccaaacctgacaagcactcaaaatggtgcttctgaatcttcttcagatactggagatctctaccatcatctgaccactataggcctacgaaacatgctaaaatgtctgcgccagtataggaagctggtgggttttaataatctttttgcagagctaggctag

SEQ ID NO: 414326 - DNA, 560 bp, Homo sapiens
cattaacactatgcagcctaatgtaatgaaaatactttagaaaccttttgtttttctcctgtccacaatacaatgtagtcttcataacatggaatttttaggaacaatacaaactataggtccagaagtcttgacctgcaaattaaatctagtccacaaaaaatttaactctgtatatatttatatttacattttaatgtatgcagagctacatgtgtgtatgtgtcatgtgtatatatatgttagctttgtatatatgtgtatatataaaataggtatgtgtatgtatacatataatgtgtgtatgtgtctttgtgtatatatatatgtatatacatatacacacacacatacacacacacgtatatttaagctctgtatactgtatatatattctgccaaacctgacaagcactcaaaatggtgcttctgaatcttcttcagatactggagatctctaccatcatctgaycactataggcctacgaaacatgctaaaatgtctgcgccagtataggaagctggtgggttttaataatctttttgcagagctaggctag

SEQ ID NO: 414327 - DNA, 609 bp, Homo sapiens
cacatgtgcacagtttaaaaaacactggagtatatggcacctcacatcccttccagcttgaaaatattgatgatggacagaccagaggtggaatcagagccccgacaaaaatatagctagtgtgaaaactaaagcaggacggtgccataggggacagaaagttacaatcctgccaagttcaatgtagtgtatatcaaaactgttttttttaagtggccatattttattcactcactaaatgtactttttctgagtactaactatgcactggtaatacaacaagtagaaagacgcagccctgtttgcgtctgatctgtttgagacatggctgggtagactcgtggtaatcacagttggatgtgaggaagtggtgcgaggggyaggagggacagggcggtcagcaagagccctctaggaaaggagacacctcctctgaatctagtagctaggtgaaatgagagaggggaaggaagagtggaaaatacatgtagaaagagaaatgaagtatgcaaagtttcagaagcagaagagaactgggtgggtcctcgggaatgagaagccagcccatcagccaatatgaggaaggtgagcagacccaggctcaaaagg

SEQ ID NO: 414328 - DNA, 573 bp, Homo sapiens
aaaattagctgggcgtggtggtggtcgcctgtagtcccagctacttgggaggctgaggcaggagaatggcaggaacccaggaggcagagcttgcagtgagctgagatcgcgccactgcactccagcctgggcaacagagcaagactccgtctcaaaaaaaaaaaaaaaaaattaattgccaatgtttgtaaatagggagatttttatagaaatactgatttccagtttttcttgacacatttggcaccagtyggctggagctcagtgatggctgctccttcaactgggtatggggtttgcaggtcaccacagtcctgcccactccccaagacctcttgcaaatacctcatttactcatttattcacacagtgaggaattctcagggctgaaggaacttgttcaactggacccttggtttctcttctagaccatatgctacataccaggactctagaattctgtaaccatatagaccttgcctgcttccaggatgtgcctgggtctcttctcaggactgtctttggaaggatgacagcattgcagacaggcatattttgccttgaagcatggct

SEQ ID NO: 414329 - DNA, 573 bp, Homo sapiens
aaaattagctgggcgtggtggtggtcgcctgtagtcccagctacttgggaggctgaggcaggagaatggcaggaacccaggaggcagagcttgcagtgagctgagatcgcgccactgcactccagcctgggcaacagagcaagactccgtctcaaaaaaaaaaaaaaaaaattaattgccaatgtttgtaaatagggagatttttatagaaatactgatttccagtttttcttgacacatttggcaccagttggctggagctcagtgatggctgctccttcaactgggtatggggtttgcaggtcaccacagtcctgcccactccccaagacctcttgcaaatrcctcatttactcatttattcacacagtgaggaattctcagggctgaaggaacttgttcaactggacccttggtttctcttctagaccatatgctacataccaggactctagaattctgtaaccatatagaccttgcctgcttccaggatgtgcctgggtctcttctcaggactgtctttggaaggatgacagcattgcagacaggcatattttgccttgaagcatggct

SEQ ID NO: 414330 - DNA, 549 bp, Homo sapiens
ttcagttttctcttctctgcccccttggaggagggtttttttgtttgtttgtttgtttkttttccctatccccattgttttggccctgaagggagagctttgtggcaaaacagagcaagaaagaacttctccatgaacaactgatctgtggccctatcttttcaattgccttctctaaaaccccaaagaaacaaaacaattctactttatctctcgctgtgagggcacagaacaaaacagaacatttgatgtgaaataacagcaattcacattcaagtggctgcggtgccagtaagtcaggggaaaaactcacactaaaaagaaaaaaaaccaacaagtaagacacacacaaacccaaaaccacctttccaggccttttgatcgctttcattctttcctgcactgcccgatgttagcctaagcccagtagtatctgctctgtagtatctgtagcctgggacaacttgccactatggcgagcagatttcaggctctttccttctgaagctcctccaaccagtgtgcaccacactcctgtgccaaagacta

SEQ ID NO: 414331 - DNA, 549 bp, Homo sapiens
ttcagttttctcttctctgcccccttggaggagggtttttttgtttgtttgtttgtttgttttccctatccccattgttttggccctgaagggagagctttgtggcaaaacagagcaagaaagaacttctccatgaacaactgatctgtggccctatcttttcaattgccttctctaaaaccccaaagaaacaaaacaattctactttatctctcgctgtgagggcacagaacaaaacagaacatttgatgtgaaataacagcaattcacattcaagtggctgcggtgccagtaagtcaggggaaaaactcacactaaaaagaaaaaaaaccaacaagtaagacacacacaaacccaaaaccacctttccaggccttttgatcgctttcattctttcctgcactgcccgatgttagcctaagcccagtagtatctgctctgtagtatctgtagcctgggacaacttgccactatggcgagcagatttcaggctctttccttctgaarctcctccaaccagtgtgcaccacactcctgtgccaaagacta

SEQ ID NO: 414332 - DNA, 485 bp, Homo sapiens
cctgaacatttattatcccttggaccaaaatcatgtaaagccttggactgcttgattcaaaggcaaatgttagggtaacgctttctcattctcaattctacagagtacgtagatttcattgtgaaatagaatggtttgttcagttggcatttttggagttttggattgatttgcctcatctgggaattggagtacaggagcaatgaacaatgtagartttatgcagaaaccaaacattttatttattttattttctttaggatgattaaaagtaaagtttttacctatgtgacttgtgaggtgagttatcaggttgtgtgggaaaaaagctctccactcgttagtcttcgtactcacttagttttacacagtgagttataagtgctctttttttgaccaggcgcggtggctcatgcctataatcccagcactttgggaggctgcggtggacagatcacttgaggtcaggagtttgagactagcct

SEQ ID NO: 414333 - DNA, 403 bp, Homo sapiens
ttgttgctttatgttattttatttttacattttagatttgagggtacatgtgcaggtttgtcatatggatatattgtgtaatggtgagctttgggcttctagtcmtggttctttttgtattaaagagggactgtagtttaaaattttttatttttatggtatttgagctttatgataatctaaacaagtaatttgtctccaagaatctcctcgatacaatgaatgcaatttccctgcctctaagctccaaatgaatgaggtctaaaatattaagaacaatagctccttctattgaaacttaccacaaacaacaacatttcatcacttaacattggcacaaataggaatattagttctttttattttttttatggatttctcagtgcatggaattttggtgata

SEQ ID NO: 414334 - DNA, 620 bp, Homo sapiens
atggcaatcactctgggtttgtcatattccagaccccaaacaacagtgtccttgagcaaagtgtaattattccctcctctacactaggctgggcatcagccaataaattatttataaataaattagtatgtttcttgagccattaaaatagaaaaactaccagccaacctaattaagaaaaagcactaataagaaataagggccaggcatggtggctcacacctggaatcacagcacttttggaggccaagatgggaggatcrcttgaggccaggagtttgagaccagcctggtcaacatagcaagacctcatctctatttaaattaaaaaaaaaaaaaaaaaaaaaaaaagaaaaagaaatgggagtaatagaactactctcaggtaaagtggaaactggaagaaaaatggagaatatttgattttaattctatttaaatacttttgaaaacctgaataaaagagacaatttgtaggataacatgcattgtaaaaactgagccctggcaagacagaaactctaaaaaaaattaattactatggaagaaattgaaaagttctaaaagggtacccttcctcccaccaaaccaaaccaaattaaacaaaaaacaaaacctaa

SEQ ID NO: 414335 - DNA, 620 bp, Homo sapiens
atggcaatcactctgggtttgtcatattccagaccccaaacaacagtgtccttgagcaaagtgtaattattccctcctctacactaggctgggcatcagccaataaattatttataaataaattagtatgtttcttgagccattaaaatagaaaaactaccagccaacctaattaagaaaaagcactaataagaaataagggccaggcatggtggctcacacctggaatcacagcacttttggaggccaagatgggaggatcgcttgaggccaggagtttgagaccagcctggtcaacatagcaagacctcatctctatttaaattaaaaaaaaaaaaaaaaaaaaaaaaagaaaaagaaatgggagtaatagaactactctcaggtaaagtggaaactrgaagaaaaatggagaatatttgattttaattctatttaaatacttttgaaaacctgaataaaagagacaatttgtaggataacatgcattgtaaaaactgagccctggcaagacagaaactctaaaaaaaattaattactatggaagaaattgaaaagttctaaaagggtacccttcctcccaccaaaccaaaccaaattaaacaaaaaacaaaacctaa

SEQ ID NO: 414336 - DNA, 525 bp, Homo sapiens
gattaccataaagcttctatgaacatttatgtacaaatgttggtatggacatctgtttttatttcttttgaatgatttatcttctctttatgggttgtatgtttttattctttccatgtttgattgttttttattgggtgctagacattgtcaattttaccttactgggtgctgtatgattctgtattttgataaatactcctgagctttttttcatgaacacagttaagttacttggaagcagtttgattatttcagttctagtttttaatgtttgttaggtggaactagcaaaatgctcagtaaaggatttttttcctggtgttgaactaaggcacttccttgtcctctatgcaatgttctcagatgcttgargttttcaagcctggctggtgggaacaggcactcttcctggccctgtgtgagcactggatgctattccttgtaatgctgtcagctagttatttgcccaggcttgggtagtttccacatacgcgtgtgttgatcagtactccagccaaacac

SEQ ID NO: 414337 - DNA, 570 bp, Homo sapiens
ggaatttgtttttttgtctctaaataattctcaggttaatgaagatataggaataaaaattgctgactgtttacaactgaaaatacaacatttatcaaaagctttgtttgctggccaaagtgatactcaaaagaaattttgtagtgtttatcattgcacttttaatctttatggtgttctgagctttcagttcatgaaattattaaaagagtaagtatactaaaaaaagaaatgatttagaaaaaacagaaataaaaaattttaaaagcagataaacataagcaacaatataaaaatagataagctggaaataatcaaaattaaaaacttttgtgtttcaaagcgtaccaccgagaaagtgaaaagacagtctacaaaatgggagaaaaattttataaattatatctgataaggaacttgtaactagaaaatawtaagaacttctacaactcaataataaaacaatatataactcaattaaaaaatgagccaaggatctggatagatattgctccaaagaagatatacaagtgatcaatacataatgaaaaaaggctcaacatcattaac

SEQ ID NO: 414338 - DNA, 521 bp, Homo sapiens
aatgataatcatttagtctttctctcacagttgtggttggctgttctcagctggggcagttgtgctccatgtgactctcatccttcttgtactagcaggctaggctgagcatgttgtcatggcaatagcaaaggtacacatgggcaggtagaaacacagaagacctctcaaggactagccttgaaattgccatrttgtttcatgctgttggttgaaacaaattacatggcccaatctgaagtcaagtctcctccccttcagtgcagagaactttgaaatcatgtgagaaagtgtatgaatgcaaggatgaatgaagaattggggccaataatacaatatatgtataagggcctaccacagtgcttggcatacagtaagtgtttaataacattcattcccatctcctttccacccctacttgcaaaaatataaggccatttacaaaaacttcttgctgttcttgaacatatcattcacttccctgttcctgcatttttgtactagatattttctccagttag

SEQ ID NO: 414339 - DNA, 607 bp, Homo sapiens
agaaatagtgagttgcttcagcagtgattatcagattggagaggagaactgcccccaccctcatgcctcattccagagaatgtatcatatgttctgggggagtgcatgtaatttgaaaaagatgcctcggttattctgataccaggcatttctgcctccatctctcaaggaaccatatccrctttactactgggttgagatatactctcagtggaattaaatggtttgtacacaattaaaccatttatccttaagagaatagtcaggctttctgactgccatgccttctcttgttttcttgaccaaacttttttattctatgtgctaaggacagaaagtaacaaatgttcattactaacacactattgagggagaataagattgtcagtagaatgggcactcccagttgttaagcatcattcatgcaccaaacactgctctaaatgttacagacaactttattcttcaccaatgtaggatagcctttattacctgcatattatagacaagggaaacaacttcatgcaggcaattacctctccaaggacatcaaataaattcacagaaaagctgtattcaaatacaggctttgtcaaatcccaagcaa

SEQ ID NO: 414340 - DNA, 631 bp, Homo sapiens
gacaagcagaacaggtgtggaagagagattttcaggaagggaaaaatttatagctacagagggtagttagaaaaatcataacttatatgtgaataaaatacatataagcagcatttacggtagtggcattctacttattaagatgcaatgaaatgaagaaaggctttatgttcaaggacctttgccatagttcagctaattgtagttttatatagaaatgatcctgaacactctgaacttgacgtagtcctgcggtgatattctatctgcagtatttgtacctccagaatggcagatccctcagcaggaacaaaggcatattgacggttctctcagcgtatgcattaaaaaaggtacttcctgaaacttttgattcaataatgactaaacatactatgtacacaattactgtaaggctaattcacgtgccatackccacctgaaagcctgagttatcttgctataagcttttcatggagcacttcctttccagaaactgatttgtaactcatttagagaatgtcctggcgtcggtttttagcatatgtggtatttaaacagagctagaatgtgatgtctgaagataatgctgcatttctgggtttcttgtgtggattttaaaataaattgt

SEQ ID NO: 414341 - DNA, 650 bp, Homo sapiens
aaagcatcagtgcactcatgcaacttgatgcaccgtgtgagcccagaaatatcacagcactaaccagaataaatgcacattaattcaggtttatataatcttcaaaataaatactgatggacacctgagaatgtatccaaggaatcccttctcccctctcaaagactcaatttataaaactgctcactatttttcacttttaagagatcacatgatgggccaggcccagtggctcatgcctgtaatcccagcacttmgggaggccgaggcaggaggatcacttgagcccaggagttcgagagcagcctgggcaacatagggagacccccaccaccccatctctacaaaaaaaaaaaaaaaatctttctaaagtagccgggcatggtggctcgcacctgtagtcccagccactagggaggtggaggctgcagagagctgcaactccagcctgggtgaagagtgagatcctgtctcaaacaaacgagagagagagagaaagagacagcgagagcgagagagagagaggacatgtactagctctgtcctgcctaaaagaatttttgtccctggtggattgtgaattgatcctttgtctcctttttgcccagcacagtacctggcacacagctagaacttgcatgtttgcttaa

SEQ ID NO: 414342 - DNA, 654 bp, Homo sapiens
catcctgttgcaagggctaactaactgctgttttcctggtgcctggagtgctcagatgaaagcaaagaggaaattaagaagcttttatccatctgtaggcttgaagcaaaaatctgggctggaggaattaacactacctctgaccctggagggaccagcacacagactttagctccctgtagctactcagagtcagctctcaagccacatgcaaccctaagtgartccttggctgtgctttagtccaattgccttgctccataattgagaaagccagggtctagagaggtgaagtccactccagatccctcagtttgtagcagcccagctgagactggaatccacgcctcccactgctgatctggtatgtcacatccataaacttcatactgctctttgagacaggaattttcatccatttcagagataagcaagctgaggttcagctagattaagaacttgactagagtcacacagctagttaaggagcagacttgactaagagtcacatggctagtgaagttcctggccaaagtccagggcttattcctccactccgggctgtctctgggcatggcctctgttgactgcggattggtaaggacagtctgtttctgctgctgctagggtaggagtcctaccgtgtttctcccc

SEQ ID NO: 414343 - DNA, 520 bp, Homo sapiens
gtagtagctgctcctgctggtggtcccatagttgtaattgtcagccaagccatcatacatggaacctagaggagaaaggaggggattaggacagggatggccatgatcttcatccacccctgttcctcagggcatcacttctgcatccaggtccactatgcccatggaggagaccaggtctgagctcctggaggagaaggtggggaatgtcatctccatctatctccacatcctccacagccgggaccaagggaagggctaccacagactcctgcagggacagctctaaaactctcatctgtccccttcctgggagcccagtggctccactgctgcttgggtaggttaacacctacaggtcaggacttggtctggagggmcttggagcacggccattccagcccagggaatcatcactccatgttccacaaggataagattcccactcaggggagacaggcaggattccgacattcccagtccagcagcaacagctgattagagattgattcaggacagg

SEQ ID NO: 414344 - DNA, 578 bp, Homo sapiens
actgacaagttgggagagggtgactgtatactttatttaaattttaatttatatcgtcttcctcatctaggtatttcaactgccccttccaaaaaggatgccaggccttggtccccttgactcaggactcagaatacgcaggtggaaagcagcagattccaggcacccagaaggcagtgcttcctctttctatattgcagaagcttgggctgcttgagggaaagagacaggtggactggccctggtgaaaggggaggccagcagggctttaggggacaggggcttttctttgagagtgggtgagcaaggagtctgaaggctctgccaagactaggaagggaatgagattttgtgagttccggscaggcgcaggggctcacgcatgtaatcccagcactttgggaggccaaggcagtcgtatcacctgagatcaggagttcgagaccagcctggccaacatggtgaaaccccatctctattaaaaatacaaaaagtagccaggcttggtggcatgtgcctgtaatcccagctacttgggaggctgaggcaggagaatcacttgaaccccagaggcagat

SEQ ID NO: 414345 - DNA, 540 bp, Homo sapiens
gagtcatacagcaaaggggcctcctgctaagggcctggtagggggagtgggaggagctcgtggcggctggctggctggatgaatatttcaccatgcttccattgtccacgccagtctcctcgccatcacactcttggtttctgtcttgaaaatctttgctgtctagtatcacatgtgactgcagagcacaggtttcaaacacttcataggagaaggatgcaaaatagctcaatttttatattaattgcatgttgaaatgataatattttggggtaaataaaacattaaaattcaccagttctttttactttttaaaatgyagctactagaaaattttaaattgcacgggtggctcacgtcatgtttctgttggagaactgtggtcgacaggcatctctttccgttctcctccagccctggaatctgaaggctctctccagcatgcagcccagccctgccctcctgactggcagaaatctgacccaaggccagggcctatgaacagggtctggtgagcagagcccaactagacccacagcc

SEQ ID NO: 414346 - DNA, 621 bp, Homo sapiens
gtgtgacactatcacagccgtcactcttgctgtcatttgaggctgccgctcacagctcacatattttacttttagtttgctcttctaatctacagaggaaaggacaatcagaratctattctttttgggaattttatgtcgaggaaggatcaagaagactgaatgactgtctcagggaccatgtacatgaaggtcactcacgcaactcctgagatgtgggtgttacatgcggggagccccagctttcccaaggaaggtattcctagtagcaatttgcagagcagattattgtaaagcagattatagtttccaatagaaacagttttattattgagggcgctgttcctaagaacttaacctcaagtaaaccagagatgtgataaaaaatatgtcatagatgtgtacaaaatacctgtaaacctctattatcacttcatattgtaagattctgcctctagccatagaccgccaggactggacagagccttggacttcatccagccaagcactgcatttcactgattaggagaggaggtagcttgcttgcaatgccccagttaatatgtggcaaagcctgcatcctaaccaggccttgtgactcctggcacagtgctcattcca

SEQ ID NO: 414347 - DNA, 548 bp, Homo sapiens
gtgtccttcctgccagcaaagctttggaggcatcaacaggcctgttttctaccgtaagatgcctggagagagaaggggagtgggagagaggaagcaggtaggagggcaggagttgagaggtgaggagcagtcatgttctttagtgggatttgagaaaaggggtttctgttgaacccgtggctggcattgaagtctcttccatgaccaatggaggaattgtacctgcctaatgtccacttaaacagagggctttgctctgcagaaagttaagatgcccagctctaaccttgggcaatgcgaaggctcctggcagctgggcaaggcaagagaagccaactgcagatgcccycacccatctctaaaagcggagtcaggctgacacacccaggccctccgcaggcccaccaaggaggaaggtatgcaaccagctacctgttgcttggcagattcatcctggaagcaggtatgctggatgtaataggccccaatggcctggtacttctcatcctgggagctcaggtactgcacagccttggggatggtcagcc

SEQ ID NO: 414348 - DNA, 519 bp, Homo sapiens
ttattattttgagatacgctcagattctatacttgactggcagggactttttttggctttgtgtggaaatgaatgaaaatgccatgaccattccttttgtcttcatatcccaccccagttacagaagtatgctagcccctcccagggacacctaacttggcctgccccaggatattggcactctgctgtccactgccaaaagagacaactgctttccactgtcccaggcctccaagggcaggaactccacctccatcgtggttggcgcccagagcacacatgcacctgtaaatttggtcctagaatgtttccctttggcattagaccaaagggctgtgatagstacataggtcaccctgaattgtctaatctgaaccatttgccagccctcgaacccaatttgtgcttccctacctccttgcctttgctcatggtgttctccaccgtgatacacccttgcccattcctgcctgtccagttgctacttttccctcaagcatgttaccactttacgaagcc

SEQ ID NO: 414349 - DNA, 555 bp, Homo sapiens
atctgcctgtattagcctaatgttttaatgaagaaacgcatagaaagcacttgctgcacccctggaatctcttgaatccaggaggtggaggctgcccccacccacacacacgaccttgatgccctagtcctcacccaggtcctctgacctcctctcctcttccctcccagtggtcacagcaggcccagctgtgcccaccctccctccaaacggctcagcccaggaaaataaggagccggcccatcctgcaggcaggtgacctctggatctcctgawgcgaagaagaaagaaacccatatggtgagggtccaggaggttcgctgtcattctgttgagtgacttagcttggagccaggaggtggaatgccctcctcccttgtttttcttccccaaggacttcacgtcctcctggccaaaacctcgccaggcatcttctcactcccattttcctggggctctgggcacagcctccatccttgggattggcttcccgggccagtgcaggtgtcggaagtgaagcttcaagggtccaggaccatcccagggtgaggtgag

SEQ ID NO: 414350 - DNA, 503 bp, Homo sapiens
ttgtacaagttcaaaatgctacactaattcaagggattattaaataaccaggtgcctcgggttggagcacttctcccttgagagctgactgaggacacagcgcagctgaaacaggctcgaaagccacccactgcggctcatccagaacccaagaccccctccccagatgtccaagactcagaactgaagctggggaagcaaggcttggaggtcatctggtcccaygccttcaatgacagatgaggaaaccgaggcctggagaggtttaagttagcgtgtgctgcaaaatttagcttttaattatatcttcttgtgctgttgttttgtctgttatttgttttcaactatagcgtaaggactttaaatactggttggttgagtagattagtttttgtcagggccaaaagaaaaaaaaaaaagcccaaaatgaaactccaccaatttctgctggggcaaaataaaaaagtttataattatccttgattcttcaaatcttctctcta

SEQ ID NO: 414351 - DNA, 542 bp, Homo sapiens
aaaatcttgaagttgatttttacatatctcatttggtcatattaaagccagcatcaaatcctgtcatatctgtattctaagaatatcctgaaatgaaccctcctccatcctccaccatcacgacaatcctygtccaagcagttgccaacacctcttttctgggtaatgctttagttctctaactggcctttctgcatctcatctacatagttgattttctataaggatgaattatcctttgaaaatgatatagattatgtcattcctccactcaaactctccatctcagtccaaataaaagccaaagcccttacagagactgagggaacactgtatgatgtaactcccaacccattctcttgtctctaaacattcacttggagcgatctttctgaatgaaaatctgtgggtgtcattccattgctttgaatcttccactgacatctccccattgctttgagaataagcccagattccacagaaaaaaacattcagtactcttcattgtgaagctcctgcttactgccatatttttgattcct

SEQ ID NO: 414352 - DNA, 542 bp, Homo sapiens
aaaatcttgaagttgatttttacatatctcatttggtcatattaaagccagcatcaaatcctgtcatatctgtattctaagaatatcctgaaatgaaccctcctccatcctccaccatcacgacaatccttgtccaagcagttgccaacacctcttttctgggtaatgctttagttctctaactggcctttctgcatctcatctacatagttgattttctataaggatgaattatcctttgaaaatgatatagattatgtcattcctccactcaaactctccatctcagtccaaataaaagccaaagcccttacagagactgagggaacactgtatgatgtaactcccaacccattctcttgtctctaaacattcacttggagcgatctttctgaatgaaaayctgtgggtgtcattccattgctttgaatcttccactgacatctccccattgctttgagaataagcccagattccacagaaaaaaacattcagtactcttcattgtgaagctcctgcttactgccatatttttgattcct

SEQ ID NO: 414353 - DNA, 542 bp, Homo sapiens
aaaatcttgaagttgatttttacatatctcatttggtcatattaaagccagcatcaaatcctgtcatatctgtattctaagaatatcctgaaatgaaccctcctccatcctccaccatcacgacaatccttgtccaagcagttgccaacacctcttttctgggtaatgctttagttctctaactggcctttctgcatctcatctacatagttgattttctataaggatgaattatcctttgaaaatgatatagattatgtcattcctccactcaaactctccatctcagtccaaataaaagccaaagcccttacagagactgagggaacactgtatgatgtaactcccaacccattctcttgtctctaaacattcacttggagcgatctttctgaatgaaaatctgtgggtgtcattccattgctttgaatcttccactgacatctccccattgctttgagaataagcccagattccayagaaaaaaacattcagtactcttcattgtgaagctcctgcttactgccatatttttgattcct

SEQ ID NO: 414354 - DNA, 610 bp, Homo sapiens
ttagtctatttcaccatctccctttttgaacaataagggcttcagcaataaaagctgtatcatatttaagtcctcaccatttagcacagtgcttagtatatgcacagttttcaaaaacattgaatgatatttttaaccaatacaaaatgtaggcatggcatgtaagatgaatgatattctttgaaattaaaaccatttaactattttaccatttaatttgtcaccatgaaaccatttaaccaaaatcaaatgaaaagatagrtgtctagagaaaatggaggataagacggcaatttatgttttttgttgttgctgctgtggtttttagttcagaagaatcacaagacaaggtatttataaactgaattattctgatcaccacaaattattccatttaatatttaagaagctaaaatgtctaaataaaatatcccaggacacaatataactatctttgctctcttttctgagaatttttgctcaccgagttactacctaattttctattatatttttctttacttcaatgcattctaaagctacacataataaaaacaaaggaaaagtcaagccatagacagaaagaaaacatcttcaaaacatatatttg

SEQ ID NO: 414355 - DNA, 503 bp, Homo sapiens
tcaaccctgtctctactaaaaacacaaaaattatctgggtggggtggacgcctataatcccagctcctcaggaggctgaggcaggagaatcacttgaaccccgggaggcagaggttgcagtgagacaagatcatgccactgcactccagcctgggcaacagagcaaaactctgtcaataaataaataaataaaaatccacatgtggctaggtgctactatattgaatagtagatccagtactttatgtgggtaagtcagtctgcccagaactaggctgcagagatcttagaaaagaccaagctagatagtaatgaaatcagatgatttaggtgctattcccaggttctgagccatacaaaaatcccatcatctgataacatggtatgtgctgcctttacattggtgccataatgctttgaactactactctagtcactttggacattacyggagatgttttgtttgttatggtaatgaaattgtatagattaggtcaactgtt

SEQ ID NO: 414356 - DNA, 578 bp, Homo sapiens
aaactacttttctgagtaagctttgaactgaacgaactctggagtcttaaagtacctgctcatttcacatcccttctgaagtaagtgcactatggtacatattgcaggctgcccactcatgttctattgtggggatggtggggcagtcattgctggggtagtcgtagaatatgtgtgttgcttccctcagctccaaagtaggcttattgattcttgtcccatgtaccatccaaaataatttggttacrtaattcatgcctaaatgattcagcttatgctatctcctttgctaatgtgacttgttcagcagtgtgtctaagcttgtccaagctatgtgaaactcagtatattagtattctatggctgttgtaacaaattaccataatttaatgtcttacaaatatgaattttattatcttacagtagttctgtaggtcagatgcctgacacccatctcaatgggccaagatcaagatgtctgtagggctgcatttctatctggaggttcagttttcttgccttttccagcttctaaaggctgatcacattccttggcttgtgagtcctttcatccatct

SEQ ID NO: 414357 - DNA, 604 bp, Homo sapiens
ttatattctcaacaaaatactagctaactgaatccaacagcatatcaaaaacccattgtgttcaagtgggtttcatactggggatgcagggatgggttaacatacgcaagtcaataaatgtgatacaccacataaaattaaaagcaaaaatcatgtgattatctcaaaagacatagaaaaagtatctgacaaaacctagcatccctttacaattaaaatcctcaacaaaattggcatagaaaggacataccttaaggtaataaaagccayctatgacaaacctacagccaacattatacttaataaggaaaagctgaaagcattccccctgagaactgcaacaagacaaatatgctcacttttcaccacttctattcaacatagaactggaggtactaggcaaagcagtcagacaagagaaagaaataaagggcatccaaatcactaaagaggaagtcaaactgtcactctttgccaatgatataatcatatacctagaaaaccctaaagactcatccaaaaagctcctggatctgataatgaattcagtaaagtttcaggatacagaatgaatcaatgtacacaaattagtagcactgctata

SEQ ID NO: 414358 - DNA, 669 bp, Homo sapiens
  misc_feature (1)...(669): n = A,T,C or G
gtataagatgaatatggagatgtgggtatactgtgcaaagccatgtggaccaccttaaagactatggtcttgatctaaaagcatgaggagttgttgcaatgtggtaaacagaaaagtggcttgattagaattgaattttttttttaaatcaccaactacaactrcaatgggcaaaagtagataactcccncaatatgctgctcacagttcaattatgctgctctagttaaagaggttcattccctaatagagaagctgcctagagaatcatatgattgattaatcagttgccttgagctaaattctcctccgatgtgtctatgggaaaattcccatagagttacaaagaataaaacatctgtaaattggtttgatgtgtcgactattttaattcatcaaccaggtatgcatgatcaaaagcagcttaagcattctctgtgacctctactaaaagaaaaagtcttatatcagcttctaaaataaattatttcatagagacattacaaatattgatggtaacaggtttctctgtagtgtttgctggagatttaatgcattcagacacagtaaaagagttgctcatgaaaacttatagaacatgaaaaatgatccatgccataatttattttgtcccaataggtcgtctttttttttgaaaccacgaatatt

SEQ ID NO: 414359 - DNA, 669 bp, Homo sapiens
  misc_feature (1)...(669): n = A,T,C or G
gtataagatgaatatggagatgtgggtatactgtgcaaagccatgtggaccaccttaaagactatggtcttgatctaaaagcatgaggagttgttgcaatgtggtaaacagaaaagtggcttgattagaattgaattttttttttaaatcaccaactacaactacaatgggcaaaagtagataactcccncaatatgctgctcacagttcaattatgctgctctagttaaagaggttcattccctaatagagaagctgcctagagaatcatatgattgattaatcagttgccttgagctaaattctcctccgatgtgtctatgggaaaattcccatagagttacaaagaataaaacatctgtaaattggtttgatgtgtcgactattttaattcatcaaccaggtatgcatgatcaaaagcagcttaagcattctctgtgacctctactaaaagaaaaagtcttatatcagcttctaaaataaattatttcatagagacattacaaatattgatggtaacaggtttctctgtagtgtttgctggagatttaatgcattcagacacagtaaaagagttgytcatgaaaacttatagaacatgaaaaatgatccatgccataatttattttgtcccaataggtcgtctttttttttgaaaccacgaatatt

SEQ ID NO: 414360 - DNA, 561 bp, Homo sapiens
atttaaccactgattgtttctcctttttctccattatctctttggatttcctgttagttggagattaaaccttctggcttgttactgtcatgattatatattttgtaattcattatacatttatttgacttttttattattgtgtgggagatattgccctttgtatcacaagtcttctacaaaatgttttgtttttattatatttttaattgataagacctctttctcactctttatatgttttttttttggaatataacatgctttttaaagaatacattattaattacatctayagatttttatatttttcactctctatctgcattgcttttatttcttccaaattccctttcccttgctttgaatgaagcttttttagaagcaggttttctccgaggtcaggttaccttcacccctcttcaaatgtaaaaaaaaggcaacaacaacagcaacaacaacaaacccaacaaaaacaggttggaggttttgtgtggtgaacagcaatttaaagtcattaggctgttgtttcattagggaccagtaaaatgtccatgtcag

SEQ ID NO: 414361 - DNA, 597 bp, Homo sapiens
tgaggctatgttaccctgagtacacagctagatccatgtgyttgattttatttctactttcagttctttctttaaaattttttattttaaaattatgtaaaacctaacaccttgggaaaaataggaatctgtaagtctatactgatataaatcaatagatggataaatagatgagaatagaagcccatctttacactagaatgccaagtaataatgtacaaagaatgatgaaaccagaaaactgctatttggcaccatcatagtaataattagttcatgcataaaataccaatagaagctaaaactagtgggtaaaagtgggatgagcaataggatttttgcatagtcccaaaatatcttcctggaaacaaaacttaataactacacaggggaaaagaagtatctttacagtgaaaaaatctcacagatataccaacttaatcaagtgatctaaacttacatcatgtgcaacctgaaaaaactgcagtggaaagagcacagtatcacctctgagacattcctatcaaaaatacataatttgtgtctaaagcgaaaatattagacaaacccaaattgagaatagcaaacagaatggct

SEQ ID NO: 414362 - DNA, 511 bp, Homo sapiens
tatcaacacaatctctacatagaattttattaaatttgggtaagcttaaaagtctaggctcaagtaaaaaaatgcgtgaaagattccatttcatccaaattccttagaaatcttcttgtcaggcagccaaagggggacttcttttaatgggcaccctaaagttttgcttggctcttgagtagccactggcagaaaagctcatatctgtgagaagctcatgctgagctcatagaggcaatgatccttagtgagtggtttccagttctttattgacttttyagcatttctattatttctactggcagcagcaatggagtgagtcagaataaattttcgtataaaacgggtaccagaagggctagaaattagttacaaatctgagcaatgtgatacttctgaaggcttactatgagagttcggcttaatgttgaaattcatttctctgtattctttaagcattgcttgtctttgttctaggatgtctagaacttcagttggaagacttaaaggc

SEQ ID NO: 414363 - DNA, 597 bp, Homo sapiens
tgaggctatgttaccctgagtacacagctagatccatgtgtttgattttatttctactttcagttctttctttaaaattttttattttaaaattatgtaaaacctaacaccttgggaaaaataggaatctgtaagtctatactgatataaatcaatagatggataaatagatgagaatagaagcccatctttacactagaatgccaagtaataatgtacaaagaatgatgaaaccagaaaactgctatttggcaccatcatagtaataattagttcatgcataaaataccaatagaagctaaaactagtgggtaaaagtgggatgagcaataggatttttgcatagtcccaaaatatcttcctggaaacaaaacttaataactacacaggggaaaagaagtatctttacartgaaaaaatctcacagatataccaacttaatcaagtgatctaaacttacatcatgtgcaacctgaaaaaactgcagtggaaagagcacagtatcacctctgagacattcctatcaaaaatacataatttgtgtctaaagcgaaaatattagacaaacccaaattgagaatagcaaacagaatggct

SEQ ID NO: 414364 - DNA, 535 bp, Homo sapiens
ctcctctaaatgttcttcatatcaaatttaaaacagaatttatgtgaattaagcatattgatttctttatgaaattataacacctactgttctactctcaataaaccattctctcaggtcatattcttactgaatcagttctatatccatggcaaatataaaagttcctctgcctrtgaccatgaaaattagaaatgagaaaagaaaaaaaaatctcacttttctctcattcaaggaggaaaatatacaataaaaatagagttgtaggattagttttcaatagacattatacaccatgaggcaaagctagccaaacatattttgtgatagcttgccgcaaataacattcaggttgtagaagtccttttgaaaagtttgccagggcttagcctatttgaatgaatctttgaataataaaagtaataataataacataaactaaaacaactacaactaatactttagatgttttatacctattatgcaggcattatataaataatttcttacaacaactttgaaagattagtattac

SEQ ID NO: 414365 - DNA, 594 bp, Homo sapiens
aaaacatgaaaaatccagaaaatatgacacttccgaaagaacacaataattctccagcaatatgtcttaatcaagaagaaattttcaaaatcycatataaagacttcaaaatattgattttaaaaacctcagtgaaatgcaagagaattatgaaaaacaatgcaaagaaatcaggaataaaaaaccaattcaggatatgaatgagaagtttaccaaagatattttttaaagaaccaaatagaaattctggaactgaataattcattaaaggaaatacaaaatacatttgaaagtttcaacactagggtagatcaagcagaataaaaaaaaaatctcagaacttgtaatctagtcagaaaaaaaataaagaacaaacaataaaaaataatgaaagcaaagcctttgtgactgctggaacaacataaagtgaccaaatatttgagttattgatatccttgagggcaaagagaggaagaaagaattagaaaacctatttaatgaatcaatagataagaccttccaaaatgtagcaagagatttgcacattcagatacaggaggctgaacaatccataggcagatacgatgcaaaaaa

SEQ ID NO: 414366 - DNA, 358 bp, Homo sapiens
catataaagacttcaaaatattgattttaaaaacctcagtgaaatgcaagagaattatgaaaaacaatgcaaagaaatyaggaataaaaaaccaattcaggatatgaatgagaagtttaccaaagatattttttaaagaaccaaatagaaattctggaactgaataattcattaaaggaaatacaaaatacatttgaaagtttcaacactagggtagatcaagcagaataaaaaaaaaatctcagaacttgtaatctagtcagaaaaaaaataaagaacaaacaataaaaaataatgaaagcaaagcctttgtgactgctggaacaacataaagtgaccaaatatttgagttattgat

SEQ ID NO: 414367 - DNA, 594 bp, Homo sapiens
aaaacatgaaaaatccagaaaatatgacacttccgaaagaacacaataattctccagcaatatgtcttaatcaagaagaaattttcaaaatctcatataaagacttcaaaatattgattttaaaaacctcagtgaaatgcaagagaattatgaaaaacaatgcaaagaaatcaggaataaaaaaccaattcaggatatgaatgagaagtttaccaaagatattttttaaagaaccaaatagaaattctggaactgaataattcattaaaggaaatacaaaatacatttgaaagtttcaacactagggtagatcaagcagaataaaaaaaaaatctcagaacttgtaatctagtcagaaaaaaaataaagaacaaacaataaaaaataatgaaagcaaagcctttgtgactgctggaacaacataaagtgaccaaatatttgagttattgatatccttgagggcaaagagaggaagaaagaattagaaaacctatttratgaatcaatagataagaccttccaaaatgtagcaagagatttgcacattcagatacaggaggctgaacaatccataggcagatacgatgcaaaaaa

SEQ ID NO: 414368 - DNA, 619 bp, Homo sapiens
ccacaaaacaaatttcaaaaatttgttaaagatcaaaattgtatcaagtatcttctaagatcacaatgaaataaaaatagaaagtgataccaacaggaaccctggacactacacaaacatatggaaattaaacaacatgctcctgaatgaccactgggtaaatgaggaaattacgatggaaataaaacaattcttgaaacaaatgaaaatggaaacataacatactaaaatctgtggatatagcaaaagcagttctaagacgaaagtttacagcctggaagcatacaacatagcaagactgaatcaggaaggaatagaaaatctgaacagactaatcacaagtaacaagattaaatcaacaataaaaaggccctcaacaaagaaaggcctargacttgatggattcacagttgaatttaaccaaacatacaaaaaagaactaatagcaatccttctgaaactgaaaaatcaaagaggagagaattctccctagctcattttatgaggccagcataactctgttactaaaaccagacaaggacacattaaaaaaaaataggccaatattcctgttgaaatagacacaaaaatcctcaacaaaatatcagcaaaccaaatc

SEQ ID NO: 414369 - DNA, 581 bp, Homo sapiens
tcagtgtttttagtctaatcagagttacacaaatatcatcagaattttgtaacatttttgacatcccagaaagaaactccagtgtttattggcagtcactctccaatccttaatccccccacccgcaaccccacccctgcccaggccactggcaaccactaactagcttgtacctctagatacatagatttgtctattctggacattttatataattgtgatggtactatatgttacctttttgactggcttttctcactgagtataatgatttcaaggttcatccatgttgtagcaagtactagtacttcatacctttttgttgctgaataatattacattgtataggaaaaccatattttgtttatgcattcatcagttkatggacacttgtgttattactttttggctctcatgaataatgctgttatggacatttatgtatatgtttttagtttatacatatgtcatcttcatttgaattgtgcatatacctaaaatgtattagtagggttctccaaagggacagaactaataggatatgtgtacatatgaaagggtgtaaggagaataggctcaca

SEQ ID NO: 414370 - DNA, 581 bp, Homo sapiens
tcagtgtttttagtctaatcagagttacacaaatatcatcagaattttgtaacatttttgacatcccagaaagaaactccagtgtttattggcagtcactctccaatccttaatccccccacccgcaaccccacccctgcccaggccactggcaaccactaactagcttgtacctctagatacatagatttgtctattctggacattttatataattgtgatggtactatatgttacctttttgactggcttttctcactgagtataatgatttcaaggttcatccatgttgtagcaagtactagtacttcatacctttttgttgctgaataatattacattgtataggaaaaccatattttgtttatgcattcatcagttgatggacacttgtgttattaytttttggctctcatgaataatgctgttatggacatttatgtatatgtttttagtttatacatatgtcatcttcatttgaattgtgcatatacctaaaatgtattagtagggttctccaaagggacagaactaataggatatgtgtacatatgaaagggtgtaaggagaataggctcaca

SEQ ID NO: 414371 - DNA, 587 bp, Homo sapiens
aggactattggataacccgtcacaatctcttcttcagaattaataaccccaattgctttagttatttcatctcacttcaattaataagcatttagtaaacaactactgtgggctgagacaaaaaaaaatctcttttctacaaacacagaatatagtatcctaagaatagaaagctctctctctcgcgctctctctctctmtatataaatttatatatgtgtatatttatgtataaatttctatcacataagcaaagttataccaaatatgagggacatatgaagtactatgtaattatagagatggagaatctttgagggcttagcagataacatggattatcaactagttattgaagatcatatagaacttttgaaaaaaattacatgccaacctagcacatagtaaatagactgaaggggctagagtttcaggcacatgcttctgatagttgaaacagtatatttaggggtcaaactctgaagaagtctaaatacttaaatgaaaagtttgaattatttaagcatgttttgagcatgctcaaaattgaactttaagaaaactggaaacaatatgagtaatggatt

SEQ ID NO: 414372 - DNA, 686 bp, Homo sapiens
atgaattaatactaatgaagggaaaagacaggattgaggctgtgatgtaataggtgagtagattgagtggtgtagttttggaaagttgtttttggtcctgttaacttatggaataggaagcaagattttcagtggagagcaaggataacaatggcacaggcagtgttggccatgtgaggaaggaggtgacagtgagaagtagttgaagacaaagaacaaaagtgagagagagagaaagaactcaatgtttaggtgaaggtgtgggaataagtgactgaggttgtgcaaagaacattattgttggagagaaagtcaaggccagaatatcatgtatccatacattgacttcaatcaataagaatcataatagtaagcatattgcagaaaacaaaagttagaagctgaaattccaaagttttagtgaacagtttggtttgagtttaaacctctgttttcatttttattgaatacatgaacacaatttcaaaaatgtttattttttcaaattattgccttattttctttcctctttctttaagcaattaagaatttatgactaccctgtgatgagtgggttatatgaagtttttaaattatagggmatgccccataatgaatccaaatttgaaatagtcactcgataatttacacctagaaagtaacaatttacactgggtagaaatgaa

SEQ ID NO: 414373 - DNA, 605 bp, Homo sapiens
tttgctttcagtattttgtaaaacctaatttggccaagatacaaataggtttgaggagtccctgaggcaccgatcctcttttatatcacctgtgctttcctaaagagtatgagaaaagttgagtcagtcactgggtactgttaccaataactaaaatgtcacttctgagaaaataaataaaaatgaaaacacaattctcattatacacctttatggcaattgagagaaaagaatgaagctaatttatactggatatttatcatatgtgagacgctacacctatcttttggcagatactgtttcggattaggatgctgaggttcatctggtcaagcagttgctctaaggacagaccaaagtgttttamgtttgaggctggcctggcaagtgtaaagttttttccatggcccacatgcctactctgcctttgttcttccaaaacattttcaactattgaaaaagaaattaataagtgagtagagtatggtctgttttgctttaaaaataacaaagataattttcaaagaatgagaaattatttttgctattatgagcttattcttttctcagacaagcagcgtcattctagtttgttgccttgagca

SEQ ID NO: 414374 - DNA, 537 bp, Homo sapiens
ggcaatcttgagaaaaatgctcatttacctaaaatgctgtgatcaggtagcccctaaaaccctacccttaaatcctcatttaaaaatctcaagcatttgttaacagtttgaaaaaaaactcatggattagtttcacacaaaacaaagagttttccaagtctttgctattgtgacgagttaatgggtgcagcacaccggcatggcacatgtatacatatgtaactaaccggcacattgtgcacatgtaccctaaaacttaaagtataataataataataataataaataaataaatttaaaaaaaaacaaagagttttcaaaatcagcatggatttttagaattgtttattactaatagaagaacatgttgcaagaagcttkaaagtggttatgaattgatgacaacaaaatatttaatgcagtttttgtgctgcttagaacagatacagaatttttgcttattaaataaatattgtatctttgcattaaaaattttttcgtgctgaactcttaagtaaatgtctctgaaattcccac

SEQ ID NO: 414375 - DNA, 570 bp, Homo sapiens
cctcttcctctgcaccttatttttcagaaacattaacaaaatcctttttggtgtccccattctcctgtaagaaccatctatatgctgttattcatgagattattcaaagaagtattctattttgctggtagtatataaatcaaagctaggaaatcaaggataggaatattgtggtaagcactgaagtaattaaaatgaaattttaaaacatattttttgataagaatttacaaacacaagaagaaaacaacagacactggggtctattttaggagggggagggagatggaggggggagaggagcagaaaataactattgagtactgagcttaatacttgggygatgtcataatatgtacaacaaactcccatgacacatgtttatgtaacaaaccttcacatgtaccctcaaacctaaaataaaagtttaaaagaagaaaaaaaaattaaaaagatgtcaatatgcttataaaattgtatgaacagattaaggatatatattgtagtcatgagagtatacagtcagctttccatgttgggttctaaaactatgaattcaaccaacatgga

SEQ ID NO: 414376 - DNA, 565 bp, Homo sapiens
caaccacccactgcttaaatctgggactatagagattctaagaagcatacctaggagtcaatactgttatggacttgtggctacagggattcttactgttaccagttattttcacagctagctgggttcttttctctatcctacctgacaagtcttctccagaatgagcttagtataatgcaggscacattataggctctttaaaaaatagaatcatggggccaggcgcggtggcacacgcctgtaatctcagcactttgggaggccgaggcaggtggatcacaaggtcaggaattcgagaccagcctggccaagatagtgaaaccccgtctttactaaaaatacaaaaattagccaggtgtggtggcaggcgcctataatcccagctactcgggaggctgaggcaggagaatcgcttgaactggggaggtggaggttgcagtgagccaagattgcaccactgcactccagcctgggcaacagagcgagactccatcttaaaaaaaaaaaaaaaatagaatcatggggggaaaaaatcatagaattttaaaactagaagacatct

SEQ ID NO: 414377 - DNA, 535 bp, Homo sapiens
ttcacatcctattatttttaaagtgtgaaatayatctgagttatataatatgaatatgtgaaatgtgtgaatgatataaatacgtgaaacatgtctagattatatatgttcggtgtccccaagaccactcccaggctcagtgatttgctaagaaaactcacagaacataccatagtcttactcatggctggaatttcttatcatgaaaggttataaagcaaaatcagcaagacaacacatgtgaaatgttgccaccaggaaaattcattggagactaaatgtacaggttttttattggaggcagattatatagcacataccaaaattctggactcctagaaggaaagtaggtgttcagcataaacatttcttatacagatagtttaggtatggtaaaccactcttattgattagagaatgctgagaatcttccctaaatttaagttcccatattccatccgagggacaaacttggaagcagtcttttctagacagagcagtttcaggctgccatgttaactctgcagcctgcttt

SEQ ID NO: 414378 - DNA, 511 bp, Homo sapiens
tgaactttttttggtgataatgtgtaaagtttaaaaaatttttcaaattccttttggtggtgtttctcctttaaagttgaaattttcttttgcattatgttaataagtaagttaaattgagactgcacatgaagttttacattatagaaattgtgattagacttcaaacaaatgttaattttttcctttaatgaatgttgtcatttcggtctagaaaattcaaatacctgattttgcagttttctcttcatagttatttggtgtacgtttatgttttcccttaagttgataaacctttacaagagaggtttcagtcataatttattgtagctttgtatgcagagcatttggtatcagacaygaattacaaggaaatattagaaaatatatagacaagggatgtttgttagacactgttaccaaaaatagcttagttgaaatgagtcttttgttgttaatgtgtttgtatgtatgtttataatatgacgtatttatgtagttagttgtggaa

SEQ ID NO: 414379 - DNA, 665 bp, Homo sapiens
gcttatagtttgcttccaatagctgtactgaagaagacagactggctagaaagatatgaatggaagctagaaatccatttaaaggactggaagcattcttaagttacaggatcaaaaattacttccacagaatatattgctactatcaccagtttaaattacacattacttagaagcccacacaattatttggttatgactttgtcttctctctttctgagtcacmtagcaaatccacttcacaaatacgaagaaatttctaaaatagataaaattagtataaacaacaaaaacttttataatagtcattttaggatggttagttgacagagctgctattgcaaatttcatagcatctctataaaagaacatttttcaatagagtaagtacagatatatagaacaaactagaggtacataaaattttaccattcaactcagagaagaactctgtttttttaaaaaatcttccttaattatgcaatcaaaatcagttaatacattattccaattgtacacataagtaaacttatagagtattaatttaaaaacccaaggcatcagataaataatcaaagaaaagttactaaatttcaaatgtaaacttcagtaactagatttcttagattatttaaaaaacaaaatctcactagtgtagacacagg

SEQ ID NO: 414380 - DNA, 576 bp, Homo sapiens
tatgtttggatctgttttattctgttctattaggcagatttattttaagttgtaattatctcctttctgtttctaatcgaatttgtttataatcaactgtcttaatcaaaaataatattttcatttggtttttcaagattattttaggatgtttattatgtttattgatggtataatatccataacattgtacctttggtatgtggtttttacagtttagctatttattagattttcatatggcaccaaactcgtaggaatatacttgatcagagaatacagaagtttttattctgtctcagtaatgaaatgggtctccctctccctactggttttgattaagctgtatgatttcagtttttgaaatggaaggtgcactaaggaaatgtttgtaacrtgacagtgaaaaatgtataactcatgctttcttgccagtatttaaattacagtgttgatgaggaaataattggaaacagtttctcagtgatgaaaaaattataaaattactaacaattatatgtggtactaaatctgtacctgctttttattttatacgtatttttttgcatcaaagca

SEQ ID NO: 414381 - DNA, 628 bp, Homo sapiens
ggagcagcagctggagctgaatcaggccctgctggaagggcaggagggggtcaggccgcagccctggtgctcaaggtccagaagctgaagaaacagatgaggaagcacagatagtctgggaggagacactcaagcttcccaccrgtggccacagcacactccatccctggaaatactgcaaaccaaccccccaggagccccgggatcagaaacatcccagtctctttcaggccagataaagcagaagagacccccacaaagggccggcaattggtaggtagtgggggagccagggctctgcagtcttagtcccattcccccttgacctcgcagcagggcacccaggccttacaggaatttaccctggaccatgccctaaaataacctcaccccaaatacaacaaaacaagagagcacccacacattaagaaataataataaaataaataagacaaggaacatgaaggattctgccactggcagaagaaactgatctaggctgcaacatgaacaacttaatcatacaggagagacaagatattggcctgactgagatgccagttgatatcaacagccttgaagacatgaagacaatcaagaaagataaatagctgcttggcagaaaatt

SEQ ID NO: 414382 - DNA, 628 bp, Homo sapiens
ggagcagcagctggagctgaatcaggccctgctggaagggcaggagggggtcaggccgcagccctggtgctcaaggtccagaagctgaagaaacagatgaggaagcacagatagtctgggaggagacactcaagcttcccaccggtggccacagcacactccatccctggaaatactgcaaaccaaccccccaggagccccgggatcagaaacatcccagtctctttcaggccagataaagcagaagagacccccacaaagggccggcaattggtaggtagtgggggagccagggctctgcagtcttagtcccattcccccttgacctcgcagcagggcacccaggccttacaggaatttaccctggaccatgccctaaaataacctcaccccaaatacaacaraacaagagagcacccacacattaagaaataataataaaataaataagacaaggaacatgaaggattctgccactggcagaagaaactgatctaggctgcaacatgaacaacttaatcatacaggagagacaagatattggcctgactgagatgccagttgatatcaacagccttgaagacatgaagacaatcaagaaagataaatagctgcttggcagaaaatt

SEQ ID NO: 414383 - DNA, 460 bp, Homo sapiens
ttgttggttcattttcagcaccttcagagggcagctttctttcagcccctacactcagttcagcctactwatttcagtttatcaagtgactttttgactctcaccctttggactagggggtttagcatacacagcattcatagttatggtaaaaaggtatttccattcagggcctaatacaagatcctatcttgcacttaagatttaataatgaattacactgttgaaatatctcaagaagcttgaaggctatgaaagattccatctctaaggttcacagagttatcacaactttaatggtaataatatatttgtatcatacttcataattatattctcatctatttttacagtaatttcttatagggtaaatgagacatagagattaaatttcctggttacatggctagttagtgacagccagtactgcaaatttctttaacaatctttccaccatatt

SEQ ID NO: 414384 - DNA, 460 bp, Homo sapiens
ttgttggttcattttcagcaccttcagagggcagctttctttcagcccctacactcagttcagcctactaayttcagtttatcaagtgactttttgactctcaccctttggactagggggtttagcatacacagcattcatagttatggtaaaaaggtatttccattcagggcctaatacaagatcctatcttgcacttaagatttaataatgaattacactgttgaaatatctcaagaagcttgaaggctatgaaagattccatctctaaggttcacagagttatcacaactttaatggtaataatatatttgtatcatacttcataattatattctcatctatttttacagtaatttcttatagggtaaatgagacatagagattaaatttcctggttacatggctagttagtgacagccagtactgcaaatttctttaacaatctttccaccatatt

SEQ ID NO: 414385 - DNA, 460 bp, Homo sapiens
ttgttggttcattttcagcaccttcagagggcagctttctttcagcccctacactcagttcagcctactaatttcagtttatcaagtgactttttgactctcrccctttggactagggggtttagcatacacagcattcatagttatggtaaaaaggtatttccattcagggcctaatacaagatcctatcttgcacttaagatttaataatgaattacactgttgaaatatctcaagaagcttgaaggctatgaaagattccatctctaaggttcacagagttatcacaactttaatggtaataatatatttgtatcatacttcataattatattctcatctatttttacagtaatttcttatagggtaaatgagacatagagattaaatttcctggttacatggctagttagtgacagccagtactgcaaatttctttaacaatctttccaccatatt

SEQ ID NO: 414386 - DNA, 459 bp, Homo sapiens
atgtatagaacttacagattttgtaactttgcattttggctttggtttttgtctatgttgcttaaaaggttttgtgggttttgatgggtgctggcccacctccattcccatctgactgggaatgtttaaattggctgtaagtcttttggctctaagtccttggccataggggtctcaccaagggacaagatggacctggggcaggcaggcacactgccctgrcagagataggacaaaatgaaagtttggccatcagtgctgcccctggcagatcttgtctaaaagggtgagaacgtaaattaaaaataaaattctaagccccgcagggactgaacagaccatcttttggccaaggggacccttgattaactttgaaaatggagttctcagccatgatgggaaggggggttggttagaccccctctcttggtaaccgtgactaagctttcctccctaagg

SEQ ID NO: 414387 - DNA, 565 bp, Homo sapiens
gctgaggatcagagaggaaagtgaattctccacgcacctatgcagttaagattggaatacagcctgtaatcccagcactttgggaggccgaggcgggtggatcatgaggtcaggagatcgagaccatcctggctaacaaggtgaaaccccgtctctactaaaaatacaaaaaattagccgggtgcggtggcgggcgcctgtagtcccagctactggggaggctgaggcaggagaatggtgtgaacccgggaagcggagcttgcagtgagccgagattgygccactgcagtccgcagtccggcctgggcgacagagcgagactccgtctcaaaaaaaaaaaaagattggaatacaggtcattattactccaaagccctttccaagataccacaccatctcccagtgcaaggcggcattaccacacttgtgtttaatccttagtaaagaggcccccacatcaccaactccaaacctcttctatgaacattcataaaatattccttaccaatagtttatctccaatggtggtctcaattttaaggctgagctactctaaacccaaaca

SEQ ID NO: 414388 - DNA, 644 bp, Homo sapiens
taaattgatcagtaaaagtaaatcaatatttaatggttcttaactaaaataagatggttaaacatatatatatcctcaaacagctgtgkttaagtatgcttctttcatctcaccactttttcctgttattgcatataattattaacacacatgcacacacacacacacacaccccgcacacacatacaccactctgcaaattaggtaaatattaacatttctttcttttacaacacttctacataattttctttagattgaatttttaaattattttatcttttatttccacaattctgtgaattatgtattggtgttatttgcacaatttttattgacagaattttcttttcattcatttgtatgaactccttttgaattattcccttctttatacatttacagcaaattatactatactattatattttaatatactgcattatattttagtgagtttatcactaacattttgtagctaatttcctctgaatattcattttctctatcttcctgaaataaatagaaatccatgaatattgccccaaactttcttgtttgaaatctttcctatcttaattaatggcctccagattctcacattaaaacatttgaggtcaattttgatacttccttttctctca

SEQ ID NO: 414389 - DNA, 539 bp, Homo sapiens
atgctgattcaaagaccataaaatctcctggagagccttgcctgagccctacaaggtattctaacctagctggcattgtaactgagtcttcaaaaagctcttttcttactctataaagtcagctaccttagaatagtggagcacatgataagacaattgaattttatgagaatgggctcattacaagactttatttcctgtgcagtaaatgtcttgatcagaagcaatgctgtttggcataccataatgggagataagcattctgtaagcccattgatgataacttttgcagaagcattgcatgcaggaaatgcaagtctgtatcccgagtaagcctcagttccattcactaagaataacacactgctttatttatgataaatctgtagctttatatctctggacaaaattggaacgttttaaktcctaatttcttcaaatacttcttcagctctctcatgttttcctccttctgtaattccactggcatgaatgttagatcttttgttatcctcttacaagttcctaagtctctattt

SEQ ID NO: 414390 - DNA, 519 bp, Homo sapiens
tagtattatttctaatagtggaaaatttaaaacactataatattgagctaaaaaataacagaggtattcctcattcttattaatattctctctttaaaaacattacttacgaatagttatatatgtaaaaattaactatagtttctaaacaaaagttaggtaaggcatttatgatacacaataagtaattctgaatattacacagacataaaatagaacaagacatgtcttttgtgggaacatggatggagttggaggctatcatccttagcacactgtattagtacattttcatactgatatgaagaaatacatgagactgggyaatttataaagaaaaagaggtttaatggactcacagttccacatggctgaggaggcctcacagtcatgttaaaaagtgaaggaggagcaatggcacatcttacatggcagcaggcaagtgaactcatctttataaaaccatcagatattgtgagactaattcactatcacgggagcaggatggggaaaactcac

SEQ ID NO: 414391 - DNA, 418 bp, Homo sapiens
ttgatcattccaatagatgcagaaaaggcatgattcaaatttacactgttaataacacaaatagtctcagcatcctaagaatataaagaaattgtttaagccacataaacagcatgtaagtaaatctaaaactgaaatcatatccaatggtgaaatattgaagactttccaaatatattgtggaaaaagtcaagaatgcctaatctcaccacttctgttcagtattgcaccaaaggttgttgcagtaaggtaaggaaaataaataaaaagctacttaycaattacttcattatttacatataaaatctctagtaatccacataataacttagaaattttatttttgtatactaaaaggaaacaaaaagacaaaaatgaacaatttaattaatattaacatgaaaaacaaaaacacctt

SEQ ID NO: 414392 - DNA, 604 bp, Homo sapiens
gattaggaatgatacctgtctagacaattcagaaccagtattgctgtgagttttaaatagacattcaaatgtcagcaagtggcaatgtatattttaattatgccgtccttagcagaccaaagrcatatataaattctggcatgtaagtataagaatgagaccttatgtagcaacaatacatatttccaagtttttactcccgtggagtaagagaaataagttggaaaggtaaaaagtttcattgcttctctttcatttaaaatatttggagaaaagctcaaagaaatttgttaaaattttcctttcttttttctttcagaatatcatcttgtaaaagtgacattgtattgtcctcaagaacacatcttggttaagaaatgttgtttctctcctatgctccctcaggctgagtgatctgtttctctccttaaatggcctgcataaatagggctttctggcaactgcatccagctgaagcaaattcataactgctcttgattgcacagtaacattgtttttgctccattcattactacattagttcttctgtgttctttttggcactatgagggagaatggatcctttaggacacacctcacacgt

SEQ ID NO: 414393 - DNA, 512 bp, Homo sapiens
gaaaattttattcttcatatattctttmaaacttgttaaaagtttgaatttagtatgacaatttttctcagaaattctattaattcattgtcaatattcttacacacagacacagattactgtttttagtaaagtcattttatgttatcttttcccataatttagcttttccattaagattctaaaataaatctctcaagaacctctggtttactttatcaggttagcacagaatcatagaattttaagactagaagagaaaataatgattatctgatcctacaacccttctgtcttctctatttaactgcagaatggttttccaaactacatttgaatgtatctctgagtaaacaaatttcgtatatatacaattgtgtcagatatgtatttttgatgttgagttgaaatttgtttccatatcttccatttactgtttctgtttcttatccttattaataaagaaaacaagtgtaatcattttgtttgccatccttcaatatttgaatatt

SEQ ID NO: 414394 - DNA, 512 bp, Homo sapiens
gaaaattttattcttcatatattctttcaaacttgttaaaagtttgaatttagtatgacaatttttytcagaaattctattaattcattgtcaatattcttacacacagacacagattactgtttttagtaaagtcattttatgttatcttttcccataatttagcttttccattaagattctaaaataaatctctcaagaacctctggtttactttatcaggttagcacagaatcatagaattttaagactagaagagaaaataatgattatctgatcctacaacccttctgtcttctctatttaactgcagaatggttttccaaactacatttgaatgtatctctgagtaaacaaatttcgtatatatacaattgtgtcagatatgtatttttgatgttgagttgaaatttgtttccatatcttccatttactgtttctgtttcttatccttattaataaagaaaacaagtgtaatcattttgtttgccatccttcaatatttgaatatt

SEQ ID NO: 414395 - DNA, 512 bp, Homo sapiens
gaaaattttattcttcatatattctttcaaacttgttaaaagtttgaatttagtatgacaatttttctcagaaattctattaattcattgtcaatattcttacacacagacacagattactgtttttagtaaagtcattttatgttatcttttcccataatttarcttttccattaagattctaaaataaatctctcaagaacctctggtttactttatcaggttagcacagaatcatagaattttaagactagaagagaaaataatgattatctgatcctacaacccttctgtcttctctatttaactgcagaatggttttccaaactacatttgaatgtatctctgagtaaacaaatttcgtatatatacaattgtgtcagatatgtatttttgatgttgagttgaaatttgtttccatatcttccatttactgtttctgtttcttatccttattaataaagaaaacaagtgtaatcattttgtttgccatccttcaatatttgaatatt

SEQ ID NO: 414396 - DNA, 600 bp, Homo sapiens
cctacagcaaaagcagtgttaggagggaagtttacagctataagtaccacatcaaaaaaagaagaaaaacttcaaataaacaacctaagaattcatcttaaagaatgagtaaaagaataagaagctaaaccccaaattagtagaggaaaagaaataataaagatcagagcagagataaatgacattgaaatgaaggaaaaatatatcaacaaaacaaaaaggtggatttttgaaaaaatgagacaaattgacagatctttagtaagagtaagaaaaaagagagatgacatgaataaataaataaataaataaataaaaatataaaaaggagacattaccactgataccacagaaattcaagattattaatgtctactatgatcaactatatgccaataaattggaaaatctagaaaaatgcataaattcctagtcgyatacaatctaccaaacttgtgtcatgaagaattccaaaacctgaacagaccaacaacaagcaatgagcttgaagccataataaaaatctcccagtgaagtaaagtctgggacccaatagcttcactgctgaaatttaacaaacatttaaagaagacataatat

SEQ ID NO: 414397 - DNA, 600 bp, Homo sapiens
cctacagcaaaagcagtgttaggagggaagtttacagctataagtaccacatcaaaaaaagaagaaaaacttcaaataaacaacctaagaattcatcttaaagaatgagtaaaagaataagaagctaaaccccaaattagtagaggaaaagaaataataaagatcagagcagagataaatgacattgaaatgaaggaaaaatatatcaacaaaacaaaaaggtggatttttgaaaaaatgagacaaattgacagatctttagtaagagtaagaaaaaagagagatgacatgaataaataaataaataaataaataaaaatataaaaaggagacattaccactgataccacagaaattcaagattattaatgtctactatgatcaactatatgccaataaattggaaaatctagaaaaatgcataaattcctagtcgcatacaatctaccaarcttgtgtcatgaagaattccaaaacctgaacagaccaacaacaagcaatgagcttgaagccataataaaaatctcccagtgaagtaaagtctgggacccaatagcttcactgctgaaatttaacaaacatttaaagaagacataatat

SEQ ID NO: 414398 - DNA, 587 bp, Homo sapiens
aatattgagattctatcatttgcaacaacttggttggaactggaggtcattatatttactgaaataagccaagcatggaaagaccaacttcacatgttcccacttctttgtgggaggtaaaaattaaaacaactgaactcatggagatagaaagtagaagcatggttactagatgctgggaagggtagtggggtgttggggagaagtaggaattgttaatgagtacaacaaatagttggaaagaataaataaggcctagtatttggtagcacaacagggtggctatagccaaaaatcatttaattatactttttaaaattaataaactgatataattagatcatttgtaacacaaagggtaaatgcttgaggtgacagatacccaattttccctgtagtgatgattacacattgcatgtctgtatcaaaatatttcatataacycataaatatatacaactactatgtactcacaaaattaaaaataaaaactaaaaaaaattaataaggaaacgtcacatttgaactatactttagaccaaatgaacgttagagacatatatagaagattgcactcaaaagcaaca

SEQ ID NO: 414399 - DNA, 628 bp, Homo sapiens
gttgtcctttattatttgtactactttctttgataaagatgacttaaaaagcaaactgacgggtaatatcagagagcacagttcaactaaatggtattttattcaatgatcttttcataaaatatgcctaattgttatgactatataataaaatatttgacaaaaacaaatggaatgtgaaatgagtttacccacatttctatagatttttacagagcttcagagactgtgaggtgtaaaataggattcaggaaacacacagaaggctgcttcacttgcatatattctcttacacwtttgtaacagtgacctctctattttcctaaactctaagtttatcacaccctttttgtcctgaggaaagtgtttatagttttctcaacctgtcaggtttaccttactcctgagacaggcttagatctgttagttacgtgacttgatactcttttattgttttttaactgtgaaaagaagtttgaattttcaaagcagccatgcaaactaatttgaaatgtgatcaattttattcaaggtttatattgtccaggcacttgtcacttttacagccacacatagaaaagcaggcgtggctgctgccaaagtcagaattaaaacaaaaccgaagtaa

SEQ ID NO: 414400 - DNA, 529 bp, Homo sapiens
ggattcaatagttgatggtagtactcaataagtttccagcacgggagcagaaatctggaaaattgaagaagtagaactagaaccatgtatgatttcatgtagagggactgccttagtagtaacaaaaattaggaaaggcagcaagsaagaataagcctaaatactggaagcattttgggagtgacggcctggagtaggaaaagtatatttgtctgcccaggctgcaataacaaaataccacaggccaggtgaggtggttcatgcctacagccccagcactctgggaggccatgatgtgtcaatagcctgagctcagctgttcgaaactagcctggccaacatggcaaaactctgtctctacaggaaaaaaaaaaacaaaaaaaaaattaggtaggtgtggtggagtatgcctgtggtctcagctactcagaagactgaggagggaggatcacttgagtcctagagtttgaggctgtcctagacaacagagtgagaccttgtctcaaaaacaaacaagcaaaaaaccaac

SEQ ID NO: 414401 - DNA, 529 bp, Homo sapiens
ggattcaatagttgatggtagtactcaataagtttccagcacgggagcagaaatctggaaaattgaagaagtagaactagaaccatgtatgatttcatgtagagggactgccttagtagtaacaaaaattaggaaaggcagcaagcaagaataagcctaaatactggaagcattttgggagtgacggcctggagtaggaaaagtatatttgtctgcccaggctgcaataacaaaataccacaggccaggtgaggtggttcatgcctacagccccagcactctgggaggccatgaygtgtcaatagcctgagctcagctgttcgaaactagcctggccaacatggcaaaactctgtctctacaggaaaaaaaaaaacaaaaaaaaaattaggtaggtgtggtggagtatgcctgtggtctcagctactcagaagactgaggagggaggatcacttgagtcctagagtttgaggctgtcctagacaacagagtgagaccttgtctcaaaaacaaacaagcaaaaaaccaac

SEQ ID NO: 414402 - DNA, 558 bp, Homo sapiens
cagaaaggtttttcacaatgattgccatgtgtattttaaatctcaatagtgagactaaaaacattcacagattgatctgaaaagggaaagtaacctgaggtgtccaatggttgaaggaataataaagaagaaaatagagaaaatgaatcatatcaatcaaggtccttatagatacttaaattacacaaataattatcttcaacaatatctgtaattagggaagtagacaatgaaatcaattgtgtgatattgtaaagatgatagatagagacagacagatagactcatcattayataatagacatttctgatgaaaacaccaaataatataatcttacttgcaagaatatttctagatttaaccatttctcccattttttgtctaattgagcattatcaggaaattaagtctaaatttaaatctaaatttctttacttttttttccttctaatattatgacctgctactcctggtgaaagaatatttacttatatgattttaaaaacacacaaactgtacaaattgacagcaaatgtcaaccaattacattaacacca

SEQ ID NO: 414403 - DNA, 619 bp, Homo sapiens
ttttgtttttgccttcaactatgtaagtattcatcaactatctgagatggagaaatgtaaaataatgcatagagttaaaaataatgaaaacaccttagagatgtattagctaaaatttatgctctttgttacatgtgtgcatactttccattaaacataacgagctctgaaattgccattgtcttgtatttgaagcttatttgtagtatttcctgtsttggacttaccagcgtcagcactaactgggtagatactgcctgaataagagctagcagaattgcaactttcattataggtatgctatgctaccaattttgtgtgtcattgtagtcagagctatttctcataaataaacactgaatataaagtcacttcaacatttaaacaattgctttcattcttttagatcatatacgttaaaataaaagagtactaaaaattgtactttgtttctgaaacatttgaaagtgattaaatatttaactcaatgatagatttttaaatgtcactatgacagtagtactctgcccacatgtgcataggattaatgaaaaaaaagggctctcttttagaacttggacacacttttaaagttatttttctgtatcttaaatataaa

SEQ ID NO: 414404 - DNA, 553 bp, Homo sapiens
gaatataaagtcacttcaacatttaaacaattgctttcattcttttagatcatatacgttaaaataaaagagtactaaaaattgtactttgtttctgaaacatttgaaagtgattaaatatttaactcaatgatagatttttaaatgtcactatgacagtagtactctgcccacatgtgcataggattaatgaaaaaaaagggctctcttttagaacttggacacacttttaaagttatttttctgtatcttaaatataaatgaatgcacaatgctggcaaaatgaaaacagagataggaaggaaggaagaaaagaasgaggaaaggaagaggtggagagagtgagggaggaaaagagaacaagaaggaagaggaaaggaagaatatagggaataaaggagagcaggcctgaatgtaatcagttagttgatatcccataagatatcagctacatgtgacaactatacaactccaaatacacatttacacagagtaatacatacaaagattgaggacatttctccaaaattaatggttcattttataaatatgt

SEQ ID NO: 414405 - DNA, 568 bp, Homo sapiens
tcacaggaagtccaaaacactactctggtgtaattaactcaggatttatcattagataagagaaacattagtttattttctaaaacttgtagattcatgcagaaaaagtgagaaatgcaactcaactctactagtttgaggtataaatgttcaacataccaatgatatgtaatgatattacaaatcatcatggttaattttccatgtaaacttgcctcaatcgcagtacttagatatttaatcaaaaaccagtctagattttctgtgagggtattttgtagataacattaaagcagtagacttttgagtccttaatgtgagtaggccttatccaaccagttgaaagtttgaagagtaaaaactgaggtcctagtggaaaagggaaytctgcctccagattaccttcagactgaagttggaatgtcactctgactaatatacaaatagtctttcactctggcatactatgcagaataaattaatctggcaaaatcaaaatacagtcaacttcaaaaataataaaatatcaaatgactaggtgaatatttcacatgataaatttaatgac

SEQ ID NO: 414406 - DNA, 568 bp, Homo sapiens
tcacaggaagtccaaaacactactctggtgtaattaactcaggatttatcattagataagagaaacattagtttattttctaaaacttgtagattcatgcagaaaaagtgagaaatgcaactcaactctactagtttgaggtataaatgttcaacataccaatgatatgtaatgatattacaaatcatcatggttaattttccatgtaaacttgcctcaatcgcagtacttagatatttaatcaaaaaccagtctagattttctgtgagggtattttgtagataacattaaagcagtagacttttgagtccttaatgtgagtaggccttatccaaccagttgaaagtttgaagagtaaaaactgaggtcctagtggaaaagggaattctgcctccagattaccttcagactgaagttggaatgtcactctgactaatatacaaatagtctttcactctggcatactatgcagaataaattaatctggcaaaatcaaaatamagtcaacttcaaaaataataaaatatcaaatgactaggtgaatatttcacatgataaatttaatgac

SEQ ID NO: 414407 - DNA, 597 bp, Homo sapiens
ggaatcctctgtattctactagattctcttagtcctgctatagaatgatcaattcagtaagaaccttcttaaaagctaaaaagaaaaaagaaatgtgtgtgcaatgtggaatctcaatattctaggaaaaaaaaaagagagaagttcttagcaggagaatcaatagggaacaaaaagtattaaaaaatgtgaatacagtcccagggagatgaatcaaagtggctcacacaaagacatagcaytgatcacattaatcaactagaaaaggttcatggaaaagactttacaattctcataataaaggtaggagttcggaaaaggctttaagaaagtacatggatattggttgaactcccagagggcacaagacagcaaaatatggaagtatttataaaacaaagagataaaagcgaacactacatactgacctaaatgtcccaccttgaaagttttgttagaacaccaatagctaagtggtgggaaagggccattgtattaagctaactcccttaggaaaaataagactactgcggctgacaaaagttcttacaaccatactgtatttagtttctaataagaggtatctagaactatttg

SEQ ID NO: 414408 - DNA, 597 bp, Homo sapiens
ggaatcctctgtattctactagattctcttagtcctgctatagaatgatcaattcagtaagaaccttcttaaaagctaaaaagaaaaaagaaatgtgtgtgcaatgtggaatctcaatattctaggaaaaaaaaaagagagaagttcttagcaggagaatcaatagggaacaaaaagtattaaaaaatgtgaatacagtcccagggagatgaatcaaagtggctcacacaaagacatagcattgatcacattaatcaactagaaaaggttcatkgaaaagactttacaattctcataataaaggtaggagttcggaaaaggctttaagaaagtacatggatattggttgaactcccagagggcacaagacagcaaaatatggaagtatttataaaacaaagagataaaagcgaacactacatactgacctaaatgtcccaccttgaaagttttgttagaacaccaatagctaagtggtgggaaagggccattgtattaagctaactcccttaggaaaaataagactactgcggctgacaaaagttcttacaaccatactgtatttagtttctaataagaggtatctagaactatttg

SEQ ID NO: 414409 - DNA, 569 bp, Homo sapiens
tgttgaattttgtttcttagcattttgttttaggattgttgcatttatgttcattagggatattggcctgtagttttcttttagtgtaatactttttcatctagctttggtatcgaggtaatgctggcctcataaaatgagtttggaagtatcccttcaatttattgcaagaatttaagaaagattgatattacttctttttaaacgtttggtagaattcaccagtgaatccatctggtcctgtgattttcttcattgtgaaattttttaattactggctcaattttcttttcattattggktctgttcaaatttcctattttttcatgattcaatcgtggtagcttgtatgtttctaagaatttctttctttctttttttttttttttttttttttgagacagtttccctcttgttggccagtttggagtacaatggcatgacctcggctcattgccacctctgccttccaggttcaacaaacaattctcctgcctcagcctccccagtagctgggattacaggtgcctgccaccatgcctggctaatttttatatttttagtagaga

SEQ ID NO: 414410 - DNA, 602 bp, Homo sapiens
cctggctaatttttatatttttagtagagacgggatttcacagaatttatttcttttgggttactcagtgtgttggtgtataattgttcataatagtctcttaccgtttcatttctgtggcatcaattgtaatgactcctctttcatttccaattttttttaaccttctctttttcttagtctggctaagggtttgtccattttacttatttttaaaagccaaactcagttttgttgtttttttctattgtttttctattttctatttctgctccaatccttattttctaccttctgctaactttagccttagtttgccctttttctagttccttaaggtataaagttaggttgcttatttaaggaaatcctgtcatttgtgacaacacagatgracctggaggacttcgtgcaaagtgaaatgaaccagtcacagaaggacaaatactgcatgaatccacttctgtgcaggatctaaaaatgtcaaactcacagaagcggagaatagaatggtggttgccaggtgccaggaggagggggaaacggttgctgttcaagaggtataaagttttagttatacaaggtgagtaacttctagaggt

SEQ ID NO: 414411 - DNA, 549 bp, Homo sapiens
aataatagacaggagccctagcttttcaaaattacggrgctccacactacctatttcccaaatcttgctatcgtgcttctctggaactcttagggtttaagggagcagagtttgaaaaccactaaactggtctaattcttacagtatatggatcaggaacgtgaggccagggaggatattaacctactgaaggttacacagcccattaatggtagataagatctgatttcaggtcttagattcgaggccttggattctttcccttgcatcagcagttttccaaatgtgttccacagtgatgccctaggggtctccatgagagtcaagagaaggaggggcaacagccaatgttccaggcaccagccaattcaaccaaaccgtctaggctttatatgttctaattatttaattttgtttaaagaaagggctcagtaattaaaagctggcttgagaagcacagcacaccatgtgctcaatgacattatctgaagtcccctgcttgggaaaagaagtagtagtaataataatagtggctagtatatatactta

SEQ ID NO: 414412 - DNA, 605 bp, Homo sapiens
ggagtacacaacctagatcccttgcatgcgcagttcacaatagggtttgtgcttctgtgagaatctaatgctkctgctgatctgacaggaggcagagctcaggctgttcaccttacctcctgctgtgtggcctggttcctaatgggccagggaccactactgctccgtggccctgcagttggggacacctgttatagtgtgaatcccaatgacaatcttctacagtctgatggacacattgggccaaagctgcaatgagaagaattgaccgtcttgcttaactggaaagaaaaaccttaaaaaaaaaaaaaaaagttcagagtgcctatgcagatccaagacataggtataactgcagtatcaatggtgaagacctgtaagacataggagaagaaaaccagagacatagtgatgagcagactgcaaaagtgtttgccagaggtgccatggaagggctggagtgaagtcaaacgtgagagaggaggggtgcattaacaaaaagttcacagaactgaaaaaagaattcatttggtggtaactatttggccagagttcagagaactccacactaaaactgccaactaaatcagaattggaaaggtcac

SEQ ID NO: 414413 - DNA, 605 bp, Homo sapiens
ggagtacacaacctagatcccttgcatgcgcagttcacaatagggtttgtgcttctgtgagaatctaatgcttctgctgatctgacaggaggcagagctcaggctgttcaccttacctcctgctgtgtggcctggttcctaatgggccagggaccactactgctccgtggccctgcagttggggacacctgttatagtgtgaatcccaaygacaatcttctacagtctgatggacacattgggccaaagctgcaatgagaagaattgaccgtcttgcttaactggaaagaaaaaccttaaaaaaaaaaaaaaaagttcagagtgcctatgcagatccaagacataggtataactgcagtatcaatggtgaagacctgtaagacataggagaagaaaaccagagacatagtgatgagcagactgcaaaagtgtttgccagaggtgccatggaagggctggagtgaagtcaaacgtgagagaggaggggtgcattaacaaaaagttcacagaactgaaaaaagaattcatttggtggtaactatttggccagagttcagagaactccacactaaaactgccaactaaatcagaattggaaaggtcac

SEQ ID NO: 414414 - DNA, 605 bp, Homo sapiens
ggagtacacaacctagatcccttgcatgcgcagttcacaatagggtttgtgcttctgtgagaatctaatgcttctgctgatctgacaggaggcagagctcaggctgttcaccttacctcctgctgtgtggcctggttcctaatgggccagggaccactactgctccgtggccctgcagttggggacacctgttatagtgtgaatcccaatgacaatcttctacagtctgatggacacattgggccaaagctgcaatgagaagaattgaccgtcttgcttaactggaaagaaaaaccttaaaaaaaaaaaaaaaagttcagagtgcctatgcagatccaagacataggtataactgcagtatcaatggtgaagacctgtaagacataggagaagaaaaccagagacrtagtgatgagcagactgcaaaagtgtttgccagaggtgccatggaagggctggagtgaagtcaaacgtgagagaggaggggtgcattaacaaaaagttcacagaactgaaaaaagaattcatttggtggtaactatttggccagagttcagagaactccacactaaaactgccaactaaatcagaattggaaaggtcac

SEQ ID NO: 414415 - DNA, 547 bp, Homo sapiens
agtcaaacgtgagagaggaggggtgcattaacaaaaagttcacagaactgaaaaaagaattcatttggtggtaactatttggccagagttcagagaactccacactaaaactgccaactaaatcagaattggaaaggtcacgtttttagctggcacaaattctgtrttgtgctacctgcttggaggaggttgggaaaatgtttctagtgcctggttttatgctaggattttagggttggtgctttttatagtgtcttattttcctctaacaagggagtgtttgagtctttgtagataactgtagaaaacttacttgtttgacagaaccttcctcaatatttacagtgtcaaacccctttgtagtttcagtgtctctgcctgccctgcccccctttctcaatctgtcaggtggaaagaataagataatgctggagaagatgtagtaccttctggggaaggagtggctctgactccatctaagcccgtttgtatcaacggtgactgaaaagtaaaaagatttccctctggtagccttacgctaggctca

SEQ ID NO: 414416 - DNA, 555 bp, Homo sapiens
catttttttgttgtcatacctagcatctagtggtgctacrggtgctgctaagtattctacaatgcacaggaaagcccccctacagcaaagaatgatccaatttaaataaatgtccagtagtgcagtagtgctaaggttgagaagctctgcctgttcagtttgtaaatgactttaccaaagacaactcgggaattgcatcatttcatatggtgtcctttttggctcatgggagaatcctacttcagtgaaaaattattctttctgcctgtttttgttgttgttgttgcaacttagatatgcatgtgatatgcatctaccaaggaaagtgaaaaatcaaaggggactggaagataatccactgccaggccaagaggataaagtttaatccttaccaaagggtctttggttggggaaagaaggaataaaacagcttgctgatagtgatggttgtgacaggaatggaagttgttacttagaggaagcatgaaatctgtcctactcatagggggatatatagcagttcgtctgttcagactagtagttttcgagcctggc

SEQ ID NO: 414417 - DNA, 555 bp, Homo sapiens
catttttttgttgtcatacctagcatctagtggtgctacaggtgctgctaagtattctacaatgcacaggaaagcccccctacagcaaagaatgatccaatttaaataaatgtccagtagtgcagtagtgctaaggttgagaagctctgcctgttcagtttgtaaatgactttaccaaagacaactcgggaattgcatcatttcatatggtgtcctttttggctcatgggagaatcctacttcagtgamaaattattctttctgcctgtttttgttgttgttgttgcaacttagatatgcatgtgatatgcatctaccaaggaaagtgaaaaatcaaaggggactggaagataatccactgccaggccaagaggataaagtttaatccttaccaaagggtctttggttggggaaagaaggaataaaacagcttgctgatagtgatggttgtgacaggaatggaagttgttacttagaggaagcatgaaatctgtcctactcatagggggatatatagcagttcgtctgttcagactagtagttttcgagcctggc

SEQ ID NO: 414418 - DNA, 555 bp, Homo sapiens
catttttttgttgtcatacctagcatctagtggtgctacaggtgctgctaagtattctacaatgcacaggaaagcccccctacagcaaagaatgatccaatttaaataaatgtccagtagtgcagtagtgctaaggttgagaagctctgcctgttcagtttgtaaatgactttaccaaagacaactcgggaattgcatcatttcatatggtgtcctttttggctcatgggagaatcctacttcagtgaaaaattattctttctgcctgtttttgttgttgttgttgcaacttagatatgcatgtgatatgcatctaccaaggaaagtgaaaaatcaaaggggactggaagataatccactgccaggccaagaggataaagtttaatccttaccaaagggtctttggttggggaaagaaggaataaaacagcttgctgatagtgatggttgtgacaggaatggaagttgttacttagaggaagcatgaaatmtgtcctactcatagggggatatatagcagttcgtctgttcagactagtagttttcgagcctggc

SEQ ID NO: 414419 - DNA, 581 bp, Homo sapiens
gattcttagtatattcactgtattatgcaaccatcaccactaatttgaaaagatttttaacactacagaaaaaaatcctgtatctattaggagtcagtcccaaattctaccacctctcatccccaggcagccactagtcttctttctgtctctggatttgcctattctggacatttcctataaatggaaacatayaacatgtgaccttttgtgactagcttctttcacttacatgtttttcaagtttatccatattgaagcacgtgttagtactttattcttattgtgactgaataatattccatagtatggatattccatattttatatccattcaatctattgatggaaatttggattgtttccacttttggctattacaaataatgttgccatgaatctttgtgtacaagtttttgtgtgaacatctgtttgaaattttcttgagtatatacctgggtgtagaattgctaggtcttgtggtaattcttttaattttttgaagaactgccaaactgcttcatgtagcaactgtaccattttacattctcactagcaatgtatgagaggttcagtttctc

SEQ ID NO: 414420 - DNA, 575 bp, Homo sapiens
gtatattcactgtattatgcaaccatcaccactaatttgaaaagatttttaacactacagaaaaaaatcctgtatctattaggagtcagtcccaaattctaccacctctcatccccaggcagccactagtcttctttctgtctctggatttgcctattctggacatttcctataaatggaaacatacaacatgtgaccttttgtgactagcttctttcacttacatgtttttcargtttatccatattgaagcacgtgttagtactttattcttattgtgactgaataatattccatagtatggatattccatattttatatccattcaatctattgatggaaatttggattgtttccacttttggctattacaaataatgttgccatgaatctttgtgtacaagtttttgtgtgaacatctgtttgaaattttcttgagtatatacctgggtgtagaattgctaggtcttgtggtaattcttttaattttttgaagaactgccaaactgcttcatgtagcaactgtaccattttacattctcactagcaatgtatgagaggttcagtttctcca

SEQ ID NO: 414421 - DNA, 575 bp, Homo sapiens
gtatattcactgtattatgcaaccatcaccactaatttgaaaagatttttaacactacagaaaaaaatcctgtatctattaggagtcagtcccaaattctaccacctctcatccccaggcagccactagtcttctttctgtctctggatttgcctattctggacatttcctataaatggaaacatacaacatgtgaccttttgtgactagcttctttcacttacatgtttttcaagtttatccatattgaagcacgtgttagtactktattcttattgtgactgaataatattccatagtatggatattccatattttatatccattcaatctattgatggaaatttggattgtttccacttttggctattacaaataatgttgccatgaatctttgtgtacaagtttttgtgtgaacatctgtttgaaattttcttgagtatatacctgggtgtagaattgctaggtcttgtggtaattcttttaattttttgaagaactgccaaactgcttcatgtagcaactgtaccattttacattctcactagcaatgtatgagaggttcagtttctcca

SEQ ID NO: 414422 - DNA, 575 bp, Homo sapiens
gtatattcactgtattatgcaaccatcaccactaatttgaaaagatttttaacactacagaaaaaaatcctgtatctattaggagtcagtcccaaattctaccacctctcatccccaggcagccactagtcttctttctgtctctggatttgcctattctggacatttcctataaatggaaacatacaacatgtgaccttttgtgactagcttctttcacttacatgtttttcaagtttatccatattgaagcacgtgttagtactttattcttattgtgactgaataatattccatagtatggatattccatattttatatccattcaatctattgatggaaatttggattgtttccacttttggctattacaaataatgttgccatgaatctttgtgtacaagtttttgtgtgaacatctgtttgaaattttcttgagtatatacctgggtgtagaattgctaggtcttgtggtaattcttttaattttttgargaactgccaaactgcttcatgtagcaactgtaccattttacattctcactagcaatgtatgagaggttcagtttctcca

SEQ ID NO: 414423 - DNA, 591 bp, Homo sapiens
acttcctttttagccaactggtacctgactagataacccaccataatcaatcttaaaactggaccaaatagattgggtttttacttactggacaacaggcagtgtaacaggaaaggtgagcttcatgatcacccctgttttctgcctgagacagtttcctaactgcagagcagtgagcaggagtccagaaaaagcacagtggtcctgctgagatgaagaggtagagatcacaattcgagacaggtgaattggcaggaatctgtggagctaggcaccaggagggagccgctcagcaggaggactgcagaagtctttgtggatggatattgctcatgagttcttgattcagggctcagctgcacacatgtaggaagagaccacayggtgctttccagacaatggctgctacagggttgagaacaaaatagagatactagaaggtgagtaggaatggaggacactgaaggtctggtcttgccaaagtgaaaagattaggttagtaccttgaaaacacctctgggcatctagctgagataccagaaggccagaagggtcatgctttggcaataaggacatgaccaagagtaagac

SEQ ID NO: 414424 - DNA, 559 bp, Homo sapiens
tgcaatgggttgaacatggccggccaagtaaacatttgcccctgtcatgagtatgatgaagggaccaagaaaaaatcttgcattaacttcacttactattattttataagcttttacttctgatatttactgcatcaacctggcccccgaagagatttcagtgtctaatcctggttagcatactcatttggttctaggatatccacttccagaaaagttgatgaacttggttcagtccaactatcccttatagaagaactataaaaagttcatagaactaaatatatatatattattttaatatatacacatatataacatacatatatatatatataactataaaactcaacttcgaccctaagaaaaacatctgacaagtacaaattaagggacattctacaaaatatctgattagtacttttcaaaactggcaaagtcatcaatarcaagcaaagtatgagaaaatgttatagctgaaatgaccctacatgacaatggcatgtattatggtatgctgaatagagtcctgggacagaaaaaggtacatatcgaacac

SEQ ID NO: 414425 - DNA, 610 bp, Homo sapiens
tatcttggtaatacatagagataatgatataaataaaagaaaaaagaagacagatgttataggtaatttccaaaaatgactctgagcaattcctcccttctctgttcctcaaaaccaagagatggaggttatttcccttctccatgaattgaagctatctctgaaattgctttcaccaatagaatataktagagaccacaggttgaaaattcttgcaggtgcagtgactgatgcctataatcccagcactttgggaagccgaggtgggtggatcacttgaggtcttgtgttcgagaccaccctgggcaacatggtgtaaccacatctccactaaaatacaaaaattagctgggagtgttggcacacacctgtagtcctagctacttgggaggctgagggaggagaattgcttgagcctgggaggtggaggctgcagtgagctgagatcgcacaccactgcactccagcttgggctacagattgagactccgtctcaaaaaaaataaaaaagaaaaaaaaaaaaaacaaaggaaaagaaaagacaaaagaaaaaagaaaaaaatctgagcccagaccttaagatgattgtcatctttcattgccattcctc

SEQ ID NO: 414426 - DNA, 597 bp, Homo sapiens
ccactatttcacacacttacccatatttggtactgcaaatctttttaattttagccatgatagtaagtaggtatatctaattttgtttttaaaaaaatatcctggtaaaccatactaaccaatttctatgtgtttattcaccatttatatatcctcttttgtaatactcaaatgtttattttaaattttaaatatgcttaaattattttagatataaattccttgtcaaatatatacatatatatcacaaaatattttcttcaaaactgtgtcttgcctattcaatttgaaaattgtggtgtgatttagcataataaagcatttaaatttttatagaagtaaaaaaatcaagatttattattattattattgtcattattattctactctatgttctatgcaaaaaatccttttctacttcccaggagcaaaagtattttcctatttttcttctaggaggtttataattgtgacattttcatttggcttgctttatatctcaaattaatattttgtgtacaaagtaagtrgaaattcacttttcatatgtgtagtcacatgttctaaaaccatttcctaaaaatacttttatttacc

SEQ ID NO: 414427 - DNA, 474 bp, Homo sapiens
atattagtaaatatttcatatgatactttatatatccagatacactggactgtgtaattatctaaaataaagtcatgccatatgattcaatggaattatagttaaataagctcattttatcctaaggcagagtagactctctcccccagccccccaaaaaatactggtgttaattataaaaggacaagcatttgttagtygatagctttatagttggttatttatgaggaaaacctcggatttgattttgttgtttttttttccactcatgcattgttcactcaacaaatatttccataggcttgacactgctaggcaccttgagcataaaactgaatgagagcttgtctctgcattgagagtgtgcctcgtttactggagaaatgttcccaacaccaggacctgtcacagaaaagttatacttaatactgtggtacacactattttaccaactgccacttggattcatgtgtc

SEQ ID NO: 414428 - DNA, 474 bp, Homo sapiens
atattagtaaatatttcatatgatactttatatatccagatacactggactgtgtaattatctaaaataaagtcatgccatatgattcaatggaattatagttaaataagctcattttatcctaaggcagagtagactctctcccccagccccccaaaaaatactggtgttaattataaaaggacaagcatttgttagttgatagctttatagttggttatttatgaggaaaacctcggatttgattttgttgtttttttttccactcatgcattgttcactcaamaaatatttccataggcttgacactgctaggcaccttgagcataaaactgaatgagagcttgtctctgcattgagagtgtgcctcgtttactggagaaatgttcccaacaccaggacctgtcacagaaaagttatacttaatactgtggtacacactattttaccaactgccacttggattcatgtgtc

SEQ ID NO: 414429 - DNA, 483 bp, Homo sapiens
ggttgaggggaggggaccatctttagaataggacagatacaggttagaaactccaacccttcccttaactatttgttgctgggaatactatttaaccttagtaagtttactcacattcctacttttcttttagtgggaataatgatgccactttaatgattaaataaaataatgtatgaaaagtatctacagcactaattttcactaagttgactgcattaaagttactatgtatggcctcacagattaagtacatcacaaattcattattcatatagacccaaatacagcaatcctactatatttgttttcattttctgagcaacaatgaaaacacagagtaaaagggaaggaaaaaaatgaagtaacatctcttaaaataaaaaaataattagtaccttgaactctaaacactttggaaaataaagcyttctatgaaaaaagggaaagcaaaacaaaatatataaagcaaccaacaattaa

SEQ ID NO: 414430 - DNA, 371 bp, Homo sapiens
gaccaacacaaagtttacacaactttcatgtgataaaactaatataaaaaatgagatgcttttgtctaacattaaaataacaaaattttttttaggaacctccatatgtttttctataaygactatactagttcacattcccaccaactgtgcacagggttcccttttctccacatccttgccaaaacttatcttttgcctttttgataaaagccattctaacaggtgtgaggtgacatcttattgtggttttgatttgtatttccctgatgattgtgttgaacatatatacatgttggctatctggatgcctttttggagaaacatctattcaggtcctttggctaatttttcatctggttgctttgttg

SEQ ID NO: 414431 - DNA, 390 bp, Homo sapiens
agaactttggaacaattttaaaggtttaataacatacatgtttttgggataccagaaggagagaaattgagactagagtggaaaaaatatttgaagtaacaatagcagacaatttctcaaaattaatgacaaccagtacactatagctcagagaagctcagagaarccaacaggataaatgccaaaaaaaaaaaaaatctacaccaggaaaataatattcaaactacaagaaactaaagacaaagagaaaaacttccaaagatgtgacattaaaaggataataaagaaatataatgagcaaatctttgcccctaaatttggtaacttagataaaacggatgaattccttgaaagatacacatgaccaacgtttatacaaagagaaatata

SEQ ID NO: 414432 - DNA, 648 bp, Homo sapiens
tgtaatttaaaaagttacagttgaaggtgagacaatacagtctaacgtaagaagagatttaaaatagcaggtaaataaaaattaaaaggtagactgacctacatggacaaactctgtctctattaagaatacaaaaaaaaaattagctgggagtggtggtgcatacctgtaatcccagcttctcggaaggctgaggcagaagaatagcttgaacccaggaggtggaggttggggtaagccgagatcacgccattgcactccagtctatgcaacgaagagcaaaactccatctccaaaaaaaaaaaaacaaaacaaccctaaagacagtgaagtggtatcgtgaagtagtaaaaacaaaccatcgtcaaccatgaattctgtagctgtcataaatatcttgcaagaggaaaggtgaagtaaaggcaatttcagggggaaaaaaagcgtgactttacagatactgactrcataaaacaacaatccaacaacagcaagaacaatgacaataataatgtcttgtgagatttagaaatatatagaatcaaaatacatagcaaacaaatagcaagtaatttaagaaggaggtactagtacttaaaataatttatagtcttttcattacacggaaagaaataggagttcttattt

SEQ ID NO: 414433 - DNA, 648 bp, Homo sapiens
tgtaatttaaaaagttacagttgaaggtgagacaatacagtctaacgtaagaagagatttaaaatagcaggtaaataaaaattaaaaggtagactgacctacatggacaaactctgtctctattaagaatacaaaaaaaaaattagctgggagtggtggtgcatacctgtaatcccagcttctcggaaggctgaggcagaagaatagcttgaacccaggaggtggaggttggggtaagccgagatcacgccattgcactccagtctatgcaacgaagagcaaaactccatctccaaaaaaaaaaaaacaaaacaaccctaaagacagtgaagtggtatcgtgaagtagtaaaaacaaaccatcgtcaaccatgaattctgtagctgtcataaatatcttgcaagaggaaaggtgaagtaaaggcaatttcagggggaaaaaaagcgtgactttacagatactgactacataaaacaacaatccaacaacagcaagaacaatgacaataataatgtcttgtgagatttagaaatatatagaatcaaaatacatagcaaacaaatagcaagtaatttaagaaggaggtactagtacytaaaataatttatagtcttttcattacacggaaagaaataggagttcttattt

SEQ ID NO: 414434 - DNA, 597 bp, Homo sapiens
tggatttaatttgcctcaaataaatatattaaagttaaatgaatcaaagatgcaaataygtattaacatccagctaagaatgcttaggaattgttttacttctaagtgttcaatcccatcacctctacagaaagaagtgtggcaatctcttctccagcagagcatgtgtcctgtcaaaacattgttactttggatacaaggtcagaatgtaaaacacatgtcaaggccattgcttcctgctcctctgtgtagtgtagcaagttgtaagcataatattttcctgattcaacttccttagacaaaataagtactccttggtttctatgatttaagcaaagggaaaataagaaagaaaaatattgctttgaagggaagctttttaaaaaagtaattaaataaaatgtttccttataaatttcaatgtgccattgatttttttatgctagagacccaaaaatatttccattaactgaatatttactacgtttggaaattaaatcatttttctgcaagcattatatgcacaggcttaaagatcaagtcctttttctaaaaactgcattagataatttaaattaccaattctgcaacaaccaa

SEQ ID NO: 414435 - DNA, 582 bp, Homo sapiens
cttgttaactagtcagcagcattataagcataaaagagtaaaaatcaaggtaaccccgtccttcctttttatttgagtctaataggccttaaatagatctggagtcaaaatcttggtttcagtgaggcttccagattccctactatcttagccagcttgggtggctataacagaatagcagagactaggtggttaataaaacacacattttttctcatagtgctggaggccaggaaatccaagatcaaggcagattctatgtctggtgasggtgcttttcttgatttgctgacagtcatcttctcgtctcttcacattttctgtgatttgagtgatggtgtcccctcagaaattcatgttgaaacctaatcttcattgcaactaggtgcacctttgggaggtgactacttcatgagggctctactcccatgaatggaattagagcccttatataacggctgacgtttaaggggaggtcttccttgcctttccatctctttcactgtatgaggacacaggatatcttctctccataagatgtagcaacaagatgccatcttgggagcatgaagcaacactcac

SEQ ID NO: 414436 - DNA, 634 bp, Homo sapiens
tgtcagactctggtaatttagcaattgattttatttgaatagtttataagaaatagyattaagactcccattattttctgattctaaaaactaaaatcagaagtataacaaagagaagagctgaggatgtttgtgtgaaaatggaagtcagaaatggttccttaagaaaatgatggagtataaagaatttggccaattgtgatccctcagcacagaaggtcaaagctacctgaagttaattctgctttctgaagcacaccaatgtgaagatgaagacatgctgctcccaaatgacttaggatcagcaagtgcttatttactatcttgtttaataagtgcttaagtttcactgcagaacaggcttgatatcaccatgatactatgaacataacccattaatattaatatgaattatatatgctatgcaaaggtttgaaagatgtgcatcggttattttctaagttgttggtcagtttctaataatatggatgcaccatgtaggttaccactttgaataaaaaggtgatatttataaaacagtgagaagacatctttagtattaaaattggaaagatagaaggaagaaagttttcagaatttttcataaattttcattataatccagttaaaccca

SEQ ID NO: 414437 - DNA, 593 bp, Homo sapiens
tgacttaatcattacacattctatgcatccaacaagatatcacatataccccctaaatatgttacagatattatgtatcaataaaaaataatgagagtgaaaaaatggttaaaatggtaaattccatgtcatatatattttagcaccataaaaacttctaaatttaaaaactatttaagaatataaacaatttatatttatgatttagaaaattatatcagatgttgacaaggtaaattgagcactcagtatttgaaatgtagtattttgaaatgtagtaatagtaattatttattattatttggtttctattttctagtgaaatatcgtgtctttgctataaaaatagtcttgccatctccatttttactaggattatratgatgaaagcatatatacaagctgtgtgattctaaattatggttatgattagcaaatatattgataccacgaacagtcccatcatgtttgttcagaaatatttcgacaaatataataatatcaatatgtgatcatttaatcattatttaattaaaaatataaaattattcttagttcaagaagtaataaaaataaaattaaaaatgaatttt

SEQ ID NO: 414438 - DNA, 517 bp, Homo sapiens
ttgttagctcacaagatggaattgtaggatatatgttgaactgctgtattgagacaggaagacctcagacacttaacagaatgtgtctgtgggagttcactattgtacactatagtacctcaaaatctttaagacttggcatgaaataacttctaagcacactgcaactgtaagctaacacgctgacactgatgtcttatttgggtaaaatcaaagaaatcatatagctgggaaaggatgaaacatctattttctgtgaggtatcaaccacaagggaagatacacctttttagaagattttattttgatgccagctagaatcttacagtcagtaactcagtttaaaaagaagtaagtaattacaaaagaaatattccatctgtctgttattaaaatgggatggatattatgattcctaraaatggcttgtttagagacagattattcaattttctggctggaatacattcatttttgaagactgcatgtctatgatatcaatttactgtactttggc

SEQ ID NO: 414439 - DNA, 553 bp, Homo sapiens
tggtttttttgcaatcaaggtgtagcatttctggcttcccttgtgctgctttgtttgtgtgaaataggaaggtaggaagtaaaaccaagtaaaccatgacatttctattttctacagccacagcatctgaattctagtgttatgtcaactagaaataatgtcagtatttcaaaactgacaaaaagaaattgatactttatctttttaaatgtttttatagattataaaaatttatagtttctgaattatataagttaaacaacctgaacatgcagatacctaaaagttttacctagataatagtattaatattttaataggttatgattgtgagtcacagttgccccattgagtttactggaaagcggttatttatcttctragtgtatgtagagaataggctttcataatcctaaacaaagagatcttttaagattagcactatatttagatttgaataaaattcataggcttgtagtaacagaaattttaatatattttctaatagaaaaaagtcaatcgaaataagttattcagatgagttttaaaaaac

SEQ ID NO: 414440 - DNA, 628 bp, Homo sapiens
ccggtaccatgctgttttggtgagtgtggccttattgtgttgtttgaagttgggtaatacgaagccttttgatttgtttcttttgcttagtcttgctttggctatgcaagctttttttttggttccatatgaattttaggattgttttttcatagttatttgaagaataatgtcagtactctgatgggaattgtattgaatttgtagattgcttttggcagtatggtcatttttagagtattgattctacccatctatgagcatgggatgtgtttttatttgtgtcatctattkctttcagcagcattttgtagtttttcttgtagaggtctttcacttccttggttaggtatattcctaagtattttattttttgtgcagctattgtagaaggggttgagttcttaatttgattctcagcgtggtcgcttttggtatatagcaaagctactaatatgtgcacatggattttgtattctgaaactttgcttaatttatttattggttctaggagctttttgaaggaggctttagtgttttctgggtatacaattatatcataaggaaacaattagtttcagctcctctttagtgatttggatgccctttatttctttctcttgtctga

SEQ ID NO: 414441 - DNA, 485 bp, Homo sapiens
tatttgaagaataatgtcagtactctgatgggaattgtattgaatttgtagattgcttttggcagtatggtcatttttagagtattgattctacccatctatgagcatgggatgtgtttttatttgtgtcatctattgctttcagcagcattttgtagtttttcttgtagaggtctttcacttccttggttaggtatattcctaagtattttattttttgtgcagctattgtagaaggggttgagttcttaatttgattctcagcgtggtcgcttttggtatatagcaaagctactaatatgtgcacatggattttgtattctgaaactttgcttaatttatttattggttctaggagctttttgaaggaggctttagtgttttctgggtatacaattatatcataaggaaacaattagtttcagctcctctttastgatttggatgccctttatttctttctcttgtctgatcattctggctag

SEQ ID NO: 414442 - DNA, 546 bp, Homo sapiens
aataaaattagacaggagacaatacagataacttagcaagaagttattaagggtgaataatagtattcrgatatatctgtcacaaggccctacaaatactaaaattagctgtgatttttttctgttagttccctaggattctgctaaaatcagcatcctcaggagcactggttaacactatggtgtaaatcacttgctgatgccataaattaaaaagaaaacaaaaaactatattcaaagtaactgagctataggaacatctccttaaaagatggaggcattaagagcattttccacaaccaagaactaaatgtcattcacctgtgaattaaaaaaaggaaatcaagggggaaaaatgagcagccagatcaattgcgtaaacctttgtcaaagatagaaatgtttatatgggagttctgtggctaaacaaaatgcaaacagccacatattttttcaaccaacaactggatatcagtagcttaaataaactctttcatcgttttatttttttcatccttatccttgctttaaaaaaatggaacacag

SEQ ID NO: 414443 - DNA, 408 bp, Homo sapiens
agtacttaaatatctttgataggcctgggaaacagaacacaggaagaaaagtcgtggcttttcaccgccagcagtggaatctattcttgttttttgtagcwtgaggtgtttacacctaaggaacagaaagtgaacttaaaatgcctttaattaagaaattaggtttaaatgattccatataacaaatctgatttaattttaaatttttgaatacatttactcattcaagaatgcgtttcaaaccctccgggggtgtagagaaagggcaattctagctatcttctacaactttcctgaaataaagacaggaaatccaatttgtaatcacaataaagtttcttatctaaatccaaaggccagtttctttttccccttggaaacataagtgcctgaagcaggggctgcatt

SEQ ID NO: 414444 - DNA, 408 bp, Homo sapiens
agtacttaaatatctttgataggcctgggaaacagaacacaggaagaaaagtcgtggcttttcaccgccagcagtggaatctattcttgttttttgtagcttgaggtgtttacacctaaggaacagaaagtgaacttaaaatgcctttaattaagaaattaggtttaaatgattccatataacaaatctgatttaattttaaatttttgaatacatttactcattcaagaatgcgtttcaaaccctccgggggtgtagagaaakggcaattctagctatcttctacaactttcctgaaataaagacaggaaatccaatttgtaatcacaataaagtttcttatctaaatccaaaggccagtttctttttccccttggaaacataagtgcctgaagcaggggctgcatt

SEQ ID NO: 414445 - DNA, 408 bp, Homo sapiens
agtacttaaatatctttgataggcctgggaaacagaacacaggaagaaaagtcgtggcttttcaccgccagcagtggaatctattcttgttttttgtagcttgaggtgtttacacctaaggaacagaaagtgaacttaaaatgcctttaattaagaaattaggtttaaatgattccatataacaaatctgatttaattttaaatttttgaatacatttactcattcaagaatgcgtttcaaaccctccgggggtgtagagaaagggcaattctagctatcttctacaactttcctgaaataaaracaggaaatccaatttgtaatcacaataaagtttcttatctaaatccaaaggccagtttctttttccccttggaaacataagtgcctgaagcaggggctgcatt

SEQ ID NO: 414446 - DNA, 408 bp, Homo sapiens
agtacttaaatatctttgataggcctgggaaacagaacacaggaagaaaagtcgtggcttttcaccgccagcagtggaatctattcttgttttttgtagcttgaggtgtttacacctaaggaacagaaagtgaacttaaaatgcctttaattaagaaattaggtttaaatgattccatataacaaatctgatttaattttaaatttttgaatacatttactcattcaagaatgcgtttcaaaccctccgggggtgtagagaaagggcaattctagctatcttctacaactttcctgaaataaagacaggaaatccaatttgtaatcacaataaagtttcttatctaaatccaaaggccagtttctttttccccttggaaacataagygcctgaagcaggggctgcatt

SEQ ID NO: 414447 - DNA, 518 bp, Homo sapiens
gggctgcattttgatattctttgtggcacttggcacagtatcatttctgtgaaggtggcttgtaagtagcctggggtgattatggtggtgtaattttcatcacaaccacagataacccaggtaactgtgcaggtacaatgatgttcagcttaacttaagtggctttgttccaaacaagggcctctattgtaaaaacaaagcaggtgttaaaacatagagatattgaagataggggtcactttacatactaacatgcactgaaaagtaaatctgagctgccccacattattgccaggaattactgtatacttaacatgaatccattaagtacacaactggacaaatgatgaaattttatgttagtaaaattcctgacatatttcacacctcttactctattaaattacgcttttttaacaaagaaaagcttgcctacytctacacattttcaattttttctcctatgtatttcatattaaaatttcaaaataatttgatcagagatccagtgcacaaag

SEQ ID NO: 414448 - DNA, 635 bp, Homo sapiens
atgacattgcactccagcctgggcaacaagagtgaaactgtctcaataaataaataaataaataaataaataaataaataaacaaacaaacaaacctaaaatttatatggtaccacaaaagaccctgaatagctaaagcaaccaaacagaaaaaaaataaaaaaataaaaataggctgaaggtatcactatacctgactttgaaatatactacaaagtatagtaaccaaaacagtatagtacttgaataaaaacagacacataggccaatggagcagaaaagagatcagaaatatatccacgtatttaagctaacttattttataatttcttttaaaaaggacagtctcttcaacaaatggggttgagaaaactttatatccacatgcagagaaataaaatgagatcctcttctcacaccacatataaaaatcaactaaaattagatacttaaatgtaaggcttaaaactcagaaattacyataaaaatatagattgaaagcccataacattgatctaggctgtgacttttattatttaacctcaaaatccaaggaaatcaaaagaaaaatagatacgttagattacttgaaattaaaaagctgcttcatggaatctgatacaatcaacaaaatg

SEQ ID NO: 414449 - DNA, 635 bp, Homo sapiens
atgacattgcactccagcctgggcaacaagagtgaaactgtctcaataaataaataaataaataaataaataaataaataaacaaacaaacaaacctaaaatttatatggtaccacaaaagaccctgaatagctaaagcaaccaaacagaaaaaaaataaaaaaataaaaataggctgaaggtatcactatacctgactttgaaatatactacaaagtatagtaaccaaaacagtatagtacttgaataaaaacagacacataggccaatggagcagaaaagagatcagaaatatatccacgtatttaagctaacttattttataatttcttttaaaaaggacagtctcttcaacaaatggggttgagaaaactttatatccacatgcagagaaataaaatgagatcctcttctcacaccacatataaaaatcaactaaaattagatacttaaatgtaaggcttaaaactcagaaattaccataaaaatatagattgaaagcccataacattgatctaggctgtgacttttattatttaacctcaaaatccaaggaaatcaaaagaaaaatagatacgttasattacttgaaattaaaaagctgcttcatggaatctgatacaatcaacaaaatg

SEQ ID NO: 414450 - DNA, 621 bp, Homo sapiens
aaacataatttgcatggagagattctgaatcataagtcagaagatttggcagtaatgaattcaatacaaagcagagtatacatttactttcagcatttttgaagttttcagttgtctagtacattamtttattaaaatatttgttttgctccaatattgctcttttcttttgaaaataggtacaaactcacactcacacaaaaacagtccataactttcttgcacttaacatttatttttagagtaatatatgggtatagttaactctatgtaaaccaatactaaaattctgttatgtttgcaggcagagagacatgttcaaagaaaaatacataacaaaatttttaaaatgtttaagcaggactcagaattttaagactcaggattttatttatacttgtatataatttttattatacccatgaaaatgaccctatagtcaatagcaatttacttgtacattttaaagtaactaaaagtgtagaatcggtttgtaatacaaatgataaatgctggagttgatggatatttcatttgccctgatgtgattaatacctattcatatgcctgtatcaaaatatgccatatatggcataaatatatacacacactatgtaccca

SEQ ID NO: 414451 - DNA, 621 bp, Homo sapiens
aaacataatttgcatggagagattctgaatcataagtcagaagatttggcagtaatgaattcaatacaaagcagagtatacatttactttcagcatttttgaagttttcagttgtctagtacattactttattaaaatatttgttttgytccaatattgctcttttcttttgaaaataggtacaaactcacactcacacaaaaacagtccataactttcttgcacttaacatttatttttagagtaatatatgggtatagttaactctatgtaaaccaatactaaaattctgttatgtttgcaggcagagagacatgttcaaagaaaaatacataacaaaatttttaaaatgtttaagcaggactcagaattttaagactcaggattttatttatacttgtatataatttttattatacccatgaaaatgaccctatagtcaatagcaatttacttgtacattttaaagtaactaaaagtgtagaatcggtttgtaatacaaatgataaatgctggagttgatggatatttcatttgccctgatgtgattaatacctattcatatgcctgtatcaaaatatgccatatatggcataaatatatacacacactatgtaccca

SEQ ID NO: 414452 - DNA, 594 bp, Homo sapiens
ttgaggtcaggagttcaagatcagcctggccaacatggtgatagccagtctctactaaaaataaaaaaattagccaaatgtggtggtgtgtgcctgtagtctcagctactctggaggctaaggcaggagaattgcttgaacctgggaggcagaggttgcagtgagccaagatcacaccactgcactccagcctgggtgacagagcaagactccatctaaaaaaaaaaaaaaaactttcattttctgattttacactaattgcttttataatgcttttattaagcactaactctctaatgttgagtaagatgtaagcagatattaatggcttttccacatttatatttgtacaatttttctgaagtgctttcctgtgctmtaaggtgtgaaaaattaaaagttttgccacattcttcacacttctgggagtttcctccagtataaattatcttacctacaatcaagtgtgacaaccatttaaaggctttgtaccattcttcatatttttaagatttctcaccagtatgatttattttatgtttagaaaagtttgaaggtgttgtcaaaatcattgtcacatctttcaggtttgta

SEQ ID NO: 414453 - DNA, 553 bp, Homo sapiens
atgtctcatcttgtgtctatttgaatttgaaattttatggaaaacttctacatatttattacattgaaatattttgctcaaggtagttttcaaacattggttaagtccactataatctcctttgtgctgtttacactcaaccacacttttacagccttttcttaactgtaaattctcatatccacattttctatatcttcttagggtcactttctggaaagaatctcttatgttctgctctggccaaaggtgttgggcaaaataataaaacataactgaaagaaataaaagtaacaaaytacttcacttgctcgactcagatgaatatactttacaaatctaacccataaagttacagaaactacataagcaagatggcatagcaaaataccacaggttctaattccttcatagacatataaatgtaacaagagcatattgaccaaaatgcatttatagaaaatttataaatgagttacgtgtgtgcagtgttccaggttatcacaattccaaaagccacatggaaggaagagaaaagttggttacatttacc

SEQ ID NO: 414454 - DNA, 553 bp, Homo sapiens
atgtctcatcttgtgtctatttgaatttgaaattttatggaaaacttctacatatttattacattgaaatattttgctcaaggtagttttcaaacattggttaagtccactataatctcctttgtgctgtttacactcaaccacacttttacagccttttcttaactgtaaattctcatatccacattttctatatcttcttagggtcactttctggaaagaatctcttatgttctgctctggccaaaggtgttgggcaaaataataaaacataactgaaagaaataaaagtaacaaactacttcacttgctcgactcagatgaatatactttacaaatctaacccataaagttacagaaactacataagcaagatggcatagcaaaataccacaggttckaattccttcatagacatataaatgtaacaagagcatattgaccaaaatgcatttatagaaaatttataaatgagttacgtgtgtgcagtgttccaggttatcacaattccaaaagccacatggaaggaagagaaaagttggttacatttacc

SEQ ID NO: 414455 - DNA, 511 bp, Homo sapiens
tttggcccaagaagagtattttgtcaaacatctagtaggtgggtgagcctgtgtttttcccagtttttctggcctgtaaaaagggatgacagctttcattttcctaaggcagatatacgcacagaaaacctaagaaagaaaggcagctgccagattaaatgtgatggtttacatgcacatcagcagcataaagatacttaataatgaagagaaaaataattatagtaaagaaatctgtccaagagctctttaaccaattgaatcattaacatcaactgcactaggacaaatttttgtaatgtgctgatgcacacagaaaaatgcagcttcactgctgcgatatygatctcaaaagtaaattagagtttgaatttaaccataaaaaatcagttttatggaaacttcaagatacagataattcatatgttctgtaatttttaatagtgattttaagtagtttttcttcagcaccctaaagagcaggtatctatctcctaataatttgtttcag

SEQ ID NO: 414456 - DNA, 511 bp, Homo sapiens
tttggcccaagaagagtattttgtcaaacatctagtaggtgggtgagcctgtgtttttcccagtttttctggcctgtaaaaagggatgacagctttcattttcctaaggcagatatacgcacagaaaacctaagaaagaaaggcagctgccagattaaatgtgatggtttacatgcacatcagcagcataaagatacttaataatgaagagaaaaataattatagtaaagaaatctgtccaagagctctttaaccaattgaatcattaacatcaactgcactaggacaaatttttgtaatgtgctgatgcacacagaaaaatgcagcttcactgctgcgatattratctcaaaagtaaattagagtttgaatttaaccataaaaaatcagttttatggaaacttcaagatacagataattcatatgttctgtaatttttaatagtgattttaagtagtttttcttcagcaccctaaagagcaggtatctatctcctaataatttgtttcag

SEQ ID NO: 414457 - DNA, 511 bp, Homo sapiens
tttggcccaagaagagtattttgtcaaacatctagtaggtgggtgagcctgtgtttttcccagtttttctggcctgtaaaaagggatgacagctttcattttcctaaggcagatatacgcacagaaaacctaagaaagaaaggcagctgccagattaaatgtgatggtttacatgcacatcagcagcataaagatacttaataatgaagagaaaaataattatagtaaagaaatctgtccaagagctctttaaccaattgaatcattaacatcaactgcactaggacaaatttttgtaatgtgctgatgcacacagaaaaatgcagcttcactgctgcgatattgatctcaaaagtaaattagagtttgaatttaaccataaaaaatcagttttatggaaacttcaagatacagrtaattcatatgttctgtaatttttaatagtgattttaagtagtttttcttcagcaccctaaagagcaggtatctatctcctaataatttgtttcag

SEQ ID NO: 414458 - DNA, 639 bp, Homo sapiens
atccatactacagccagaataatctttctaagatggtgattctattattctgcttaataccttctggtgcccattcattgactttcaaaacatttttcaactgcctcttgacacatataaagtcttatatgatctgtcccttgcctaggtctctatccttactctcttactatccccctctcctagtctctacaactgccatcctttctcttgcccactgctctttgtgccaccctctggttaaaataatactactactgataacctctttttcttaattctgctcatattttagtctcaacttcaatgacacccatcttckcccttaggctacatcagttctccctgctatatgctggctattcagttaacataacacattgcattgcaggaactgtgctaaattattcaccttcccaattagactataagccccatgaggacaataaccattttcgttttgctcacgaacatgtccttgacatctaatagctagtgcttgacaaagagcagaaaataagctgaatttaattctttcatttattccacaaatattttaaggaagcctatttgtgccagatgccacccaaggcactgagatgcagctgtgaatgaaacaaaatctcttcctacataaag

SEQ ID NO: 414459 - DNA, 568 bp, Homo sapiens
atttcagttttgaacatcttgagttaaattgtcctaacatatcttatgaatttgattgtcttcccwgggaagctgatatttcaaaaactttaagagtatagatttccaacttgtgtccaatttataaaattatctctaggctgctggtttcaggaggttgttcatgaatatactatttgcagagaatatatcaggagttaacaacagcctcgatatttgtggaggaccagttaactaagccacctcttagtgtatttagttgggaaatcttagctgaagatattcagtaatgaaccgacagtgactaaaaaattcaatatttaagtatatttcattgtaattaatttgaatttaagtagccatatacagctagtatttactacattgaacaatgcaaataagaggaaaaaattaataaccatctctaataccacatgccaaaatcctcatagatttattctagctaaaggagtttatcagaagcagcaattgaaagtaccaactaaaccagctagggttaattcactgtcattctctcagaaccatctcttctctgaacaaaacaagt

SEQ ID NO: 414460 - DNA, 568 bp, Homo sapiens
atttcagttttgaacatcttgagttaaattgtcctaacatatcttatgaatttgattgtcttccctgggaagctgatatttcaaaaactttaagagtatagatttccaacttgtgtccaatttataaaattatctctaggctgctggtttcaggaggttgttcatgaatatactatttgcagagaatatatcaggagttaacaacagcctcgatatttgtggaggaccagttaactaagccacctcttagtgtatttagttgggaaatcttagctgaagatattcagtaatgaaccgacagtgactaaaaaattcaatatttaagtatatttcattgtaattaatttgaatttaagtagccatatacagctagtatttactacattgaacaatgcaaataagaggaaaaaattaataaccatctctaataccamatgccaaaatcctcatagatttattctagctaaaggagtttatcagaagcagcaattgaaagtaccaactaaaccagctagggttaattcactgtcattctctcagaaccatctcttctctgaacaaaacaagt

SEQ ID NO: 414461 - DNA, 551 bp, Homo sapiens
tgctctcaaagatacccttcattttctacctaatattaataactgtaatcactcattattccattactatgctctayagtgtatacaactgttctttgtcatgtcattaactaaattatttatttgttccagtaatgtattccataaatattgtacacctaaaaattatgctatttttactgctgtatgctcagctgcccaataacagtttgaggattaacatatttgttaaatgcacaaatacattctttcagaagtgttagttgaataattttatattaaactccctatatacgtacaatatgaattagagaattcagaataaacattccattggaaaaaactaaacaatttgttataaaacatccttaaaagcatcagaaagttaatacagcaatgaagaattacaggaccaaattaagaatggtatggaagcctgtttgtgaggcttatgtttgggttatctctttacttagaatgactataaatctcaaaagagaactaaagggagaaataaccatatctactaacatggtaagggtatttaaaca

SEQ ID NO: 414462 - DNA, 551 bp, Homo sapiens
tgctctcaaagatacccttcattttctacctaatattaataactgtaatcactcattattccattactatgctctatagtgtatacaactgttctttgtcatgtcattaactaaattatttatttgttccagtaatgtattccataaatattgtacacctaaaaattatgytatttttactgctgtatgctcagctgcccaataacagtttgaggattaacatatttgttaaatgcacaaatacattctttcagaagtgttagttgaataattttatattaaactccctatatacgtacaatatgaattagagaattcagaataaacattccattggaaaaaactaaacaatttgttataaaacatccttaaaagcatcagaaagttaatacagcaatgaagaattacaggaccaaattaagaatggtatggaagcctgtttgtgaggcttatgtttgggttatctctttacttagaatgactataaatctcaaaagagaactaaagggagaaataaccatatctactaacatggtaagggtatttaaaca

SEQ ID NO: 414463 - DNA, 551 bp, Homo sapiens
tgctctcaaagatacccttcattttctacctaatattaataactgtaatcactcattattccattactatgctctatagtgtatacaactgttctttgtcatgtcattaactaaattatttatttgttccagtaatgtattccataaatattgtacacctaaaaattatgctatttttaytgctgtatgctcagctgcccaataacagtttgaggattaacatatttgttaaatgcacaaatacattctttcagaagtgttagttgaataattttatattaaactccctatatacgtacaatatgaattagagaattcagaataaacattccattggaaaaaactaaacaatttgttataaaacatccttaaaagcatcagaaagttaatacagcaatgaagaattacaggaccaaattaagaatggtatggaagcctgtttgtgaggcttatgtttgggttatctctttacttagaatgactataaatctcaaaagagaactaaagggagaaataaccatatctactaacatggtaagggtatttaaaca

SEQ ID NO: 414464 - DNA, 431 bp, Homo sapiens
atcatcttgaaaacttttccccccaaacccactgtgatctctcaagcaattggtaaggaatccaagagagtctgtatatgatacagatcagggagagcagaacacttgggaggtgaccaggtcttggggccgagcccttatgaatsggattagtgcctttataaaagaagctcaatggagttcttgtgtgccttccactatgtgaggacatagaaagaaggcaccatctatgaaccatgaaatgggctctcatcaacactgaatttgtgagcatcttgacctgagatcttacagcctcaagaagtgtgaaaaaagaaatatctgttgttttttagtcacccagttcatgttattttgttataagagtccaaatagaccaagatattccacttaatatataggggaaggcaacaaaaactgccacacttaga

SEQ ID NO: 414465 - DNA, 431 bp, Homo sapiens
atcatcttgaaaacttttccccccaaacccactgtgatctctcaagcaattggtaaggaatccaagagagtctgtatatgatacagatcagggagagcagaacacttgggaggtgaccaggtcttggggccgagcccttatgaatgggattagtgcctttataaaagaagctcaatggagttcttgtgtgccttccactatgtgaggacatagaaagaaggcaccatctatgaaccatgaaatgggctctcatcaacactgaatttgtgagcatcttgacctgagatcttacagcctcaagaagtgtgaaaaaagaaatatctgttgttttttagtcacccagttyatgttattttgttataagagtccaaatagaccaagatattccacttaatatataggggaaggcaacaaaaactgccacacttaga

SEQ ID NO: 414466 - DNA, 562 bp, Homo sapiens
atgatttagaattgagtgtaaaagtcaaaacccaattctgaatccatctgacaagggattaataactagagtacataaagagctcaggtggaaaaaaaaataaatgggaaaaaatataataaactgattttaaaatgggcaaaagatcagaatagatatttctcaaaagaagacatacaaattgcaaacagrtatataaaaaggtgctcaacatcatcgatcatcagagaaatgcaaatcaaaactacaatgagctatcatcctaccccagttaaaatggcttatatccaaaagacaggcaataccaaatgctattgaggatgtggagaaaagggaaccctgatacactgttgatgggaacgtaaattagtacaaccactacggagaacggtttggagggtcctcaaaaaatgaaaaatagagttactttatgatgcaataatcttactgctagatatatacccaaaaggaagaaaatcagtatattgaagaaatatctgcatttctatatttattacaacactattcacaatagccaagatttggaagcaatttaagtgtc

SEQ ID NO: 414467 - DNA, 562 bp, Homo sapiens
atgatttagaattgagtgtaaaagtcaaaacccaattctgaatccatctgacaagggattaataactagagtacataaagagctcaggtggaaaaaaaaataaatgggaaaaaatataataaactgattttaaaatgggcaaaagatcagaatagatatttctcaaaagaagacatacaaattgcaaacagatatataaaaaggtgctcaacatcatcgatcatcagagaaatgcaaatcaaaactayaatgagctatcatcctaccccagttaaaatggcttatatccaaaagacaggcaataccaaatgctattgaggatgtggagaaaagggaaccctgatacactgttgatgggaacgtaaattagtacaaccactacggagaacggtttggagggtcctcaaaaaatgaaaaatagagttactttatgatgcaataatcttactgctagatatatacccaaaaggaagaaaatcagtatattgaagaaatatctgcatttctatatttattacaacactattcacaatagccaagatttggaagcaatttaagtgtc

SEQ ID NO: 414468 - DNA, 562 bp, Homo sapiens
atgatttagaattgagtgtaaaagtcaaaacccaattctgaatccatctgacaagggattaataactagagtacataaagagctcaggtggaaaaaaaaataaatgggaaaaaatataataaactgattttaaaatgggcaaaagatcagaatagatatttctcaaaagaagacatacaaattgcaaacagatatataaaaaggtgctcaacatcatcgatcatcagagaaatgcaaatcaaaactacaatgagctatcatcctaccccagttaaaatggcttatatccaaaagacaggcaataccaaatgctattgaggatgtggagaaaagggaaccctgatacactgttgatgggaacgtaaattagtacaaccactacggagaacggtttggagggtcctcaaaaaatgaaaaatagagttactttatgatgcaataatcttactgctrgatatatacccaaaaggaagaaaatcagtatattgaagaaatatctgcatttctatatttattacaacactattcacaatagccaagatttggaagcaatttaagtgtc

SEQ ID NO: 414469 - DNA, 583 bp, Homo sapiens
tgcgtgttgcctgttttgggggtttatataaagtctaccataagttttcatctgtgatttgctttttttttataattgtacttttctatttttccatgttgtctagaaacatagcacattttcataaagagggaagggggacatctcaaggtctcctggcagtgcagcgaaggctggtgaattatcattaaaraggctgagattatcattaaagaaaaatctctgaattgtgacactgcactccagcctgggtgacagagtgagactccatccccccgcccccccgaaaaagaaacatttgaagcacatttttaacaccaaatagcaacaggattatcaggttcaggattctgaaagaaggggtgtagatcactttatttcattttttcatttttctttgctttttctttttttgagacggactcttgctctgtcacccagactggagtgcaatggcatgacctctcctcactgcaacctctgcctcccgggttcaagctattctcatgtctcagcctcctgagtaactgggattacaggtgctcgccactatgcctgcctgatttttgtatatttagtagag

SEQ ID NO: 414470 - DNA, 583 bp, Homo sapiens
tgcgtgttgcctgttttgggggtttatataaagtctaccataagttttcatctgtgatttgctttttttttataattgtacttttctatttttccatgttgtctagaaacatagcacattttcataaagagggaagggggacatctcaaggtctcctggcagtgcagcgaaggctggtgaattatcattaaaaaggctgagattatcattaaagaaaaatctctgaattgtgacactgcactccagcctgggtgacagagtgagactccatcccccygcccccccgaaaaagaaacatttgaagcacatttttaacaccaaatagcaacaggattatcaggttcaggattctgaaagaaggggtgtagatcactttatttcattttttcatttttctttgctttttctttttttgagacggactcttgctctgtcacccagactggagtgcaatggcatgacctctcctcactgcaacctctgcctcccgggttcaagctattctcatgtctcagcctcctgagtaactgggattacaggtgctcgccactatgcctgcctgatttttgtatatttagtagag

SEQ ID NO: 414471 - DNA, 564 bp, Homo sapiens
tctctaatcaaggaaagcaggcatttgcaccaataatgacagaacaaaacaacatgggggagagtagtagtataaacaactttgagagttcataggtgggctgccatactttcagctagagtgataagtaaagactttggagacaggtaaatattaagaataaatcttgaagaacgagtcatacctcaataggaagagatatgattggtggacagcattttaggtagacagagaatagaatgagctaaagtgtagagatgagaaatttgagtactccagttgtctagactagcactgtcygatagaacttttgtccatgaaggcaatgttgtatgaacgttctgtccaatatggtagccactagtggctgttgaacacttgacatgtggatagtgtgactgaggagttgaattttttattctatttaattttaattagtatacattttaaaaccacatctgacgagtgccagctcaaatcataggatacacggagaggagtttagtgtgataagttccaaacagattggcaaatttcgaagaactttactgctaggccaacaag

SEQ ID NO: 414472 - DNA, 564 bp, Homo sapiens
tctctaatcaaggaaagcaggcatttgcaccaataatgacagaacaaaacaacatgggggagagtagtagtataaacaactttgagagttcataggtgggctgccatactttcagctagagtgataagtaaagactttggagacaggtaaatattaagaataaatcttgaagaacgagtcatacctcaataggaagagatatgattggtggacagcattttaggtagacagagaatagaatgagctaaagtgtagagatgagaaatttgagtactccagttgtctagactagcactgtctgatagaacttttgtccatgaaggcaatgttgtatgaacgttctgtccaatatggtagccactagtggctgttgaacacttgacatgtggatagtgtgactgaggagttgaaktttttattctatttaattttaattagtatacattttaaaaccacatctgacgagtgccagctcaaatcataggatacacggagaggagtttagtgtgataagttccaaacagattggcaaatttcgaagaactttactgctaggccaacaag

SEQ ID NO: 414473 - DNA, 564 bp, Homo sapiens
tctctaatcaaggaaagcaggcatttgcaccaataatgacagaacaaaacaacatgggggagagtagtagtataaacaactttgagagttcataggtgggctgccatactttcagctagagtgataagtaaagactttggagacaggtaaatattaagaataaatcttgaagaacgagtcatacctcaataggaagagatatgattggtggacagcattttaggtagacagagaatagaatgagctaaagtgtagagatgagaaatttgagtactccagttgtctagactagcactgtctgatagaacttttgtccatgaaggcaatgttgtatgaacgttctgtccaatatggtagccactagtggctgttgaacacttgacatgtggatagtgtgactgaggagttgaattttttattctatttaattttaattagtatacattttaaaaccacatctgacgagtgccagctcaaatcataggatacacggagaggagtttagtgtgataagwtccaaacagattggcaaatttcgaagaactttactgctaggccaacaag

SEQ ID NO: 414474 - DNA, 553 bp, Homo sapiens
  misc_feature (1)...(553): n = A,T,C or G
gcctcaggctctctcccgccaggcgaggggccccatcccctttcccagcgcccccgggctggccggcggttcaatgacctagcctgagccacgcaccaaccaggagcgacagcagggacagcagcggtgatgaacarcccatgctggcatcaggactggcgcgcacgcgcgcacacccacggccccgctgctcatccgccctcacgcaccacggtggcagtcgcctcctccacacatgcgcatgctgctccaccaccgcccctcacccaacggttcagcgggggaaactgacggacacgaggtgtaggactggccataccacctgcaaggctgcccagggaagtaaggaaaagcaggttgagggtccctagaggccccttcactactttttgaacctttggacagctttcattccctttaagattgcttctgtgtgtcaaaccattgcaagaccacaaaggaggtttcaacttaacatgtatttgcacactccaggtcactgctgangccccaaaacccacagcctagtaacaccaacttcactttcaaggag

SEQ ID NO: 414475 - DNA, 553 bp, Homo sapiens
  misc_feature (1)...(553): n = A,T,C or G
gcctcaggctctctcccgccaggcgaggggccccatcccctttcccagcgcccccgggctggccggcggttcaatgacctagcctgagccacgcaccaaccaggagcgacagcagggacagcagcggtgatgaacaacccatgctggcatcaggactggcgcgcacgcgcgcacacccacggccccgctgctcatccgccctcacgcaccacggtggcagtcgcctcctccacacatgcrcatgctgctccaccaccgcccctcacccaacggttcagcgggggaaactgacggacacgaggtgtaggactggccataccacctgcaaggctgcccagggaagtaaggaaaagcaggttgagggtccctagaggccccttcactactttttgaacctttggacagctttcattccctttaagattgcttctgtgtgtcaaaccattgcaagaccacaaaggaggtttcaacttaacatgtatttgcacactccaggtcactgctgangccccaaaacccacagcctagtaacaccaacttcactttcaaggag

SEQ ID NO: 414476 - DNA, 500 bp, Homo sapiens
agacattccagctcgcatgatctcatcaaccaagagaatgttggtggcaatcagtgctgaaagggggataaaaattagatagctcagatgattaggagccctaattcgactcaacttcccacttccaactaagctgcacacgttaacatccaattaaatttcccccttcccctctacacatcagagggckagttcggtttccatacttttcagctgattacattattcatgggggaaaatgagcgactaaacagaaaacaccaaatgaaaagagtatgatgattctctaacagtttagttttcattttcccaaacttaccaggaatgaagaagctgtttctttacacaatcgttatcccataatgcctgcttctgctgctaccacgggctcacctaaaaggcaaccaaagtaagttcagtcaataagaaccaacaatactgtgtgtggctttgcttatcaccgatgactcatttcctccagtattaactatgggaattca

SEQ ID NO: 414477 - DNA, 500 bp, Homo sapiens
agacattccagctcgcatgatctcatcaaccaagagaatgttggtggcaatcagtgctgaaagggggataaaaattagatagctcagatgattaggagccctaattcgactcaacttcccacttccaactaagctgcacacgttaacatccaattaaatttcccccttcccctctacacatcagagggcgagttcggtttccatacttttcagctgattacattattcatgggggaaaatgagcractaaacagaaaacaccaaatgaaaagagtatgatgattctctaacagtttagttttcattttcccaaacttaccaggaatgaagaagctgtttctttacacaatcgttatcccataatgcctgcttctgctgctaccacgggctcacctaaaaggcaaccaaagtaagttcagtcaataagaaccaacaatactgtgtgtggctttgcttatcaccgatgactcatttcctccagtattaactatgggaattca

SEQ ID NO: 414478 - DNA, 500 bp, Homo sapiens
agacattccagctcgcatgatctcatcaaccaagagaatgttggtggcaatcagtgctgaaagggggataaaaattagatagctcagatgattaggagccctaattcgactcaacttcccacttccaactaagctgcacacgttaacatccaattaaatttcccccttcccctctacacatcagagggcgagttcggtttccatacttttcagctgattacattattcatgggggaaaatgagcgactaaacagaaaacaccaaatgaaaagagtatgatgattctctaacagtttagttttcattttcccaaacttaccaggaatgaagaagctgtttctttacacaatcgttatcccataatgcctgcttctgctgctaccacgggctcacctaaaaggcaaccaaagtaagttcagtcaataagaaccaacaataytgtgtgtggctttgcttatcaccgatgactcatttcctccagtattaactatgggaattca

SEQ ID NO: 414479 - DNA, 530 bp, Homo sapiens
tttttgtaaatgttctcctcttagcttttaaggttttttttagcgatgagtcaaattttactcagatttttataggttatccctagtattcttgtttcttgttattgaagatattcaaatgttaatatatggtaataagaagtagctcaaaaagagcagaatgacctcttccttacccccttagtgatacagacaaatagagtatttgttcatgttatattttggcttttattkttaaatcaaggaggttgaattagagacagagcaaaataagcaaaaacctgaagctataaatttctaggtcaatccaaatacataaagcattaaaaaatgtcagatgcgaagctagatgcaaactgacagggaaaaaaaaaaacctctttgtgtacttaaagccccaaaccaaaagcaaaattaaaatttgtgctgacccttctcccttggggctgcagatgtcactgctgtccagggcgccgtctgttactgagtggaaggaagaggaatggcatccaagtcactagtgtaaaata

SEQ ID NO: 414480 - DNA, 488 bp, Homo sapiens
ccaaaagcaaaattaaaatttgtgctgacccttctcccttggggctgcagatgtcactgctgtccagggcgccgtctgttactgagtggaaggaagaggaatggcatccaagtcactagtgtaaaataaatcrtctgcctgccaaatcctgaagatgtcctgccatatttgttaaggccaggggatggagggtagaggtgagcaacaaaggtgaccattaacactcattgattcttgtcttttatgactcattcttttattattacatgttttgtaagaggttttatacttatacatatataatttttatttagtcagtcacagcagtagttacaatttatttagcacttatgggacaagatattttatacacattttttcactggatgtccaggactattatacaaactgagtattactcttatattaaaggtaaggaaatagcttctaactaagcaaagttgctcaaagtggcacatagagtgagg

SEQ ID NO: 414481 - DNA, 488 bp, Homo sapiens
ccaaaagcaaaattaaaatttgtgctgacccttctcccttggggctgcagatgtcactgctgtccagggcgccgtctgttactgagtggaaggaagaggaatggcatccaagtcactagtgtaaaataaatcatctgcctgccaaatcctgaagatgtcctgccatatttgttaaggccaggggatggagggtagaggtsagcaacaaaggtgaccattaacactcattgattcttgtcttttatgactcattcttttattattacatgttttgtaagaggttttatacttatacatatataatttttatttagtcagtcacagcagtagttacaatttatttagcacttatgggacaagatattttatacacattttttcactggatgtccaggactattatacaaactgagtattactcttatattaaaggtaaggaaatagcttctaactaagcaaagttgctcaaagtggcacatagagtgagg

SEQ ID NO: 414482 - DNA, 488 bp, Homo sapiens
ccaaaagcaaaattaaaatttgtgctgacccttctcccttggggctgcagatgtcactgctgtccagggcgccgtctgttactgagtggaaggaagaggaatggcatccaagtcactagtgtaaaataaatcatctgcctgccaaatcctgaagatgtcctgccatatttgttaaggccaggggatggagggtagaggtgagcaacaaaggtgaccattaacactcattgattcttgtcttttatgactcattcttttattattacatgttttgtaagaggttttatacttatacatatataatttttatttagtcagtcacagcagtagttacaattyatttagcacttatgggacaagatattttatacacattttttcactggatgtccaggactattatacaaactgagtattactcttatattaaaggtaaggaaatagcttctaactaagcaaagttgctcaaagtggcacatagagtgagg

SEQ ID NO: 414483 - DNA, 488 bp, Homo sapiens
ccaaaagcaaaattaaaatttgtgctgacccttctcccttggggctgcagatgtcactgctgtccagggcgccgtctgttactgagtggaaggaagaggaatggcatccaagtcactagtgtaaaataaatcatctgcctgccaaatcctgaagatgtcctgccatatttgttaaggccaggggatggagggtagaggtgagcaacaaaggtgaccattaacactcattgattcttgtcttttatgactcattcttttattattacatgttttgtaagaggttttatacttatacatatataatttttatttagtcagtcacagcagtagttacaatttatttagcacttatgggacaagatattttatacacaktttttcactggatgtccaggactattatacaaactgagtattactcttatattaaaggtaaggaaatagcttctaactaagcaaagttgctcaaagtggcacatagagtgagg

SEQ ID NO: 414484 - DNA, 528 bp, Homo sapiens
ctctctgtgtttgtcttgggtggggcctatggaaggctttagcaggatattggagggcaggaagagaaagaagtcagggtatttcttcttcatgtcctacttcggccctgtgcgctggccgtgatcatgtcctttcaggatataactcccttcgccctgttctcctctgtacctcttctgatgcagggctyctaaggaaacactgctccttttccttgactgtttatccctaggggtagtattatattctcaccattgctatcctttgggtgccctgccaccttgtttgctccttaagtctgtctacaattaatgcaaataactcctttattaaaatctctttatttgaacactctgggatgaattctgtttttttctgggaccctgactaatacagaggctgatactacacccatatgaaaatacatcaaagataatttgcaaagcatgtttgaaagctctacgttaggatcactagcactggcatgccaaaaggcacagaaaagaaaatacagggcatagcaaaat

SEQ ID NO: 414485 - DNA, 573 bp, Homo sapiens
agtgagataccatctcatccagtcagaatgcctattgttaaaaagtcaatgacagatgcgggctaggttgcagagaaaaaggaatgcttatatgttgtgggwatcaggaggccggagagatcactgggtgcaacaggaaggttttatttaggtggccactggcccagcggattaacatccaaaggctgagccctgaacaaagacagggcttgacttttatacatgcatcaggcaggggcaagtcgggtttttggcgcaaaacctgcgaggtgagaaagcagtcttacagaagcagaacaaaggcagttaatcataccgtgacaggttttacaacaggatttgcaacatgagcctaccttacttaaacatgtcttgtgaccttgccatgctacagaaagaaaaacaagaacttacaaaatctttacagacttgcagaaatagttacaaaaatagttgtgagagcagaacaaagaataatgttatggggagagaatttcaaacagggaaactgataaggagaacttgtttttctcatccctgctcctggagcccactccttcggagcccctgcct

SEQ ID NO: 414486 - DNA, 573 bp, Homo sapiens
agtgagataccatctcatccagtcagaatgcctattgttaaaaagtcaatgacagatgcgggctaggttgcagagaaaaaggaatgcttatatgttgtgggaatcaggaggccggagagatcactgggtgcaacaggaaggttttatttaggtggccactggcccagcggattaacatccaaaggctgagccckgaacaaagacagggcttgacttttatacatgcatcaggcaggggcaagtcgggtttttggcgcaaaacctgcgaggtgagaaagcagtcttacagaagcagaacaaaggcagttaatcataccgtgacaggttttacaacaggatttgcaacatgagcctaccttacttaaacatgtcttgtgaccttgccatgctacagaaagaaaaacaagaacttacaaaatctttacagacttgcagaaatagttacaaaaatagttgtgagagcagaacaaagaataatgttatggggagagaatttcaaacagggaaactgataaggagaacttgtttttctcatccctgctcctggagcccactccttcggagcccctgcct

SEQ ID NO: 414487 - DNA, 569 bp, Homo sapiens
ctgcaatagaggagtctttaataaacctgcctctttcactgtgctttgtgacttgtcctgaattatttccctcatgatatcaaagaacccacccttcaggtactgggatgagaccackttccggtaaagaagtgtctgagactaggacacagaaaagaaatagccgcaaaaactctttccttctacccacatagctcctgcttgtgtctcccattggttgaacgccaagcagaaaccaggggaaagagacccctagggatgcagcccgccaggagtttagcctataggacatagggcagagcaaaaaagaacagagggaagtagtccaatgcagaataactagcactgtgggaactgacaaccaacttattttgtagaatcagaaacactttctactgtcttttctttcctgaaagacactcacaactgcaaagtgattacaactcttttccctagaaaatcagttacaggtaaaatctactttcaacatgtctaggttctgttttacagtaacatcttaacaaaggaaacactatgacttctatagatggaatatcttaaggaataag

SEQ ID NO: 414488 - DNA, 559 bp, Homo sapiens
actctagaggatcccctcttggaaagtgttcatatcaatgatttgtttctaacktaatgttaatggccgcagcagcctgtctgagtggcactgcgaagatgctgcagtagggaaggtgtagccaggacaggttccttggagactgtgggagccgggaacaggtgggaaccccgcctcttatcgagttggtgaggcaggagccccacactcctgggcgcatgctagctgaccagctgaggctccagacccaggcattcctgtgctcttgggagcccgggaagccctcttcccccgcagcttggaaatgcctgctctagttccctggcctctgcctgctctagggcagagcaaagttgtgtccacggccgggtgctcttgcaacccagtcgggtgtgcgcggcctcgggggacactgacatgccagcccccggtcaccatggccccctccagactttgggtactgacgagcatgggagggaggcaaggcgaggcttagggaggctcagtgcaggcgccccttgacacaaacaacctgggcctgcgatggatggcatgttga

SEQ ID NO: 414489 - DNA, 559 bp, Homo sapiens
actctagaggatcccctcttggaaagtgttcatatcaatgatttgtttctaacttaatgttaatggccgcagcagcctgtctgagtggcactgcgaagatgctgcagtagggaaggtgtagccaggacaggttccttggagactgtgggagccgggaacaggtgggaaccccgcctcttatcgagttggtgaggcaggagccccacactcctgggcgcatgctagctgaccagctgaggctccagacccaggcattcctgtgctcttgggagcccgggaagccctcttcccccgcagcttggaaatgcctgctctagttccctggcctctgcctgctctagggcagagcaaagttgtgtccacggccgggtgctcttgcaacccagtcgggtgtgcgcggcctcgggggacactgacatgccagccccckgtcaccatggccccctccagactttgggtactgacgagcatgggagggaggcaaggcgaggcttagggaggctcagtgcaggcgccccttgacacaaacaacctgggcctgcgatggatggcatgttga

SEQ ID NO: 414490 - DNA, 535 bp, Homo sapiens
gcagcaggtagctcctctcataggcagatcatcygtggagccttcagttctcaacagagaggaggccctggagagggtggcttctctctgcttgtggtcatcccattgtctccagctatcagcagagagggtacctcctctctgcagctggtcctcctgtcctgtctctgccttcttcatcctctggttgtcctctgcccttctctggctgagcccagggcttttatggacctcaaaggggaggaagtgcctgctgattggtccatggttggccatgggtgggcccagaagagccataatgagtccccactctggtctgcaggaccagcagtctggcccccagccttcgggacctccttggcctgaaggtgggggttcactgggaacctgcccccttctacccaggaatcaatctgcctccaggggccaggccaggaattaatcagcctcctggtgccaatcatggcccaggggctcttccccaactcccactccaagattggagcgggtgctggtgtgtccggaattggttgct

SEQ ID NO: 414491 - DNA, 535 bp, Homo sapiens
gcagcaggtagctcctctcataggcagatcatccgtggagccttcagttctcaacagagaggaggccctggagagggtggcttctctctgcttgtggtcatcccattgtctccagctatcagcagagagggtacctcctctctgcagctggtcctcctgtcctgtctctgccttcttcatcctstggttgtcctctgcccttctctggctgagcccagggcttttatggacctcaaaggggaggaagtgcctgctgattggtccatggttggccatgggtgggcccagaagagccataatgagtccccactctggtctgcaggaccagcagtctggcccccagccttcgggacctccttggcctgaaggtgggggttcactgggaacctgcccccttctacccaggaatcaatctgcctccaggggccaggccaggaattaatcagcctcctggtgccaatcatggcccaggggctcttccccaactcccactccaagattggagcgggtgctggtgtgtccggaattggttgct

SEQ ID NO: 414492 - DNA, 597 bp, Homo sapiens
cccaggctggacagcaaagtctgtgatgtgcacaaaaggccctggtagggactggtgggcaggagggcctatagaacagatgtgccacagtccttgggtaagccagccccactgtctcctggccaggtggacagctggggctagagctaattggagagagatgtggaatcctgggggatagggtgcctatgggcacaacggcctctggctccatctgtctctgcctactctctgggaagattagcctgytatttcaaatgtccatgagggacactggttcccttgtagctagcatccccatggtccacagcaagagtgggttctttctctgtcccttgacccactcttttcccagaatccattcagggctggaaactagctctaacatttgagtaccccagcaggtccccagcttcctttctcttcagcctcaatgtgtgtgtcgcttctccgtcaactctcggtgttttctgtctgaagatctgctcaaagtaggttggttttgttgatattttggtcactctcagtgggagtggcacttcctgccttttgttaagtgccatgaataaaataagccacatgctttgatagagaata

SEQ ID NO: 414493 - DNA, 487 bp, Homo sapiens
acactggttcccttgtagctagcatccccatggtccacagcaagagtgggttctttctctgtcccttgacccactcttttcccagaatccattcagggctggaaactagctctaacatttgagtaccccagcaggtccccagcttcctttctcttcagcctcaatgtgtgtgtcgcttctccgtcaactctcggtgttttctgtctgaagatctgctcaaagtaggttggttttgttgatattttggtcactctcagtgggagtggcacttcctgccttttgttaagtgccatgaataaaataagccacatgctttgataragaataataataggagtggaggatataggttgtgtgctacgtatgggtcaaggaagaggcctttttggggctgtgataattaagctggaatctgaagggggacaaagagccctcttcatgaatagcaaaatgaaggaacaacttgtatgaggatctttagatgaga

SEQ ID NO: 414494 - DNA, 627 bp, Homo sapiens
ttgtttcaactttgtttgaagacaacatctttctctttgaaagaaggttcttaatggctgcatacatttaatggtatggatcttgcctaatctagtcagttttttaaaattttattggaatccaaaattatatgcaattcacccttgaacaatgtggggggtaggggcgttgaccacctgtgcagttgaaaatctgcatagaacttttgactcccctcaaacttaattactaagagcctattgttgatcggaagccttactaattatataaacagtcaacaaacatatttttatgttacatgtgttatattctatattcttacactaaagtaagctagagaaaagaaaacgctattaagaagatcataggaaagaaaaaatatatttactattaagtggaagtgaatcatcataaaagtcttcattcttactgttttcccactgaatgggctgaggagcaggagaaagaggaggagttacttttgctgtctcaggggtggcacaggcagaaaaggtggaggatgtggaaggggaggcagaagagacagggatactctgtaacttcacagaaatacattgtaatttttgtcttccttttttctcyaaaaatgtttctatatgttacca

SEQ ID NO: 414495 - DNA, 584 bp, Homo sapiens
aggatagggagtgattttccatttttatttcttgattttgcaattctagacattttctattaacatgttatgaaaatgtaggattggratctcttacatccattaaattccaagtcttgatccttctcctcaccatttatgtttcttcctcgtattttaaaaaattaaatctctatttattgttcactattatttttacagagtaaagattggtcacggccaggcacggcggctcacgcctgtaatcccagcactttgggaggccgaggcgggcggatcacgaggtcaggagatcgagaccatcctggctgacatggtgaaaccccatctctactgaaaatacaaaaaattagccaggcgtggtggtgggcgcctgtagtcccagctgcttgggaagctgaggcaggagaatggcttgaacccaggaggcggagcttgcagtgagcagagattgtgccactgcactccagcctgggcgacagagcgagactgcatctctaaaaaaaaaaaaaaaaaaaaaaaaagattggtcacaggtgttccgtatagttttacatttcctttctcatacaatttttgttttt

SEQ ID NO: 414496 - DNA, 569 bp, Homo sapiens
cttaacatgaaattttcttaggtttattttgtgtgttttttaaaattattgagttgaatatttaatttatttttaatatttattattcaataataaatataataaagcttttaaattttctactaggatatgataaaataagtgtttcattaggaagcattcctcccattattaatttatatgttgtatgtcattacactttctagttaaaataatttattgcctcagattacaaaagtaattgcaaacttgtttttaaaatacttaaatatagaaaaatgattatattagtctggtgcagtagtaattgcagtttttgccatttaaaagtratagcaaaaactgcaattacttttcaccagcctaatatatttttagtgaggttccaagcaataaaaggtatgtaaatagaaaatagtatagcctgaagctgtaagaactactatgaagccagataaagaaagataaacggttagggaatgacaggaggggtaggggagacatgtttagctatggtgttcagaaaaggcctaggaatgtgacatttgaaaagataacttatggatatc

SEQ ID NO: 414497 - DNA, 486 bp, Homo sapiens
ggcgcaacacgctaagcaactgtgcccctggttctgccccatgcgcaatgtccatctataattaataaaggaataacactgatgctttgaagagcatcactgaactattttcagctttctccccactgcagaaaaaggaaagaaatatccaattttatctcaagccaagtgaaaaggaattcaaaagataaactttagagttttatatgtatcctctgaagtttgaggaaataagggattagtgtctgctatgtgcttaagaaatctaaaggcaaaatggtgggatctcaacygggggaagggcagaaggaaagagattagactactttgggaagtactgccctttgaaataaaagactttttttttttttttaaataccacagagtgggtgttctttcaggaaaaaatcagccaggagccaagagaactatctggaatggatgggcaaggtaggaaaatctgactgaagtttaaaagcaacaact

SEQ ID NO: 414498 - DNA, 579 bp, Homo sapiens
aaactgtgtattcacctgagttggtgaattttgtatgctttctcgaaatatgttttaaatctggaaataaagtcacattgaggtgtaaatacagagcagtgagccagatatgcactaaggaagtggataaatgtgtayagtaaatatggcataaaataccactcaccctgtgacccagtcattagatgtcagagagggcataagcttggctggatagtactcttgctcagagctggtggctgaaagccagcagcaagcaatacttctcccagtcaaggaaataagcaccttggaggtctgggaaacactcaccatattagtcactgaagcaccaaaaagaattatggtacactgtgtgacttccctcattctttaaagtgatacatttccaaatgttatgaatcctaaaacttcaagcatgcatgaagatgaccaaaagaaagtagtcataacagaaaaaagcaagtatttgagagctgttgataaatctgccttttaaaacttaaaagtaacaaaatcacttaaattagcaaaaactgattaatatgcatttgtagaagctcaattctttattataag

SEQ ID NO: 414499 - DNA, 654 bp, Homo sapiens
tgtcctttaagtgctgagagtgagcccataatgtactcgggattcctttcttacatgcccatgttatagcacaaaggcaaatacatttcataaaatactggtttgttgcagttgattcttgttacttgcaaccattctggtctacaaagtcattggtgatactaaccattgcccttaaggaaaattcagggttaggtcccttgcagtcacaatgttctcataactacataacgctagttttgtgtgtgtttctgttttttttttttaatatatattgctgatttattaacattgaactcacagctggcaacaccataattcatgcctgaattaagtttatgtaatgcatgtactttctccataaggcacatcayggtcttcttgtgctgaggaacactaggtaggacttcagcactatgctagggccatttttacacggtgaaatcaccagcaaaaagcacaaaaaatgcaaaaaaactggcagcaaatagatcttgaaaaggacacttgtttatgagagctgaagaagaaggcacaatgttgtttttttcagcttcagctggggtcctgtgcattgggcaattcaaggtctttcccttctacctatatccacaaatcactgtgaaaacaccttgtgtattgattatggggcta

SEQ ID NO: 414500 - DNA, 558 bp, Homo sapiens
caaatctctttcccgtacttactagttccttactaccttgtttcataaataaccttttcaagctgataatttgaattatacrtaggtatttttcccaataactcaggaagttcagcaaacaacattaaattagtctcatttgtcagagaagacacacaaaccaagatcatttcattttggctgggtttctatgccaaaccttgacacctcaaaatatccagcaaagacaaacataacacccggacaaaaatgtatgctgacagttctgaagaagtttctatttttattgtatcaataattttaaagccaccttgtttgttaaaaatttccttaagtcatgtgaacttgaaaaatactttgggcttaacttatgagtgctttttttttaataagccaatttggtaaacgcaatatataacataataaatgtacgtacataaatacttctgatagtaatacaaactcaccagtttagaggctacttttgtttgctcaaataggtaatgcaatgaagactgtgaaccaacattttgggtaaaacagctcccatggcagctt

SEQ ID NO: 414501 - DNA, 615 bp, Homo sapiens
aacaatttaaaaactgagatacatgcagtacttatcacaataaaatcagtatctctatttttaaaaccatttcgaacagtaatgtgaattttttgggaatatatgtctaagcttgtctccatttgttgtgtagattaaggtatttaccatattttatgttaatattaatcattttacaatcattttcattatgtttgtcctataattacataaataagaatgaaaatgggcagattttcaagttgctcactatttctatttttcatccaaaagaatagtgcaatgaggagtccatacctgatagacatgtggaaatatagctggacacatttatggagtggcagtcaatgacaaggcacaaatacatagtgttatgacatgggaaatagttcttaaggttgaagttcccactagagagcttgtggtgtagacacttagaattgagagcctaaaaaagatggtatgataagagcaggtttcacctactgagtactatcttttctcatgttttctgtacctygtatctctcgtatctctaaaaggtcaaagatactgcataagccctctggaagctacctcttcccaagtctccatattcacactgcttttgattaa

SEQ ID NO: 414502 - DNA, 558 bp, Homo sapiens
caaatctctttcccgtacttactagttccttactaccttgtttcataaataaccttttcaagctgataatttgaattatacgtaggtatttttcccaataactcaggaagttcagcaaacaacattaaattagtctcatttgtcagagaagacacacaaaccaagatcatttcattttggctgggtttctatgccaaaccttgacacctcaaaatatccagcaaagacaaacataacacccggacaaaaatgtatgctgacagttctgaagaagtttctatttttattgtatcaataattttaaagccaccttgtttgttaaraatttccttaagtcatgtgaacttgaaaaatactttgggcttaacttatgagtgctttttttttaataagccaatttggtaaacgcaatatataacataataaatgtacgtacataaatacttctgatagtaatacaaactcaccagtttagaggctacttttgtttgctcaaataggtaatgcaatgaagactgtgaaccaacattttgggtaaaacagctcccatggcagctt

SEQ ID NO: 414503 - DNA, 568 bp, Homo sapiens
gcctgagaaaggaaatagaaatccagatccaggaaacccaaagaatttgttggaatttttaaagaaatgttccccaacactataaaggccataggtgacaaggcaacagctaatattattctcaagggtgaaaaattgaagacttttcccctaagatcaggaataaaacaagaatatccactctcaccacttctgttcagcatagtaatggaaattctagacagagcaattttgcaagagaaagaaataaaagacattgaaataggaaaggaaaaagtaaaattgtttctgtttgccgatmgaatgatcttattgataatcctaaggattccaaaaaaaagttgttaaaactcataagcaaacttagtaaattagtaggtcacaaaaccaacataaagcaatcagtatcatttctactttctaaaaactatttataaaagaacttaagaaagcaatagcatttataaaagcatcagaaaataaaatgaaatatttagaagtaaatttaactaaggacatgaaagatctatatactgaaaactacaggacactggtgaaagaaaacaca

SEQ ID NO: 414504 - DNA, 589 bp, Homo sapiens
tcttgcattctggttcgtgctcaccccttcmcttcttttatttttattcgtaagacttctaaaaatcaccagatattaggatatttgtcatttgtttattgtctgcatgtgggcatagacttttgtctctgttttgtttactgctgtctttccaaatatttggtgaattaatagagcagcctctagttgaacatcttctagtggctacagaaatctcaaaaagtagatgattcttcacagggtgaaatagttggtccatgactcccacttttattcatatgctttgtaacacatctcataccattgattattgtagtctcctattttaatactgtaccatttatatatcccataaaataggctagttatttaagtgcctgttgtgtaccgggcgttgttgtaagatagtcatgggtattgaaatgttaatgttttaggcttaagtcattttggtaccaaagttttcaagagaaaattttcatttaaaaggatttatgaacaagttgtatttataaagatacatcagtttaatacttttcttttacatttaacctaatgtgaactgttttccagatattttctaaatttg

SEQ ID NO: 414505 - DNA, 571 bp, Homo sapiens
ggggagagttatcagaataatggagtgaaaataaccttgttaaaattatagctattatagctaaaggttcattaactgctggatttyccatctacacccctaagcccaatctccttggcccatagcttgatcaacagcctgaccaataactgtgatcaatcatctaactttaatccatcttgcctggacccacctgaagtcccattagtgatcttcctggaacaagactttttattatcttggccttgtgtaaacctcactggcaatggaatctgggtcagtctccctttaacctgtcaaaaggatggctatattaaagtaatctatgatcaggccaagtgtttataccaatttaacccttccagggccctgtagcttctacccttgatttcttggccctgtctcctaaatttctggtcttgtttgtgtctaagcaaactgaggtcgtacaactacaaatgacagttactcagggatataaacatctgggcttgcacccaggagataaccagtcctagctaagaccagctagggaaaaaattcacccttctaatgggccctatatcaacac

SEQ ID NO: 414506 - DNA, 571 bp, Homo sapiens
ggtgactgacgcagtgtgtatccttgattagactccgaaatgaaaaaagacattagcaaaagaatacaaagtggatgaaatatgtatacagtttttagttttgttattagtatttcaccaatattaagttcttagtttgggtaaatgtggcatgattatgtaagatgctagccttaggggaaacgcggtgaagggtgtactcaaattcactgtactatcgttttcactcttctgtaagtctaaaattatttcaaaataaaaaaattaaaattgcraacattgtcagattggatataaaaagcaagattcaaccatatgttacttatgaacataatactttttttttttttgagaccaagttttactctgtctcccaggctggagtgcagtggtgcaatttcagctcactgcaatctctgcctcctaggttccagcaattcttgtgcctcagcctcccaagtaactgaaattacaggcatgatccaccacgtccggctaatttttgtatttttagtaaagacagggtttcaatatgttggccaggctggtctcaaactcctgacctcaagcg

SEQ ID NO: 414507 - DNA, 571 bp, Homo sapiens
ggtgactgacgcagtgtgtatccttgattagactccgaaatgaaaaaagacattagcaaaagaatacaaagtggatgaaatatgtatacagtttttagttttgttattagtatttcaccaatattaagttcttagtttgggtaaatgtggcatgattatgtaagatgctagccttaggggaaacgcggtgaagggtgtactcaaattcactgtactatcgttttcactcttctgtaagtctaaaattatttcaaaataaaaaaattaaaattgcgaacattgtcagattggatataaaaagcaagattcaaccatatgttacttatgaacataatactttttttttttttgagaccragttttactctgtctcccaggctggagtgcagtggtgcaatttcagctcactgcaatctctgcctcctaggttccagcaattcttgtgcctcagcctcccaagtaactgaaattacaggcatgatccaccacgtccggctaatttttgtatttttagtaaagacagggtttcaatatgttggccaggctggtctcaaactcctgacctcaagcg

SEQ ID NO: 414508 - DNA, 606 bp, Homo sapiens
tggtatatattaaacagcatctatgcctgtttatctctgccctgtaatgaatgaacagggttccaatgcccctaagggagatgtgtggttctagacccttatgttctatgaatagtaaagtctcttmtctgttgggaacaggccctcaaatctggccataaactggccccaaaactggtcataaacaaaatctctgcagcactctgacatgttcgtgatggccatgatgcccacgctgaaggttgtgggtttactggaatgagggcaaggaacacctggcccaccccgggtggaaaaccgcttaaaggcgttcctaagccacgaacaatagcatgagtgatctgtgccttaaggacatgttcctgcttcagataactatccagagcccatccctttgtttcccttaaggaatacttttagttaatctataatctatagaaacaatgcttaccactggcttgctgtcaataaatatgtgggtcaaactctgctcggggctctcagctctgaaggctgtcagccccctgattttccactctgcactctgtatttctctgtgtgtgtgtctttaattcctctagcaccactgggttagggtctccatga

SEQ ID NO: 414509 - DNA, 512 bp, Homo sapiens
atgtcttccaaagagtctttggtgggattccgcagatacaggactagacgttgtctgaaatgggtctttctgtgaggcacaggcatctatctttaaagaagtggttactgacactcacacaggcaactgggtaatgaggagcgtgatggggaagaagaaaagagtaggagagccctggaacttgatgatgtctacctgaagaaggtgcccctggatttggaatgctgactagataaaggaagcagctttgcattctttctatrtgcctgttcattcgcggagccaagtttgtgtttgtgttcattctggtgtttgtttgcatgttcttttctatcacagtaatacctttaaaatagtattttcatttttataatgttagatttatagaaagctgcaaaaaggattcagtgagtttcatatgctcttcagcttcctgtaatgttaatatctgacatagccatagtatatttatgaaagctgagacactgatggtaaaaatagctattaactga

SEQ ID NO: 414510 - DNA, 568 bp, Homo sapiens
acccacattacaatattgtagagaatattttcactgccctaaagaaatttacacatcatctattaaatatttctctccctccagccactagtaaccactaatgtgtttactatctccatagtttctcctttttcagaatgtcatataaatggaagtaaacaatagttaggccatattatgtgtatggcatgagggaagactccagcttgcaccagggtattaatttgtcccgcattatctttgacaaaaaaaaaaaaatccacactgaattgtcttgactaccttgtgaaatcaatttaccataaatgttagggttaatttttagatgctaaattttattcactgatctatatrtctatccctatataagtaccataatgtcttgattaccattattttcaagtaagtttcagaatccggaagtgtgagttgagtactccaacttttttttctagattgtcttggctgttctggatcccttatatttccatatgaatttaaaaatcagcttgtcaattaatgcaaagaaaagcagctggaatttgataaggattgcattgaattatgg

SEQ ID NO: 414511 - DNA, 556 bp, Homo sapiens
gatgattcaattcctgagtgggacagactgggatggcttgagatttcatcatgctacttagaatggcatgcaatttaaaacttatgaattatttctggaagtttccatttaacgtatttggactgtggaaagcaagatggtggataaaggaggacacttgtaaatcaagttaaagataggcaaaacattgaacatacgctttctcaaaaaatatgcaattggaatgaaaagcatgaaaagatgctacacagcatttgccattaggaagtgcaaattaaaacaagttactactacatttatggcaatggctaagttccaaaaaaacgaccacaccatttgatgagaggatgcagagcaacagggactctcattcatttttggcaggaatgcaaaatggcacaaccacttcagaagacaatctggcagcctctcacaaagctaaacayagcattaccatatgatccagcaatcacactcctaggtatttagccaactgttttgaaaactgaagtccacacacacattctgcacatgaatggtaacatatgctttgctc

SEQ ID NO: 414512 - DNA, 495 bp, Homo sapiens
atcaacagcgatcagtcatgatgacagcatgcactcctgataccatattatgaaaacaatgatgacctctgtggtcttcccttgctaacccaaaaactccagtctaatcatgagaaaaacagcactgratttccaatagattcccggtggtggtggctcacacgtgtaatcccagcactttgggagactgaggcaggcagatcacttgaggtcaggggttcgagaccagcctggccaacatggtgaaacactgtctctactaaaaatacataagtcatcaggggtgtggtggtgtacacctgttattccagctacttgagaggctgaggcaggataatcatttgaacccgggaggaaggggttgcagtgagccaagatcgagctactgaacacacagcctgggtgacacagcaaggctctatctcaaaaataaataaataaataaatttccagtagaggggcagtctacaaaatatctgaccaggactccccaaa

SEQ ID NO: 414513 - DNA, 533 bp, Homo sapiens
cctactacaaatgtgagctcaaaaagaaaaggagaaaaatgaacaggcagcactcgtccctcctcttcttaccttgtacaggtcaaagggaggcacagctgtggcccagagagacctctctgatccataccacatgctcatctctcctggcattctccacactacaccctccctccaccagccctcttcaccttaactctcagaaacacagttggtgcctcagtaggtctgatgccaccagcctttactcagaatgtgcttaatccaattagagcattctatcacattagagagttcacattgattctctccctctgaagtcgggccgcatacacagagaaaccatctgggactcagccatgttcagtgaagaatgtggatggcatgggcatccttcccatttggggatcaagccttctcttcttcagctgcagctcctccagtgtaatacatgtccatttatcaaactcctatctcctttcacttccggtctctatcacatattatckgagtttgctcagtcacttgatttc

SEQ ID NO: 414514 - DNA, 452 bp, Homo sapiens
ttagctattatgaatgacgttacaacatcactgttaartatattttgatgaacataagtatttgcttctcttggtatattctcaggatagaatttgttgagtcatagggtatatctatgtttactagatactaccaaacattttcccaaagcggttgtaccactttcattcccactagcagtatatgaaagtccaatttccttcataattgacattgtcaatcccttcaagtttagtgatttcacagtctaattttaccttttcatgatgagtaatagcattgagaactttttcatatgtttgttggccactttaacattatcattttgaagtttctgattcagcattttggccattttaaatatgattgcctgcctttttttttattgatttgaagttctgcctacaatcctttgtgggatgtaaagttcttaattttaacaaagtccaaa

SEQ ID NO: 414515 - DNA, 612 bp, Homo sapiens
tttcacatttaggtcccagggccattgcagattatgtattgcatatagagtgaattggaaaaagcaaggataaaggggtcttatttkcctattagagtttatgtataaagaaagactttagtatatcatttttgctcatttatcaggcaaactttcttgaaattagaggcagaagtaagatttgaagcaaacccaaatatttcccttcaagaactccagtaggttctcaaagtgagtatctcagaaagacccacactcagctctgtctgggaagaggaatgcaactgttgtgaaacataaccagagaaacgtacactccaccccttctgtttcacctaaaggaaaaacaaaagaaaacaaaaaccatagtcaatgtgggattcaaggaaagaaaatcagagtgctgcagccagtgagaggaatcgaaatcaggcatagagaagaaacctattttaccagaagagagtaagaaacattttatgaaggccacagccttaagtgcaggcaaatcaaaaaaagcctgagatttactcagaatattttagaatgttaccctcttcttcatatcttatgatcacatcaaggcagccccaaaataataaattacagctg

SEQ ID NO: 414516 - DNA, 612 bp, Homo sapiens
tttcacatttaggtcccagggccattgcagattatgtattgcatatagagtgaattggaaaaagcaaggataaaggggtcttatttgcctattagagtttatgtataaagaaagactttagtatatcatttttgctcatttatcaggcaaactttcttgaaattagaggcagaagtaagatttgaagmaaacccaaatatttcccttcaagaactccagtaggttctcaaagtgagtatctcagaaagacccacactcagctctgtctgggaagaggaatgcaactgttgtgaaacataaccagagaaacgtacactccaccccttctgtttcacctaaaggaaaaacaaaagaaaacaaaaaccatagtcaatgtgggattcaaggaaagaaaatcagagtgctgcagccagtgagaggaatcgaaatcaggcatagagaagaaacctattttaccagaagagagtaagaaacattttatgaaggccacagccttaagtgcaggcaaatcaaaaaaagcctgagatttactcagaatattttagaatgttaccctcttcttcatatcttatgatcacatcaaggcagccccaaaataataaattacagctg

SEQ ID NO: 414517 - DNA, 612 bp, Homo sapiens
tttcacatttaggtcccagggccattgcagattatgtattgcatatagagtgaattggaaaaagcaaggataaaggggtcttatttgcctattagagtttatgtataaagaaagactttagtatatcatttttgctcatttatcaggcaaactttcttgaaattagaggcagaagtaagatttgaagcaaacccaaatatttccyttcaagaactccagtaggttctcaaagtgagtatctcagaaagacccacactcagctctgtctgggaagaggaatgcaactgttgtgaaacataaccagagaaacgtacactccaccccttctgtttcacctaaaggaaaaacaaaagaaaacaaaaaccatagtcaatgtgggattcaaggaaagaaaatcagagtgctgcagccagtgagaggaatcgaaatcaggcatagagaagaaacctattttaccagaagagagtaagaaacattttatgaaggccacagccttaagtgcaggcaaatcaaaaaaagcctgagatttactcagaatattttagaatgttaccctcttcttcatatcttatgatcacatcaaggcagccccaaaataataaattacagctg

SEQ ID NO: 414518 - DNA, 536 bp, Homo sapiens
ttcacctctcaatagggcaccactcatgtggcaataaaatctggcagctccttagttgttccaaatttggccctagaggaaaacaggctacatgtccatgaatctgatgagtagtgccttcttgtattcttctgaatgcataaacctgtttcaatcagtttcattttattatggagctcttctgggcactctcttccgtgttagaccatttccctgatgttatccaagacattacggtatttcaagtttcawgattattttatgccccttattcatagagggtggctccaattgatgtctaatagcaagccaataattgtctctcaaatggtgttaatgtatcattatgtgtggaaattttatggccccaaatcctaacaatcactggtgagtgacaccaacaggctttggccataaactctagtctgcatgaatgcaagttgtagatacttccaaaattatatctgaatgcagatcataaggttccaaagggattgtgtgaaccaccatttttgcagttcatacatacctactat

SEQ ID NO: 414519 - DNA, 586 bp, Homo sapiens
acattaataggtatattaaaagcagtaaatacctcaattacagctacaagctctgctttctgagctgaagtatagggtgtctgaaaaactttaccttttgagccagaataagaagttttatcattactagacccatctgtaaaaacattctcagcaccttcaattggtttaaatttagtaattttagggagaatccaattagttaatttcaaaaattgaaacagtttcattttaggaaaatgattatctagaatacccacacagtcagctaaatgggtttgtcaagtaagactgtttayaaaagcttgctgtatttgtgtctttatgagagggactataatttatccaggatcatatccatgtaatttaacaatctgagttctcccatttcctatcatagtagtgatttgatccaaataaggagttagagtccatgaattagcatgtggaagaaaaagccattctactaagtcctgctcttggacaataacaccagtgggtgaatgatgagttgaaaaaattagcaaatctagagtcttctctggatctgttctatttatttgagccttatggacttgcttttcaa

SEQ ID NO: 414520 - DNA, 525 bp, Homo sapiens
acaaacatctcgcaaattgttggactgtttaacatgccttgtggyaacactttccaatgaatacgcttagcaggctgcaggttttgtaaatgcaaactgttcacagtcttgctcagccaaggggatagtaaagaaacagtcttttaaatctatgactatgaaaggccattttttcggaatcatagcaggagaaggcaatcctggctgtaatgtccccataggttgtataagtgaattaatggctcttaagtcaggtaacattctccatttacctgattttttcttaattaccaaaactggagaattccaaggggaaaatgttggagctatgtgtccattttctaattgttcagtaactaagtcctctaaagcctccagtttctctttacttagcagccattgttctatccaaattggcttatctgtgaacaattttaaaggtatccgttctggaggcttaacaatgtctgccatcaaaaatgatatcctaaaccttggcgggaactttgtctttccacttgaagt

SEQ ID NO: 414521 - DNA, 544 bp, Homo sapiens
attctgatatgtattgctagatcttctgagcctcaaattcttgccatgtaaaatcaagccaaatacttatggattttgtgagaaatcaatgaatagagtctattatactctgaggatggtattttatcaaataataaattgttgataactagtagttacactattttaatccttccaattctttttttttcaaacctcatacttatgatatctcctatgctttttaaataatttttctacttagactgtctatctggatcacatgaatctttcacagcctcaggtttgttttctttcttttcactgctacaatcagcatcacagctcccctcaccccatgttccaagcagaagtgagtatttgattattttcatcctctatgaccaatatgaggtttaaacaatgcracaacaccttattgtactaaaaaaccatatgaatatccctatatgactaacaatagattcgtgaaatgtccctatgtgactaacgatagattagattaatgtccctatgtgactaacaatagatgtaaataggactt

SEQ ID NO: 414522 - DNA, 466 bp, Homo sapiens
tacccattttgttatcttcaggtgcgttatttggttttcattttttaaatttctttcccattctgcagatgaaaaatactgagaaacctactctgttcctgcatccgagccattccacaggcagttttcccatactaaaaatgctgtcttccactgatgtgtggcatgtctcagttccgtgacttcttttcctctctctctactcgctgctgtcccttttctccatgtgtctctaacatgcctgtgttcttcaagaccyagtgcaaccacattccctcccacaactctattttcatgaggaatagccaagcaggactcccaagacatcatacaggagtgcctacagggtatctctccttggcagtcccacagcaccgcaaatgccctgtgtctgccaatactcatcagcctctcttcccgtgtgcctctcctgggaccctaagagagtaacagtccctgcaacttc

SEQ ID NO: 414523 - DNA, 556 bp, Homo sapiens
actcactgttaaccacctgtttccctgctgacatgcactgtagtcactgggctttgaaatggattaaggcaatccctgatgaaggtgcctgtagttgtataagaatactcagataatcagctattttaaacaattcataaaatgtgaaattaaagaagcaagtgaatggatgagacaaacaaagaagcaccttctcatgaacaaaagggctgggccttacaaaaagcatttctggccatgtagtgaaagctgtgtcctgtgagtctctatcctcatcctctgtgctcattcctagaaccattwtctggcttcagaatgggcacagctgctgaggacatgctatgtgattcacactgttacaagccagaacgtgtaaaacaggggccaaggttttttaaagtggttctttagtacaagcaatattcaggtcttattgtccatatttggctactgactacaaagtttaggagccagcacatgggaggatgcaggtgggtaagcagggaaagcctatgtctctgatggggaatgcacagttttttgcttgcagtaagaa

SEQ ID NO: 414524 - DNA, 556 bp, Homo sapiens
actcactgttaaccacctgtttccctgctgacatgcactgtagtcactgggctttgaaatggattaaggcaatccctgatgaaggtgcctgtagttgtataagaatactcagataatcagctattttaaacaattcataaaatgtgaaattaaagaagcaagtgaatggatgagacaaacaaagaagcaccttctcatgaacaaaagggctgggccttacaaaaagcatttctggccatgtagtgaaagctgtgtcctgtgagtctctatcctcatcctctgtgctcattcctagaaccattttctggyttcagaatgggcacagctgctgaggacatgctatgtgattcacactgttacaagccagaacgtgtaaaacaggggccaaggttttttaaagtggttctttagtacaagcaatattcaggtcttattgtccatatttggctactgactacaaagtttaggagccagcacatgggaggatgcaggtgggtaagcagggaaagcctatgtctctgatggggaatgcacagttttttgcttgcagtaagaa

SEQ ID NO: 414525 - DNA, 486 bp, Homo sapiens
gtactcatactccatgaaggcccttccaagtaccaaagtcagaagtgggtcccctttcctgcctctcacttagccttcagcagctgtgtcctagaaagaggttctacactgttaagagcccggatatttcatattaacatttacagaaaattcaattatacacggcttccacatggtatggtcaaatctcatgctcatccaagtgcattaaccctgagtcttgcccttttggttacttgaggtgcagactgagggcaccaccccagaccccagttacatctttcagcaaagagggctacytgaggtactgttggtgtccactgtgtaaggccatcttcccaagagcataacaacttgaacttcatctttttctcagattccttttttattccatttcttaattcaccaaggttcagaatttgtcttttattccccatatcacaaccaggtacccttatattccataatgaaatacgtatttcatta

SEQ ID NO: 414526 - DNA, 486 bp, Homo sapiens
gtactcatactccatgaaggcccttccaagtaccaaagtcagaagtgggtcccctttcctgcctctcacttagccttcagcagctgtgtcctagaaagaggttctacactgttaagagcccggatatttcatattaacatttacagaaaattcaattatacacggcttccacatggtatggtcaaatctcatgctcatccaagtgcattaaccctgagtcttgcccttttggttacttgaggtgcagactgagggcaccaccccagaccccagttacatctttcagcaaagagggctacctgaggtactgttggtgtccactgtgtaaggccatcttcccaagagcataacaacttgaacttcatctttttctcagattccttttttattccatttcttaattcaccaaggttcagaatttgtcttttattccccatatcacaaccaggtaccyttatattccataatgaaatacgtatttcatta

SEQ ID NO: 414527 - DNA, 571 bp, Homo sapiens
tcttaaattaggtctggtacacacatacactgataaaattgggtttcaggacctgctgatctaaagctgagacctgaactgtgctgtccacatactagaattgctactgtttaaggccccrcctgaggagctggctaaattcttaatttaaattatcttttgaaatgacacacacaatgatttgcatgacagattgatttaaatgtatttacagaatcttaatgatttctagactctgtcaataagtctgtattttccttacactctaaataataatcttgtagatttgtcagtataatcataaaatctgatacagaaaaatccttgttagataatgctggccttgctgtgtttttaaattacatatttggtatttctaatcaactctataggattagacattatacaaattctaagttggaaaagaaaaagaaatatttaaaataagatgaaagcttccctttctttccttagaaagaaatatggaaataatattgagaattagtagttgaccttaagtttgattgctattgttataatttctgttcttatttcaatttctataaaaaca

SEQ ID NO: 414528 - DNA, 569 bp, Homo sapiens
aattcagctaaagcagatgcctaaagtccagcaaagcttgaagctacactaattcctaccctaactaccatcatccgctgaggtaaccaaccagaacgcctcaatgcaaactaatatttcttattttatacgctagtagggtcccttcctctacttgttacacttgtttatactcaaaatacctcaggttcactaaatgtgctagtaataatacttaccactcaagagctattagcctcctgatccaataatcttatatgactatcatgtattatagcttttagagtaaaaatacccctatacagacttcacttatgactcaggttcattaaatgcgctagtaataatacttaccacccaagagctattagcctcctgatccaataaccttataygattagcatgcattgtggcttttagagtaaaaatacccctatacagacatcacctataactccccaaagcccacgtagaagcccctatcaatggatcaatagtacttgcagcggtattcctaaagttaggcgactatggtataatatggcttacccttatcctcaactccctaa

SEQ ID NO: 414529 - DNA, 614 bp, Homo sapiens
gattttttttgcctccaaagtatctatttaacctgtttgcctgttttccatatattttccactgccctggtccagccgtcacctcctctctatcacccaggcaacagcaaaaaatcttctcattgacaggatctctctgcctccgttctgtcttcttcaaaccatcctccagccccaagggatctttcaaagaagcagcacttggcaaggtccacttgtcaaaaactttctgatgactcccatcaccaataggacacagttctgctcattatctggactcagaaataccccgtgatgggagccctacctggcttccagcctctcatagcaccacccascactttgaacttatgcaaaacatcacatagcagcatgcatcatccagtttctctttcaactgaaactatctttctctttttcctcctggctaactccttcccaccttactccaacatttttagcttctgagtggccaaatgttaccccatgcacacacctttcttcttaaacttactgctgtggattttaaagatcggttggtgtgtcttcactagactataaactgcaaaaggcaggtcgctatcttaattatccttggattacaatctttcaga

SEQ ID NO: 414530 - DNA, 567 bp, Homo sapiens
ctaggactacagacatttgccaccatgcccagctaatttattctttttaatttttgtagagatgggggtctccctttgttgcccaggctggtctcaaagtcatcgcctccastgatcctccctcttcagcctcccaaagggctgggattgtaggcatgaaccactgtgcctgacccatcttcatctcttacatttaagagagctactctctgactacaaaaaaatcaatcaaggttacataagaaacactagctcatgcacaaggctgtcaaactcctgagaagaactggccaaaccaggcactccacatgattagggagctgataggagattaaagaaatcatttttcaccttcatatagaaaagaatgtccagtaatagggccagtaaaagatccaaggaggtcaacagaggtgatctaatatccaagtgaagggaaagaagaaggaggatggagagcaagggaggaagaaaaaaaatagatcaaacccctccaactttcattccccaaagtgatgattgcatttaacttgggggctatgacctgcacatgggggatgacctatt

SEQ ID NO: 414531 - DNA, 597 bp, Homo sapiens
agaagaaggaggatggagagcaagggaggaagaaaaaaaatagatcaaacccctccaactttcattccccaaagtgatgattgcatttaacttgggggctatgacctgcacatgggggatgaccyatttgttcccctacaactttgggcttatatagggagatgggcacaaccaggtaacagggaggttggcatacattcagctcactgagggactgctttttctgctcctacagcctatgccttgtaaaccaaaaagtgactaagtcagatctctattgatttagaggtttattttgctgaggtttaggatgtccctgggaaaaagaaacacaagttacagtaggatctgtggcctgtgatatctccaaaaagggttttgggatcttcagtatttgaaggagaaagagtaagcaggaaggaaagagacaaaagagaaggaggaagggaaggtaggcaatgaagcaagtggtcacattcttgttttaattaacactcagtgaatctacattttacgtgtgaaacgaagggagtggggtgaaagtcaatcatgcatttgtctcccacttattaaatctacattttacatgagataaag

SEQ ID NO: 414532 - DNA, 597 bp, Homo sapiens
agaagaaggaggatggagagcaagggaggaagaaaaaaaatagatcaaacccctccaactttcattccccaaagtgatgattgcatttaacttgggggctatgacctgcacatgggggatgacctatttgttcccctacaactttgggcttatatagggagatgggcacaaccaggtaacagggaggttggcatacattcagctcactgagggactgctttttctgytcctacagcctatgccttgtaaaccaaaaagtgactaagtcagatctctattgatttagaggtttattttgctgaggtttaggatgtccctgggaaaaagaaacacaagttacagtaggatctgtggcctgtgatatctccaaaaagggttttgggatcttcagtatttgaaggagaaagagtaagcaggaaggaaagagacaaaagagaaggaggaagggaaggtaggcaatgaagcaagtggtcacattcttgttttaattaacactcagtgaatctacattttacgtgtgaaacgaagggagtggggtgaaagtcaatcatgcatttgtctcccacttattaaatctacattttacatgagataaag

SEQ ID NO: 414533 - DNA, 551 bp, Homo sapiens
gtgaacttgcagtggcattttccctacagcccctctgaggtcttctctcaggcagcaagaatgtcagtagactatggacctaccttttctttttctttctttctttctttctctctctctctctctctttctttctttctttctttctttctttctttctttctttcttcttctttctttttctttctctcttctttctttctctctctttctttctctatctctctccctcccctccctccctctctccttcctttctttctttcttttccttctttctttctttctttctttctttctttctttctttctttctttctttctytctctctctctctctctctctccctccctccctctttccttctttcctttctttctctctttctctctccctccctccctccttccctacttcctttcttctttccttccttcctttctttcttctctctctctttctttcttccacttttgagaaataggatctcagggtggtgtgcagtgctgtgatcatagctcactgaatcctcaaactcctgcactcaaca

SEQ ID NO: 414534 - DNA, 551 bp, Homo sapiens
gtgaacttgcagtggcattttccctacagcccctctgaggtcttctctcaggcagcaagaatgtcagtagactatggacctaccttttctttttctttctttctttctttctctctctctctctctctttctttctttctttctttctttctttctttctttctttcttcttctttctttttctttctctcttctttctttctctctctttctttctctatctctctccctcccctccctccctctctccttcctttctttctttcttttccttctttctttctttctttctttctttctttctttctttctttctttctttctctctctctctctctctctctctccctccctccctctttccttctttcctttctttctctctttctctctccctccctccctccttccctacttcctttcttctttccttccytcctttctttcttctctctctctttctttcttccacttttgagaaataggatctcagggtggtgtgcagtgctgtgatcatagctcactgaatcctcaaactcctgcactcaaca

SEQ ID NO: 414535 - DNA, 509 bp, Homo sapiens
aggcaagtgggtgtgtgcatgggaactcccccttataaaaccatcagatctcgtgagacttattcactatcatgagaacagcatgggaaagacccaccttcatgattcagttacctgccaccaggtctctcccacaacacgtgggaattrtgggagctacaattcaagatgagattgaggtggggacacagtcaaaccatatcaacaaaattgcaaatatggggaaaagaattcctgtatccccttggtttagatgccccaaatgctttggctttcataaccacagaaaaattatcaaaattcaggatatgaacatcgataccacactattgtctaatctatagaccttatgcaaatttttttccaattgttccatggatattctttttctgatccaggatccaacccaagactgcacattccacttggtcgtcaagtctattcagtctcctttcatcttttagtctcttttattttattattgtgttactattgctattattatttat

SEQ ID NO: 414536 - DNA, 626 bp, Homo sapiens
gtgaaaccccgtcactactaaaaatacaaaaattagctgggcctggtggtgcgtgcctgtagttctagctacttgggaggctgaggcaggagaatcccttgaacccaggaggcagaggttgcagtgagccgagattgcaccactgcactccagcctggagacaaagcaagagtctgtctcaaaaaaaaaaaaaagcatttaaaatcctctctccgagttactttgaagtgtaccatacagtattgtccactatagtcactctgctgtgcaacagcacaccagaatttatttctcctgtctaactgtaactttgtgctcattgaccaacttctctttctttccctctcctcacctacactcgccagtctctggtaaccactgttcttttatatgcttctatgagatcaatatttttttagattctacacatgagtgagatcatacaacatttgtccttatgtgcttggcctatttcattaacgtaattgttttctaggttcattcatgttgttacaaataacaggatttcatcttttttatggctgaatagtattccattatgcacatatrcaacattttctttatccagtcagccattggtggacacttacgttgattccatagct

SEQ ID NO: 414537 - DNA, 603 bp, Homo sapiens
tttggtgtgttgtgttttgattttcatgttgtttaattttcatgtatttttttcagttttcagagttcctcgtgttattgattttgatgtattccattgtctgaacagatacttgacatgatttcaattttttttatggttgagacttgttttgtgtttcaacatataatctgtcctagagaatgttccatgtactgatgagaagaatgtgtattctgtacctgtcggataaaatgttctgtaaatgtctttgaggtccatttgttctaaagtgcagtttaaatccaataaatctttkttaatttcctgtctaggtgacctgattactactgaaagtgggatgttggagtatctgactattatagtattggagtctatccttttcaacttaataatatttgctttaaatatctgggtgttttagtgttgtattcatgtatgtttagaatttttatatcctcttactgaattaatccttttatcattgtataatgacttttttgtctcttattaccgtttttgacttaaagtacgttttaaagtatacttaatgtatagctacttctgcttaatcttagattccgtttccatggaatatagttt

SEQ ID NO: 414538 - DNA, 617 bp, Homo sapiens
aaccaacccactcatttaataaatgaggacgcctaggctcagagaagttggatgagttgcctacattcagatttggcgaatcccttatgggctgaaaactggaaccagaattcctcactccatcccgggctctttctctgcaatcctgtgttgcctcaaccctgccccatcctccatattagccttgcaatctggatttttaacacaaatggcaactgtgacttccacagatactaacgagttatacattgtacattcactaatgagtatgaagcaattaaaggattacactgaaataatgtatgggctgtgtcaaggcaaaaatgagaaattctgtttgcatagagtactattgattagcatactgaatcatcgctctgaaaaccattcaagacggcattcaaggaactctgagatgagaaggagatagtgagccctacagtacacagaatatctctatttgtgagccaacaaaagcatatcasgagccccagctgcctccgccacccctccccgttccctgagcactacactgacagatctaaatatgaagaagaaaaatgtctccgacaggctgttattttgctgcctgaattgtgtcagggaagtgtaaatat

SEQ ID NO: 414539 - DNA, 617 bp, Homo sapiens
aaccaacccactcatttaataaatgaggacgcctaggctcagagaagttggatgagttgcctacattcagatttggcgaatcccttatgggctgaaaactggaaccagaattcctcactccatcccgggctctttctctgcaatcctgtgttgcctcaaccctgccccatcctccatattagccttgcaatctggatttttaacacaaatggcaactgtgacttccacagatactaacgagttatacattgtacattcactaatgagtatgaagcaattaaaggattacactgaaataatgtatgggctgtgtcaaggcaaaaatgagaaattctgtttgcatagagtactattgattagcatactgaatcatcgctctgaaaaccattcaagacggcattcaaggaactctgagatgagaaggagatagtgagccctacagtacacagaatatctctatttgtgagccaacaaaagcatatcacsagccccagctgcctccgccacccctccccgttccctgagcactacactgacagatctaaatatgaagaagaaaaatgtctccgacaggctgttattttgctgcctgaattgtgtcagggaagtgtaaatat

SEQ ID NO: 414540 - DNA, 594 bp, Homo sapiens
cctcctcaaaattgtcaaggcatcaatgtagacctatcctccccactcgggcattcaaagaggaggaaaagcagaaatagtcactacacggttacattcttgggtaaaattacttatctaaatttagaactaggccaggctttgaggcttgcccttcrttcgaggtctaatgcatgaaagaccttgtgttgggcaattttgcgggtttgcttagaagggggcatttaatccaatttgatctccagtgaatgcatcaggggctgaatctctgccgctgcctgccctctggtttccaggcactttgagaaagattctttttgatgtcagtgggagctctgtttccaaaaagaagcaatgacacaagaacctgcctaaagaaatggagagccagggtctctttttgagaacatttctcccctggtttgtcagccaataatacccactgtgctgagggtgggagcaaacacattccatggcaagtgctgggtcaggatgggtgggggacattttcttatgatgacagaatttggatatttagcctatatattttaaggccaaatcccttccagcaggaaacaattactaaagtcatca

SEQ ID NO: 414541 - DNA, 646 bp, Homo sapiens
attaaaaatgaattgcacttaagaagaaaaatgtgtaactgcagacactaaaggcgtcacctgggatgggggcctttctcaataatttgatgaattatttctcaataattcatcaaattgaaccttctgataatttggttatttgcctctgagtgaggtcacaccaaagtctygtaaccttccaagctgccttctcttcaaccctaattgcctcccttccttagattctcctgtccagaacctgtgcagatatcctacaatatgactccattgtgcttttgtcagtggttctgaggttgttacaggactgccagatgggtatgaccactgcacagcaacatgccaacacaccaagacagcagggtttgcagcagagaaagagtttaataattacaagcccaccaaacaaggaaatgggaggaattcttgagcctcaaatccatttcactaaggggttttgggcttcagtgtttaaggaaatcacggagggtgaggggctggaaaattgggattgttgattggttgaggtaagggggatgaaattatcaggatgtggaaaatgcattcttccatgagtcagtttcttgtggagcctgcagaccagctggtgtcagtagtgtaaggtagctttgttggtatgcagaac

SEQ ID NO: 414542 - DNA, 646 bp, Homo sapiens
attaaaaatgaattgcacttaagaagaaaaatgtgtaactgcagacactaaaggcgtcacctgggatgggggcctttctcaataatttgatgaattatttctcaataattcatcaaattgaaccttctgataatttggttatttgcctctgagtgaggtcacaccaaagtcttgtaaccttccaagctgccttctcttcaaccctaattgcctcccttccttagattctcctgtccagaacctgtgcagatatcctacaatatgactccattgtgcttttgtcagtggttctgaggttgttacaggactgccagatgggtatgaccactgcacagcaacatgccaacacaccaagacagcagggtttgcagcagagaaagagtttaataattacaagcccaccaaacaaggaaatgggaggaattcttgagcctcaaatccatttcactaaggggttttgggcttcagtgtttaaggaaatcacggagggtgaggggctggaaaattgggattgttgattggttgaggtaagggggatgaaattatcaggatgtggaaaatgcattcttccatgagtcagtttcttgtggagcctgcagaccagctgktgtcagtagtgtaaggtagctttgttggtatgcagaac

SEQ ID NO: 414543 - DNA, 569 bp, Homo sapiens
taggagctagaattaggttgcagatttaaagttacagttggtatgtctttgtttatggaaggtcagcaaagaatttgcttatgggctgggtgcggtggctcatgcctgtaatcccagcgccttgggaggcctaggcgtgtggatcatgaggtcaggagatmgagaccatcctggctaacatgctgaaactccatctctactaaaaatacaaaaaattagccaggcgtggtggcacaccacctggctactcaggagtacacacacacctcagctactcaggaggctgaggaaggagaatcacttgaacctgggaggcgtaggttgcagtgagccgagttggcaccactgcactccagcctgggtgacatagtgagactccgtctcaaaaaaaaaaaaaaaaaagaaagaaaaaaagaatttgcttatgaatgatgtggaggctgtccttcccagatgccttaggtcttttacctctccacgggcaacctggctgatgcataatattagtgacaggtattcatttggaagagggtgttgcaatgaccttctcttttgcataagtagtttgc

SEQ ID NO: 414544 - DNA, 473 bp, Homo sapiens
cagcaggggcctaggtgatcagcaacaagaagctgattttaaaataaaggttatgaaaaatggtaaggccctggagatgcttttcatggatttccaaagctaagaaattatcagtggtagccatgagttmagtttcagggttctgggaacaagcttgcttactttttttttccaagtaagactgggaattgctttttaaatattttctcagctaaagtggttcaagtcactggtgagatcttatttgcccaccaagtcctggtgaccagctaaaaaaaaatgtgaaaaacagattaaagacaactctggtttctctgtttatggagtgtcagaaaactaggatcagttttcttgccaactaaatcaaaaaggtatctgagctaacttactcaaatgttttaaaacatgtcccaaactaaaacttaacagcttgctctcttcatcagctcttgctcttgtcttgcttagttggt

SEQ ID NO: 414545 - DNA, 616 bp, Homo sapiens
gctgggtttaaaatgattgggtcactgtttcttatcttgaagatatttggtatagccccactgtctctagcactgaatatagagaagcaagcctaaggcccatcctgtaatttttatgcacaggatcaacttgatattttgattcaatgaccaaggaattatttctttatccataatgtgtactatttttgttcttttttttttaattggatgatagggatgcgggtgtctgaacctggaattggaaacagttatatcctttgatagtcccttttgagaatgatttttttttgtttgtatgtttgttttctttgttttgtttttgagacatgatctcgctctgttgcccaggctagtacagtgacacaatcacagctcactgcagccttgagattctgggctcaggtgatccttctgtctcagcctcctgagtagctgggactacagatatgcaccaccacacctggctaatatttttttaatttttacttttgtagagacaaggtctcaytatgttgtccaggctgctctcaaactcctggcctcatgccatcctcccatctcagcctcccaaagtactaggattacaggcatgagccatcatgcccagccatgt

SEQ ID NO: 414546 - DNA, 624 bp, Homo sapiens
aaaaattaaaaattaaaaataacataaacataaataaagctgatgatcctcccttgtcccctcaaaaagcggaagtttrcacagctacagtggaatgattgacagacttgggtgagtgggaaagtcggagctacaagcctatgcctctgaagcactcatagacaatgatgggaaaatcggagtcatagagctcagacctggtaatgcaagataagccactgcagttaaagaaatcactggactaaggaaaaaaaaaaagaaatcccgacttgatgctggacagggaaaatcttatacatccggattattatcataatatcgataattcccaggtgagaggaagctggaactcggagaggtttggttaatttccccaagactctctctctattgtaaagatgtcaattacatcctgcttttctaattccatatcctcaggcctttctactccttcttgcctacttattagctctccagctggggtgactcagtatatggtggtgctattatccaagagagggaagaccgaggagggagagataatgagctctgttttggacaggatgagttactgtgaatgtcatgcttgcagctctgctgcaggaataacatgaagggagaggc

SEQ ID NO: 414547 - DNA, 624 bp, Homo sapiens
aaaaattaaaaattaaaaataacataaacataaataaagctgatgatcctcccttgtcccctcaaaaagcggaagtttgcacagctacagtggaatgattgacagacttgggtgagtgggaaagtcggagctacaagcctatgcctctgaagcactcatagacaatgatgggaaaatcggagtcatagagctcagacctggtaatgcaagataagccactgcagttaaagaaatcactggactaaggaaaaaaaaaaagaaatcccgacttgatgctggacagggaaaatcttatacatccggattattatcataatatcgataattcccaggtgagaggaagctggaactcggagaggtttggttaatttccccaagactctctctctattgtaaagatgtcaattacatcctgcttttctaattccatatcctcaggcctttctactccttcttgcctacttattagctctccagctggggtgactcagtatatggtggtgctattatccaagagagggaagaccgaggagggagagataatgagctctgttttggacagsatgagttactgtgaatgtcatgcttgcagctctgctgcaggaataacatgaagggagaggc

SEQ ID NO: 414548 - DNA, 569 bp, Homo sapiens
aattcagctaaagcagatgcctaaagtccagcaaagcttgaagctacactaattcctaccctaactaccatcatccrctgaggtaaccaaccagaacgcctcaatgcaaactaatatttcttattttatacgctagtagggtcccttcctctacttgttacacttgtttatactcaaaatacctcaggttcactaaatgtgctagtaataatacttaccactcaagagctattagcctcctgatccaataatcttatatgactatcatgtattatagcttttagagtaaaaatacccctatacagacttcacttatgactcaggttcattaaatgcgctagtaataatacttaccacccaagagctattagcctcctgatccaataaccttatacgattagcatgcattgtggcttttagagtaaaaatacccctatacagacatcacctataactccccaaagcccacgtagaagcccctatcaatggatcaatagtacttgcagcggtattcctaaagttaggcgactatggtataatatggcttacccttatcctcaactccctaa

SEQ ID NO: 414549 - DNA, 547 bp, Homo sapiens
caagcagtttcaacaatagataccacagttccaataaaaagagggctacaagaaaactaagttaacacatattttcaaaaacaatgtcacaaatcaacatgacacactacaaaagagttgcaaataccttttgttagaagtttgtccagttctaaaagccttcatcctttgtgccccgggttggcagtcaagcatgcttccgactaagctcaaagtacaaacttaaaacttaccacctactcatctacaattattgattatcagmagctaggaaaccacaagagaaataaaaataatcttgtaacaggacagatgtattatttcatttcaataacactgaagtttcatttggctaaatatacttctatagtctattgcaggagatttaatttcactgctacttataactacaaaataattatattcaaacttttaattctctacatccctagtttcaacaatacttagcatgcgcctctccccacctcaccctataacaaaaacgagtatctgcaatagttttgctaacacatttcaaaataccctt

SEQ ID NO: 414550 - DNA, 551 bp, Homo sapiens
tgattgcatgcttgataacacattctttactgacttcctccttttcccttcctttccccatcttacctccccacttccctagcagtgtttcctgagatcacctcccaaacaattgcatctggaatmcttcactcatgtctacttctgggagaagcatctaagacagtcatggtccataaaacagcagcaacatgaacaaagacacagggctcaactgtaccaggcaaatgaagggagatggagagattgaagcaagagctaaaactatccaccagactgcagtccattgtgaggtatgtctatacatggtgtttaataatagcaagattatgctgatgggcacatggaggatcagcctggagccagagtttcttccttccacaggtatagtttctagatgccgatttagtcttttagtttttttttttaatcattctctatgctgccgttttattccagttttaattctctttgagtcattggaagagaaatagcacccctgccatgggagccaacctctctccatgtggagcaggccttgggacgtgcta

SEQ ID NO: 414551 - DNA, 551 bp, Homo sapiens
tgattgcatgcttgataacacattctttactgacttcctccttttcccttcctttccccatcttacctccccacttccctagcagtgtttcctgagatcacctcccaaacaattgcatctggaatccttcactcatgtctacttctgggagaagcatctaagacagtcatggtccataaaacagcagcaacatgaacaaagacacagggctcaactgtaccaggcaaatgaagggagatggagagattgaagcaagagctaaaactatcsaccagactgcagtccattgtgaggtatgtctatacatggtgtttaataatagcaagattatgctgatgggcacatggaggatcagcctggagccagagtttcttccttccacaggtatagtttctagatgccgatttagtcttttagtttttttttttaatcattctctatgctgccgttttattccagttttaattctctttgagtcattggaagagaaatagcacccctgccatgggagccaacctctctccatgtggagcaggccttgggacgtgcta

SEQ ID NO: 414552 - DNA, 380 bp, Homo sapiens
tattgtgttctcacatggtggaaggggctagctagctttctgaggcctctttyataaaggcactgatctcattcctgaaggctctgtccttgtgaactaatcacctcccaaatgccccacttcctaataccattaccttggtaattaggtttcaacatataaatattggaaggacacaaacattcagaccacagtatcttcccccttcttaatgtacccctggttgactctattgctctggggttgttcccaacctattgttttattttgttcctggtttccttattatcttgatctcacccttggctcgctgggcacccaatcttcccgttccttggtccacctgctctgacaaagatcatctgctctcattttagcct

SEQ ID NO: 414553 - DNA, 603 bp, Homo sapiens
tttagttttataaagaactgccaaatcgtcttccaaagcactgttccatcttgcattcacatcagcaataaatgagaactgctgttattcttcatccctaccaacattgttattgtcagtgttatgaattttagccattctaataggtattgcactgcagttttaatatgcatttccctaatgacaaacaaygttgagttatcttttcttatttgccacccatatatcttctttctgatgtgtctattcagattttctacccattttaaaaactaggctggtcgttctcttattattgaatttgacgagttctttttagctgggcatggtggcctccatctgtaatcccagccaaggtgagaaccaagaggccaagcaagaagattgcttgagcccaggagtatgaggttacagtaaaccatgatcacaccactgcactccagcctgggcaacagagaccctctttctaaaaataatatttttaaagagttacttttatgttcttgatataagtcctttatcagatatgtaagttgcaaatattttctccaagtctatggcatatcttttcattctcttatgttttcaaaaagtaaagttttt

SEQ ID NO: 414554 - DNA, 603 bp, Homo sapiens
tttagttttataaagaactgccaaatcgtcttccaaagcactgttccatcttgcattcacatcagcaataaatgagaactgctgttattcttcatccctaccaacattgttattgtcagtgttatgaattttagccattctaataggtattgcactgcagttttaatatgcatttccctaatgacaaacaacgttgagttatcttttcttatttgccacccatatatcttctttctgatgtgtctrttcagattttctacccattttaaaaactaggctggtcgttctcttattattgaatttgacgagttctttttagctgggcatggtggcctccatctgtaatcccagccaaggtgagaaccaagaggccaagcaagaagattgcttgagcccaggagtatgaggttacagtaaaccatgatcacaccactgcactccagcctgggcaacagagaccctctttctaaaaataatatttttaaagagttacttttatgttcttgatataagtcctttatcagatatgtaagttgcaaatattttctccaagtctatggcatatcttttcattctcttatgttttcaaaaagtaaagttttt

SEQ ID NO: 414555 - DNA, 621 bp, Homo sapiens
ataataatacctatctcaaatggttgccccaagagttaaataaagataataagtatctgggaagccttagcgcayagtaagcattcaacaaatctcaattaaagtttctatttgggaaaatttatagatttctttgtggtcaaattttgatactcactgatacttgaaagaataaaaaaggatgttctcaataggtgtggtcaatgttgcaacggatgttactgatctccaactccatattcctttgtcccgcctcagagtttgcctgaagctgcattgggcaatgtgccgacaggacagtttccctcaagaacctgtacatttctctgcttgtctacctgaaggtgctccagggcagtccagcagtgtttgagatttgaaactctcagagataattctcaatcagtgaggaacaggaaaaaagggatacaaaccccagctttcctgtcccttgagagagaaaatcgaaggtgtgttgtatatattcttcctagaatccccaaaaagactgagcttcggtcacccacagaagaaacccactcattttttatgcaccctggatgggctttttcctcttcctgtctcacagttcctgctctttctcttgggcttcctgagatt

SEQ ID NO: 414556 - DNA, 567 bp, Homo sapiens
ttaattatgtttctacttcaggtcaaactgagacaataaacactcatgccataccattctttaactgctgtcttgtcctgttttctgttgttataacagaatgcctgggactgggtaatttataaagaaaggaagtttatttggctcacagttctggagactgagaagtgcaagggcatgatgacagcttctggcaagagctttgtactgcatcataacttggcaaatggcatcacatggcaagagagcaagagtgtgcaaaaaagacaaaacatgaggggtggccttgtgttataacaatctgctctcatggtaactaatccagtcccgttggagcaagaactccccatcgagaactaacccagtcccatgagagcagcattmatgtcttcatgaaggcaaagccctcatgacccaaacacttcataaagttcccacgacttttcaacatcattacattgggaatcaaattgcaacatgagttttataggggacaagtcatattcaagccattagtaactgcctatgcgtggcagtatcagtaactgtctggatgcatctttatgg

SEQ ID NO: 414557 - DNA, 637 bp, Homo sapiens
atctttctgtgcctggcttatttcacttaagataatgacctccggtgctatccatgttgctgcaaatgacataattttattcttttttatgattgaatagtatttcattgcatatatgtaccacattttctttatccattcttcttttgatggacacttaggttaactccgtatcttggccactgtgaatagtgctgcagtaactrtgggaggacaggtatctctttgacatactgatttcctgttctttgggtagtagtgggattgctggatcatatggtagttgtagttttagttctttgagaaatctacacactgttttccataatggttgaactaatttacattcctatcaacagtgtatgaattcccttttctctgcatcctcaccctctgcatttgtttttgtctttttcgtatagcgattctaactggagtgagataatatctcactgtggttttgatttgtatttccctgatgattagtgatgttgagcatttttttcatgtatttgttggctatttatatgtcttcttttgaaaaatgtgtattcagatcatttgcccatttaaaaattatttgggttttttttgctattgagttgtttgagttttttatacttcctggatattaatt

SEQ ID NO: 414558 - DNA, 548 bp, Homo sapiens
tatgaaaaggaatttaatctttagaaccttcagaaactttattttctgtcccggatatacctctaagacttaaagccaatgtgacacctgatggatattccatggtcttctctatgcctgagcaccccataagccactaatttctttgagtgtgaaactcacctgggacgcattgctgactttagccctgtggcttattcttgagaggagacatccagacaggatgtgacatgaaggcttggaggggattaataccctgagaaaagatgaccacgtaattttatccttcatctaagaatgtggtttacttcatggtagacatctgggttcttggctgaagtttccactctttcytaacacctcagacctcactgtgatgtcagagggaaagaaaatgggaggactttgattggccttttcagttggatgatgggcctcaccagcacagaatgtgtggctttgctcaaaggtgaatgctgtgggtttctctcaagacacttaagtttttgtttgggcctttaggtatcaactccaatattttaatgtag

SEQ ID NO: 414559 - DNA, 541 bp, Homo sapiens
agcacttggactgttgggccggagtttgtgcagcccatgcctagcgatgctgcacctcccatgatgtcctggctttgtggcaaccccagggaggtgcagcagtttcactccttcctccactgtgtccagttttatttacacaaagcgagctgagaccacaggttcttgctctggatgagcagcatgacaccatcaaaatttaagaccatgatgaaatttcagtttcattcaaatgttacctaaaatttatggtgtcagaataaagggagatcatagtgagttaatttgatattcatatcctggaagtatacatatttgtttttccaaagttttatatgcaggtttttgttgtacctgtatccagatcttcttttcactgttctaacaatctaacactttmatagaatcatttggatcttgtatagagtgtaacttattggggataaacacttcaacttttggcagaaaatactttggattctccccaaggtcatttgtattcagagtaaatcagtggtccacccccataaaactgtaagac

SEQ ID NO: 414560 - DNA, 621 bp, Homo sapiens
tacatgcagggttcccaagggctcctaagacctgatatgcaagggcagaatgaattttacatgtcctgttccccagaaatatacaaagttgagtattttagccagtcttgttctgcttcactcaggggtccatttctaaaattaagactacacagttgtttccttgactcagacaaacgacaggaaactcaaacctcagtgcaacacccttcttgtctctgtaaccctcagggagatagctaagtcacttcacagctccatmcagaagctcaggggaacacattaagtctcaattcccacacctaagagcaaacaaaacctagtagtaacagcaactataatagttacaatttaagaagctcctgctctatgttcaatacttgcaaaacactttagaaagtctgatttattacttgcccagccctgcaaggttggtgctattgttcttgtcttttcagatgtggtacctgggctccagtgatataagccactcggcttggaaggggcgaagttggcatttacgtccaggcctattgggttcctgagcttcagctctgaaccccctggggcttgagggctgcggggcctccctgcagacaggctggcactttcagggtggta

SEQ ID NO: 414561 - DNA, 545 bp, Homo sapiens
gccatttctcgctgcttttttgtatggttgttagaggcagcgtggggctgagtcagctgctgtgggtgagttggggggcactttggggagtgagcactggacacagagattggaggccaagtgcctgccctgcccttacctggctgtggtctcggccaagtcctaggtggggtattgggtacttgtactgtgaaggtacagaagagtacctttagtatgttaccatttctgtagagagaggaaatgtgtgtgtgtgtgcatgtttgtgtacatactatgataatatacataaaacatgtctgcaagtgtcataaaaaattcaggagagagcaacagggtggctgggagatacttcccttctgtactttctgagtttgggactatgcgaatgtatcatcatttcaaaaagtgaacaaaagattaattttccccttcctatctgtgcccccaccccyagcaagaaaaatgggtttagagaatcagatagacctgggtgttcaaatcccagctctgcctaagtgatcttaggcaagcacttaacctca

SEQ ID NO: 414562 - DNA, 576 bp, Homo sapiens
catgctctttctgtttacagaaaagaaattcacagatcattgatcatggacatcctttttttgtggccatgaggcaaaaaagaaataaagcctattttcaaggcaaaacccaacacagcgtattttttaaaagccccttaaaaatagcacaatatcacatcaggttaggaaacaaatgagtatgtccaaaagcatctacgctgaaagaagtctataaaaatattgtaaaactgcaagtcagttgaattactcgttgatttttttggggtggcagaactcgaactaaatacattgtttttcagtagtgaatttcaagtgtataacttatgttcatatgacctaagtaagaggcctctttggacacacagactaaggcacatacaaacttgtgtacctggattgtcttcatgttgttactgtggaacactcygagaagagaaagccagggccccattctttgcacttttacatacacactattttaaaaacctaagtccaaattcctacctttcatcctaagagtttttgaaagatctgaaatacttcatttgtcctggctaccacaggaaatgaaga

SEQ ID NO: 414563 - DNA, 597 bp, Homo sapiens
tcattagcagtgaggccaagtttggggagcctgagaggagctgtgtaccaagaggacggtttttgttttgttttgttttgtttgagaatccagaagcccttattgtctgcttcctttctcagctgaacccctgcctccagagcccccagcagtgccctctgaggtggagccgcagcacctgaggaaggaactagatagagtggcaggagagctccaggtccaggtcaaaaacaatcagcgcataagtctcctgaactggggacaagacgagaggattcgagagcaggaagagaggcttcggaagcaggaggagaagytttaggagcagcataagaggcttcagcagctggccgagccacagagcatcttcaaggagctggtgcgttgcccctcctggggagcctgccctcccaagccctctgggcctttgtttccccacctctaaaatggggcagtgtagccctcatgtgaaaggttacttctaaaggcacctgtgagccaggtggctgtgggagagaggggatgatttttctaaccggcctccagccttcccagtgccatgggaggcagacaccaagttctggggtctccagctgc

SEQ ID NO: 414564 - DNA, 659 bp, Homo sapiens
gtcacagaactgccactgcttgcctacatatgcattaaagagctataaataggacatctgtcctgtctgattctttcaacaacctgtaaggtgaggaaggcagatggtttccttaatacacagataaaggatttgcacccaaagaggttaaatcactttcctaagatcttaaaaagaagtagtggacttcgcacttataaccaagtgttctgacttcaattcccatagtctttccctataattacatacaattaaatgtactgcagtgtagcaagtaccaaaacttattaaagttcaaatattggccttaactgaattctaacgagaaaaaaaatttaagatgaccaaatatatatatatatagacgcactgagtaattcaaatacataaaatttaaatcttctttggctccttgaacataaacctyaccaattcccatatcagattctgggccactgaatactcaaccctttctcctctccagtaaatcttagatatgaattgtaagcaggccctcaatttaaacaactaaactaaccatgccagttcagatagaggacacagccctgtaacaatgacttctttacacggaatcatcacatactgtgccaccttagcaaactcatctaaaaacagactcttcaaaccttgctacaaaa

SEQ ID NO: 414565 - DNA, 547 bp, Homo sapiens
aattgtaaaggggacccagatgttgkatttgacatacacaaacttcaaagcaactagtataattatgttcaaagaagtggcagaagacatttttgaagaagtaaagagtgatgaaacaactcatcaaatagagaatataaatacagaaataaaaatttttgaaaggaccaagtagaaattctagcatggaaaattacagtaacagaaataaaaattcactggaaagggttcaaacacattttattttgcagaaagaagaatcaggaaacttgaaaagaaatgaatagaaattattcatcctaaagatctgaaagaaaaaagtagaagaaatagggactatcttagagacttgtgggaagacaagaatgtgtatatatctttttctttttttactccctgaatatgagcatttacatgaatagatttcccaatgtttaaatttgcttttatgcccagaatgaatacttcttggttgatatatttttatcacatatatgttgcatatgttttattcataattagactatagttgttaatgttttaatta

SEQ ID NO: 414566 - DNA, 571 bp, Homo sapiens
tatgctgcaggcactgtttctttatgaggggttagctatgctgcaggcattgtttctatatgtggagttagctatgctgcaggcattgtttcttgaccttgctgctggaatgccttggyatgctggagtgaaacatcagtccttatggcagttttgcttcaagatggcattactcttgccatgcaacaggctgttttcctacaataattttggaatatagtgtttattctctcaatatctgaatgtgagtttaagttacaaattgtagttttctatctttcattctgccatttttcgggctggcttttgggcaataattttaatttctgagtgtaatcagaggacgagctcagataaattatccatcccttataaaatgaaaattgaggaaaatttggggggtaagtttaggttgaagtgagttccatatcagatgaacaggtgcctgtcttgtgaaacaatctgattagcaaaagtacctaagagagttgtatcctcaatctgggatccgtttgaatctccctttaaatatagataatggtgatgagaagattttttaaagttgctataa

SEQ ID NO: 414567 - DNA, 557 bp, Homo sapiens
aagggtctgggatggtatagtataatgctatgattcaagactggggacttctgaagaagcagaagaaaatctggtctaggacagataatgttctgtaaatggcaatgaaaaacaagaaatacaccagcagatagtgtgaggagtggaaaagaatgcagccatcacttgagaaaggctgtaaaggaaacaattacttcaaagcagggcaaggttttagttaaagcaaaaatatcataaaatgagttaagattataatagattttgatggtgactgattcttaatgcttttacttctaaatcaaattggtatccattgcctctagtaattctgtatcagtttgcatgaattccattaatcctgactgttaatcttttagcagcttctgggcttctttatgtgtttttgttaaatataatttcactgaagtccagaktgagttgtttgatttccctaggtgtcagcagtcatgttgaagtgaaggcattttttctctcccctgtcccaccaacacaatgggaatatggtataaaagcagccaggctaatggaatggagat

SEQ ID NO: 414568 - DNA, 548 bp, Homo sapiens
acccttcaactcacttcctataatgaaaacctcttatgtaatcatagcatagtcatccctcagtagccactggggttttgtacaagcacccccatagacaccaaaatccatggatgttcaagtccctgacataaaatggtttagtatttgcatataacctatgcacatcctttaaatcgggagccccagctcctggggctgttgacactattggtctgtggccttttgggaatcaggctgcacagcaagagatgagtagtgtgctctgtaaatatatttgtatttataataaatgtaatctgtatttataatacatgtaataaatctgtatgtaaagcccctccctattgcttgcatgaccacctgagctccacctcctgtcagatcagcagcagcattagattcttgtaggagtgcaaactctactgtgaactgtgcatgtaagggatctagttgcatgctccttatgagagtctaatgcstgatgatctgaagtgggacagtttcataccaaaaccacccccgcagcccttaccccatctgtggaa

SEQ ID NO: 414569 - DNA, 597 bp, Homo sapiens
aatctagaaataatatacagtttttctggttccaactgattcccgtccttttcttcaaaacttaaaacaataatttccaatttcttgttttgaactctcttctacacacgctttctaagagaagactgggtgtatttagacaaaggaaagctgcctcataaattgtcatgtcctgctttcattttatagtgaaatccccactctgtagttgtgatactagattgagagcctgaaaatcaatggaatccaaamatttgtttaatctaaagggagatggatagtaactcctcccttactctatgagttaaacaatggttttgagatataaagacattttggaaatatatgaatatgatcctatagatgtattaagacttctagggtttttcattagataaaaagtactatgattttatcctggaaggcagggttttcacttaattttgtttcttataacagttccttgaacctagtggatgctatttgcatttaaaaaaatggaagttgccagagtacatattggtagctaccaaatgtagttcatacactgtgctattatcagtgattctgggaggacttatatcagcagtagggaaa

SEQ ID NO: 414570 - DNA, 508 bp, Homo sapiens
ctaattgtttatttaagtttattaagttataagtattgtacttactagagataaattaacacgtacagaaacacatttcattacaatttagccttggctattgtttataatttcattgtttcatcttctaattttgtaaaacacaatgtgttttatgattttaatactgaagctaaaactactactagaaacatattacatattcctgatgtactaatttccccacataatgatagtagctatcagttaacacataatcamatagcttgacaacattttaaggaagacaagcataaattccagagttgtttgttgtatcaatggactaaatatgtattgtctactttgcatagaggtgtatataggtagcgagcagcagcaatcacagttaacatgagcatttactatattatcagatactgttctaattacccgatgatacactgtctcatgcattctcagaaaaacagtatgagatattactattaaccctttcttacaaaccata

SEQ ID NO: 414571 - DNA, 581 bp, Homo sapiens
caagtgcctggtagagactgacatatagctcctgaatgattcattaaatgtggctagaatttgagaataccttatttcaaggtttttcttctgaacatacacatatatgagcatactttatagctgaacatgcgaaatgctacaataatgcatcatgattgtgaaagacattaccatatgcataaataaaattatatgtttcaaagagataagaaaccatacaartttaaaagacaaaatacattagcttggccacagaaattttaagaaaagtatatccttttaataatataaacatataatttatataatatataaaatataaattataatatataaatatacaattatatattaaattatatcatttatttattaccattaaaaaggattttatatatagagagagagacagagagcgggagagagagagagagagaaagagagagagactcccttagggacccgccctgccacccaggctggattgccacaatagtgcaatcatagctattgctgccttgaattcctggcctcaagcaatcctcctaacttaggatcctgaatagttaggattacag

SEQ ID NO: 414572 - DNA, 549 bp, Homo sapiens
cattagcttggccacagaaattttaagaaaagtatatccttttaataatataaacatataatttatataatatataaaatataaattataatatataaatatacaattatatattaaattatatcatttatttattaccattaaaaaggattttatatatagagagagagacagagagcgggagagagagagagagagaaagagagagagactcccttagggacccgccctgccacccaggctggattgccacaatagtgcaatcatagctattgctgccttgaattcctggcctcaagcaatcctcctaacttaggatcctgaatagttaggattacagacatataccgacatatgccacggcaccygggtagatttttctttttctttttattttattttatttatttatttatttatttatttatttgagacggagtctcactctgtcgcccaggctggagtgcagtggcgccatctcggctcactgcaagctccgcctcctgggttcatgtcattctcctgcctcagcctcccaagtagctgggg

SEQ ID NO: 414573 - DNA, 598 bp, Homo sapiens
ttcagttgtacatccgtcttccagaaaagagggtatgtcagagcttctgactaacaacaagacttttctttctgacaacccatgcatatgcatcttttccattttgcttcatttatttttaaaaggaaaaggaagatagaaaagtttagaggagaatgctggcttcatttactttaaaaggttaagaaagatatcaaaaaattaggataaaataaagggtgttttagaggaaattaattttattatataaatagttcaacaaattaattccatgtttctaatcattttccctgttaaatgttaacagacatttttatttgyaaaaaaataaacattttaaaatttacagttgtgctacagtttatagctttagtgtatgattcaggatattcctcagttcagttcctatcattatttctcttctcctggtcttactacagtttttcacttccatatgtgttcactcattgccctcatccagcccactagtttacttttttttttctcccagaatagtgtctacgattttatggtcagtttcaaatccctgtgtaatatgatatcctcctacatctatgttctcatttcctatgacacc

SEQ ID NO: 414574 - DNA, 598 bp, Homo sapiens
ttcagttgtacatccgtcttccagaaaagagggtatgtcagagcttctgactaacaacaagacttttctttctgacaacccatgcatatgcatcttttccattttgcttcatttatttttaaaaggaaaaggaagatagaaaagtttagaggagaatgctggcttcatttactttaaaaggttaagaaagatatcaaaaaattaggataaaataaagggtgttttagaggaaattaattttattatataaatagttcaacaaattaattccatgtttctaatcattttccctgttaaatgttaacagacatttttatttgcaaaaaaataaacattttaaaatttacagttgtgctacagtttatagctttagtgtatgattcaggatattcctcagttcagttcctatcattatttctcttctcctggtcttactacagtttttcacttccatatgtgttcactcattgccctcatccagcccactartttacttttttttttctcccagaatagtgtctacgattttatggtcagtttcaaatccctgtgtaatatgatatcctcctacatctatgttctcatttcctatgacacc

SEQ ID NO: 414575 - DNA, 551 bp, Homo sapiens
ttccttttgcattttggaaaaatttgacagaatcttaaatttatctaatatttgacaaaactcaattgatgaggttagataatgagcatagaaaatagattataattatcgcctctcatttttaagttggatttggaatcctgagcgaggaattgcttctgcaggtgatatccygtccagacctctgacccatatgtcagcactccaagaggacatattttggtcattcattcattcagtaaatgttttatgagggctactactctatgttaaaaatgtttctaaatgttgaggatttagtagtgaaagagaaaaaggcaaaattcctacactaaaggcttttacagttcagtgtgtgaaacccacaataaaacattaaacaagtatatatctagcatatctgtttttcccacagttttctttagcattaagcaaagtgctttatacatagtaagtgcttaacaactatttgttgaatgaaagatatagcctgtcattactacttactaacaagctacttatcatctttgctaaatgggaataaaaagagt

SEQ ID NO: 414576 - DNA, 576 bp, Homo sapiens
gctttatacatagtaagtgcttaacaactatttgttgaatgaaagatatagcctgtcattactacttactaacaagctacttatcatctttgctaaatgggaataaaaagagttatctacagtgtttctgtaaagatcttaaaaacacaatgtactaaatgtgtaaatcacacttcctaccacatagtaaatcatggaaagcatcacttcacttcaacacaaagttatgcacaacacattgtaagtgttagaaaaattaaagacatggagttagtgatgttctggtaggtggttagatacagctaagtggggatggctgcacctgaatgaatcaggaaggatggaataaagacatcttattccttcttcactttcaacggtggtgaaattcacaatcgacaattcacaaactcaaaatcaaaagacataaaggagttagctatttcagctaatkatttgaatcagtctgacaagtgatggtgatagctctataaaatgagtaacaggtcagtattagtgtgcaggctaaaacagtcaagccgttctgcagctgtggctgaaaattagtcttttcaa

SEQ ID NO: 414577 - DNA, 563 bp, Homo sapiens
acatataaatcagaccaaatgaacaacatgtgcttgcaatagtttgttattggaaactactgcatatagacagcgattcatagactgcaagtttcatgagggaagagaccatgcctggcttcttttcggctacatcaattacatatatcacatggcatttcagagagtaaaccttaataaatacttacagaatttaataacattttcatagcagaacaaatagcaaattagtgcatacttgatacatcacactttgtaatgtttgggttatctatcccctttccattattctttgcttatctttgattaagtcagctatcatcgaaatacttaaggagtatgataggtagctattaggactcacatacaaatatccattstattgacataaagaggtgaaattattttatctctagctctcaaaaggtggtccctagacaaacaacatgggcatcacctgggtacttgtttgaactgcatattcttaggtcccatttaatttctattgagccagaaactctggaggcaaggcctaggaatctgaattttatcatgctgtctag

SEQ ID NO: 414578 - DNA, 443 bp, Homo sapiens
tgcttacacatttcagattgttacatctttttagtaggttgatctttttaccatttataatgtccatccttgtctctaataaatttttttgctctgaagtctattttatctagcattagctttaaaaagtactttaaaaagcacttctgctttttaaaattaatatttgaatggtatgtcttttcccattccttcaatttcagtctaactataatgtagaatttggacattcatgaatattttaaggtgttttttgctggtaattgatgaaattccaaaattcattttgttcaataaaaagtttatggttccgtgatgttggatttggcaatgatttcttgactataatactgaaagtataggtaacaaaagaattggaytgtattgaaattaaaaacttctgtgcatcataggacgctattaagagaataaaaagacaatcc

SEQ ID NO: 414579 - DNA, 640 bp, Homo sapiens
ccaagattctggtatagttgtgtttagttctgtgagaatcagcacaaagggagaaaagcagcccatgtgtcccccaagcctgtaatggggccactataacccgcagagcccccttacctttccttccatcctcagaaggcagaagaggagaaaggcatcctttttcttgctacatcttcaggtgacagttgtggcaatgagaagactgcagctctcccccaatcaagtaccttaagaaactggaagcttttaattacaaagggaaaaagggaaaaggtaccttttgtggcaaccaagagattatagagattgggtgtctcttcaggaaaggacttgccrgtcagctggaaggagcatggtgggcaatgactcccagctatgaatgccttaagtctctgcctcagttaaagccatgggctttccaggccactcccagctgatgactgggcatggtgagggtagcagggccagaccattttgaccaacacagatctcttcaatgggcaatccactctggaactcctctctgcattggccaaaactctggcacccttgcacgacaagctgaggctctccctgctcaatcctgctgcttctgtcttgtattgatatcaaaggtgttacctcccaatagacctcc

SEQ ID NO: 414580 - DNA, 640 bp, Homo sapiens
ccaagattctggtatagttgtgtttagttctgtgagaatcagcacaaagggagaaaagcagcccatgtgtcccccaagcctgtaatggggccactataacccgcagagcccccttacctttccttccatcctcagaaggcagaagaggagaaaggcatcctttttcttgctacatcttcaggtgacagttgtggcaatgagaagactgcagctctcccccaatcaagtaccttaagaaactggaagcttttaattacaaagggaaaaagggaaaaggtaccttttgtggcaaccaagagattatagagattgggtgtctcttcaggaaaggacttgccggtcagctggaaggagcatggtgggcaatgactcccagctatgaatgccttaagtctctgcctcagttaaagccatgggctttccaggccactcccagctgatgactgggcatggtgagggtagcagggccagaccattttgmccaacacagatctcttcaatgggcaatccactctggaactcctctctgcattggccaaaactctggcacccttgcacgacaagctgaggctctccctgctcaatcctgctgcttctgtcttgtattgatatcaaaggtgttacctcccaatagacctcc

SEQ ID NO: 414581 - DNA, 468 bp, Homo sapiens
tagactacatgcagatttttactcaaaagatgttgctggctttgtcctctagctgtcagcagaaacacatacagccctgtacaatgatggacgtgccgccgcagaaggagaaagataaaagccttgctttggggacacctgacttgaaacgctgatgagtaagagaacaacaaaatcataagcaagatttaaagatgatattaaagaaaacaccctgagaaggtagtcaacagagtcctctacaataatgggtaatgggytatttgaatcaataggatttaaagagactcaaacggaaaaacaatgttattttaaagtgctcttttctgggcatgataatagaagacatggaagaagaaaaatggttgttctggtcacttttgctcaataatgaccctgctaccttccgttagagttgagcacaaagttggaaaattagtttctcaaagtatgacttggttttacatt

SEQ ID NO: 414582 - DNA, 594 bp, Homo sapiens
accatgtttactaagtagtccatacctttgtcactgaattaaacgtatcatctttttcttatacaaaattctaattcatacgaatttgtatctgaaactcccttttctgatttgattactttgtttattcctgggctatcacgacacttttaattacaaaagctttacagtatgttttggcatttgggatgcttcattgtttttcttcttcaaagatatgtcctgactcttcttacttattttccattccagattaattttcaaatcgtttgtcaatttccaaggcaaatcctgttggggttttgtttgaatttatatgaagcttatagactaattcattgaaaataaacatctctattacactagatcttcctatccaataacatagtatgtcactttattaattcacatcttttaaatatttcagtgaagttttataaactacatatagattttatacaacttttgttggatttatttcaaataattttattgtttatgytgttattgtaactgagatttttcaaaatttcactctttattattgctggtgtaaaggaatgctactgatatttttgctgttattctatgtgg

SEQ ID NO: 414583 - DNA, 512 bp, Homo sapiens
ggcacagtggcttgcatccgtaatcccagctactggggaaggtgaggagggaggattgcttgaggccaggagttgagacaggccagcctgagcaacatggcgagacttcgtctttacaaaaacaaaaacagagtatcttagataggaataaggtacttggaagaaaataaaatgggctaatggagtgatgtggaaggyttcctttagatataaggaccaggaacaacctctctgagcagatcaagtttgaattgaggcttaaattgtgagaatgagccagctgtggagtgcaaagggcaaatgcaaagatctcgaggcagaaaacagctggtgagttctaggaataactaggaaaccagcctgggaggaacagtgtcctgaaggagagcagggagatggagaagaagggcaggcaggggccagctcctggaggacctccgaggaagccaaggtaaagagcctggattttattctgagtgccctgagaagccagggggaatttttaggcaggg

SEQ ID NO: 414584 - DNA, 512 bp, Homo sapiens
ggcacagtggcttgcatccgtaatcccagctactggggaaggtgaggagggaggattgcttgaggccaggagttgagacaggccagcctgagcaacatggcgagacttcgtctttacaaaaacaaaaacagagtatcttagataggaataaggtacttggaagaaaataaaatgggctaatggagtgatgtggaaggcttcctttagatataaggaccaggaacaacctctctgagcagatcaagtttgaatygaggcttaaattgtgagaatgagccagctgtggagtgcaaagggcaaatgcaaagatctcgaggcagaaaacagctggtgagttctaggaataactaggaaaccagcctgggaggaacagtgtcctgaaggagagcagggagatggagaagaagggcaggcaggggccagctcctggaggacctccgaggaagccaaggtaaagagcctggattttattctgagtgccctgagaagccagggggaatttttaggcaggg

SEQ ID NO: 414585 - DNA, 558 bp, Homo sapiens
taaaccatccaggctgtgatattctggtatagcgacctgaaaggactaagacattaggtctcagttttattctatggcttaaaatatcatgtcatgagtagacaacttccaatcctagtacctcgtgcttcctctgctgcatttggaaagaaggcatttmccccttcaatcatggaatgaaaaagttgtacttcattctgatttgattagcagaaggcacaggttccttcatgcaccaattacaatgaccaagaattgggcatgggactcatgtcacttaaacattgtgaagctgagaaattcattatttggttaggagtgtgtgagagcagggaacactgaatgcttgagacaccaccacgatgtccactacatgtatttccatttcagtaaacatttccattaagataatgctagaacaaaatcagaggagtagatcttggtgtccccaacttttgttgacctaacaaagtgaagttgcttcaactggacacttctgaaccacatttatgcctatatgttcagttcaaatttattataagcaattttcaggtccat

SEQ ID NO: 414586 - DNA, 558 bp, Homo sapiens
taaaccatccaggctgtgatattctggtatagcgacctgaaaggactaagacattaggtctcagttttattctatggcttaaaatatcatgtcatgagtagacaacttccaatcctagtacctcgtgcttcctctgctgcatttggaaagaaggcatttaccycttcaatcatggaatgaaaaagttgtacttcattctgatttgattagcagaaggcacaggttccttcatgcaccaattacaatgaccaagaattgggcatgggactcatgtcacttaaacattgtgaagctgagaaattcattatttggttaggagtgtgtgagagcagggaacactgaatgcttgagacaccaccacgatgtccactacatgtatttccatttcagtaaacatttccattaagataatgctagaacaaaatcagaggagtagatcttggtgtccccaacttttgttgacctaacaaagtgaagttgcttcaactggacacttctgaaccacatttatgcctatatgttcagttcaaatttattataagcaattttcaggtccat

SEQ ID NO: 414587 - DNA, 466 bp, Homo sapiens
ctctacatatattttggaggcctttacacaaaagtgttttccctaaagggagaagagaaaagttgaatgcagaagtagaaaaaaagattcatttgcacttgtagtatttatakctaaatattttatattacagatgtattaaaatttttataattttaaacactactttaaaacagggagatggtttaccttcaaaaaatttggctctcaactcaaagttatcaaagtatatcctagatgtagtttgcttgtcaggcttctacatgaaaatctaaaatgctcctgcatttcagaatgagcctaacatatgtaattgcactcatccactatgtctacattgccaaccaaatactgacagagagagctagagtgccacagagagctggcagttcctctgtttgcattagcttctacttgcttcttcatctttcctctatgtctgacacatttcatgttactgttttta

SEQ ID NO: 414588 - DNA, 620 bp, Homo sapiens
gtttaaaatgagaaatgaaagtctggctttttacaacctacagtcttatcaccaaagttagctattgttaataacttcttgtccattcttgtatgtgttatggtttctttcttagaaagaagtatgctatactagtatacatgctatttattcatgaaccttgcacttatcatgtaatcatatgtcttagtggtcttttcataatagatgtctctctttcccacgctgtcagtggtgattgcatgaggcattgtacagacgtaccaataattacttactctgtgtcatattgttggttattcagattgttttcactttgyccttgcagacaacactgcaacgaacatacttatgcatatcttattccaaatacatcatcgtgatggctgtgtgagagaaatatacattgttgattttatttttttattttttataatttcaacttttgattttagatacagtgggtacatgtgcaggtttgttacatgggtatgttgtgtaatgctgaggtttgcggcatgattgatccgatcactcaggtactagacatagtagttgtttttcaacctttaccccctccctccttctaccctcgagtagtccccagtttctattgttcc

SEQ ID NO: 414589 - DNA, 620 bp, Homo sapiens
gtttaaaatgagaaatgaaagtctggctttttacaacctacagtcttatcaccaaagttagctattgttaataacttcttgtccattcttgtatgtgttatggtttctttcttagaaagaagtatgctatactagtatacatgctatttattcatgaaccttgcacttatcatgtaatcatatgtcttagtggtcttttcataatagatgtctctctttcccacgctgtcagtggtgattgcatgaggcattgtacagacgtaccaataattacttactctgtgtcatattgttggttattcagattgttttcactttgtccttgcagacaacactgcaacgaacatmcttatgcatatcttattccaaatacatcatcgtgatggctgtgtgagagaaatatacattgttgattttatttttttattttttataatttcaacttttgattttagatacagtgggtacatgtgcaggtttgttacatgggtatgttgtgtaatgctgaggtttgcggcatgattgatccgatcactcaggtactagacatagtagttgtttttcaacctttaccccctccctccttctaccctcgagtagtccccagtttctattgttcc

SEQ ID NO: 414590 - DNA, 620 bp, Homo sapiens
gtttaaaatgagaaatgaaagtctggctttttacaacctacagtcttatcaccaaagttagctattgttaataacttcttgtccattcttgtatgtgttatggtttctttcttagaaagaagtatgctatactagtatacatgctatttattcatgaaccttgcacttatcatgtaatcatatgtcttagtggtcttttcataatagatgtctctctttcccacgctgtcagtggtgattgcatgaggcattgtacagacgtaccaataattacttactctgtgtcatattgttggttattcagattgttttcactttgtccttgcagacaacactgcaacgaacatacttatgcatatcttattccaaatacatcatcgtgatggctgtgtgagagaaatatacattgttgattttatttttttattttttataatttcaacttttgattttagatacagtgggtacatgtgcaggtttgttacatgggtatgttgtgtaatgctgaggtttgcggcatgattgatccgatcactcaggtactagrcatagtagttgtttttcaacctttaccccctccctccttctaccctcgagtagtccccagtttctattgttcc

SEQ ID NO: 414591 - DNA, 435 bp, Homo sapiens
ccatcagcttgacttgaggccgtttgaargcagactcagaatctgcaatttatcaggatccccaggtaatttgtatgtgcagtctagtttggtagatctgctctggcagactggaagactcttctatctgcctcacgtaaggtgcaggtgacataattaggtaatcaagcaaaagatcacatattttaataagaaagagacactggctattattttgagtggcaaaacaggttattcagtcccagtttaaaatggaaatgacagagaccaagatgaagatttttaatttgagatgtgcctgcgatgcaattacatttgctgaatgaaactgcttcagtaattagatgcaggtttcttctctcttctttttgagatgtaaagaagacacaatagactcatggaacttaaagaactagacgccagctaacaaaacat

SEQ ID NO: 414592 - DNA, 578 bp, Homo sapiens
cataggacagtgccagtttagcactgaaaaaaatcagttctcctaattctaaaaagaggagacagccaggcgtggtgggtcactaaaaatacaaaaaattagcgggcatggtggtgcatgcctgtaatcccagctacttgggaggctgaggcaaaagaatcacttaaaccygggaggtgaaggttgcagtgtgctgagatagcgccattgcactctcgcctgggcaacaagagcgaaactccgtctcaagaaaaaaaaaaaaagagagagagagagagaaactgtaatttcatttcagaagttttatagggtactatttccaattctttttttcttactccattaaagtgtaattagcagtatgtgaaaatttccactttatcctcaatcagaagcctctccttccaattagcatatattttttctattaactttgtaaagtgggattcttgttttatacatacccctggaaagtatacttaaactgtgagaccctgggattttatatttccaaatagaagataccatcctcttgtatcacaaaatgtacctaagatggtttggattatatttaaata

SEQ ID NO: 414593 - DNA, 578 bp, Homo sapiens
cataggacagtgccagtttagcactgaaaaaaatcagttctcctaattctaaaaagaggagacagccaggcgtggtgggtcactaaaaatacaaaaaattagcgggcatggtggtgcatgcctgtaatcccagctacttgggaggctgaggcaaaagaatcacttaaacctgggaggtgaaggttgcagtgtgctgagatagcgccattgcactctcgcctgggcaacaagagcgaaactccrtctcaagaaaaaaaaaaaaagagagagagagagagaaactgtaatttcatttcagaagttttatagggtactatttccaattctttttttcttactccattaaagtgtaattagcagtatgtgaaaatttccactttatcctcaatcagaagcctctccttccaattagcatatattttttctattaactttgtaaagtgggattcttgttttatacatacccctggaaagtatacttaaactgtgagaccctgggattttatatttccaaatagaagataccatcctcttgtatcacaaaatgtacctaagatggtttggattatatttaaata

SEQ ID NO: 414594 - DNA, 594 bp, Homo sapiens
taagatggtttggattatatttaaatattcttgaatgaaatagacttactgactgaagccaattattatatttttccacaccaaaataaatgcaataggaaaagatgacagttctatgtagtattcctgcttccatattgcacaaattagaaacatacatattccattatgttacagggtctagggctttgggaggacaaggctgcaggcagccgagattgtgccgctgcactccagcctgggcgacagagtgagaycttttctcaataataataataaaagtaaaaagaaatataatatttaatcaatatatgcacacacatgggtttatcatgacacacatgacatgtgtgtacagtgaaaaaaatgagtaaatctagaaacctgtattgcctcaatagctagctaagtacttcaatatgcatgtttatttcaacaattttgtgttaagcttcagtggtaaataagcagagtacactgaccataatgaatacttcttttgatgagggttatcactacacaattaaaatattacatagttggctgggcacgttggctcacacctataatcccagcactttgggaggccgaggc

SEQ ID NO: 414595 - DNA, 594 bp, Homo sapiens
taagatggtttggattatatttaaatattcttgaatgaaatagacttactgactgaagccaattattatatttttccacaccaaaataaatgcaataggaaaagatgacagttctatgtagtattcctgcttccatattgcacaaattagaaacatacatattccattatgttacagggtctagggctttgggaggacaaggctgcaggcagccgagattgtgccgctgcactccagcctgggcgacagagtgagaccttttctcaataataataataaaagtaaaaagaaatataatatttaatcaatatatgcacacacatgggtttatcatgacacacaygacatgtgtgtacagtgaaaaaaatgagtaaatctagaaacctgtattgcctcaatagctagctaagtacttcaatatgcatgtttatttcaacaattttgtgttaagcttcagtggtaaataagcagagtacactgaccataatgaatacttcttttgatgagggttatcactacacaattaaaatattacatagttggctgggcacgttggctcacacctataatcccagcactttgggaggccgaggc

SEQ ID NO: 414596 - DNA, 605 bp, Homo sapiens
gacatcaggaacatctttcaggaacatcaggtaaaacagacttagggcccaagtcaaaggagctaaaataatacaccctggaaagtggtatgatcatttctgcatctgctycagagaaacctgccaaaatatgattagcataatacccaagagaacatcacattccccatgtgtgaaaatgcaagagggagttatttctaatagttcataagctcagcaacaacagagtagacacaaaagccacagaatgtgcttaggctttactttaatgatatagggatatcacatatcatcagcctgtggagtacagaggtagtttacaaaggataaaccttcattgtttggaaaggaaagatcagagagctctttatgaagtttaaacaaaatcagagaaataaagagatgtgggaaagaaagaaaaaaaagaaagtacattgaggacagtccaatctaactgtgaactcataagggacagccagtaaattcaaaacagcctactgttttttgattacttgtgctactctattaaaatagccacaaacacaaaactagtctacctctttctctccccattattggccctaacccaaaaatagtgggagtaa

SEQ ID NO: 414597 - DNA, 605 bp, Homo sapiens
gacatcaggaacatctttcaggaacatcaggtaaaacagacttagggcccaagtcaaaggagctaaaataatacaccctggaaagtggtatgatcatttctgcatctgctccagagaaacctgccaaaatatgattagcataatacccaagagaacatcacattccccatgtgtgaaaatgcaagagggarttatttctaatagttcataagctcagcaacaacagagtagacacaaaagccacagaatgtgcttaggctttactttaatgatatagggatatcacatatcatcagcctgtggagtacagaggtagtttacaaaggataaaccttcattgtttggaaaggaaagatcagagagctctttatgaagtttaaacaaaatcagagaaataaagagatgtgggaaagaaagaaaaaaaagaaagtacattgaggacagtccaatctaactgtgaactcataagggacagccagtaaattcaaaacagcctactgttttttgattacttgtgctactctattaaaatagccacaaacacaaaactagtctacctctttctctccccattattggccctaacccaaaaatagtgggagtaa

SEQ ID NO: 414598 - DNA, 560 bp, Homo sapiens
gggtgcctttgacaaatcattaagaatgagttctacattaaaaaggggaagagagggtgatagctgaggaggcagcataggcaagaacatccagcatgaaagaacagtgaaggacatcaggaacatctttcaggaacatcaggtaaaacagacttagggcccaagtcaaaggagctaaaataatacaccctggaaagtggtatgatcatttctgcatctgctccagagaaacctgccaaaatatgattagcataatacccaagagaacatcacattccccatgtgtgaaaatgcaagagggagttatttctaatagttcataagctcagcaacaacagagtagacacaaaagccayagaatgtgcttaggctttactttaatgatatagggatatcacatatcatcagcctgtggagtacagaggtagtttacaaaggataaaccttcattgtttggaaaggaaagatcagagagctctttatgaagtttaaacaaaatcagagaaataaagagatgtgggaaagaaagaaaaaaaagaaagtacattgaggacagtcca

SEQ ID NO: 414599 - DNA, 605 bp, Homo sapiens
gacatcaggaacatctttcaggaacatcaggtaaaacagacttagggcccaagtcaaaggagctaaaataatacaccctggaaagtggtatgatcatttctgcatctgctccagagaaacctgccaaaatatgattagcataatacccaagagaacatcacattccccatgtgtgaaaatgcaagagggagttatttctaatagttcataagctcagcaacaacagagtagacacaaaagccacagaatgtgcttaggctttactttaatgatatagggatatcayatatcatcagcctgtggagtacagaggtagtttacaaaggataaaccttcattgtttggaaaggaaagatcagagagctctttatgaagtttaaacaaaatcagagaaataaagagatgtgggaaagaaagaaaaaaaagaaagtacattgaggacagtccaatctaactgtgaactcataagggacagccagtaaattcaaaacagcctactgttttttgattacttgtgctactctattaaaatagccacaaacacaaaactagtctacctctttctctccccattattggccctaacccaaaaatagtgggagtaa

SEQ ID NO: 414600 - DNA, 232 bp, Homo sapiens
taattctcatcaaataagggtgctatttacattgagatagtgactattactataagtaacattttagtctcttgacaagcatgggaagcaatggaatgaagggcaatggaaggaagggcactgcattatgaaaaggactttttaaaagaaaaccatctctaggcactatttccctttgtggaaatgaastgaatattttctgaactccacctgggacatacgaacaatgagc

SEQ ID NO: 414601 - DNA, 428 bp, Homo sapiens
acatacgaacaatgagcatgaaatcttacaaactgtataaataacatttattcacagtgtcactgcatcatctattgttttgaattctctttaaatttccttctatatatttatccaaagctgaagtcatctggtttagattatgggaccctgaaaagcaagaactagtctatgtaactacttttaaacatctgcacaatgcsatatatatatatataccacacacacacacacacacacacacatattgatatgtaacaagtactatttgattataattaggagtgtcttggttttcttataacatgaacatatatttttaacccaaacagcttaaagcatttaacgaaaagttttacacacctacaaagtgctttcaggaagcagatgtgcagtgcaatgtggcgcagtaagatgcacaaagcaaa

SEQ ID NO: 414602 - DNA, 554 bp, Homo sapiens
cttagtaattcatctgcttcagctgcttgtattctgttcccaatcaaaattcttggttttcagcctcctcatcatttttataaggagttgaatgaattggccargcttgttcctttctccctctccatggaacaccaggccccaagctccccgacactgctcctctttttatttctatctttgggttgtgtgtgcactctagaacacttgtatcagtgaagagtgtaacaaagtattgtgccacgcatagtctctcatatatcatctatcagctcatcaaaaagtgctcactgattaacagaggatcccctcctcagtttcagaattctctagctttaagttaggggagggttaccccaaagtcagagagggtacatgggagagggttgtgaaggccagtagcccagagaaaatcaagggcagctgggtgcatttaggtggataagaaaacaatgaattactccatcaaaagcaaaagcacaagcacatagtaaagttgatcacctactgttaatgtcaattcagtttaaagcactttattaaccacacataca

SEQ ID NO: 414603 - DNA, 554 bp, Homo sapiens
cttagtaattcatctgcttcagctgcttgtattctgttcccaatcaaaattcttggttttcagcctcctcatcatttttataaggagttgaatgaattggccaagcttgttcctttctccctctccatggaacaccaggccccaagctccccgacactgctcctctttttrtttctatctttgggttgtgtgtgcactctagaacacttgtatcagtgaagagtgtaacaaagtattgtgccacgcatagtctctcatatatcatctatcagctcatcaaaaagtgctcactgattaacagaggatcccctcctcagtttcagaattctctagctttaagttaggggagggttaccccaaagtcagagagggtacatgggagagggttgtgaaggccagtagcccagagaaaatcaagggcagctgggtgcatttaggtggataagaaaacaatgaattactccatcaaaagcaaaagcacaagcacatagtaaagttgatcacctactgttaatgtcaattcagtttaaagcactttattaaccacacataca

SEQ ID NO: 414604 - DNA, 554 bp, Homo sapiens
cttagtaattcatctgcttcagctgcttgtattctgttcccaatcaaaattcttggttttcagcctcctcatcatttttataaggagttgaatgaattggccaagcttgttcctttctccctctccatggaacaccaggccccaagctccccgacactgctcctctttttatttctatctttgggttgtgtgtgcactctagaacacttgtatcagtgaagagtgtaacaaagtattgtgccacgcatagtctctcatatatcatctatcagctcatcaaaaagtgctcactgattaacagaggatcccctcctcagtttcagaattctctagctttaagttaggggagggttaccccaaagtcagagagggtacatgggagagggttgtgaaggccagtagcccagagaaaatcaagggcagctgggtgcatttaggtggataagaaaacaatgaattactccatcaaaagcaaaagcacaagcacatagkaaagttgatcacctactgttaatgtcaattcagtttaaagcactttattaaccacacataca

SEQ ID NO: 414605 - DNA, 428 bp, Homo sapiens
acacagcaaactgtgatcatgaaaagagtgagctcaatagttttccataaaatatgctcaaaattcgatgcagtggccatgagagtacagcttttgaagtatggtcaacctatggtacgytagtaaatgataaggggaggaagaaatggaaacctaaacatctactgcaatgaaaaccaacagcaatgacagtaggagtaattcagccttcgttgaaaacatgacatcaaacacactctggtttccctgaatctgttgcctccaggtgttaacacagaattaagcatccacaattgctgaaagtcacctggggcatggtgggttttgatcttcttccccttcttttcttccccttcttctttccttctttgatcttcttccccttcttttcttccccttccccttcttttcaatttctgcaataaatt

SEQ ID NO: 414606 - DNA, 428 bp, Homo sapiens
acacagcaaactgtgatcatgaaaagagtgagctcaatagttttccataaaatatgctcaaaattcgatgcagtggccatgagagtacagcttttgaagtatggtcaacctatggtacgctagtaaatgataaggggaggaagaaatggaaacctaaacatctactgcaatgaaaaccaacagcaatgacagtaggagtaattcagccttcgttgaaaacatgamatcaaacacactctggtttccctgaatctgttgcctccaggtgttaacacagaattaagcatccacaattgctgaaagtcacctggggcatggtgggttttgatcttcttccccttcttttcttccccttcttctttccttctttgatcttcttccccttcttttcttccccttccccttcttttcaatttctgcaataaatt

SEQ ID NO: 414607 - DNA, 428 bp, Homo sapiens
acacagcaaactgtgatcatgaaaagagtgagctcaatagttttccataaaatatgctcaaaattcgatgcagtggccatgagagtacagcttttgaagtatggtcaacctatggtacgctagtaaatgataaggggaggaagaaatggaaacctaaacatctactgcaatgaaaaccaacagcaatgacagtaggagtaattcagccttcgttgaaaacatgacatcaaacacactctggtttccctgaatctgttgcctccaggtgttaacacagaattaagcatccacaattgctgaaagtyacctggggcatggtgggttttgatcttcttccccttcttttcttccccttcttctttccttctttgatcttcttccccttcttttcttccccttccccttcttttcaatttctgcaataaatt

SEQ ID NO: 414608 - DNA, 428 bp, Homo sapiens
acacagcaaactgtgatcatgaaaagagtgagctcaatagttttccataaaatatgctcaaaattcgatgcagtggccatgagagtacagcttttgaagtatggtcaacctatggtacgctagtaaatgataaggggaggaagaaatggaaacctaaacatctactgcaatgaaaaccaacagcaatgacagtaggagtaattcagccttcgttgaaaacatgacatcaaacacactctggtttccctgaatctgttgcctccaggtgttaacacagaattaagcatccacaattgctgaaagtcacctggggcatggtgggttttgatcttcttcccyttcttttcttccccttcttctttccttctttgatcttcttccccttcttttcttccccttccccttcttttcaatttctgcaataaatt

SEQ ID NO: 414609 - DNA, 403 bp, Homo sapiens
aacatgtttttcctccaatgcataaaaggaacttccatagggctggcaggagtcaggctgttcaagacaactggaaggagttgaataacatctatccagtgagtcctgcaagacttcaggctctactacctccagcagctccctgctgagcctggaaaaggaggaaaaagtaaagaataagccaggggaaatcasacacaacagagccccaactaggtttcatgggtagcatagggaagtggttaagaaactaaaaggatagatccattaatgaggtaacaaattattgccttcatgttgggacagaacagggccaaatggaaaagaatgaaagagaaagacagatagacacacacacacacacacacacacacacacacacacacacacacacacagagaga

SEQ ID NO: 414610 - DNA, 403 bp, Homo sapiens
aacatgtttttcctccaatgcataaaaggaacttccatagggctggcaggagtcaggctgttcaagacaactggaaggagttgaataacatctatccagtgagtcctgcaagacttcaggctctactacctccagcagctccctgctgagcctggaaaaggaggaaaaagtaaagaataagccaggggaaatcacacacaacagagccccaactaggtttcatgggtagcatagggaagtggttaaraaactaaaaggatagatccattaatgaggtaacaaattattgccttcatgttgggacagaacagggccaaatggaaaagaatgaaagagaaagacagatagacacacacacacacacacacacacacacacacacacacacacacacacagagaga

SEQ ID NO: 414611 - DNA, 569 bp, Homo sapiens
ccccccaaaaaaaatgactccaagaaactgaggtttcyagatgagggttacacaatgtggatctaaaagcaacagggaaaggaaaaggatttgggcctagaatgtggggaattttagatgctgcagaaagccttctggtgtctttctagaatggctggattttggttaaggcaaagaagaagtaacttttcatggagaacagtagcatacaggagtgcggatggtttgatcatttaaggcagggatgtgaggtttgatggaatatgttgataacaaagattctttgcttggccaactttagtcaggcttctaaatcttcagctaggctaaactgtgcacttcctcgcaaaatccagcattagcaaagaacactgccaagtttaccaaagaacccctcattctcaatatctgatcaagttcttcattcttcaccattctgcaggtgatgtctgatcaccctggccagtcttcagcaagaattcttttaggtcggtttagccagaatctcccttactcctgatgtttcctcttagtgattttccattcactgacccctgcattgctcctgg

SEQ ID NO: 414612 - DNA, 569 bp, Homo sapiens
ccccccaaaaaaaatgactccaagaaactgaggtttctagatgagggttacacaatgtggatctaaaagcaacagggaaaggaaaaggatttgggccyagaatgtggggaattttagatgctgcagaaagccttctggtgtctttctagaatggctggattttggttaaggcaaagaagaagtaacttttcatggagaacagtagcatacaggagtgcggatggtttgatcatttaaggcagggatgtgaggtttgatggaatatgttgataacaaagattctttgcttggccaactttagtcaggcttctaaatcttcagctaggctaaactgtgcacttcctcgcaaaatccagcattagcaaagaacactgccaagtttaccaaagaacccctcattctcaatatctgatcaagttcttcattcttcaccattctgcaggtgatgtctgatcaccctggccagtcttcagcaagaattcttttaggtcggtttagccagaatctcccttactcctgatgtttcctcttagtgattttccattcactgacccctgcattgctcctgg

SEQ ID NO: 414613 - DNA, 575 bp, Homo sapiens
acagggaaaggaaaaggatttgggcctagaatgtggggaattttagatgctgcagaaagccttctggtgtctttctagaatggctggattttggttaaggcaaagaagaagtaacttttcatggagaacagtagcatacaggagtgcggatggtttgatcatttaaggcagggatgtgaggtttgatggaatatgttgataacaaagattctttgcttggccaactttagtcaggcttctaaatcttcagctaggctaaactgtgcacttcctcgcaaaatccagcattagcaaagaacactgccaagtttaccaaagaacccctcattctcaatatctgatcargttcttcattcttcaccattctgcaggtgatgtctgatcaccctggccagtcttcagcaagaattcttttaggtcggtttagccagaatctcccttactcctgatgtttcctcttagtgattttccattcactgacccctgcattgctcctgggctataaattcccacttccccatgctgtattcagagttaagcccatctctctccccagctccaagactgtgttgcag

SEQ ID NO: 414614 - DNA, 569 bp, Homo sapiens
ccccccaaaaaaaatgactccaagaaactgaggtttctagatgagggttacacaatgtggatctaaaagcaacagggaaaggaaaaggatttgggcctagaatgtggggaattttagatgctgcagaaagccttctggtgtctttctagaatggctggattttggttaaggcaaagaagaagtaacttttcatggagaacagtagcatacaggagtgcggatggtttgatcatttaaggcagggatgtgaggtttgatggaatatgttgataacaaagattctttgcttggccaactttagtcaggcttctaaatcttcagctaggctaaactgtgcacttcctcgcaaaatccagcattagcaaagaacactgccaagtttaccaaagaacccctcattctcaatatctgatcaagttcttcattcttcaccattctgcaggtgatgtctgatcaccctggccagtcttcagcaagaattcttttaggkcggtttagccagaatctcccttactcctgatgtttcctcttagtgattttccattcactgacccctgcattgctcctgg

SEQ ID NO: 414615 - DNA, 644 bp, Homo sapiens
taaaatggtaaagttttcttggaatgttggtctgagaatgtaaagggtatttttttccttttcagtaattggcctcagaaacagagactctgtttcatcaagataatttcttgagtttcatgttgttttattaggtttttggttacttaagaaaagtgagtcttctcaatattaaaggagctaagttcttgttcacaactatgtaatctgaatttgcctttaaaatcttttaatggagcttttattaaatagataactatggtcatatttgttttaaatgttttaaactttttgacatttttgacaatcttcccaaaatcacattctaagttaagtctttttgacctcaaattaacttaggattctccatattggaccctcagaaagccacaaagwatatttttttttgtatgaaagagagattaaaccaattagatttatttaatatgctaaattatatgtgtaacattcaaataaaaagtgatgctaagccatctttaagttatatttatggatatattattgggataagtgtacaaaagttgtatgagattcctagaaatctagtatgttatcagtcataattttggttattatgttaaaatgctgtatgccatgctaaccaaattttcttataaattgca

SEQ ID NO: 414616 - DNA, 644 bp, Homo sapiens
taaaatggtaaagttttcttggaatgttggtctgagaatgtaaagggtatttttttccttttcagtaattggcctcagaaacagagactctgtttcatcaagataatttcttgagtttcatgttgttttattaggtttttggttacttaagaaaagtgagtcttctcaatattaaaggagctaagttcttgttcacaactatgtaatctgaatttgcctttaaaatcttttaatggagcttttattaaatagataactatggtcatatttgttttaaatgttttaaactttttgacatttttgacaatcttcccaaaatcacattctaagttaagtctttttgacctcaaattaacttaggattctccatattggaccctcagaaagccacaaagtatatttttttttgtatgaaagagagattaaaccaattagatttatttaatatgctaaattatatgtgtarcattcaaataaaaagtgatgctaagccatctttaagttatatttatggatatattattgggataagtgtacaaaagttgtatgagattcctagaaatctagtatgttatcagtcataattttggttattatgttaaaatgctgtatgccatgctaaccaaattttcttataaattgca

SEQ ID NO: 414617 - DNA, 586 bp, Homo sapiens
gtacaaaagttgtatgagattcctagaaatctagtatgttatcagtcataattttggttattatgttaaaatgctgtatgccatgctaaccaaattttcttataaattgcatcattgtaatgaactctcattarattttttaaccatggacactttaagtccttgtcatctgtagacagttattgttttaatttaattgttctctaaaagcatttgaaattagctacagtccaaaatggcttcttcttcaaggagatttatggaaaatactcttatgagtattctggaatacaggtttctgaacaactttaacgtcatacaattggactggtaagaatttccagaactctaataaaactgacgggttcatgtaactactaacccaagatcaagcaaaacaagatttaattacatggtactgaatgaactgatgagaataatttttaaaatgactttttgttggaaacattgctagttctttaaatgttttgttttccagatttcagaaaactttcttttaagctatctctagcttacaccaattcagtaaagaatacttttgtgcaaaatggaaacatttactttt

SEQ ID NO: 414618 - DNA, 586 bp, Homo sapiens
gtacaaaagttgtatgagattcctagaaatctagtatgttatcagtcataattttggttattatgttaaaatgctgtatgccatgctaaccaaattttcttataaattgcatcattgtaatgaactctcattaaattttttaaccatggacactttaagtccttgtcatctgtagacagttattgttttaatttaattgttctctaaaagcatttgaaattagctacagtccaaaatggcttcttcttcaaggagatttatggaaaatactcttatgastattctggaatacaggtttctgaacaactttaacgtcatacaattggactggtaagaatttccagaactctaataaaactgacgggttcatgtaactactaacccaagatcaagcaaaacaagatttaattacatggtactgaatgaactgatgagaataatttttaaaatgactttttgttggaaacattgctagttctttaaatgttttgttttccagatttcagaaaactttcttttaagctatctctagcttacaccaattcagtaaagaatacttttgtgcaaaatggaaacatttactttt

SEQ ID NO: 414619 - DNA, 586 bp, Homo sapiens
gtacaaaagttgtatgagattcctagaaatctagtatgttatcagtcataattttggttattatgttaaaatgctgtatgccatgctaaccaaattttcttataaattgcatcattgtaatgaactctcattaaattttttaaccatggacactttaagtccttgtcatctgtagacagttattgttttaatttaattgttctctaaaagcatttgaaattagctacagtccaaaatggcttcttcttcaaggagatttatggaaaatactcttatgagtattctggaatacaggtttctgaacaactttaacgtcatacaattggactggtaagaatttccagaactctaataaaactgaygggttcatgtaactactaacccaagatcaagcaaaacaagatttaattacatggtactgaatgaactgatgagaataatttttaaaatgactttttgttggaaacattgctagttctttaaatgttttgttttccagatttcagaaaactttcttttaagctatctctagcttacaccaattcagtaaagaatacttttgtgcaaaatggaaacatttactttt

SEQ ID NO: 414620 - DNA, 586 bp, Homo sapiens
gtacaaaagttgtatgagattcctagaaatctagtatgttatcagtcataattttggttattatgttaaaatgctgtatgccatgctaaccaaattttcttataaattgcatcattgtaatgaactctcattaaattttttaaccatggacactttaagtccttgtcatctgtagacagttattgttttaatttaattgttctctaaaagcatttgaaattagctacagtccaaaatggcttcttcttcaaggagatttatggaaaatactcttatgagtattctggaatacaggtttctgaacaactttaacgtcatacaattggactggtaagaatttccagaactctaataaaactgacgggttcatgtaactactaacccaagatcaagcaaaacaagatttaattacatggtactgaatgaactgatgagaataatttttaaaatgactttttgttggaaacattgctagttctttaaatgttttgttttccagatttcagaaaactttyttttaagctatctctagcttacaccaattcagtaaagaatacttttgtgcaaaatggaaacatttactttt

SEQ ID NO: 414621 - DNA, 591 bp, Homo sapiens
atggctgggtcaaatggtatttctaattctagatagaatgtttcctcttataactcatagtgaatatgactggacaatgaaactattttgtaatttctttcctgaaagataaaggcgttagaacatagaatctttcactgattctacagaatcttaagactccttcagagatggcagtcattcctaccgtgctgaacatcatgttgtcacggtcagaatcagaactaaattgattaagggtctgaaacmgtttggcactcttgggcacttattctgataagaaagctgatgagacagggtaatgaaaagaggctgcaagaaatgaccattcatgcattcagccaacatttaggccaccctcctgtattccaggcactgtacgtggcactgagaatgcaaagcaaaacgagtcatggtctactggcgggagccttctcagcggagaaaagatcaacaagaaaagtgcctgctggagacccctcctagggcataaaccaatatagaggtggggcagctacgtcagcctgaggtgtccttaggcagaacagaaagtgagaatcagagcagtatctcatttctgaaaacctggat

SEQ ID NO: 414622 - DNA, 626 bp, Homo sapiens
ttggcactcttgggcacttattctgataagaaagctgatgagacagggtaatgaaaagaggctgcaagaaatgaccattcatgcattcagccaacatttaggccaccctcctgtattccaggcactgtacgtggcactgagaatgcaaagcaaaacgagtcatggtctactggcgggagccttctcagcggagaaaagatcaacaagaaaagtgcctgctggagaccyctcctagggcataaaccaatatagaggtggggcagctacgtcagcctgaggtgtccttaggcagaacagaaagtgagaatcagagcagtatctcatttctgaaaacctggattgtagctttccctgggctgactgtcaaaggaggtggttttaaaaagcaagccaaacaggtttccatcctttaggaagaccctggaacgtgccagttgattctgacaatttctcatgaacagaaacacctaggaagggagaactggtgagtcttttcaagaggaggaagtccctcaaaaggggctgtgtttcgcaaacggcgccccaaaagggctgaaatacttcgatctggaagaaaaagactcaggcactgagggaaggggagggtgcacatctggagtaatttc

SEQ ID NO: 414623 - DNA, 626 bp, Homo sapiens
ttggcactcttgggcacttattctgataagaaagctgatgagacagggtaatgaaaagaggctgcaagaaatgaccattcatgcattcagccaacatttaggccaccctcctgtattccaggcactgtacgtggcactgagaatgcaaagcaaaacgagtcatggtctactggcgggagccttctcagcggagaaaagatcaacaagaaaagtgcctgctggagacccctcctagggcataaaccaatatagaggtggggcagctacgtcagcctgaggtgtccttaggcagaacagaaagtgagaatcagagcagtatctcatttctgaamacctggattgtagctttccctgggctgactgtcaaaggaggtggttttaaaaagcaagccaaacaggtttccatcctttaggaagaccctggaacgtgccagttgattctgacaatttctcatgaacagaaacacctaggaagggagaactggtgagtcttttcaagaggaggaagtccctcaaaaggggctgtgtttcgcaaacggcgccccaaaagggctgaaatacttcgatctggaagaaaaagactcaggcactgagggaaggggagggtgcacatctggagtaatttc

SEQ ID NO: 414624 - DNA, 626 bp, Homo sapiens
ttggcactcttgggcacttattctgataagaaagctgatgagacagggtaatgaaaagaggctgcaagaaatgaccattcatgcattcagccaacatttaggccaccctcctgtattccaggcactgtacgtggcactgagaatgcaaagcaaaacgagtcatggtctactggcgggagccttctcagcggagaaaagatcaacaagaaaagtgcctgctggagacccctcctagggcataaaccaatatagaggtggggcagctacgtcagcctgaggtgtccttaggcagaacagaaagtgagaatcagagcagtatctcatttctgaaaacctggattgtagctttccctggrctgactgtcaaaggaggtggttttaaaaagcaagccaaacaggtttccatcctttaggaagaccctggaacgtgccagttgattctgacaatttctcatgaacagaaacacctaggaagggagaactggtgagtcttttcaagaggaggaagtccctcaaaaggggctgtgtttcgcaaacggcgccccaaaagggctgaaatacttcgatctggaagaaaaagactcaggcactgagggaaggggagggtgcacatctggagtaatttc

SEQ ID NO: 414625 - DNA, 592 bp, Homo sapiens
attctaatagcggaagacgaaaacaaaattactaagtaaaagatgcacaatagatggagttaagtgctgtgaaaaaaaattaaacaggaaggaatggagctggggatgagggtgtggggtgagcaaagagaagtatctcagtttagaataggaaaatcagagaagaccttcactgacaatacttgagttgagacctaaataaggtgagagtaatcatgcaggtatcttaggraaacacattcatgagaaagggaacagcaaatgcaaaggccataacacagagagcagccctagcgtgtttgagaaacagcaagaatatctggagcagcagaaaatagatgagagctgtaactgggatgtggatcaattggggcctttaagccactgtaaagaaagacttagggttttcctctaaatgggataatacttacatatgaggtacaacagacttactctcctaaagcccgtgtacagaaccacatatttgctttacgtgaaactagacctactgtattaataaagtttgatttctatttaaaatgttttagagggctggacatcagcttagttctttacttttaccttagaagat

SEQ ID NO: 414626 - DNA, 592 bp, Homo sapiens
attctaatagcggaagacgaaaacaaaattactaagtaaaagatgcacaatagatggagttaagtgctgtgaaaaaaaattaaacaggaaggaatggagctggggatgagggtgtggggtgagcaaagagaagtatctcagtttagaataggaaaatcagagaagaccttcactgacaatacttgagttgagacctaaataaggtgagagtaatcatgcaggtatcttaggaaaacacattcatgagaaagggaacagcaaatgcaaaggccataacacagagagcagccctagcgtgtytgagaaacagcaagaatatctggagcagcagaaaatagatgagagctgtaactgggatgtggatcaattggggcctttaagccactgtaaagaaagacttagggttttcctctaaatgggataatacttacatatgaggtacaacagacttactctcctaaagcccgtgtacagaaccacatatttgctttacgtgaaactagacctactgtattaataaagtttgatttctatttaaaatgttttagagggctggacatcagcttagttctttacttttaccttagaagat

SEQ ID NO: 414627 - DNA, 592 bp, Homo sapiens
attctaatagcggaagacgaaaacaaaattactaagtaaaagatgcacaatagatggagttaagtgctgtgaaaaaaaattaaacaggaaggaatggagctggggatgagggtgtggggtgagcaaagagaagtatctcagtttagaataggaaaatcagagaagaccttcactgacaatacttgagttgagacctaaataaggtgagagtaatcatgcaggtatcttaggaaaacacattcatgagaaagggaacagcaaatgcaaaggccataacacagagagcagccctagcgtgtttgagaaacagcaagaatatctggagcagcagaaaatagatgagagctgtaactgggatgtggatcaattggggcctttaagccactgtaaagaaagacttagggttttcctctaaatgggataatacttacatatgaggtacaacagacttactctcctaaagcccgtgtacagaaccayatatttgctttacgtgaaactagacctactgtattaataaagtttgatttctatttaaaatgttttagagggctggacatcagcttagttctttacttttaccttagaagat

SEQ ID NO: 414628 - DNA, 592 bp, Homo sapiens
attctaatagcggaagacgaaaacaaaattactaagtaaaagatgcacaatagatggagttaagtgctgtgaaaaaaaattaaacaggaaggaatggagctggggatgagggtgtggggtgagcaaagagaagtatctcagtttagaataggaaaatcagagaagaccttcactgacaatacttgagttgagacctaaataaggtgagagtaatcatgcaggtatcttaggaaaacacattcatgagaaagggaacagcaaatgcaaaggccataacacagagagcagccctagcgtgtttgagaaacagcaagaatatctggagcagcagaaaatagatgagagctgtaactgggatgtggatcaattggggcctttaagccactgtaaagaaagacttagggttttcctctaaatgggataatacttacatatgaggtacaacagacttactctcctaaagcccgtgtacagaaccacatatttgctttaygtgaaactagacctactgtattaataaagtttgatttctatttaaaatgttttagagggctggacatcagcttagttctttacttttaccttagaagat

SEQ ID NO: 414629 - DNA, 599 bp, Homo sapiens
ttttaacccacactttcatgaggtcccatttccctttccaaattattgtttcacagctaaccttctatgactgtagcctaatttcagatatttctctttcttttccatctacttcttacttatccctcygcaacaaaactttaattctaattattgcttagaaactgttttctaaaaacaatgactttcctctagtcaagttcagtggtctcatctgaaacttcataaggaaattctctctcctatagggagaattgctaaccactccatgtaccgttttaatcattttaccttggcttctatgactccctctgtctaactcaaaacccagtgaagtcttagtctggattgctgatttctccttcttccccatctattatggccaccctaatgtttaagtctggactgcactgctctttctctcaaatgcatttgttactgttgttgttcacttggttttaaacaacttccttcctgtaactgactccaaaatacactgttccagtcccatatgttcagttttctagaagtcatctctctatcctaatatgtgctgccactatttgaaactaaacatttgtaaaaggagatcatcttcc

SEQ ID NO: 414630 - DNA, 600 bp, Homo sapiens
ttctctttcttttccatctacttcttacttatccctctgcaacaaaactttaattctaattattgyttagaaactgttttctaaaaacaatgactttcctctagtcaagttcagtggtctcatctgaaacttcataaggaaattctctctcctatagggagaattgctaaccactccatgtaccgttttaatcattttaccttggcttctatgactccctctgtctaactcaaaacccagtgaagtcttagtctggattgctgatttctccttcttccccatctattatggccaccctaatgtttaagtctggactgcactgctctttctctcaaatgcatttgttactgttgttgttcacttggttttaaacaacttccttcctgtaactgactccaaaatacactgttccagtcccatatgttcagttttctagaagtcatctctctatcctaatatgtgctgccactatttgaaactaaacatttgtaaaaggagatcatcttcccaagaaactttaattattcaatttttctaaggcttccacacacaatttaaagtaacttcatctctttaagttgtatataatttattaccaca

SEQ ID NO: 414631 - DNA, 599 bp, Homo sapiens
ttttaacccacactttcatgaggtcccatttccctttccaaattattgtttcacagctaaccttctatgactgtagcctaatttcagatatttctctttcttttccatctacttcttacttatccctctgcaacaaaactttaattctaattattgcttagaaactgttttctaaaaacaatgactttcctctagtcaagttcagtggtctcatctgaaacttcataaggaaattctctctcctatagggagaattgctaaccactccaygtaccgttttaatcattttaccttggcttctatgactccctctgtctaactcaaaacccagtgaagtcttagtctggattgctgatttctccttcttccccatctattatggccaccctaatgtttaagtctggactgcactgctctttctctcaaatgcatttgttactgttgttgttcacttggttttaaacaacttccttcctgtaactgactccaaaatacactgttccagtcccatatgttcagttttctagaagtcatctctctatcctaatatgtgctgccactatttgaaactaaacatttgtaaaaggagatcatcttcc

SEQ ID NO: 414632 - DNA, 599 bp, Homo sapiens
ttttaacccacactttcatgaggtcccatttccctttccaaattattgtttcacagctaaccttctatgactgtagcctaatttcagatatttctctttcttttccatctacttcttacttatccctctgcaacaaaactttaattctaattattgcttagaaactgttttctaaaaacaatgactttcctctagtcaagttcagtggtctcatctgaaacttcataaggaaattctctctcctatagggagaattgctaaccactccatgyaccgttttaatcattttaccttggcttctatgactccctctgtctaactcaaaacccagtgaagtcttagtctggattgctgatttctccttcttccccatctattatggccaccctaatgtttaagtctggactgcactgctctttctctcaaatgcatttgttactgttgttgttcacttggttttaaacaacttccttcctgtaactgactccaaaatacactgttccagtcccatatgttcagttttctagaagtcatctctctatcctaatatgtgctgccactatttgaaactaaacatttgtaaaaggagatcatcttcc

SEQ ID NO: 414633 - DNA, 600 bp, Homo sapiens
ttctctttcttttccatctacttcttacttatccctctgcaacaaaactttaattctaattattgcttagaaactgttttctaaaaacaatgactttcctctagtcaagttcagtggtctcatctgaaacttcataaggaaattctctctcctatagggagaattgctaaccactccatgtaccgttttaatcattttaccttggcttctatgmctccctctgtctaactcaaaacccagtgaagtcttagtctggattgctgatttctccttcttccccatctattatggccaccctaatgtttaagtctggactgcactgctctttctctcaaatgcatttgttactgttgttgttcacttggttttaaacaacttccttcctgtaactgactccaaaatacactgttccagtcccatatgttcagttttctagaagtcatctctctatcctaatatgtgctgccactatttgaaactaaacatttgtaaaaggagatcatcttcccaagaaactttaattattcaatttttctaaggcttccacacacaatttaaagtaacttcatctctttaagttgtatataatttattaccaca

SEQ ID NO: 414634 - DNA, 418 bp, Homo sapiens
aatgaaacagtacttaactgaaagtgtatgactaagtcttgccccaagactagcacctattcaatcagctctaacatcctaaatggaccagcatcctatccatacctctcctctccctaaggacagtctggaaattccttgctgaacctaagcatatgactaaaagaataatctttcctaagcataattttcatgtcattcttctgctcagaaactagcaacagtattaataccaagcctttcaaatccaagttctttacaatctctgatctgcttgtctgtcccattccaatcatctaaccatcttactctttagtaatccataactcgaacactccatattatttccacaatcttgtttactgtccccyatattaaaatctttttaatttccagtgagaaacatcatgcttccctt

SEQ ID NO: 414635 - DNA, 379 bp, Homo sapiens
atttttaaaaaaactatacagaatgtggaacgaaggggaaaaaaaagtctcatgtgggttgcgtcggcactgcagctgctcctcattaaagytcctctttactccctctgggctagtttccagcagaaaattctttaaacagaactctgctttcaacccactttcttcttgccctgggcctcttcgcgccaatccgcagtggcagcctgcctagctgagctctagaggggggagctgtcgttaaggtaaatgaggtaagggcaggggaaaaaactaacaaaacccagaaaccaaattaagcatcggtcagtaacaaaggtctgcagtttgaaaggctccaaatcagtctgttctttcctgtgaccataatgccagctta

SEQ ID NO: 414636 - DNA, 379 bp, Homo sapiens
atttttaaaaaaactatacagaatgtggaacgaaggggaaaaaaaagtctcatgtgggttgcgtcggcactgcagctgctcctcattaaagttcctctttactccctctgggctagtttccagcagaaaattctttraacagaactctgctttcaacccactttcttcttgccctgggcctcttcgcgccaatccgcagtggcagcctgcctagctgagctctagaggggggagctgtcgttaaggtaaatgaggtaagggcaggggaaaaaactaacaaaacccagaaaccaaattaagcatcggtcagtaacaaaggtctgcagtttgaaaggctccaaatcagtctgttctttcctgtgaccataatgccagctta

SEQ ID NO: 414637 - DNA, 379 bp, Homo sapiens
atttttaaaaaaactatacagaatgtggaacgaaggggaaaaaaaagtctcatgtgggttgcgtcggcactgcagctgctcctcattaaagttcctctttactccctctgggctagtttccagcagaaaattctttaaacagaactctgctttcaacccactttcttcttgcsctgggcctcttcgcgccaatccgcagtggcagcctgcctagctgagctctagaggggggagctgtcgttaaggtaaatgaggtaagggcaggggaaaaaactaacaaaacccagaaaccaaattaagcatcggtcagtaacaaaggtctgcagtttgaaaggctccaaatcagtctgttctttcctgtgaccataatgccagctta

SEQ ID NO: 414638 - DNA, 379 bp, Homo sapiens
atttttaaaaaaactatacagaatgtggaacgaaggggaaaaaaaagtctcatgtgggttgcgtcggcactgcagctgctcctcattaaagttcctctttactccctctgggctagtttccagcagaaaattctttaaacagaactctgctttcaacccactttcttcttgccctgggcctcttcgcgccaatccgcagtggcagcctgcctagctgagctctagaggggggagctgtcgttaagstaaatgaggtaagggcaggggaaaaaactaacaaaacccagaaaccaaattaagcatcggtcagtaacaaaggtctgcagtttgaaaggctccaaatcagtctgttctttcctgtgaccataatgccagctta

SEQ ID NO: 414639 - DNA, 591 bp, Homo sapiens
atcaagtctaaacttctaggctggcattcaggaggcctaacccacctattggtctaractcactggtctccctcctttcagtacctcctggctgaggtctgatgggcttgtcaactttttaattctgtcactctgtgtaaaggtaactaactaggttatgctaattaccaactttgttttaaaaacatgcatgaggacttctagttaacttcctggtaaagaggggaaaaaaagagaagaagctctgtcatactacttcttgccattcccactctactctcaacccccccttttctcaaataaaaagaaaaaaaaaggaaatactatagcttactcagcaagaaggaaaaacaaaaagaactttaaaaaaaagtatttgtgtatagattggtgtccagaactgggacgcttgtggtaaaacacactttctagtgtagtttttctagggccttactagttgtatgtgaaggaaacaaagacaagtatacaatctctcactctcacacacgtacacacacacatacacacttttatcacaactaatacacaaagactaccaaatactgcagggcagctcatttttctactatg

SEQ ID NO: 414640 - DNA, 591 bp, Homo sapiens
atcaagtctaaacttctaggctggcattcaggaggcctaacccacctattggtctagactcactggtctccctcctttcagtacctcctggctgaggtctgatgggcttgtcaactttttaattctgtcactctgtgtaaaggtaactaactaggttatgctaattaccaactttgttttaaaaacatgcatgaggacttctagttaacttcctggtaaagaggggaaaaaaagagaagaagctctgtcatactacttcttgccattcccactctactctcaacccccccttytctcaaataaaaagaaaaaaaaaggaaatactatagcttactcagcaagaaggaaaaacaaaaagaactttaaaaaaaagtatttgtgtatagattggtgtccagaactgggacgcttgtggtaaaacacactttctagtgtagtttttctagggccttactagttgtatgtgaaggaaacaaagacaagtatacaatctctcactctcacacacgtacacacacacatacacacttttatcacaactaatacacaaagactaccaaatactgcagggcagctcatttttctactatg

SEQ ID NO: 414641 - DNA, 662 bp, Homo sapiens
tgttgttgctataacagaaggtggtctttcctctgtgttccagaacacaatcaggatcttaccatacttcactgcactggacyctgagaaaatatctacttgtgattaaaacatggcaaacacattctagacatatgagtttacaaaaaacacccttcgatgtaatggacaaaactgaatgagttagctcagttgttcccaaggtatgggctgtggagttattgcaagggattgcaatccttataaatcactttctaaactactaaacagtatcttgtccatatttaaatatatgtatatgcttttatgactagtaaaacataaagatatattaaatgattcttgaattcttagattttgacagtatacattgtattcaaacaacacactgagaaattgtttcatctcaagctctctcctttatgcactatactcttgctaaacgcctttcagctcctagaaaatgctatagtacactacttctcacttccagacctctgtacacgctgttcagtcagcccaaaatgcttttccccaccttctcatggctaagccctaaaatttcattaagtctcaacttaaatgttatttcctgtgaaaaacagccttgacaccccctctgttcttataaccctgagcctgtgttactcattagcccttat

SEQ ID NO: 414642 - DNA, 662 bp, Homo sapiens
tgttgttgctataacagaaggtggtctttcctctgtgttccagaacacaatcaggatcttaccatacttcactgcactggaccctgagaaaatatctacttgtgattaaaacatggcaaacacattctagacatatgagtttacaaaaaacacccttcgatgtaatggacaaaactgaatgagttagctcagttgttcccaaggtatgggctgtggagttattgcaagggattgcaatcctyataaatcactttctaaactactaaacagtatcttgtccatatttaaatatatgtatatgcttttatgactagtaaaacataaagatatattaaatgattcttgaattcttagattttgacagtatacattgtattcaaacaacacactgagaaattgtttcatctcaagctctctcctttatgcactatactcttgctaaacgcctttcagctcctagaaaatgctatagtacactacttctcacttccagacctctgtacacgctgttcagtcagcccaaaatgcttttccccaccttctcatggctaagccctaaaatttcattaagtctcaacttaaatgttatttcctgtgaaaaacagccttgacaccccctctgttcttataaccctgagcctgtgttactcattagcccttat

SEQ ID NO: 414643 - DNA, 662 bp, Homo sapiens
tgttgttgctataacagaaggtggtctttcctctgtgttccagaacacaatcaggatcttaccatacttcactgcactggaccctgagaaaatatctacttgtgattaaaacatggcaaacacattctagacatatgagtttacaaaaaacacccttcgatgtaatggacaaaactgaatgagttagctcagttgttcccaaggtatgggctgtggagttattgcaagggattgcaatccttataaatcactttctaaactactaaacagtatcttgtccatatttaaatatatgtatatgcttttatgactagtaaaacataaagatatattaaatgattcttgaattcttagattttgacagtatacattgtattcaaacaacacactgagaaattgtttcatctcaagctctctcctttatgcrctatactcttgctaaacgcctttcagctcctagaaaatgctatagtacactacttctcacttccagacctctgtacacgctgttcagtcagcccaaaatgcttttccccaccttctcatggctaagccctaaaatttcattaagtctcaacttaaatgttatttcctgtgaaaaacagccttgacaccccctctgttcttataaccctgagcctgtgttactcattagcccttat

SEQ ID NO: 414644 - DNA, 662 bp, Homo sapiens
tgttgttgctataacagaaggtggtctttcctctgtgttccagaacacaatcaggatcttaccatacttcactgcactggaccctgagaaaatatctacttgtgattaaaacatggcaaacacattctagacatatgagtttacaaaaaacacccttcgatgtaatggacaaaactgaatgagttagctcagttgttcccaaggtatgggctgtggagttattgcaagggattgcaatccttataaatcactttctaaactactaaacagtatcttgtccatatttaaatatatgtatatgcttttatgactagtaaaacataaagatatattaaatgattcttgaattcttagattttgacagtatacattgtattcaaacaacacactgagaaattgtttcatctcaagctctctcctttatgcactatactcttgctaaaygcctttcagctcctagaaaatgctatagtacactacttctcacttccagacctctgtacacgctgttcagtcagcccaaaatgcttttccccaccttctcatggctaagccctaaaatttcattaagtctcaacttaaatgttatttcctgtgaaaaacagccttgacaccccctctgttcttataaccctgagcctgtgttactcattagcccttat

SEQ ID NO: 414645 - DNA, 468 bp, Homo sapiens
actcccagtgcctaacacaatgactggcatatagaaggcattcaactattcagtgcagaagcamaaggtcaaaatgaagggctctgtggaatctttaccccttaaaaagaccctataaatacacttgaagtttgggaacaactgggttgagctatttacctaaaggattttcaaaactaattaagattcctgatatatagactacttcttaacccccactcacccctatatcagtcaaatatgggccaactccatgcaaagtagattattttttaatcaccttccctcccacctaccaaatatgaagttaaccaacacacacagagaggcatgtgtgcatgtgcagacatacacacacacagtcctcattccctcttgcacttttattggtctttcatcggttgttgataagactgactacataaaccaccagggacctggagccctgactaaaaaaaaaaaaaaatc

SEQ ID NO: 414646 - DNA, 468 bp, Homo sapiens
actcccagtgcctaacacaatgactggcatatagaaggcattcaactattcagtgcagaagcaaaaggtcaaaatgaagggctctgtggaatctttaccccttaaaaagaccctataaatacacttgaagtttgggaacaactgggttgagctatttacctaaaggattttcaaaactaattaagattcctgatatatagactacttcttaacccccactcacccctatatcagtcaaatatgggccaactccatgcaaagtagattattttttaatcaccttccctcccacctaccaaatatgaagttaaccaacacacacagagaggcatgtgtgcatgtgcagacatacacacacacagtcctcattccctcttgcacttttattrgtctttcatcggttgttgataagactgactacataaaccaccagggacctggagccctgactaaaaaaaaaaaaaaatc

SEQ ID NO: 414647 - DNA, 538 bp, Homo sapiens
agtgggaacacagctgctcactctacagtgtgggttgcctttgtgtctggaatgtgtctgacgtcctgatccctgtgcacatttcagggagccttgggaggacccctgaatcactgatggaattgggcagtgcatggagatggctcagcaggatgagggtaaatgcaggggcaagtccaggtcatactgagagacaatgagtggcgctgatgaggacaaagataaaatcaaaagtttgtgcttcatcttcaaaaactcaagctgataacaaacttggcctgatgagaaataataagtatttttctatttacatgagaatttaatctcaaaacagaaatcagaaaaatatgaagtccagggcataaaacctaaaactattgctcatatttattctttctaaatagagcaaagtgtamaatcttctccataagacatacattgtggttataaaaaggcaaaagtcttagtgagaatcattggtattccatagaagagtgaattaaacacagccaagggaagacccacgtctcatacttct

SEQ ID NO: 414648 - DNA, 552 bp, Homo sapiens
agcgaagaggtggttcaggggatcactctttcctacttgttcctctcacctcaaactcaccttctactgcacagcaacactgaggatcgccaaccaaccctgaccataaccttgatcttgccatgttctgttagtggaatgcaacccaaaatcaatggtgttaggtcatctcaacaaaatatatatcaaaccatattccataagaactgctcgtggccctgttcttttcagtatatgggaaaacaaaatggaaacaacaaaatagcatcaggtttacaaaacttcccaagatagatggtcacacatgttttcaggagacctctatataaatgactttgatcacttgataccttgaaaagaggtcttgkggcactagaatgacatctataagtgacaagtataaaatgtagtgctcagtgacattaaaaaacaaatcaacccacatagaggaagagctttggacgtagggatgtcaaactggtctagaatgtaatgaaaacccaagaaggtgccccagtaagaaagaggaaatcaatctaacaatgggatgca

SEQ ID NO: 414649 - DNA, 569 bp, Homo sapiens
ttagtggaatgcaacccaaaatcaatggtgttaggtcatctcaacaaaatatatatcaaaccatattccataagaactgctcgtggccctgttcttttcagtatatgggaaaacaaaatggaaacaacaaaatagcatcaggtttacaaaacttcccaagatagatggtcacacatgttttcaggagacctctatataaatgactttgatcacttgataccttgaaaagaggtcttgtggcactagaatgacatctataagtgacaagtataaaatgtagtgctcagtgacattaaaaaacaaatcaacccacatagaggaagagctttggacrtagggatgtcaaactggtctagaatgtaatgaaaacccaagaaggtgccccagtaagaaagaggaaatcaatctaacaatgggatgcagcagcaagaatactgagacaggaaagaaaatattttaaaaaaatgaattattcattcactttctagtggatacagaaaaaactgcagaagacccagaggatatcagggcaggctaaaagtttgatatcttacacctgtggaaaagcc

SEQ ID NO: 414650 - DNA, 569 bp, Homo sapiens
ttagtggaatgcaacccaaaatcaatggtgttaggtcatctcaacaaaatatatatcaaaccatattccataagaactgctcgtggccctgttcttttcagtatatgggaaaacaaaatggaaacaacaaaatagcatcaggtttacaaaacttcccaagatagatggtcacacatgttttcaggagacctctatataaatgactttgatcacttgataccttgaaaagaggtcttgtggcactagaatgacatctataagtgacaagtataaaatgtagtgctcagtgacattaaaaaacaaatcaacccacatagaggaagagctttggacgtagggatgtcaaactggtctagaatgtaatgaaaacccaagaaggtgccccagtaagaaagargaaatcaatctaacaatgggatgcagcagcaagaatactgagacaggaaagaaaatattttaaaaaaatgaattattcattcactttctagtggatacagaaaaaactgcagaagacccagaggatatcagggcaggctaaaagtttgatatcttacacctgtggaaaagcc

SEQ ID NO: 414651 - DNA, 569 bp, Homo sapiens
ttagtggaatgcaacccaaaatcaatggtgttaggtcatctcaacaaaatatatatcaaaccatattccataagaactgctcgtggccctgttcttttcagtatatgggaaaacaaaatggaaacaacaaaatagcatcaggtttacaaaacttcccaagatagatggtcacacatgttttcaggagacctctatataaatgactttgatcacttgataccttgaaaagaggtcttgtggcactagaatgacatctataagtgacaagtataaaatgtagtgctcagtgacattaaaaaacaaatcaacccacatagaggaagagctttggacgtagggatgtcaaactggtctagaatgtaatgaaaacccaagaaggtgccccagtaagaaagaggaaatcaatctaacaatgggatgcagcagcaagaatactgagacaggaaagaaaatattttaaaaaaatgaattattcattcactttctagtggatacagaaaaaactgcagaagacccrgaggatatcagggcaggctaaaagtttgatatcttacacctgtggaaaagcc

SEQ ID NO: 414652 - DNA, 486 bp, Homo sapiens
ccagggtagtcctgaactcatgacctcaaatgattcacctgtcttggcctcccaaatcacagattctttttaaagcaagagttgttmaaatttatctatcagtcgtgtttcatgtatagatgcctctaaacatttaatgtccatgttacctggtgatataagtccgtatcgcagcaacactcttagaaaattgtttgaccaatttttggagatttttttggggaaaaaattttgtttaactttgactcaggcagggaatatggcattatggtctacacgtagagggagattttggcctgtgggtctggaaagcagggtcatctaattctcaccaaagttaatctaggacaccctagaatattcctgtcagaatccttattcttgcactgagaatagttatgtccttgtgctatgactggacagtcatttgttcatatgtgaagtatgaattgcgtaatgtgacctgcttctctgaatttatttaca

SEQ ID NO: 414653 - DNA, 437 bp, Homo sapiens
acaatatttacgggcaacataaattctcatccagagatcggagtaaatattatatagtatatctgtagaaygaaatgtaccttgctgtttaaatgaataaattagttattatcataaaataaatgtcatgtaaagacatttattttatggtgtataaaattagaaaaacaagttattaaaaataacatgattttttgtaaaatgcttttattttgtttttaattgacataataattgcacatgtttatggggtacagtgtggtgctttagtgcatgtgtacattgcataatggtcaaatttaaaaattaaatgtattgatagaagaagtgtttggatatttgtatcctaaatgctaacagtgatgatatctggaatgtggaactgctggtaatttttccctttttcttttagagatttttgtacttatttttaataa

SEQ ID NO: 414654 - DNA, 437 bp, Homo sapiens
acaatatttacgggcaacataaattctcatccagagatcggagtaaatattatatagtatatctgtagaacgaaatgtaccttgctgtttaaatgaataaattagttattatcataaaataaatgtcatgtaaagacatttattttatggtgtataaaattagaaaaacaagttattaaaaataacatgattttttgtaaaatgcttttattttgtttttaattgacataataattgcacatgtttatggggtacagtgtggtgctttagtgcatgtgtacattgcataatggtcaaatttaaaaattaaatgtattgatagaaraagtgtttggatatttgtatcctaaatgctaacagtgatgatatctggaatgtggaactgctggtaatttttccctttttcttttagagatttttgtacttatttttaataa

SEQ ID NO: 414655 - DNA, 508 bp, Homo sapiens
tgaatcagatctggccagtgatatgctggacagaagatatctgaggttgagatacctgatttctcaactaagggaatgaactatgcagtacatgaaaaccaaccctcttcttagtgcctctgttttcctatcacttcccctatcccaatccattcttgctcttgccttagagattcttagattctgattttcctcgcaaaacatggccacaagcctaccgcctctctgtctggtagaagtayaagaatcaagagtcaaggccaaaaaggtctgagggaaggagcacaattgctcccagctgccctctcttcctgtccccaggtcctctccttcaccctcactctaggcattctacctccaaacgttcaagttaacatgtgctaaaggaatgattttctaaatcacttacctgtcactgtgaaactagattaatccacatactggtttagtaaaacctcacacaaaccagcatatacacagaagacagcaatcaagatgaagaaaacgt

SEQ ID NO: 414656 - DNA, 610 bp, Homo sapiens
ccaatccattcttgctcttgccttagagattcttagattctgattttcctcgcaaaacatggccacaagcctaccgcctctctgtctggtagaagtataagaatcaagagtcaaggccaaaaaggtctgagggaaggagcayaattgctcccagctgccctctcttcctgtccccaggtcctctccttcaccctcactctaggcattctacctccaaacgttcaagttaacatgtgctaaaggaatgattttctaaatcacttacctgtcactgtgaaactagattaatccacatactggtttagtaaaacctcacacaaaccagcatatacacagaagacagcaatcaagatgaagaaaacgtttgaaactgtgtcattaagaaaacgtgatgaagaaattggtaatgattattccaggaaataacagtcccttctagtctcctcagctcccttcctctcacccttctcctacctatccatcttctaaggcaccactaatattcaaagatttaggatctaagcagtgcaccaaaagtcctctgattttactcttttgtcccacagtacttgttcctttgtctgagtgtccatagttattatctgtgccc

SEQ ID NO: 414657 - DNA, 610 bp, Homo sapiens
ccaatccattcttgctcttgccttagagattcttagattctgattttcctcgcaaaacatggccacaagcctaccgcctctctgtctggtagaagtataagaatcaagagtcaaggccaaaaaggtctgagggaaggagcacaattgctcccagctgccctctcttcctgtccccaggtcctctccttcaccctcactctaggcattctacctccaaacgttcaagttaacatgtgctaaaggaakgattttctaaatcacttacctgtcactgtgaaactagattaatccacatactggtttagtaaaacctcacacaaaccagcatatacacagaagacagcaatcaagatgaagaaaacgtttgaaactgtgtcattaagaaaacgtgatgaagaaattggtaatgattattccaggaaataacagtcccttctagtctcctcagctcccttcctctcacccttctcctacctatccatcttctaaggcaccactaatattcaaagatttaggatctaagcagtgcaccaaaagtcctctgattttactcttttgtcccacagtacttgttcctttgtctgagtgtccatagttattatctgtgccc

SEQ ID NO: 414658 - DNA, 571 bp, Homo sapiens
ggtttagtaaaacctcacacaaaccagcatatacacagaagacagcaatcaagatgaagaaaacgtttgaaactgtgtcattaagaaaaygtgatgaagaaattggtaatgattattccaggaaataacagtcccttctagtctcctcagctcccttcctctcacccttctcctacctatccatcttctaaggcaccactaatattcaaagatttaggatctaagcagtgcaccaaaagtcctctgattttactcttttgtcccacagtacttgttcctttgtctgagtgtccatagttattatctgtgcccctacactgggatattacaaactgttttattttacacatctctgtatgcttcatctccccagcaagacttcagaagactgccaccatgtcttatgcaggagaaactgcattcactgtcagacagtctctgggtacgtatacttgtgaataaagaagtcaggtaacacaggcctcttgggcttttctgtctattcacaatacccagtacagtgatcagttatagtagcctgctcaataaatactagtgtgataaaaattaa

SEQ ID NO: 414659 - DNA, 610 bp, Homo sapiens
ccaatccattcttgctcttgccttagagattcttagattctgattttcctcgcaaaacatggccacaagcctaccgcctctctgtctggtagaagtataagaatcaagagtcaaggccaaaaaggtctgagggaaggagcacaattgctcccagctgccctctcttcctgtccccaggtcctctccttcaccctcactctaggcattctacctccaaacgttcaagttaacatgtgctaaaggaatgattttctaaatcacttacctgtcactgtgaaactagattaatccacatactggtttagtaaaacctcacacaaaccagcatatacacagaagacagcaatcaagatgaagaaaacgtttgaaactgtgtcattaagaaaacgtgatgaagaaattggtaatgattattccaggaaataacagtcccttctagtctcctcagctcccttcctctcacccttctcctacctatccrtcttctaaggcaccactaatattcaaagatttaggatctaagcagtgcaccaaaagtcctctgattttactcttttgtcccacagtacttgttcctttgtctgagtgtccatagttattatctgtgccc

SEQ ID NO: 414660 - DNA, 571 bp, Homo sapiens
ggtttagtaaaacctcacacaaaccagcatatacacagaagacagcaatcaagatgaagaaaacgtttgaaactgtgtcattaagaaaacgtgatgaagaaattggtaatgattattccaggaaataacagtcccttctagtctcctcagctcccttcctctcacccttctcctacctatccatcttctaaggcaccactaatattcaaagatttaggatctaagcagtgcaccaaaagtcctctgattttactcttttgtcccacagtacttgttcctttgtctgagtgtccatagttattatctgtgcccctacactgggatattacaaactgttttattttacacatctctgtatgcttcatctccccagcaagacttcagaagactgccaccatgtcttatgcaggagaaactgcattcactgtcagacagtctctgggtacgtatacttgtgaataargaagtcaggtaacacaggcctcttgggcttttctgtctattcacaatacccagtacagtgatcagttatagtagcctgctcaataaatactagtgtgataaaaattaa

SEQ ID NO: 414661 - DNA, 571 bp, Homo sapiens
ggtttagtaaaacctcacacaaaccagcatatacacagaagacagcaatcaagatgaagaaaacgtttgaaactgtgtcattaagaaaacgtgatgaagaaattggtaatgattattccaggaaataacagtcccttctagtctcctcagctcccttcctctcacccttctcctacctatccatcttctaaggcaccactaatattcaaagatttaggatctaagcagtgcaccaaaagtcctctgattttactcttttgtcccacagtacttgttcctttgtctgagtgtccatagttattatctgtgcccctacactgggatattacaaactgttttattttacacatctctgtatgcttcatctccccagcaagacttcagaagactgccaccatgtcttatgcaggagaaactgcattcactgtcagacagtctctgggtacgtatacttgtgaataaagaagtcaggtaacacaggcctcttgggcttttctgkctattcacaatacccagtacagtgatcagttatagtagcctgctcaataaatactagtgtgataaaaattaa

SEQ ID NO: 414662 - DNA, 571 bp, Homo sapiens
ggtttagtaaaacctcacacaaaccagcatatacacagaagacagcaatcaagatgaagaaaacgtttgaaactgtgtcattaagaaaacgtgatgaagaaattggtaatgattattccaggaaataacagtcccttctagtctcctcagctcccttcctctcacccttctcctacctatccatcttctaaggcaccactaatattcaaagatttaggatctaagcagtgcaccaaaagtcctctgattttactcttttgtcccacagtacttgttcctttgtctgagtgtccatagttattatctgtgcccctacactgggatattacaaactgttttattttacacatctctgtatgcttcatctccccagcaagacttcagaagactgccaccatgtcttatgcaggagaaactgcattcactgtcagacagtctctgggtacgtatacttgtgaataaagaagtcaggtaacacaggcctcttgggcttttctgtstattcacaatacccagtacagtgatcagttatagtagcctgctcaataaatactagtgtgataaaaattaa

SEQ ID NO: 414663 - DNA, 553 bp, Homo sapiens
atcgttttaaactggcattacttgttgctttgtagcttcttcaaataagcctctgtcgtctatctcacatgatttttttcatatccttctccctatctgcagtgtggtatctgtgcttagacccactgctcaatcggaaggtattttaatgtcttgactgtctgaggctcctaaaatacatgaagaggagttatacaggctcttataactttttcttcaacgtttatgcaaatttcaagtagcaatatttgagagatgaagtctgagtttacgycctaggatcttggctgtggttggctgctgttgattcatgctacatgcgctctggaagaggctcagtaaaatgaacaaagcaaagttttctaaaatgactgcctgcattattaccaaaaataggagaattgagggcagacaaagagacatcagggatttgcaataattctcatagcgccctgcaatttcaaacaaaactttctctaaattttgtattccattttttgggaccaagccatgaaaaaaaaatccaaacaaacagaagaagtgcggaagcttc

SEQ ID NO: 414664 - DNA, 261 bp, Homo sapiens
attcgactccttcaggttatcttgaactgcctgacttaggccagccctacagcagtgctgtttactcattggaggaacagtaccttggcttggctcttgacgtggacagtgagtaccttactatgaaggtgataagcctccacctggtcttccagataggggtgatattcctgttccaagtggcccttactgacccgagagatgtcattgccrcaggcaggacctatgggcgcatataggttgtaatgaaactgtagtctc

SEQ ID NO: 414665 - DNA, 497 bp, Homo sapiens
ttgtgaacagctacttctgtgttgacatctggagactcctggttcagggaaaacagagcgggctgacattatcgattacatcttttcaagcaagcctgaattattcctactaacattgctgttggttttcattgcagtagatatttaggtttccatttcttcctccccttatcatttactaacctactgtaggtggaccagacttcaaaaactgtattctcatggcgactgcatggaaacttgagcacattttatggaaaattattgagcacagtcttttcatgatcactgtatgctgtgtgtcctgagggcactaactcagagtgtcctgttactccctcatcagtgtgtcacctggacaattcactgagctcgttctctctctctctctctgtgtgtgtgtgtgtgtgtgtgtgygtgtgtgtgtgtgtgtgtgtgtgtccatctgtctttctctttcattcttttccatttggccctgttctgtcccaacatga

SEQ ID NO: 414666 - DNA, 497 bp, Homo sapiens
ttgtgaacagctacttctgtgttgacatctggagactcctggttcagggaaaacagagcgggctgacattatcgattacatcttttcaagcaagcctgaattattcctactaacattgctgttggttttcattgcagtagatatttaggtttccatttcttcctccccttatcatttactaacctactgtaggtggaccagacttcaaaaactgtattctcatggcgactgcatggaaacttgagcacattttatggaaaattattgagcacagtcttttcatgatcactgtatgctgtgtgtcctgagggcactaactcagagtgtcctgttactccctcatcagtgtgtcacctggacaattcactgagctcgttctctctctctctctctgtgtgtgtgtgtgtgtgtgtgtgcgtgtgtgtgtgtgtgtgtgtgtgtcyatctgtctttctctttcattcttttccatttggccctgttctgtcccaacatga

SEQ ID NO: 414667 - DNA, 473 bp, Homo sapiens
ttgctgttggttttcattgcagtagatgtttaggtttccatttcttcctccccttatcatttactarcgtaccataggttgaccatacttcaaaagctgtactctcatggccactgcatcgaattttgagcatattttatggaaaactattgagctcactcttttcatgatcacagtttgctgtgtgtcatgagggcactaactcagagtgtccttttactcccttaccagtatgtcacctggccaattcactaggtcactttctctctgtctctgtctctgtctctctctctgtctctgtctctctctctctctctctctgtctttctctttcattgttttctacctggccctgttctatcccaacataaaggcaataatttgttacctcattaatggatctgtcctttttcttttcaaactcttccttaacgttagccatgaaatctagctggggctgtgcggtttctgat

SEQ ID NO: 414668 - DNA, 469 bp, Homo sapiens
gtcattgctgttggttttcattgcagtagatgtttaggtttccatttcttcctccccttatcatttmctaacgtaccataggttgaccatacttcaaaagctgtactctcatggccactgcatcgaattttgagcatattttatggaaaactattgagctcactcttttcatgatcacagtttgctgtgtgtcatgagggcactaactcagagtgtccttttactcccttaccagtatgtcacctggccaattcactaggtcactttctctctgtctctgtctctgtctctctctctgtctctgtctctctctctctctctctctttctctttcattgttttctacctggccctgttctatcccaacataaaggcaataatttgttacctcattaatggatctgtcctttttcttttcaaactcttccttaacgttagccatgaaatctagctggggctgtgtggtttc

SEQ ID NO: 414669 - DNA, 560 bp, Homo sapiens
gctggaattgtttctgggtgtgtctgtgagggtgtttcyggaggagactgacatgtgagtcagtggactgagagaggaagacctgccctcagcgtgggcgagcaccatccaatcggctgcaggcacagctagaacaaagcaggtggaagaaggaggacattcagctttcttttctttttttgctcacactctctttctctcttttgtagcagtgtaccctttcctcttcctgcctttgcacatcagactccagggtctttggcctttggactctgggacttgcaccagtggcctctcaggggctctcaggcatctggcctacattgtcagcttctctagttttgaggctttcagaattggaccaagtcatgccactgcctgccctaggagccatgctaccaacttctctaaaagccatgcttctatcattctccagcttatagatggactatcctggtactttttcatcctctgagccaattctccctaataaattccctttctttatatattatagaaacgtgtgtcaggaaaccaatatgtttcctattggttctgtc

SEQ ID NO: 414670 - DNA, 560 bp, Homo sapiens
gctggaattgtttctgggtgtgtctgtgagggtgtttccggaggagactgacatgtgagtcagtggactgagagaggaagacctgccctcagcgtgggcgagcaccatccaatcggctgcaggcacagctagaacaaagcaggtggaagaaggaggacattcagctttcttttctttttttgctcacactctctttctctcttttgtagcagtgtaccctttcctcttcctgcctttgcacatcagactccagggtctttggccttyggactctgggacttgcaccagtggcctctcaggggctctcaggcatctggcctacattgtcagcttctctagttttgaggctttcagaattggaccaagtcatgccactgcctgccctaggagccatgctaccaacttctctaaaagccatgcttctatcattctccagcttatagatggactatcctggtactttttcatcctctgagccaattctccctaataaattccctttctttatatattatagaaacgtgtgtcaggaaaccaatatgtttcctattggttctgtc

SEQ ID NO: 414671 - DNA, 565 bp, Homo sapiens
atcctggtactttttcatcctctgagccaattctccctaataaattccctttctttatatattatagaaacgtgtgtcaggaaaccaatatgtttcctattggttctgtctctctggagagactgactgaaaatcggtacgaggagtggctataaagacacttgaaaatgtggaagtggctttggaactgggtaacaggcaaaggttggaagagtttcaggactcagaagaagacagaaagatgaaggaaagtttggaacttcttagagactagttaagtgttgtaaccaaaatgctgatagaaatacagataggaaaggccatgcagaggaggtatcagatggaaatgaggaacttattgggaactggagcaaaggttgctcttactaggcatagcaaagtacttggctgccttgtgtccatgcactagagtttcrtggatggctgaacttaagagggataatctagggtatatgataggagacatttctaagcagcaaaaggtctatgacatttagtggacagatgccagggatgctgcacaatctacagtgtgtaggagagt

SEQ ID NO: 414672 - DNA, 565 bp, Homo sapiens
atcctggtactttttcatcctctgagccaattctccctaataaattccctttctttatatattatagaaacgtgtgtcaggaaaccaatatgtttcctattggttctgtctctctggagagactgactgaaaatcggtacgaggagtggctataaagacacttgaaaatgtggaagtggctttggaactgggtaacaggcaaaggttggaagagtttcaggactcagaagaagacagaaagatgaaggaaagtttggaacttcttagagactagttaagtgttgtaaccaaaatgctgatagaaatacagataggaaaggccatgcagaggaggtatcagatggaaatgaggaacttattgggaactggagcaaaggttgctcttactaggcatagcaaagtacttggctgccttgtgtccatgcactagagtttcgtggatggctgaacttaagagggataatctagggtatatgataggagacatttctaagcagcaaaaggtctatgacatttagtggacagatgccagggatgcygcacaatctacagtgtgtaggagagt

SEQ ID NO: 414673 - DNA, 552 bp, Homo sapiens
ccaaggaagctacttctggagaaggtaaaggactccccagtggctttgccagatcttccatagactgtgattgaggcagcttccatccaattttccctccccctctctcactctgtctctctcagcttccttactatacccattcacacacatacatctcctcccctaagaaaacccttgcatgtttaatcctctcttagcatctgtattagtcctttttcatgctgctgatacatacctgagactgggcaatttgcaaaagaaagaggtttaatggcctcccacatggccggggaggcctcacaatcatggcgaaggaaaggaggagcaagtcacctcttacacggatggcagcaggcaaagaaagagagcttgtgcagggaaactcctgtttttaataccatcagatctcatgacacttattcactmtcatgagaacagcatgggaaagacccacccccgtgattcaattacctcccaccggtttcctcccctaacacatgggaattcaagatgagatttaggtggggacacagccaaaccatattagca

SEQ ID NO: 414674 - DNA, 586 bp, Homo sapiens
ccagctttgcctgacaatcctgtccttaagggtaattgtctagttacctcctgtatcatagttgggttacaagatggacattctagaaattaataattgggctgtttaartcacattgacgaatgcatttctctctttgatacaatatatttctgaacaagaagtggcaaaaatcaataaattcatatttaacttacagaatttcataaaaatttttgttgtgctgcagagcaaggaaacatgctgccagtctgttcattttgataagaacattcttctttgaattacaattttattatgtatttatctgtattatacaaaagcctgtggcaatcagaggaggatgtttgaaacatctttggtttcatagaaatttgcatatcaaaaatatgcaatgctgtagtgatatattgcatagaaatatacagttcaataagcatagtatttttcttggcacttttgaatgaaatacttaaagcagtactttgcctgagttctaaatgtttttcacagaaatcttccacatctatctttcatttctatttcatataaagaggtagagaaatgtcgtgatgtaatattttct

SEQ ID NO: 414675 - DNA, 597 bp, Homo sapiens
gtgtttaacctgtccatttagtttttaattttcattatattttttatttctaaaagatctcttaaattcagtttcaatctgcttaatataagatacatacactgtctcaatttatattcctggcacacctcattgattttttaaacatattaaacacagcttttatagttatataatcrtcctaatatctgaaatctttatgggcataattctgtttctgctcatgatgtttatttcctcatgagttttgtaagagtcttacttttttctcattttggatgaaattttacctgtggccattctttgagacatgggctgaatgtgggtttctccaaagacactttgccttcgtcttgtgtttggtggtaataccaacatgggataactataaaataaattatcagtttcatgtgtgggttttttttaacttatacttacagtgaaaatttaaaccacaaattcatgtgaagatggccttctcatttttcctctaaatggcaccgagtttgaggcaggaaaatttcctggttgtctcctgctgaggaacaggtttttatctagtttatcctttcactgaaattatagtccttcgtatct

SEQ ID NO: 414676 - DNA, 597 bp, Homo sapiens
gtgtttaacctgtccatttagtttttaattttcattatattttttatttctaaaagatctcttaaattcagtttcaatctgcttaatataagatacatacactgtctcaatttatattcctggcacacctcattgattttttaaacatattaaacacagcttttatagttatataatcatcctaatatctgaaatctttatgggcataattctgtttctgctcatgatgtttatttcctcatgagttttgtaagagtcttacttttttctcattttggatgaaattttacctgtggccattctttgagacatgggctgaatgtgggtttctccaaagacactttgccttcgtcttgtgtttggtggtaataccaacatgggataactataaaataaattatcagtttcatgtgtgggttttttttaacttatacttacagtgaaaatttaaaccacaaattcatgtgaagatggccttctcatttttcctctaaatrgcaccgagtttgaggcaggaaaatttcctggttgtctcctgctgaggaacaggtttttatctagtttatcctttcactgaaattatagtccttcgtatct

SEQ ID NO: 414677 - DNA, 506 bp, Homo sapiens
caagttgttttaaattcaaccttataaagcctgagtttatacatgaaagtaatatagtcttgtttgataaaggcactttttcaaaaagtatgaattttctcacattcattgtgygtgcgcgtggtgctgtgtgaggttttgtcacctgcctgaaaatcttttgtctttcatgcatttaataaacaggacttattttacaatgaattacaatttctctcagtctccatgcactacagatgattcttcttaaagcgatttgtggagttactcttagaaaagacaatagagttgagaatgaatttttttttttttttaaaagtcacaagacactgaagatcactcagctaacaatcgaatttggtcctactaaccctgagcaataccatctagtaaaaggcactgtcttgatggatcattcatggaaaactaaagtaattaccatcattctaatatttctatttaaatgcatgaaaaactgattagctgaaggcagccctatatatagc

SEQ ID NO: 414678 - DNA, 503 bp, Homo sapiens
tagcaaacaagaaatagaagagctttcagtgtttgcttataaatcagaaactattcttcgtctttcaagcagaggtgatttaatacaggtgattgattacacaagtgatggaagccaaaccaggcttggtgagtcagcagcccatatttaatatatttatatattaaatatttaattatacttcaaaacttttatgtacactataatctcattattgttttctatactattatatgcaatatacaaatacagaaatacagaaatgtacctcagtttgaaagagaayttgaatatgaggcaaaaagatacccccaaattatagttacattacaagaattgaatttaagaaggaagaagcaaattgcaagagataaggccaagcctctttagtaatgatcattctaaatccaattggtataaatttagggacgcacaactggattgcagtgtaactaagaaagtttgtgtgtcaataaccatatttatcctatgtgaagaaataa

SEQ ID NO: 414679 - DNA, 503 bp, Homo sapiens
tagcaaacaagaaatagaagagctttcagtgtttgcttataaatcagaaactattcttcgtctttcaagcagaggtgatttaatacaggtgattgattacacaagtgatggaagccaaaccaggcttggtgagtcagcagcccatatttaatatatttatatattaaatatttaattatacttcaaaacttttatgtacactataatctcattattgttttctatactattatatgcaatatacaaatacagaaatacagaaatgtacctcagtttgaaagagaacttgaatatgaggcaaaaagatacccccaaattatagttacattacaagaattgaatttaagaaggaagaagcaaattgcaagagataaggccaagcctctttagtaatgatcattctaaatccaattggtataaatttaggracgcacaactggattgcagtgtaactaagaaagtttgtgtgtcaataaccatatttatcctatgtgaagaaataa

SEQ ID NO: 414680 - DNA, 515 bp, Homo sapiens
taaaagtataaaccaaatattagaagtgtgtctagttcaaagggaggaaaaccatcaaaaacatttttagtgcaatatttaacatgagctatacaacccttcctaaacaccaaaggcacacacagacacacacacagacacacacacacacacactctcacacttacgaagaatacaaatgactagaacsaagaaatgtaaatacattctgctacatatggtaaacatagcctacaatgtggaagagattagaaaataaacatggaaatgaaatgtttttattaattcacatcagacccaccaaaaccaatcagcataatcaaatattataacactgaatgtaaaaaacaatccaaaagtccagagtgataggcaaaaggttttaattgtatagattaaaattaactttggacaaaaattaaaactcaggcagagaatgttttcttctttttgcaacagcagacactagtaaaaacaaaggcacagtaaaaattgagacccaaattttgcagcgt

SEQ ID NO: 414681 - DNA, 515 bp, Homo sapiens
taaaagtataaaccaaatattagaagtgtgtctagttcaaagggaggaaaaccatcaaaaacatttttagtgcaatatttaacatgagctatacaacccttcctaaacaccaaaggcacacacagacacacacacagacacacacacacacacactctcacacttacgaagaatacaaatgactagaacgaagaaatgtaaatacattctgctacrtatggtaaacatagcctacaatgtggaagagattagaaaataaacatggaaatgaaatgtttttattaattcacatcagacccaccaaaaccaatcagcataatcaaatattataacactgaatgtaaaaaacaatccaaaagtccagagtgataggcaaaaggttttaattgtatagattaaaattaactttggacaaaaattaaaactcaggcagagaatgttttcttctttttgcaacagcagacactagtaaaaacaaaggcacagtaaaaattgagacccaaattttgcagcgt

SEQ ID NO: 414682 - DNA, 600 bp, Homo sapiens
tcatagcctttttaaaacatccttgggtggtagcaatgaaggctactcacaaggatggggacagaggtcatcagggataccataatcaatgtactgtgcaaaaatagtgcagaggagattggttagtcctacataaagtccaactacatgtatggctaactattctcaagtcagggttcgcagaagctaaggtcctaacatttggattatttttatattattatctggatcaaataatatgccttcagccaaaatcaaactctgttcacctgtgaatagtattcctgtacccaaattcctgtacacatcactgagaattgtctaaaccyaagtgcctcaaaaggtcctaaacccttgactcatagccaggatatttctttttttttattattatactttaagttttagggtacatgtgcacaacgtgcaggtttgttacatatgtatacatgtgccatgttggtgtgctgcacccattaactcgtcatttaacattaggttctaataagctcagaaactagcactgtgagggaaatatctaaatatggagattataaatgcctatcattgccatttccagagaacacacctgaggccaaa

SEQ ID NO: 414683 - DNA, 600 bp, Homo sapiens
tcatagcctttttaaaacatccttgggtggtagcaatgaaggctactcacaaggatggggacagaggtcatcagggataccataatcaatgtactgtgcaaaaatagtgcagaggagattggttagtcctacataaagtccaactacatgtatggctaactattctcaagtcagggttcgcagaagctaaggtcctaacatttggattatttttatattattatctggatcaaataatatgccttcagccaaaatcaaactctgttcacctgtgaatagtattcctgtacccaaattcctgtacacatcactgagaattgtctaaacctaagtgcctcaaaaggtcctaaacccttgactcatagccaggatatttcttttwttttattattatactttaagttttagggtacatgtgcacaacgtgcaggtttgttacatatgtatacatgtgccatgttggtgtgctgcacccattaactcgtcatttaacattaggttctaataagctcagaaactagcactgtgagggaaatatctaaatatggagattataaatgcctatcattgccatttccagagaacacacctgaggccaaa

SEQ ID NO: 414684 - DNA, 550 bp, Homo sapiens
acaggttctggcatcttgtccatggcaaatgctggacccaacacaaatggttcccagtttttcatctgcrctgccaagactgagtggttggatggcaagcatgtggcctttggcaaggtgaaagaacgtgtgaatattgtggaagccatggagcactttgggtacaggaatagcaagaccagcaagaagatcaccattgctgactgtggacaattctaatgagtttgacttgtgttttattttcaccaccagacccattccttctgtagctcaggagagcacccctccaccacatttgcttgcaatatcctagaatctctgtgctcttgctgcagttccctttgggttccatgttttccttgttcccttccatgcctagctggattgcagagttgagttaagtttatgattatgaaataaaaactaagtaacaacaacaacaacaaaaaagctcagtggttgccaggagtttggggatgggtagggagataaatagttctgaaacaggcgatttttaggggattgaaaatacgttggtaataatgtaatg

SEQ ID NO: 414685 - DNA, 544 bp, Homo sapiens
aatggttcccagtttttcatctgcactgccaagactgagtggttggatggcaagcatgtggcctttggcaaggtgaaagaacgtgtgaatattgtggaagccatggagcactttgggtacaggaatagcaagaccagcaagaagatcaccattgctgactgtggacaattctaatgagtttgacttgtgttttattttcaccaccagacccattccttctgtagctcaggagagcacccctccaccacatttgcttgcaatatcctagaatctytgtgctcttgctgcagttccctttgggttccatgttttccttgttcccttccatgcctagctggattgcagagttgagttaagtttatgattatgaaataaaaactaagtaacaacaacaacaacaaaaaagctcagtggttgccaggagtttggggatgggtagggagataaatagttctgaaacaggcgatttttaggggattgaaaatacgttggtaataatgtaatgatgggtacatgacattatgcgttttgcaaaactcctaga

SEQ ID NO: 414686 - DNA, 554 bp, Homo sapiens
gcaaaaccctgactagcagaggtgttagctgagggcacatggccatagatgccaatagtgacctgctggccacttgcagaaaggagagccttgacatccaaacacattgtttctcttgtattgtcctgtgcatacttatgtatcttaacaactttccttcyttcctctccatttatccctctttttaaaacagggcttattgagggtgattaacttaatttttaaatgatatatggcagaatgtcaagagagtatagtgaagaacttcgtagaggaatggacataacccagaattcttagacttagagtacatgctgtgattgagaattttttattgtttcattgttcaagagattgtaggtacatgttcaattattagagaaatagttgcactctgttagaaggaagcttgggtctttcgtgtttactttcaaaagggaaagtttatattgatattgagcaagttaaagcatgaatatttattatttgatgtttgtttctgtgtttgaggaattcctcagcctctcagttttgatgaaaacaagaaaccacct

SEQ ID NO: 414687 - DNA, 548 bp, Homo sapiens
aagaacttcgtagaggaatggacataacccagaattcttagacttagagtacatgctgtgattgagaattttttattgtttcattgttcaagagattgtaggtacatgttcaattattagagaaatagttgcactctgttagaaggaagcttgggtctttcrtgtttactttcaaaagggaaagtttatattgatattgagcaagttaaagcatgaatatttattatttgatgtttgtttctgtgtttgaggaattcctcagcctctcagttttgatgaaaacaagaaaccacctcctgctttagaagctaaaatgccaaatgcttgctttctcagcctcctttgcagctagggtacaagcatatgacttaggttttgccaatctgtttgccagtgctgaatttcgacttcggaattaataaaaaaagaagcagattcagttatgctttctcttgtttctggtggaggccatgtagcagctgctacaatatctgttgcaaagcaaacaagtgggagtggtgctggtggctttgcagttagcctaggat

SEQ ID NO: 414688 - DNA, 548 bp, Homo sapiens
aagaacttcgtagaggaatggacataacccagaattcttagacttagagtacatgctgtgattgagaattttttattgtttcattgttcaagagattgtaggtacatgttcaattattagagaaatagttgcactctgttagaaggaagcttgggtctttcgtgtttactttcaaaagggaaagtttatattgatattgagcaagtkaaagcatgaatatttattatttgatgtttgtttctgtgtttgaggaattcctcagcctctcagttttgatgaaaacaagaaaccacctcctgctttagaagctaaaatgccaaatgcttgctttctcagcctcctttgcagctagggtacaagcatatgacttaggttttgccaatctgtttgccagtgctgaatttcgacttcggaattaataaaaaaagaagcagattcagttatgctttctcttgtttctggtggaggccatgtagcagctgctacaatatctgttgcaaagcaaacaagtgggagtggtgctggtggctttgcagttagcctaggat

SEQ ID NO: 414689 - DNA, 554 bp, Homo sapiens
gcaaaaccctgactagcagaggtgttagctgagggcacatggccatagatgccaatagtgacctgctggccacttgcagaaaggagagccttgacatccaaacacattgtttctcttgtattgtcctgtgcatacttatgtatcttaacaactttccttccttcctctccatttatccctctttttaaaacagggcttattgagggtgattaacttaatttttaaatgatatatggcagaatgtcaagagagtatagtgaagaacttcgtagaggaatggacataacccagaattcttagacttagagtacatgctgtgattgagaattttttattgtttcattgttcaagagattgtaggtacatgttcaattattagagaaatagttgcactctgttagaaggaagcttgggtctttcgtgtttactttcaaaagggaaagtttatattgatattgagcaagttaaagcatgaatatttattatttgatgtttgttkctgtgtttgaggaattcctcagcctctcagttttgatgaaaacaagaaaccacct

SEQ ID NO: 414690 - DNA, 548 bp, Homo sapiens
aagaacttcgtagaggaatggacataacccagaattcttagacttagagtacatgctgtgattgagaattttttattgtttcattgttcaagagattgtaggtacatgttcaattattagagaaatagttgcactctgttagaaggaagcttgggtctttcgtgtttactttcaaaagggaaagtttatattgatattgagcaagttaaagcatgaatatttattatttgatgtttgtttctgtgtttgaggaattcctcagcctctcagttttgaygaaaacaagaaaccacctcctgctttagaagctaaaatgccaaatgcttgctttctcagcctcctttgcagctagggtacaagcatatgacttaggttttgccaatctgtttgccagtgctgaatttcgacttcggaattaataaaaaaagaagcagattcagttatgctttctcttgtttctggtggaggccatgtagcagctgctacaatatctgttgcaaagcaaacaagtgggagtggtgctggtggctttgcagttagcctaggat

SEQ ID NO: 414691 - DNA, 607 bp, Homo sapiens
caagttaaagcatgaatatttattatttgatgtttgtttctgtgtttgaggaattcctcagcctctcagttttgatgaaaacaagaaaccacctcctgctttagaagctaaaatgccaaatgcttgctttctcagcctcctttgcagctagggtacaagcatatgacttaggttttgccaatctgtttgccagtgctgaatttcgacttcggaattaataaaaaaagaagcagattcagttatgctttctcttgtttctggtggaggccatgtagcagctgctacaatatctgttgcaaagcraacaagtgggagtggtgctggtggctttgcagttagcctaggattgagcaattgctgcaattgttgctctctgcatctttggtgttacttcttactggtggtgacagtggtttcctccctggatgagttctacagcatggtttggggtacatttcctggctgcctagctttgatctggctctctagccttctcaacagttctacaagttccccactatttctgtgataaacctatttattgttaatgtcagccataattggcttctgtggtttatattttttaaaattccaagatataccagcg

SEQ ID NO: 414692 - DNA, 607 bp, Homo sapiens
caagttaaagcatgaatatttattatttgatgtttgtttctgtgtttgaggaattcctcagcctctcagttttgatgaaaacaagaaaccacctcctgctttagaagctaaaatgccaaatgcttgctttctcagcctcctttgcagctagggtacaagcatatgacttaggttttgccaatctgtttgccagtgctgaatttcgacttcggaattaataaaaaaagaagcagattcagttatgctttctcttgtttctggtggaggccatgtagcagctgctacaatatctgttgcaaagcaaacaagtgggagtggtgctggtggctttgcagttagcctaggattgagcaattgctgcaattgttgctstctgcatctttggtgttacttcttactggtggtgacagtggtttcctccctggatgagttctacagcatggtttggggtacatttcctggctgcctagctttgatctggctctctagccttctcaacagttctacaagttccccactatttctgtgataaacctatttattgttaatgtcagccataattggcttctgtggtttatattttttaaaattccaagatataccagcg

SEQ ID NO: 414693 - DNA, 588 bp, Homo sapiens
tacaatggacaaaatgcaacaaattgaattgagctaaagaccaaatatatattaagcctggctggtcttaaaaatgtaactggatacagccaggcatggtggctcacgcctataatcccagcactttgggatcctgaggtgggcagatcacctgaagtcaggagtttgagaccagcctggccagcatggtgaaaccccatctctactaaaaatgcaaaaattagctgggtgtggtggtatgcccctgtaatcccagctactggggaggttgaggcaggagaatcacttgaacctgggaggcagaggttgcagtgagccsagatcatgccaatgcactccagctttggcaacagagtgagactttgtttcaaaataaaaaaataaaaataaaaaaataaaaatgtaactggatagacctaaggttcttgaataagcagaaaataatttaggtaaaaaccaaataataaactaacattctgaaaggtttaggatttggaggcccaaatgtcttagctaaaagtgttcattctaacctcacaggaaaattgaaatatgaaaatatacagaaaaatcttaggcagtatatgt

SEQ ID NO: 414694 - DNA, 588 bp, Homo sapiens
tacaatggacaaaatgcaacaaattgaattgagctaaagaccaaatatatattaagcctggctggtcttaaaaatgtaactggatacagccaggcatggtggctcacgcctataatcccagcactttgggatcctgaggtgggcagatcacctgaagtcaggagtttgagaccagcctggccagcatggtgaaaccccatctctactaaaaatgcaaaaattagctgggtgtggtggtatgcccctgtaatcccagctactggggaggttgaggcaggagaatcacttgaacctgggaggcagaggttgcagtgagccgagatcatgccaatgcactccagctttggcaacagagtgagactttgtttcaaaataaaaaaataaaaataaaaaaataaaaatgtaactggatagacctaaggwtcttgaataagcagaaaataatttaggtaaaaaccaaataataaactaacattctgaaaggtttaggatttggaggcccaaatgtcttagctaaaagtgttcattctaacctcacaggaaaattgaaatatgaaaatatacagaaaaatcttaggcagtatatgt

SEQ ID NO: 414695 - DNA, 447 bp, Homo sapiens
tatcaacagtgtacacgtgagaaaaaacattttacatagattttctgcgacagaaaacagcatctcattagacatcccaagttttttcatttggaacacacacccattccccagtataytaggggtaataataatttaaagagtttaattactttttactactagaaaactaattttatgtttggcacaaatttctgaaatgatattccactgcaaagaataatacctatatatggccagaattactttttttctataacattaagataatacttgtcagcctgagcaacaaagtgagacctcatctttacaaaaaataaataaattagatgggtgttttggtgatgagggtctgtagtcccagatactcaagaggctgaggtgggaggatcccttgagcctaggaggttgcggttgcagtgaactatgattgcaccactgcactcc

SEQ ID NO: 414696 - DNA, 357 bp, Homo sapiens
gaagcactggggaaatttaatcaacttcataatcacttataatcctcacagtaattttatgagataagttctatttattatccctatcttaaggatgaggaractgtggtttaaagagcttaagtaatttgggcaaatcataaaagaagcagtgaagacagaattcaaatctaggcaacctgaaatctgagcctgagcactttgcctccctaataactatctccctttgtgagttgtattacaaagttgacaacatttagcaacccttattcccctccccacccctatctctctccaagaaatctgctgtgaggtagagaatgtgttgattttctctgcagtttttagtgcatagca

SEQ ID NO: 414697 - DNA, 429 bp, Homo sapiens
cacagtaattttatgagataagttctatttattatccctatcttaaggatgaggagactgtggtttaaagagcttaagtaatttgggcaaatcataaaagaagcagtgaagacagaattcaaatctaggcaacctgaaatctgagcctgagcactttgcctccctaataactatctccctttgwgagttgtattacaaagttgacaacatttagcaacccttattcccctccccacccctatctctctccaagaaatctgctgtgaggtagagaatgtgttgattttctctgcagtttttagtgcatagcatagggcttagaaaggagaaaatgatgaaaaatatttattaaaataattgtttttctttgatagttgttataaccatcgaattgtgagtgcttaacaattactataaaggagaatggaa

SEQ ID NO: 414698 - DNA, 429 bp, Homo sapiens
cacagtaattttatgagataagttctatttattatccctatcttaaggatgaggagactgtggtttaaagagcttaagtaatttgggcaaatcataaaagaagcagtgaagacagaattcaaatctaggcaacctgaaatctgagcctgagcactttgcctccctaataactatctccctttgtgagttgtattacaaagttgacaacatttagcaacccttattcccctccccacccctatctctctccaagaaatctgctgtgaggtagagaatgtgttgattttctctgcagtttttagtgcatagcatagggcttagaaaggagaaaatgwtgaaaaatatttattaaaataattgtttttctttgatagttgttataaccatcgaattgtgagtgcttaacaattactataaaggagaatggaa

SEQ ID NO: 414699 - DNA, 429 bp, Homo sapiens
cacagtaattttatgagataagttctatttattatccctatcttaaggatgaggagactgtggtttaaagagcttaagtaatttgggcaaatcataaaagaagcagtgaagacagaattcaaatctaggcaacctgaaatctgagcctgagcactttgcctccctaataactatctccctttgtgagttgtattacaaagttgacaacatttagcaacccttattcccctccccacccctatctctctccaagaaatctgctgtgaggtagagaatgtgttgattttctctgcagtttttagtgcatagcatagggcttagaaaggagaaaatgatgaaaaatatttattaaaataattgtttttctttgatagttgttataaccatckaattgtgagtgcttaacaattactataaaggagaatggaa

SEQ ID NO: 414700 - DNA, 392 bp, Homo sapiens
attaattactcttggagtccaaactctccagtgtgccacagtcctcatcacttcctgtatcttaaatattgcattatctgtcccctaaaagtatttgaacatgtgacccagagaagrggacttacaacttgactaggcaacttctgtcacactggattcatatgaaattccactgcaagtgacatcaccagattggggaccctgaagtgtttgagtatcttctccacatctggtcatttaggctaagaaattccttcttgtctaccaggtcttttagcattcattttgtaagtcattcaacacctacttactgagaaggaatactgggctagacagtgtgctaggggctggggaaaccgcaatgcataggagagaattcccatctccaagag

SEQ ID NO: 414701 - DNA, 607 bp, Homo sapiens
aaacactctttgagtacaatctgcgaagtgacttttcggagtccattgagacctatggggraaaaaaaatcccaagataaaaactagaaatagtctgtctgtgaaactgctttgtgatgtgtggattcatcaaacagagttaaacctttcttttgattcagcaggttggaaacactttttgtagaatatgtgaagagacatttcagagccccatgaggcctgtagtgaaaaactgaatgtcccacgatgaaaactagaaagaagctatctgtgaaattgctttatgatctgtgctttcagctcacagagttttacctttcttttgattcagtagattggaaacactttttttggtagaacttgtgaatggacattgaaaagcccactgaggcctatagtgaaaaaccaaaatcccacaattaaaaactagtgagaagctacctgtgaaactgttgtgtgaagtgtagattcagcttacattgttaaacctttcttttcattcagcaggttggaaatactcttcttgtaaaatctgcgtagggacatttcaaagcccacttacgtctatagtgaaaacctaactatcctgtgatgaaaactagcaaga

SEQ ID NO: 414702 - DNA, 476 bp, Homo sapiens
cttgcagagggcacccaggggtggcagcagggctgtgggggcaggcaaaaatgcagggggacattgagataggcagagaagagaagaggcaaggcctgaacgggagctgggtcatcccagggagtcctctcccttcccagaagcccctggggtgccctccaagtagggtctagagccatgggctccagcccagagtacctgagtctctcctggaggaccmccacgggtagcggcggggctggaggcaggcctgtgcgagctggcaaaaactcagccagacaggagaagtggcaaggcctgagtgggtcctgggtcatctcaggaaggcctctcccttttcagaagtccctggggtgactgcaggtggggactagagcctcagggtctggcccaaggtgcctgtgttcctcgtcgagagcagtcacaggtggtggtgaggccgcaggtgggcctgtgcaggcaggcctgtgcaggtg

SEQ ID NO: 414703 - DNA, 564 bp, Homo sapiens
tgtgagctgaatgcacacatcataaaggggtttctcagacaccttctgtctagtttttctcatgggatattttgtatttcagtatatgcctcactgtgctctgaaatgtttcttcaccgatactacaaaaagagtgtttccaaacagttgaatcaaaagaaaggtttaacattgtgagctgaatccacactttacaaagcagtttcccacacagcttcttttaatgtgtattgmgggatattttcttttccactgtaggcctcactacgctctgaaatgtgcctcacagtttctacataaagagagtttctaaactgctgaatcagaagaaaagtttaactctgtgagctgaatgcagacatctcaaaacagttgcacagaaacttctgtctagtttttatctggggatattctgttttttactctaggcattactgcattccaaaatttcccttcacagattccacaaaaagagtgtttacaagctgctgaatcaaaagaaagatttaattctgtgagctgaatccacacattacaaagcagtttgacagataggttccttgt

SEQ ID NO: 414704 - DNA, 542 bp, Homo sapiens
tttttctagtttttatctgaatatattcagtttttcaccattggcctcaaagggctcttacaggtcccttcacagatcgtacaaaaagattatttccaaactgctgaatcaaaagaaaggtttacctctctgagatgaatcgacacattgcaaagcagttccatagatggtttctttctatattttatctggggctattttgtttttaaacaaaaacctcagtgggctcccaaacatcccttcccagattctacaaaaacagtgttttcaacctcctgaatgaaaagaaaggtttaaccctgtgagataaatccatcgatcacaaagcactttaacaaatagcttatttctattttccgtctgggggtattcctttttttaacataggcctcagtaacctcccaaatatcccttcacagattctacaaaaaatgtgattccaaccagctgaatcaaaagaaaggtttaactttgtgagatgaatccacacatcacagaggagtktcccagacagcttctttctagttttaatctgggtatat

SEQ ID NO: 414705 - DNA, 587 bp, Homo sapiens
tatttgtgaaactgctttttgatgtgggattatcttacagagttaaccccttcttttgattcaacagcttggaaacactcatttgtaaaattggcaaacggacatttgaaagccctttgaggtctatggcraaaaagccaatatccccagataaaaactagaaataagcaatttctgaaactgctttttgatgtttggattcatcccacagagttaaaactttgttatgatacagcagtctggaaagacttcttttgcagaatctgtgaaggggcattttggagcccactgaggcacttgtcaaaatctgaatatccctagataaatactagaaagactctatctgtgaaactgctttgtgatgtgtggattcatctcacaaacttagatatttcttttgattaagaagattggaaacactctttttataaaatctgtgaaaggacaatttggaggtcacagaaacctatggtgaaaaagagaatgtctccatatacagacaaaaaacatgctatttgtgaaactgctttgtgatgaacagattcatctcacagagttaaaagtttcctttgattcagcaggttgaa

SEQ ID NO: 414706 - DNA, 519 bp, Homo sapiens
actgctttgtgatgtgtgcattcagttcacatagttaaacctgtcttttgattcmgcaggttggaaacactctttttgtagagtctgtgaaatgccattttgcagcccacttcaggcctatagagaaaaaccaaatatcccgcaataaaaactagaaagaagctatctttgaaactgcttttgatgtgttgattcagctcacagagttaaacctttcttttgattcaacgaggttggaaaaactctttttgtagaatctgcaaagagacatttcagagcccattgaaacctatagtgaaaaaccaaatatcccgctacaaaaactagaaagaagttatctgtgattctgctttgttatgtgcagattcagctcacagagttaaacctttcttttgattcagcaggttggatacgcttttttttgtggattctgttaagggatatttcacaaaagcggcaggcagaggaaagaagaggctaggccttagtgtgttctgggtccccccagggaagcatctc

SEQ ID NO: 414707 - DNA, 463 bp, Homo sapiens
gctttttgtagaacctgtgaaggaacgtttgaaaccccattgaggcttatagttaaaaacaaaatatctcaagataaaagctagaaagaaggtatctgggaaactgctttgtgatgtttggattcatctcacagaggtaaatctttctttcgaatcagcaggttgaaaacaccattttgtaaaatctacaaagagacatttgggagaccattgaggcatatggtgaaaaacggagaatcccaagataaaaacaagaaagaagctatctgtgaaactcctttgtgaygtgtagatccatctcacagagtgaaacttttcttttcattcagcaggttggaaacattctctttgtagaatctgcaaaggaacaattgggagtctattgaggcccatgttggcaaactgattattcccagataaaaactagagagaagatattcatgtaactgctttgttatgtgtg

SEQ ID NO: 414708 - DNA, 596 bp, Homo sapiens
gtctattgaggcccatgttggcaaactgattattcccagataaaaactagagagaagatattcatgtaactgctttgttatgtgtgcattcatctaacagagataaaactttcttttgattcatcaggttggaaacactcttgctttagagtcttgaaaggaatatttkggagtcccttgagtgctatggtgaaaaaccaaatattcccagataaaaactagaaagaagctatctgtgaaactgctttgtgttgtgtggattcatctcacacagttaaacctttcttttgattcagcaagttggaaagcttccttttggaggatctgggaatggagattttggagcccattgaggcctacggtgaaaaaccgaatatccccagatataaactagaaagaaattttccatgaaactgctttgtgattactgtgaaaaagctttgtgacatgtggattcatctcacagagttacacatttattttggttcagctggttggaaacactctttttgtaaaacctgaaaagagacatttgggagcacatggaggactatggtgaaaaattgaataacctcaggaaaaaaaaaacaagaaac

SEQ ID NO: 414709 - DNA, 523 bp, Homo sapiens
ggattgcaggcgtgagtcaccacatctggaccaaagttttcataagaatgaccaagaaccactgctttctcaatctccagataagttgcaagtgtgatatatcattttgggtctaccctttatattgcagattctctgtatctaatatttgacattgcagcacatcattcagtgtttttcttcatccttcaactacagaagtgttttaatatgtctcttcctatcaaccctgtttgccggagattatccactgtgcttctcccttatcccttctccagtcccaagctgagtggaagaaagcacagccctaacataygcaaatgtttaagaaatccaggaagagcagacctccttgcaccaaatggcttaggcggataagttgctgaaggttctcttttatttggctcaattttatcactgaaatatacatctgaaaatgagattgggagaggtgttggagatttaagtagagaggattccctttggaaggacatagaaatctccccgagtacctttttaaaat

SEQ ID NO: 414710 - DNA, 450 bp, Homo sapiens
aataaacattttaaggcaagatgtactgatgtacatatgatggtttattttatatgcaaacttgactgggccattgggtgcccagatatttggtcaaacattattctgtctttgagggtgcttcttgatgagattaacacttgaattagtagactgagtaaagcaatgtgccttccttaatgtgggcagcctttatctaatcagttgaaggttcacatagaattaaaaaactgacccttccactagtaagaggaaaytcctcctgcctgagtgcatgagctgggatatctgtcttttcttgcctttagacttgaagtaaaagattggctcttcttgggtctgctggctttcagactggctcttataccattggctttccaggctttcaggccttcagacttggtctagaactacatctgccctcctgggtctccagcttaccagttagca

SEQ ID NO: 414711 - DNA, 450 bp, Homo sapiens
aataaacattttaaggcaagatgtactgatgtacatatgatggtttattttatatgcaaacttgactgggccattgggtgcccagatatttggtcaaacattattctgtctttgagggtgcttcttgatgagattaacacttgaattagtagactgagtaaagcaatgtgccttccttaatgtgggcagcctttatctaatcagttgaaggttcacatagaattaaaaaactgacccttccactagtaagaggaaactcctcctgcctgagtgcatgagctgggatatctgtcttttcttgcctttagacttgaagtaaaagattggctcttcttgggtctgctggctttcagactggctcttataccattggctttccaggctttcaggccttcagayttggtctagaactacatctgccctcctgggtctccagcttaccagttagca

SEQ ID NO: 414712 - DNA, 514 bp, Homo sapiens
ttcctctgacttcctgtaaaattgttagaataaagaaaatgaaaaaataaatgtatacacattttctaatatctgaaatgattatgactatgtactcataatgtatatatgtttataytgagtgtatatgagtacatttacagatatatattatgaggatatatgtatatatacatatatgtatatatcctcatagatacatatatatcatatgagtacatatacagatatatattatgaggatatatgtgtatacatgatagacatatttatacatatataaatgaggatatatacatatatgtatatacacatatattctcataatatatatgtatatatgtactcatatatgctcatatatatacacaatatatgtcactgttatcaacatgaaaaaattgggtgtctgtcttttttatctgaaactgtacataatttttacccatgtcttttcaaccttaatttaaaaatgtgtgttggtaatacaagagtgtattcaaacatatgagtg

SEQ ID NO: 414713 - DNA, 551 bp, Homo sapiens
gtggccaatgaaaagatgacattgaaggtaattcaattcatggccaagaaaaatttgttaccaaaaagtatccaaagaacaagtaattactagtaatttgcattttgcttttaatctcttgattattcaggatgagcttaatatatgtgtcctactttcatactcctactttgttttcacgtaaagttcactgaattaaacaatgtgttcctacacttccarcttctgtgtaaataacttgtctgcctctgaaaatattcctgatgtacactactgtcttaaatggacttttctctttttttttctttgtctttattttctttgctcagaaaaaaaaaagtcaagtggctttcttaatctagcaggtatatttacattttcccaggaaatatccaactgttgatctttctgaccttgagtgacatgatattctagacgtgatgaaacctaatctttttttactctctataaagaaagaagataatcaatatttttctagatttgaacattctctttatgcaaattaattattgttttcattcttttattaa

SEQ ID NO: 414714 - DNA, 624 bp, Homo sapiens
agtattttgcaggtaggcagagtcccagggaaaggatactaaaccaaacatgattgtcagcatccgcaaagctcaccartcatgtagcttattctttccccaagcaatggaggattgagagaatggggcaagaagtgaagaatatagtgtatatctttcaacattgaaacaaattattaaaatacctatctcttcataatatttgccaactcctctcatctacctttgcttcttgtctctcattttgtccttcttaattcactttttcttcctaaaaacattctttgtgagtatatttaatgtggttgatgaagaatactctcagcattttttgcctgaagtatttatttttccctcacttttgaacagcattttatcggtatatagaattctagattgacacattttttttctcagcacattgttattacaaaatcatttatttttttcttctacttttattttaggttcggggatatatgtgcaggtttcttatatgggtaaattgcatgtcactgaggcttgatgtatgaatgatcctgtcaccaaggtagagagcatagtaccaacaggtaggattccaaggcatgcccccttgcacactcccccttcaagcagacaaca

SEQ ID NO: 414715 - DNA, 624 bp, Homo sapiens
agtattttgcaggtaggcagagtcccagggaaaggatactaaaccaaacatgattgtcagcatccgcaaagctcaccaatcatgtagcttattctttccccaagcaatggaggattgagagaatggggcaagaagtgaagaatatagtgtatatctttcaacattgaaacaaattattaaaatacctatctcttcataatatttgccaactcctctcatctacctttgcttcttgtctctcattttgtccttcttaattcactttttcttcctaaaaacattctttgtgagtatatttaatgtgsttgatgaagaatactctcagcattttttgcctgaagtatttatttttccctcacttttgaacagcattttatcggtatatagaattctagattgacacattttttttctcagcacattgttattacaaaatcatttatttttttcttctacttttattttaggttcggggatatatgtgcaggtttcttatatgggtaaattgcatgtcactgaggcttgatgtatgaatgatcctgtcaccaaggtagagagcatagtaccaacaggtaggattccaaggcatgcccccttgcacactcccccttcaagcagacaaca

SEQ ID NO: 414716 - DNA, 494 bp, Homo sapiens
atcatactatatgtggcctttgtgactggattctttaactttgcatgtctgtttattattattattattattttttgagacagagcctcgctcttkttgcccaggctggagtgcaatggcacaatctcagctcaccacatcctctgcctcccgggttcaagtgattctcctgcctcaccctcccgagtagctgggattacaggcatgcaccaccatacccagccaattttgtatttttagtagagaacgggtttctccatgtcggtcaggctggtctcgaactcccaacctcaggtgatccacccaccttggcctcccaaagtgctggcattacaggcatgagccactgcgcctagactcactttgcatgttttaagatttatgtaagttgtagcatgttacagtcattctttttaccctgcataatattctgtggtattaatagactatattttgttattcattaattaatggatgaacatttggcatatttg

SEQ ID NO: 414717 - DNA, 584 bp, Homo sapiens
tcagcgtagaaaaacatttttaaaataatatcaatgcaagtttacagatatatttcttaaatataagaagaccagaaatgccattgtggctacaaagtttcatcagggactcagaattctatccttctgctctgccttatgcagcccatcaccacatggtcaaagatggctggtagacttccaggtattacattcatactgtaagcagcaggaaaagtgaggaagaaagaaggattttgccccatttttccaagaaaatttcctataatttccacacaactttcctcagtaaatcatatagggcataatctagccacatagtccatgttacaaaaatctaggctagtaatacagattttaatcttggctctaaactcaaatttaggtttgcatcactaaggaagatgggracactagagacttgatagtgagttaacattaggtgccatagagtgatctagtgactttttttcttattgtgcaggcattaatggaagaatctaattttgtaaacatgtctatttgaatcaaaagctgtattttcagctattgtcatatacatagtggtctcttaaatatatatt

SEQ ID NO: 414718 - DNA, 566 bp, Homo sapiens
tttgcaaatattttctcctattctgtaggtcatctatttactctgttgatagttttctttttctttggaattgcttttggcatcttcgtcacgaaatctttgcccattcctgttcctatgcccagaattgtattgcctaggtagtcttccagtttttatagtttcgggtttcacaactaagtctttattccaccttgagttaatttttgtatatgatgtamggaaggggtccagtttcaatcttctgcatatggctaaccagttatcccagcactatttattaaatagggagtgagtccttttcccattgctttatttttaagtcaactttgtcaaaaatcagataggtgcaggtatgtctgggctctccattgtgtttcattcgtctatgttcctgtttttgtaccaataccaagctgttttggttactgtagccttgtcatatagtttgaagtttggtagcatgcttcctccagctttgttctttctgcttagaaatgccttggctatttgggttcctttttggttccatatgaattttaaaatactttttctaattataggaa

SEQ ID NO: 414719 - DNA, 631 bp, Homo sapiens
aagtcttcacttctcttctatttcctgcaagagattgtgatgaattagtattttttctttcttaaatatttggtagaagccaccggtgaagtcaagttggcttgaagtttccttcatttgaaggattttacctacaaactcaattccacaaatccttatataacaatttagactatgtatttcttctacagcaagctttgattgtttgagactttcaaggttataacatttcatcgaagttgttgattttatggtatttaagttgttcataatatttatttccttattattctttcattgtctgtaatatctacaaggagattctgcttatcttcttgatattttgacaataatttctcttttttatctctttcttttttcagactccctttctctctctctctctcttcagtcaagacggctgaaggtttataaattgcattgatgttttcaaatagctagctttttatttgactgattttcttgttgatattccctgttttcagtttcattgatatcttatacattaattacttccttccttctatttgctttctgtttaacattatcttttcctacattattrgagtgaaaaccttataccattaatttaaaatctcttttgtaattt

SEQ ID NO: 414720 - DNA, 581 bp, Homo sapiens
ctctctctctcttcagtcaagacggctgaaggtttataaattgcattgatgttttcaaatagctagctttttatttgactgattttcttgttgatattccctgttttcagtttcattgatatcttatacattaattacttccttccttctatttgctttctgtttaacattatcttttcctacattattagagtgaaaaccttataccattaatttaaaatctcttttgtaatttatatcttgattttaattatattaattatataattatatatytcatgtataattaacacaatatattatgtattctatataatagcaaatacattatatgaatacatatatgtatatgtaatttcatataaatatataataatagttatagcatttaatttaattacctttacttctaagtactattttagctgcttcccctacattttcaaatgttttatttttcttaaatcccaaatatttataatttcccttatgacttcatctttagcctcttttaattaagaaatatgttatttaatttccaaatatttcaggattctctagtatctttctggtaacgattg

SEQ ID NO: 414721 - DNA, 558 bp, Homo sapiens
aatcccaaaacacaaaatcacacaaaccacaatcttgggccatagtgcaataaaaaatkacatcaataccaagaagatctctcaaagcaactaaattacatggtaattaaacaacttgctcctgaatgacttttggctaaagaatgaaattaaggcagaaatcaagaaattatttgaaaataatgaaaacaaagatgaaacatactagaatctctgggatccagctaaagcagtattaagaggaaagtttatagtgcttaacacccacatcaaaaagttagaaaggtctcaaattaaagtcaccaaagtttcaggactcaaagttaacatacaaaaatcagtagcatttctacacacaaatgatgttcaaactgagctaaatcaagaacacaatcccattcacaatagccacaaaaggaataaaattacatttcacctaaaggaactagaaagacaaaaacaaaccaaccccaaggctagcagaagaaaaaactaaccaaaatcagaactgaactaaatgaaatggaaaggagaaaacacatacaaaagcttgtggta

SEQ ID NO: 414722 - DNA, 381 bp, Homo sapiens
aactttactcctgtacttcatatccttggcttccctattgtagatattatggatacagaaaaatatgcaagtgattggaatgtgtatactacatcctggaacaaagctccccaatctcacacagyactgtcaccaagctgacccttttgctgaactgttaacacataatgttactgttgtattaggtttgctgtttctggataatgaggtaggatatatagaagtccttagataatggttctgtcagagcactgtgataagagaggaagaactttataagtttttttttttttgcaggtatcctgtaagaacaaattgctgcctcctccaggtggaaagggatcaaatataattaatctgtgtgtgccacacagtagcttg

SEQ ID NO: 414723 - DNA, 544 bp, Homo sapiens
aaaaagtaaaatataaatacatataagtttggaaaaacatataacaaaatgtctagattgattttcttaggctgagtaaatgtttcaggttgtcttcttcaaaatttgaatgctgtttaaaattaaatgatttctataattttaaaatacaaaatagtataccaaataaggcagttgtgaatgttgatcctaactcatgatgcatttgaacactcatgttatctaaatagaattacaatattttttatttctcactgaaagattaacagcatcttctgttctaaagaatgaagtgaaagtggctgagacacacagtgcactgtgatatttagatggacctttgcaataagttttaaagctgtgttyttattatgtaatctattttgtgggctctgttgagaacaactgtccttgtagccattcaagagaagcagagttcaggtaatctcatcctttgctctacctcaaagtggttaaccctctctcctttctgtgcacacattccagtcagcacaaagacacttttcattacctcctaaaaacc

SEQ ID NO: 414724 - DNA, 602 bp, Homo sapiens
ggggagctagtacagtcatttatatgtaagaggacattttggcttttagagttgccagagttttagcactggttctttctcatctgtgtggactgatgttctttaactgtggtgacatttgagtaccatcagttggcttcatttctagatgtttgcggaaggctgaagctttgcgtagggtcttyatttgtggctgaattattgtcattggtttcacaaggaggaatattagccaagtttttttcccgttgaagtttgtgctgtgatccagtagatggaacttacatgtagtgtccataaataggctcttactgatcagtgctcctcctcaatatttcctcacatttgcagctgtgctacctctcagagttctgagagtggaggcttctgtcacactcaagtgctggccacaaatattggcttggcactcccaggctgtgcatggcaaacccagggtgagctcaggctttcggttccctccccagcttgggggcagcaggagtggcgaccttggcagtggcagcagcaagggtcttaaacttgtctctgggggttctgccacaggaaaacacagaactgctgctaatctaatctgggtaggg

SEQ ID NO: 414725 - DNA, 505 bp, Homo sapiens
tgctgctttccattgattaattacctcttaatcataaaatgtaagaaaaacttattaagcctacatgtcatagcttctctcacatttatgatctcatattaaaaaaatgaaatttytataaaaaacagggttatgtaatcatgtgattgttttattacattagtgacctaatactataaatgtgcttttagcgaaaatcatgttcttttatttttaaatcaattcaaaaagtttactgaattcctaaaatatatgaggccatcaagccagacaacattcccactctcaaaaagcttatagtctaatagtggatctcatattgctatcaatctgggaacagttaacggcttaatatcaagacttctaataaacacaacatgtctccatttatttggtctctaatttctttaatcagtgtttcatagttttttgcttacacatgtacatactttattagatttatacctaagtgtttcatgttttggtgggtttttttaacttttaa

SEQ ID NO: 414726 - DNA, 551 bp, Homo sapiens
agtaaactaatagtatgtcatctctttcaagggatttttttgagttaatgagcatgcagtgagcaatttaaggatcaaacatactgggcaaaagactaaatttttattatagtggatactcgcagccttatgtaatctgccagtctaaaccatgtgctgctttggcacatgctttactgaaaatagcagaccagtttgtgagctggcacaatttcaacatagcagatggacatgcaacgaartaactagcaaagagaccttgtttcaacatcaaatatgtttccgtaaggccagattcttgggcaaagttgttttagcgatctggttgcaactaaggtaagatggtatatttcctttgcatttagccttcactaactatttctatatattttagggagttatttcagttatttcagacactgaaatatttgtatttgaaaatcacaataacttggactcttttagtttggaattttgaaacaccagcaaaagatgaggcttaaagaatacttggattgtcgctttatgagaaactataattatctagctgg

SEQ ID NO: 414727 - DNA, 556 bp, Homo sapiens
tttaatttagggagaattataaaaataaagtttttaatcaaagaacatgatttttttttactattcattcaagattatttatatctttcacttgtatgtttgtcatgcaatatatcataggtgtgtaagctttttttcatataaaatcagtacatttctagttaggtatactcttgattattattatcattgatrctaacccaattaacaacagaactttttctttctctctatcttaacctgccactatttgtatataggaaagctgctgtttatattaattggctaaccatccactttttttaacattcttttattgtttgtagattgtggtatattctcttgagttttcttgcttatatagtcataacatctgcaaaaattgttacatttctattctcctttcaattttatattccatgcatttccttcccttctctaattgcactggctagaatttcgggaatattgttcaataatactggtaaagtaaggatctgtttcatttctatcactttaataaaatatgtttaatttgttaagctttatgttggca

SEQ ID NO: 414728 - DNA, 556 bp, Homo sapiens
tttaatttagggagaattataaaaataaagtttttaatcaaagaacatgatttttttttactattcattcaagattatttatatctttcacttgtatgtttgtcatgcaatatatcataggtgtgtaagctttttttcatataaaatcagtacatttctagttaggtatactcttgattattattatcattgatactaacccaattaacaacagaactttttctttctctctatcttaacctgccactatttgtatataggaaagctgctgtttatattaattggctaaccatccactttttttaacattcttttattgtttgtagattgtggtatattctsttgagttttcttgcttatatagtcataacatctgcaaaaattgttacatttctattctcctttcaattttatattccatgcatttccttcccttctctaattgcactggctagaatttcgggaatattgttcaataatactggtaaagtaaggatctgtttcatttctatcactttaataaaatatgtttaatttgttaagctttatgttggca

SEQ ID NO: 414729 - DNA, 583 bp, Homo sapiens
gaaaagaaatttacctattcttgtaaaagagtattcctacaaaacaaaatttgatttttgaagtgtgtatattaagatttaggtaaatatatctctctacatattttaattttagagtaaagtatggtcctttaatgccttcttataaaactattacattttcattatgttgtaaccacgaattttctacaaaacatccctagaagatcaaacctctctttagattgagtgaaagatgtacaaaagtgggggattttcctttggcctacttgaaggtaataattaaagttttgtgtctctgcccattgttctggggttacatggattcaagcttattgacaacccaaccctggtattacattttctatgagatcatatattctatctcgccaacaggagataatccgaatgtcaaatgtgagttgcatttttgtgtttgactaacttccatgtgtattggaaggcaggataaggatagtggagcatttagacagctttacttctaatacatgtaacaggtraagttgcctcctgaatcactatgaatgtcaatgggtgccaaatcatagaagtttctgcagca

SEQ ID NO: 414730 - DNA, 607 bp, Homo sapiens
ggttcaagtcaactcaactagtcatatgtgtcatcattattgcttgctctctattttcacaagcataacttctgtttgttttatattaaaaattgtcttgaccctcatctgaaactcactttcctgcatcatgagatatgtactggatatattcacccacaagatcaggcccaaaaattagggaagtgtacatctcttctcttatttttatgttatctaaaagtttctgttttgatttttcctaaatgaagtttaatttttgtatattttcattgactatgtgtccatttttcctaaatgcaggtcaggaagagaacaaaaataaaacaatgtggaggaaaaaagttctagatgtaagcctttgggcttaacaatttgtaggttttcatatcgtgcagtagtttcaggttttaatatatatgaaaatcagtggtcttgtatctatgcatatgtgtcgtctataatataattttgacagatggtgagctggataaatctagtccctgactatagaaaaccttggcttgacttgcactctwccaaaacttgttttaaaaagcattcacatgtatttattttttaaataaagattcattttttggcctgc

SEQ ID NO: 414731 - DNA, 331 bp, Homo sapiens
ttaatgtgtaagtaaaagaagggataaatgtatgttgaataactgacaatatgaaacatagagtccatattgtggataacttcttattaataatatttgtttactgcttcctcatcagatagcagccatgtagttgggaagataatggtttcagatccaggaacatgtgttgcttagggtaagccaattagaagagttgtatttccctagagaattawcgttccaggaacttaggtttatataaatcatcttataatgatacatagacatcttatcttgtttcagatatgggcatatgactttggttggcacaattatattataggatggt

SEQ ID NO: 414732 - DNA, 472 bp, Homo sapiens
aaccaaaggcttgcagcaatccagggtgcatcattcaagaaaaatggcagaatcacagtaagaacagtgagctttgccatttgactggcttatgcccattgctgcaccatctttacagtagctttgaaaaccaacagcctgcagtcacagtgaaaaccaaaagcctggcagccactggagggggcagaagtggattgaatctccttgaaaccccatacccagacaattgtccttccttgatatgtttggtaattttccagaagatcctatacagaaggttttttattttacctgactcagagcttgagagaatagccttttctctagagaaaacaacaaacagtagcaattgtttactatcrtgactgagccagcagtgagtaacagttagggcaaacaataggcaaacaaaataatctcagaaatgtgttaagcaagtggtctatatttcaaaagttttgacacatttctg

SEQ ID NO: 414733 - DNA, 597 bp, Homo sapiens
ttgcagtagtcttttaaaataaaagaacaatttgatatccattgagacaaacacagactgaacagtctgcaggctatcaaaattttatctagaattaactcagtctaatatatagctgtatatttcagcattatcttgacccctatcaagtctaaatgaggatttggaattatgatattggttttcatttgaaactggtccaattgtcccacagaactgatgcttatcatttcttttgaataagcataaaaactgaccctcccagtcttgaaacttgagaaagttatatttgtcttatctgagtactttctcaggaaaccaaccatcaggccacccagatagtatcaaggaactgaaacttaccagatcaccacatatggacaatgagatkacagaccactgacccatcatgattgccttacttaccacctgcttcctttggatcaactccacttctttactcctcccttattctgttttcccacacatggttacatttttttcccctgctatataaacccctaattttagtcagttgaggagatgaatttgagactatctcccatctcctcagctgcatcactgatttcaagtctt

SEQ ID NO: 414734 - DNA, 562 bp, Homo sapiens
agtagtgattcaaactggggtgagctggttggacaggcrtacatctggcttaccaagcctattgggtttttaagccaagaaaggtaatacagtgcgagaaaaagttagcaaaacaaacaatggattctgaaaataacaaatcccagagatcagtagaatcaggtgagaaaaaaacaagttttgaatgtacttaagcttagaaagtatttctgggttaaagtaaatgagaaagcaaaacagtgtacaatgcaactttaaaagctgtgtaaggattttggtaactcaaaaataaactgacaatttcatttgtgatttaaatctgttataatgaaaactcacgtgattactttaatactttaaagggtttgaaaggttgacctacgctaattattgagccatatagtatcctcacactcatgaaaatgaatgtggggagaaaatttcttccttaatgcaatagctatttggccacttgtaggcagtattttagaggtgattcatgcattgcttagtatagcagttatgcaaaacttagtgcataaaacaatgaccagttttttta

SEQ ID NO: 414735 - DNA, 562 bp, Homo sapiens
agtagtgattcaaactggggtgagctggttggacaggcgtacatctggcttaccaagcctattgggtttttaagccaagaaaggtaatacagtgcgagaaaaagttagcaaaacaaacaatggattctgaaaataacaaatcccagagatcagtagaatcaggtgagaaaaaaacaagttttgaatgtacttaagcttagaaagtatttctgggttaaagtaaatgagaaagcaaaacagtgtacaatgmaactttaaaagctgtgtaaggattttggtaactcaaaaataaactgacaatttcatttgtgatttaaatctgttataatgaaaactcacgtgattactttaatactttaaagggtttgaaaggttgacctacgctaattattgagccatatagtatcctcacactcatgaaaatgaatgtggggagaaaatttcttccttaatgcaatagctatttggccacttgtaggcagtattttagaggtgattcatgcattgcttagtatagcagttatgcaaaacttagtgcataaaacaatgaccagttttttta

SEQ ID NO: 414736 - DNA, 552 bp, Homo sapiens
tctagtacacagtatgttacttggtacaacatacgtgctcaataaagwtatactgaatagtcacatttatgacaatagacttatgagacatccatccacacataggtacacgttgcaaatttgtatcactctaaaaacaggcacaagccatctgaggaataattccagtagcaaaacaaaaatatactcttatttgggaatgtttttcgcttttctgcgaaagcagcaccctatactgggataaaacacagtctgtggtacttcctttgacacatttctctcccccatagtttttccgaaactcaaagatctatttaagaagttggacaaagaatggcctattcccttaatatttcaggaacatgaatggttggactattctttttaaaggaatgaacaaagcctgaatatacagccagtggactataaatggattattgttttctttacattgtaagcaacagcagtaaacaaggatataaatgttaatgatatttctttaacaaaagctatccatcagcactgctgcactgtgagcagtacagtgattaa

SEQ ID NO: 414737 - DNA, 552 bp, Homo sapiens
tctagtacacagtatgttacttggtacaacatacgtgctcaataaagatatactgaatagtcacatttatgacaatagacttatgagacatccatccacacataggtacacgttgcaaatttgtatcactctaaaaacaggcacaagccatctgaggaataattccagtagcaaaacaaaaatatactcttatttgggaatgtttttcgcttttctgcgaaagcagcaccctatactgrgataaaacacagtctgtggtacttcctttgacacatttctctcccccatagtttttccgaaactcaaagatctatttaagaagttggacaaagaatggcctattcccttaatatttcaggaacatgaatggttggactattctttttaaaggaatgaacaaagcctgaatatacagccagtggactataaatggattattgttttctttacattgtaagcaacagcagtaaacaaggatataaatgttaatgatatttctttaacaaaagctatccatcagcactgctgcactgtgagcagtacagtgattaa

SEQ ID NO: 414738 - DNA, 583 bp, Homo sapiens
ttataacaaatatgaaagatcaagtggtatcatcatcttttatgcagtatgtgctcccatgarttgataatcaatatactaaggtcctgacaaataaacgggcaatagcaaggatgcagagtatatagaagaggaaatacaagtactgaacaaagcaaaatctctagaacttattaatccaagcatagaaattaaataatagcattaattacttgttaattattttaacaatcattattgctggtggtgaggcccaatgaaatgctaactttctagcattgtattttccctaactttccaattttctgcatgaggtaatattatttttaactggaattgctacttaaaataattagatattagattaacagctttggagtagttgacaaaaattttcataccaggatgagaacacatgaaacccacggttgtttactgtatacaacaattatgtatcaaatctattttcagaatatttctagaagatgtaatttgcatggctatttgaccagggtctaggagagaatctaggtgacattaggcagtaaatacatgcagtatcttatatttaaaagcagactgt

SEQ ID NO: 414739 - DNA, 356 bp, Homo sapiens
gaatcactcattaatcaacaatatctttaggagtgaagcacttatttatctaaggtctttttcaaagccttatttaggagatatacaaaagctgctcctaagaatttcygtccttgttgtctcaattccccatatagtggatcctaaggcatttctaattagggataaagttgtaaagcatgtggagtttgttttttagcaacagccacatattctgagtttcttatatttttgaccctatttttagccacacagtgcttggaggagtcctaaggtgtcctccagtgggcatagatcccatcaacaattaccagttaactcttctaaaagctcaaaattaatctttccttctctct

SEQ ID NO: 414740 - DNA, 544 bp, Homo sapiens
gagcaggaaaaaaaagaataaaaaacaatgaagcacacctacaagatctagaaaatagcccccaaaaggcaaatctaagagttattgcccttaaagaggtggtggaaaaagaaataggggtagaaagtttattcaaagggaaaataatacagaactttccaaacccagagaaagatatcaacattcaagtataagaaggatatggaacaccaagcagatctaacccaaagaagactacctcaagggatttaatattcaaactcccagaggtcaaggataaataattctaaaagcagcaagagaaaaataaacaaatattatacygtggaacttcaatatatctggcagcagacttttcagtggaaaccttacagaccaagagagagttgtgtgacataattaaagtgctgaaggagtctgtaatccctgcactttgggaggccaaggcgggtggatcacctgaactcagcaattagagaccaccctgagtaacatggtgaaatcctgtctctacaaaaaatacaaaaattagctgggggtggtg

SEQ ID NO: 414741 - DNA, 562 bp, Homo sapiens
caacccattaaaaaagacaaaacacacactgaatattacaaggaaagggcacgggcttctagaagcaaaacccgtaccwgttcatatagggctgaaatatattctcaatctgatttcaggtggtccagacactagaagggattgaacctataggcaaaagacctttcaggacctgcagctggagaggattaaggaaggtaacaactgataaattgtagtatgatgtagtaaataggatggtataggttgcacatagtctgatcaaattatataagttgaattatttttaaatcccttacatcagattttattgacttttcataaaaggaagatttcttgaaaataagattatacattattgctatttagttcctaaaagagtgtaggacagtataatgccattatacttagagaaatacatatctcacaaaatgacgaattcatttttagatgtaaggtatgcaatctgattagaagaatctctgctaggtacatggtacttgaataggcactaattaataattacaggggttacagcttgaattgtttgtaaggctttctc

SEQ ID NO: 414742 - DNA, 509 bp, Homo sapiens
gttggactagcacgtaatttatcctaacttcaatagttaactagctgtgtgacctataggccaagcacataaactttctgtgtgtcagtttccttattaaccctgcgataataaaatccaagtcatgaaagttgttctaatttctaygtaattcatctaaagcacctagaataactgttggcataggaaatcaataaatggtagatataataagtgtaactactggtatgctactattcttgccaggcattgggctagatgttttatgtcttcagtcatcactataacccagtattattatctttattctgttgacagaggtagtagagaggatacttaatgccactcaaaatgaaagctgtaaggctaggatttgaaccctcctatgcttgacttcaggggctggaatgttttcaatacaccatactgcctcttttagatgctatgaaaggctcaattcctctctttaaaatcttttcctaaagtatttctacagattaaaatatggt

SEQ ID NO: 414743 - DNA, 509 bp, Homo sapiens
gttggactagcacgtaatttatcctaacttcaatagttaactagctgtgtgacctataggccaagcacataaactttctgtgtgtcagtttccttattaaccctgcgataataaaatccaagtcatgaaagttgttctaatttctatgtaattcatctaaagcacctagaataactgttggcataggaaatcaataaatggtagatataataagtgtaactactggtakgctactattcttgccaggcattgggctagatgttttatgtcttcagtcatcactataacccagtattattatctttattctgttgacagaggtagtagagaggatacttaatgccactcaaaatgaaagctgtaaggctaggatttgaaccctcctatgcttgacttcaggggctggaatgttttcaatacaccatactgcctcttttagatgctatgaaaggctcaattcctctctttaaaatcttttcctaaagtatttctacagattaaaatatggt

SEQ ID NO: 414744 - DNA, 509 bp, Homo sapiens
gttggactagcacgtaatttatcctaacttcaatagttaactagctgtgtgacctataggccaagcacataaactttctgtgtgtcagtttccttattaaccctgcgataataaaatccaagtcatgaaagttgttctaatttctatgtaattcatctaaagcacctagaataactgttggcataggaaatcaataaatggtagatataataagtgtaactactggtatgctactattcttgccaggcattgggctagatgttttatgtcttcagtcatcactataacccagtattattatctttattctgttgacagaggtagtagagaggatacttaatgccactcaaaatgaaagctgtaaggctaggatttgaaccctcctatgcttgacttcrggggctggaatgttttcaatacaccatactgcctcttttagatgctatgaaaggctcaattcctctctttaaaatcttttcctaaagtatttctacagattaaaatatggt

SEQ ID NO: 414745 - DNA, 602 bp, Homo sapiens
ttataaggcatgctgggcaaagtagaatgctgcttggacaccacttgtcagaaggtggtgtcacttgtcttccaaagatkgaaggatatcaacttctcagcacgactaacacaatatttagttggagaggttctagtaagggatttagggtgcatgatgacaaagtggaaaaagaaaagtatttttggcaagaaaccaatatacaactgggtaggtgttccgtcctattctactcaccaatcctgtccatgtggaagttgaaactgcataggtgagaggtggagtggaaagaaacgcacttaaaaataatatcatctccctcttatgactctttataggaagttctgattgcaggtcattagtatttctatcaagggggtggggggtagaggagagtattataaagaaaaataaactctgagtataatgcaatatgtatgattttagaagaaaagggagtgtgatgtgagaaggctagaaatgtataaagtgtagaaacatgaataagaatggcgcggaaagtgaaggcgctgaaaattgctccaagaatccctttaggctcctatttttgtgagtcaaccttaaaggaaggcataagcccc

SEQ ID NO: 414746 - DNA, 602 bp, Homo sapiens
ttataaggcatgctgggcaaagtagaatgctgcttggacaccacttgtcagaaggtggtgtcacttgtcttccaaagatggaaggatatcaacttctcagcacgactaacacaatatttagttggagaggttctagtaagggatttagggtgcatgatgacaaagtggaaaaagaaaagtatttttggcaagaaaccaatatacaactgggtaggtgttccgtcctattctactcaccaatcctgtccatgtggaagttgaaactgcataggtgagaggtggagtggaaagaaacgcacttaaaaataatatcatctccctcttatgactctttataggaagttctgattgcaggtcattagtatttctatcaagggggtggggggtagaggagagtattayaaagaaaaataaactctgagtataatgcaatatgtatgattttagaagaaaagggagtgtgatgtgagaaggctagaaatgtataaagtgtagaaacatgaataagaatggcgcggaaagtgaaggcgctgaaaattgctccaagaatccctttaggctcctatttttgtgagtcaaccttaaaggaaggcataagcccc

SEQ ID NO: 414747 - DNA, 546 bp, Homo sapiens
aatgtcattattttaccatcttaactcataagctcccagaaaagtagggtctcagtctattcaaatcatgcataaaaaatttagctttagtctctagaatataggtgcttacaaayaattttgattatgatgaatatattcaatgaattgtaatcaaatgcaaagtaattaactttttcttttcaaatataggtctcatcatccctctgattcaatcattttctttgtcagtcattgctgaaatgtatttctagctgtgccctgcctctacaaagacttttttttcacatgctgtcatttgaaaactcagtttatgagagttagaaatataatggcttccttggccaaggcaatcctttaacagagaggtaaggtctgtggggggaataatagtgcataatcactctaccatagatgctatttaataagcacactttcacacttcaaggtattacacttgaaaagtaactaatataatctgtaatattttttcctgtattaaaacaaaaagtaacctcaactgagagggattgtgtcactaggcct

SEQ ID NO: 414748 - DNA, 597 bp, Homo sapiens
aggtccttaatttctgaagaactaagcagcaaactcttacagaaatggtgaaatcttactaaagataacttacagtggaatgttccaaatgaacaacactgcacagacatgcatttaaaaatgagggctcccaaattagtctcatctagggatgcctattgatatgcagaaacatctaagaaaatttcaatatttttatttaaagactttacaaaacgcaaataaaaagcataaatgactaattgattaaaaacattaaatctgctaaccttttagcttagttactatcctgattcaaggatatagacggcagcaccaattggctgactttgaataactaatggggtacattttacctgggtaaaggatgggattgggttagatacccttcccygagaaaagtccctcttggttaaaaattgatttggcactatggcatgttaactgctattctctttggattaatctgccttgcactctttgctgatggttgtgggtgacaggattaggtatgcatgggatcacaggacatgaggagttttttctcctcaaagggagaaacttgagagccaatgggactcctggaaaagatccctt

SEQ ID NO: 414749 - DNA, 630 bp, Homo sapiens
caagggccttgggtgagcctctgagacttgctgccttcaggtgagactcagcctattcccaaatctggtggctaggtggcaagatgcctttcacgtgaagaacagaggakggaaaagtaaaggggactttgtcttcgaccttaggtgccaccttggctacagggggatagagcaccaagaggactctcagggtccccaattccaggagttggctcttggatggcatttctggacctgccctgggccagaggggagcctgttcccctgaaaagtgagtcccaaaccaggcagcattcaccacaagctgactgaagagctgttaggccctcaaggaacatcagaggtagtctggcagtactcctcatgagcctatggtagtgtggccacagggtgaggctcctctctgtttggaaaggggtgggaagagtgggaaggactgtgccttgtggcttgagtgccagctcagccgcagcacactagaataccacgtagaattctaaggtttttgcttttagttcttagctcccagatggcacttctggacctgcgtggggagtggaggaactcaccacctgaaaggaagaacacaggcctggctggctttaccacctgctaagtgtagagccctag

SEQ ID NO: 414750 - DNA, 573 bp, Homo sapiens
gcttgcataaaatataagttgtagcaagaagcagcagcaaaagtcaatcagaacattcaggtctggaaagagcttcttgctgcctgagtgcatggatcgttgtattcacagttcatcttgaagctggagctaatttaggacctggttctacttctgggctgaggaactttatctagaaaactgcttagagcagagtgagaccaaagaccaaaaccacaaaacaataaaaacactttctattcaaggtgaaactacaaaccgaaatttaagagcatattaggaaatttaatgttaagaatgaaactaagaaaacaaagtataaggagataaatagataaattcacacatggcaaaatgtaaacaatggaacaatctctatatgactttaaaataagaatatttaagatcctcaagtagatacagataagaatgttacccagcaagagaattttgaaaatacagtagatggatatgaataaaaaaccaagcaatctcacttctgcacatatatccaaaggaattgaaattcgtatgttgaagagatgtctkcactcccatgttcactgcagctct

SEQ ID NO: 414751 - DNA, 525 bp, Homo sapiens
tgacttggctccctcaacttccccttaacctccaatcttaaaaaatcccccaaaaggccatcaatttcaagacaccattgtaaatgttgatactggtcattcagtccaatcctaaataccaagggtcctggaaatggatctatgtgaatgcagtctcttttacattattaactaaagataaaaagaccccatttaaagattttttaaaaattagaaaacaaaaagaagccaaaatgaaycaaatcgaggcttttaggtggatgcccaacaattttccatccaaatgcccacaaaattccttgtccaatgagaggaattagcaggaatatcatgcctatattctttatggtacaagagaaaatacaaaacagatattctcctagggtcttgtggtgtggtagagatactcaagccccaaaagtaaccatcttactgtctccagtcaggtgaatgacatttcaagagctcaggattaggagtcagaagactcaggtgcatattctgcatctgtcactttccgctgtg

SEQ ID NO: 414752 - DNA, 583 bp, Homo sapiens
atatttcaggatgatatgtcctgaactccttcaatgataagcagtctagggccaacagcaacgctgtgaacatttttgaatctcctactgcccccaggctcagtattttatgcaaaagattgtagactctggtaacctttctgaaccacttaagccattgaccaagactgtagaaacttccaattctatattggaagagaatgagtcttacttttttgcaaggtctatggcattgattaattttagaaattcrttttatctttcatatttaagatatattgtcactgacacaagtagctgaatctgaagaacaattaaagccagatatttgagcacagcaggactttgcctacctctcttgtctcttacctagagtatcattggtgtctatattattcaccttcatagcagataattctctccctcaggataggaaaattgattatcaaaagctgctggagcccgggcttggtggctcacacctgtaatcccagcaccttgggaggcccaggcaggcggatcacctgaggtcgggagttcgagactgacctcaccaacatggagaaaccccatctctactaaa

SEQ ID NO: 414753 - DNA, 565 bp, Homo sapiens
gaaccttgtaaacattaagctaagtaaaaaagccagtcagaaaagactacatattgtatgattctatttatgtaatatgtccaaatatttggagacagaaagtagactagtggttgcctagggctgtatgtgagggagggaaaatggagactggactccaagtgggtacaaggcttctttatgggattatggaaaggctttaaaattagattatggcaatggttatgcaaccttgtaaatattctggaaaccattgaactgtacactttaaacaggtgaattatggtatataaattatctcaataaaatgactttttaaatacaaaaggatcattcttaaaaagaaaaaaaaaatggaagtagtgccttgtgccaacaggtgggaagcactgatgctcggaagtagggttccaaccaacacactcaaattcagagttggaacctccagtctccctggtggggtrctaacaaaagctctttcacaaatctccattcctctgcttatgtacttccctgggctcaacatgtcctttccttcttgcctaccaagtaacttcttattcct

SEQ ID NO: 414754 - DNA, 570 bp, Homo sapiens
agtcccatattattttaattatgcagttctggacttggatgaaaaatatctctgaaaaataaatacttttttttctaatagttgtgccacaattttgtttactctcattctatgtcctccattcaagcctgttgtgtatggatgtgggcccatcttcttgccaaaaaggtgggcatagcctcagtttaggtgacacagttagggtgtcctctctgtgggaagagcttctgcaactcttgctgtggtaggctcagctgctctgaataagacagacccaatgcccttctggctatagctaaatagaatctgagcagtatttactatccatattttttgcccttgttctccgtataaatctagtttacttaaagttggcttgagtaggcttctatttagagtgatcctcccttatcaattacccccagtggatgcctgcaaatgcagacagttttgaaccctatgtataccatgttttttcctatgcatacatacctatgatgaagtttaatttgtaaattaggcatagtaagagattaacaacartaactaataataaaatagaacaagtat

SEQ ID NO: 414755 - DNA, 589 bp, Homo sapiens
taagttttggcaaggatgtggagagactgaaaccttcacaccctgctagtacgaacgctagtgagaacataaattgttcaactgctgtagaaaacagcttggcagytcctcaaaaagttaaatatagaattaacgtatgacccaacaattccacttgtgtgtgtgtgtgtgtgtgtgtgtgtgtgtatatatatatatataaaatttcttttcaaaagaattgaaaacaggtactcaaatatatgtacacgtacgttcatagcagcactatccacaatagctaaaaggtggaaacagtctgaatgtccatcaactgatgaatgtataaaacgtggcatatccatatagtattattataaattggaatatacaatatggaacatgtatatgaatattattcagccataaaaaggaatgaagtactgatgcatggtacaacatgaatgaaccttgaaaacattatgctaagtgaaaaaaggtacgcacgcaaggtcacaatattgtatgatttcatttatatgaagcttccaaaacaggcaaatacttagagatagaaagcagatcagcagcggccagggattagggcaag

SEQ ID NO: 414756 - DNA, 614 bp, Homo sapiens
ctctgggcaagtagaattgaaagatttgaaacttctctttaaaaaaaaaatgcttattcatatcagtcattctttttcctaacgaccttctttcattttggtaatgggaaaatatttctaatgcaaataaggaaaatatcactttgatattggatttctttagtctttgccaataaaataattatctgaaatttaaatttgtgtatgcagtttgatattcatgttaaagccccattttctggaggtcttaatctatttctaagaagaattactctccagcatttactatagcaagaggagggaggtcaacttcacatacggcacactgggttctgcaaatttcatctgattggggaacaggccaacrtaccaaaaaattagttccaggtggctgtaagagaaatgttttatgtttaattgaatttttctaggaggtatgtatatgtaaagtattctctggaaaaggttatatttagtcattcacacttacatgtatagtcaagaaaacatagtaccccctaagaaatgtagggtatgtgtagatattctgcagtgatttgagttgccatcaagcaatatgtgttgttgtgaacgcaatatcaaccagcacttag

SEQ ID NO: 414757 - DNA, 606 bp, Homo sapiens
aggaaaatatcacaatcctaaacatatatgcacctaatactgggagccttcaaatttataaaacaattactactagacctaagaaatgagtcccccaataatagtgggggacttcaacactccactgacagcactaagcactagacaggtcatcaagacagaaagtcaacaaagaaacaatggatttaaactataccttggaacaaatgggcttaacagatatatacagaacatttcatccaataactgcagcayacacactctattcaacagcacatgaaactttctccaagatagagcataaaataggccacaaaatgagcctcaataaatttaagaaaattgaaattatatcaagcactctctcagaccacagtggaataaaactggaaatcaactccaaaaggaatcttcaaaaccatacaaatacatggaaattaaataacctgctcctaaatgagcattgggtcaaaaatgaaatcaagatggaaatttaaaaatgcttcaaactaaatgacaatgacccaacctataaaaaactctgggatatagcaaagtcagtgctaagaggaaagttcatagtcctaaatgcctacatcaaaaata

SEQ ID NO: 414758 - DNA, 606 bp, Homo sapiens
aggaaaatatcacaatcctaaacatatatgcacctaatactgggagccttcaaatttataaaacaattactactagacctaagaaatgagtcccccaataatagtgggggacttcaacactccactgacagcactaagcactagacaggtcatcaagacagaaagtcaacaaagaaacaatggatttaaactataccttggaacaaatgggcttaacagatatatacagaacatttcatccaataactgcagcacacacactctattcaacagcacatgaaactttctccaagakagagcataaaataggccacaaaatgagcctcaataaatttaagaaaattgaaattatatcaagcactctctcagaccacagtggaataaaactggaaatcaactccaaaaggaatcttcaaaaccatacaaatacatggaaattaaataacctgctcctaaatgagcattgggtcaaaaatgaaatcaagatggaaatttaaaaatgcttcaaactaaatgacaatgacccaacctataaaaaactctgggatatagcaaagtcagtgctaagaggaaagttcatagtcctaaatgcctacatcaaaaata

SEQ ID NO: 414759 - DNA, 606 bp, Homo sapiens
aggaaaatatcacaatcctaaacatatatgcacctaatactgggagccttcaaatttataaaacaattactactagacctaagaaatgagtcccccaataatagtgggggacttcaacactccactgacagcactaagcactagacaggtcatcaagacagaaagtcaacaaagaaacaatggatttaaactataccttggaacaaatgggcttaacagatatatacagaacatttcatccaataactgcagcacacacactctattcaacagcacatgaaactttctccaagatagagcataaaataggccacaaaatgagcctcaataaatttaagaaaattgaaattatatcaagcactctctcagaccacagtggaataaaactggaaatcaactccaaaaggaatcttcaaaaccatacaaatacatggaaattaaataacctgctcctaaatgagcattgggtcaaaaatgaaatcaagatggaaatttaaaaatgcttcaaactaaatgacaatgacmcaacctataaaaaactctgggatatagcaaagtcagtgctaagaggaaagttcatagtcctaaatgcctacatcaaaaata

SEQ ID NO: 414760 - DNA, 606 bp, Homo sapiens
aggaaaatatcacaatcctaaacatatatgcacctaatactgggagccttcaaatttataaaacaattactactagacctaagaaatgagtcccccaataatagtgggggacttcaacactccactgacagcactaagcactagacaggtcatcaagacagaaagtcaacaaagaaacaatggatttaaactataccttggaacaaatgggcttaacagatatatacagaacatttcatccaataactgcagcacacacactctattcaacagcacatgaaactttctccaagatagagcataaaataggccacaaaatgagcctcaataaatttaagaaaattgaaattatatcaagcactctctcagaccacagtggaataaaactggaaatcaactccaaaaggaatcttcaaaaccatacaaatacatggaaattaaataacctgctcctaaatgagcattgggtcaaaaatgaaatcaagatggaaatttaaaaatgcttcaaactaaatgacaatgacccaacctatmaaaaactctgggatatagcaaagtcagtgctaagaggaaagttcatagtcctaaatgcctacatcaaaaata

SEQ ID NO: 414761 - DNA, 284 bp, Homo sapiens
tcttctccttccaatgtggcctagggacactaaaaaaattggacacccctgattgagactctactcactgaactaatttgagtttcctgagtatacacaacctcataattcattgtttttgtttacaatgtttcctttgcctagactatcctctctcaacttatctacctaacttttaatcatctcttggaggggctgtctttgaagggactcattatataatatcytcttccctgtctcaattctcaataaattgaaaaataaggaatgatggggctaggata

SEQ ID NO: 414762 - DNA, 613 bp, Homo sapiens
cctcatatgtgactatttatgggtctgtgaaaatattttctagggtataagctcaggggtgtgactgataggtcaccaaatagagaaaatatatgcatataatttatatgtttatatacatatgcatgtagatgtgtacaaatacatagttttctctaacataagtaatgacagattactctcccaaatggctattcctgtttccatccctaccagcagcactaggattcctgtttcctcccagatttcaccaacacttggtattrtcccatctaatttgtacctctctcattagtaaaacatgatacaatttgcttcttcaccccctccccaccaccctgattactagtgaggttgacatctcttcacatacccattaactatttggattttccatttcgtgcatcacttctgtagccatgttttttttttcctctgtgttttcatttttgtaatttctaggaagtgtttgtttattccagttttggggctagcaaatattttcttccaatgacctctctgttagccttgcgtatggtgcccttcaatgaagataaactcttaaattttacatagttgtagccatcagtttgggtcagtattttttgtgctt

SEQ ID NO: 414763 - DNA, 617 bp, Homo sapiens
gtgcagcaaatgtagtctgtgtgatgctgaatttttggaatttgttgaagaattttcttcctttgtggcataatcaatttttgtgtgttccatttgtactttaaaagaatacgaatttttgtttgtttgatgggtatacaaatctataaatattagttcaaatttattatgttgcttaaatcttttaaatcattgcttacttcagactctttgtgggtcaattactgagaatcatcttaggaactctggcttcctcgcccaacttttaatgctttcttatttgcctgatacatcttatcttttatttttaattttttttgaatctttttattttaaatctatctttttaaaagacacattgctcgtgttctgttacccagcctgaatatttatgtcttttgatttgtgaatatttattataattattattctgttaggacaaatttctactatataattttatgtgttctcttatcattctttctrcattttctttcttcttttttctctattatatcagctatctcttgtgccctgcacacactcttccttcctcttactccaggccttcctggggtgatcaacttttcattggtataacctgacagcactgcctc

SEQ ID NO: 414764 - DNA, 617 bp, Homo sapiens
gtgcagcaaatgtagtctgtgtgatgctgaatttttggaatttgttgaagaattttcttcctttgtggcataatcaatttttgtgtgttccatttgtactttaaaagaatacgaatttttgtttgtttgatgggtatacaaatctataaatattagttcaaatttattatgttgcttaaatcttttaaatcattgcttacttcagactctttgtgggtcaattactgagaatcatcttaggaactctggcttcctcgcccaacttttaatgctttcttatttgcctgatacatcttatcttttatttttaattttttttgaatctttttattttaaatctatctttttaaaagacacattgctcgtgttctgttacccagcctgaatatttatgtcttttgatttgtgaatatttattataattattattctgttaggacaaatttctactatataattttatgtgttctcttatcattctttctacattttctttcttcttttttctctattrtatcagctatctcttgtgccctgcacacactcttccttcctcttactccaggccttcctggggtgatcaacttttcattggtataacctgacagcactgcctc

SEQ ID NO: 414765 - DNA, 607 bp, Homo sapiens
gttcaaggttcatccatactgtagtgtatatcaatacttcattttttgactgaataatatacacttgcatgggcataccttatcagttgatgcacattttgggtagcgtacatttttggctattatgaatttctatgaacatatataggttataagtatgacagggtccagtaggagtggaaatgctggcttttatggtaactatgtttaactttttgaggaactgccaaactgttatcaaagtgctgctccattgtatatccccatcagaaatgtatgagagttccagtttttccacaaccttagcartacttgccattgctcatctttttatcatagctatcctagtgggtgtgaagtagtattttactgtggttttgatttgcattttcctaatttctaattgtgcattgttttatgtgcttattggacatttgtgtatcttgtttgaaaagatgtctattgaaagcctttgctctttttttttttcaagagacaagatctcactcagtcacccaggctggagtgcagtggcacaatcacggctcactgcagccttgatctgggctcaagccatcctcctgcctcagctgagtggctgggacta

SEQ ID NO: 414766 - DNA, 599 bp, Homo sapiens
aaagttcctgaaacacaaatattattcacaaataggaactcaatatttcatcttattatttattctgaacttcactcttataaaaaagccaaagggtgtcatcccttttcaggctagggactaaggagttttattttacataatttagtaggcttttacaattctcctcatgcttcttatatccttttctggtgtcagcattcttatagtacttagtctaaacttctaaagcagaaatggtgtgcgtgtcaatatagttagcaagaaattagggaatatattatccactcaaagcaagtcttggagatgaggagagaaagaaatctctagagatayatgcagtaggggcagtcttgaagagaaaaggaattcagactatggaatttgtcttacaactttcaagtcacatagtattagaaattaagccacagagcctggtgatactatgtttcataaaattcttaccagtagttaccacgtgtcctaagtcttcatcaccgtgagttcctggggcctacatgaaggaagaacaaaagcccttataaattaccttgggccagagactagacccagcaggttccatagaagaatagcctgcc

SEQ ID NO: 414767 - DNA, 422 bp, Homo sapiens
acaccaataatagatgacgttgccatcatcattttatagatgaagactttgagacttttggctaagatctcacagccaattaaggatctgcttatctttgggaagttaccaagaatctttgatcgagatctttattgattttgcatcatcattttgggggaagttttgttggtggtaagtttcctctcaaagtggctcaaggagcttgtagcactatttcaaatttcagtctcaatgatggggactctgcgctggctgctggccgctcycaaattgtcagagtattgaaaatgagtcaacatctacttaaagttttaagatcatttgccttagccaagaggggcaggaaaagagagccggagacagagtgaactttgtagtgattgaataatgtctccccaaaattcaagtccacctggaat

SEQ ID NO: 414768 - DNA, 593 bp, Homo sapiens
attattaatactgcttagtaatacattcaattctatttctaaagcataccaaagattgatagtgctatctagcgaaattcagaccatatgcaagcaatgtaaaaatttgaacaaaaatgtcttttctgactttatgcccttataactatgtctttacttcaggtttgaacaagttaataaaagtaggtcaaaaacttttcctctatgagaacaaaatgataacatttctgaatcacaaagtattttaaatactgatttctgggtaaagaaagaaatttgcaaggtaagagtgggtggggtcacccaaggctcaaataggtctctactgtgcaagccaccagcccactggaatttctatttcccccagatcaaagcaaaataaccaggttacagctcctaaaaatgcctctaagaagaaaacaaaagcttttccatcccttcccagaatggtccgataaacctccctgaagccagagtgccacaattgctttmattaaagagagagatgtggttcttgagagcagtccctaaaaattcctaatgccttacaattcaggcagtgagctcagggaatcatggacggggggcactga

SEQ ID NO: 414769 - DNA, 598 bp, Homo sapiens
cttgttgtttaagtcacccagcatgtggaattttgctatggcagcccacgcagactaagatgctgagacaatctctcctttggaccactgattgaggggagtcaacttggcttctctgatctratagttttgctcagtggaaggtgacaccaggccaaagacacattgactccatcctttacttgtgttttcttgtaaaatgtagagtctgccacgccctggctttaagtcttttggggttttctcagtggctgcatgatcacattctaattcttcagaaagtcattcaaaaatcttcacattatgtggccaggaatggtggctcacacctgtaatcccagcactttgggaggctgaggtgggagaatctcttgaggctgggagttcaagactagcctggccaacatgacaaaaccctgtctctactaaaaatacaaaaattagccagtgtggtggtgcacgcctgtagtccaagctatttgggaggctgaggcatgagaatcgcttgaacctgggacacggaggttgcagtgagccaagatcttaccactgcactccagcctgggtggcagagtaagactctgtctcaattaaaaaa

SEQ ID NO: 414770 - DNA, 529 bp, Homo sapiens
acggaggttgcagtgagccaagatcttaccactgcactccagcctgggtggcagagtaagactctgtctcaattaaaaaaaaaaggctttcacattaaagccccaagctccttctcttcccacatcactttccactctatgtcctctgtcttctagtacatgggccctgtattaatccgttttcatgccgctatgaagaaatacacaagactaggtaatttataaaggaaagaggtttaattgactcatagttctggrgaggcctcaagaaacttacaatcattgtggaaggggaagcaaacttgtccttcacttggctgcaggaaggagagtcctgagcaaaagggggaaaagctccttgcaaaaccttcagatctcgtgagaactcactcactatcacaagaacagcatgagggtaaccgcccccatgatttaattacctcccacaaggtccctccccccaacacgtgggggttacaattcggattacaattcaagatgagatttgaatggggacacagagccagac

SEQ ID NO: 414771 - DNA, 482 bp, Homo sapiens
tgaggactggctacataatttgtagggctcagtgcaaaatgaaaatggcagactctttatttaagagttgttgaagccaggcacggtggcttgcatctktaatcccagctactcaagaggctgaggcaggaggatcttggaatgtctaagcattgaggagttggatctgaaaagcagtgaatacagcaagaaaggacaagccaatctgtaagaaccttgggtccatgaagatatggaatagatacttaaagatactaatgtgacttgtgcctatggtgaaagtagtgtcacaaggaattaaatgttatttaagacatactgtaaaatgatcaaactacactacaggtgccttgccaacacccagatgttattactccagaactttggatctctactatatgccaattttggtgaacacccagatgttattactctataactttagatctctgcagattgtgatgctggagcctgtgaattca

SEQ ID NO: 414772 - DNA, 482 bp, Homo sapiens
tgaggactggctacataatttgtagggctcagtgcaaaatgaaaatggcagactctttatttaagagttgttgaagccaggcacggtggcttgcatctttaatcccagctactcaagaggctgaggcaggaggatcttggaatgtctaagcattgaggagttggatctgaaaagcagtgaatacagcaagaaaggacaagccaatctgtaagaaccttgggtccatgaagatatggaatagatacttaaagatactaatgtgacttgtgcctatggtgaaagtagtgtcacaaggaattaaatgttrtttaagacatactgtaaaatgatcaaactacactacaggtgccttgccaacacccagatgttattactccagaactttggatctctactatatgccaattttggtgaacacccagatgttattactctataactttagatctctgcagattgtgatgctggagcctgtgaattca

SEQ ID NO: 414773 - DNA, 554 bp, Homo sapiens
cagttgtgaggaggatggttaagtggccctgagaaattctgaacctcaacgcagccttggaggccctcttctgagctatgctctggagaatggactctaagacagaatgactttttctgcagagacaagaagaaaaggtgggaaggtgagacagagtttctaaagccaactcaagctacagtttagtttggtctcctacataatattcctgtttaagtgggaggtggttggggtggattctttcctttattgaaattataataaaaaaatgtaaatttggtctgaagggaaggccaagtggtaaattctggcactcatggagatcttttagagatcatgaatgtctgggtgttggatcaggatttgaacccaggtcactccatatccacagccgtggagtcattttctctatcactgtttgtacacagcaggcgattataaatattgtaaatactctgcygctggtctccttcctcttcccctcctcctcttccttctgctcagggctccttatttttctcctcctgccttcctctctccatgtcctcctcctc

SEQ ID NO: 414774 - DNA, 576 bp, Homo sapiens
aatcacctcccaccaggtccctcccttgatgtgtggggattacaattacagatgagatttgggtgaggacacagagccaaaccatatcaccagtccactgagtacaaacactgtgctattaaaactagtaattattatatggaatatataaaatgaggcataattatcaaacatttctggcaaagtttttgaagttataaaataacttcacagcagttgggatttcccttgctctgtatgtttaagatcgcagtgtctgtaagaaagacagtttgggtgtgatccacagatttctyattcttatttctacttaagcaagttacatagcctctctatgactcagtttcctcatctgtaaagtaaggatgtagcagatgctattggtgctctgcccatatcaccttgatctaacttagagttcatttgcagatagtgtcttaaagctctaagtcttctgctctctacatggtggcattatttggccatggagctgtctatagatagtatcttaaagctcgaagtcttttgctttctatctggtggcattctctagccatggagctgtactgtgtccaa

SEQ ID NO: 414775 - DNA, 562 bp, Homo sapiens
tttcttatctttgttcagaacatttcaacttcccccactggatgaattggtgaggaacaaaacgggtatccaaattcaatactagaaatccaagcaacaaattcattaaattaaataacaaggaatgaatagtgtcttgaacagtgcctggcaaacagtaagccatcaatacatggtagatctaaatagctggagcaacactagtgttctagagagcgtcgcarcttggggcaggtactccttatcactgtaatactttggatttcaggagtgtactaagtattattgcagtaaagcaaaatggagaaaatgcattaattacaatgcagcaaagaggagaaagagaaagattcctacttgcttgtatctctgatagttcatctcttctctatatgcagtgtagcctcaggactaatttagagagggttgcgaatatatttgctccctttaacttaaaaatctttgaatggtaagtcggtaaatggacctcctctttcccaatgactctcataataatgttatttcaatcaaacgacaaacacttgatgagcagtgcctatgt

SEQ ID NO: 414776 - DNA, 562 bp, Homo sapiens
catagctcacagcatccttgaacacctggactcaagcaatcctcccaccagagcttcccaaatagctggcactataggtgtgcaccaccagcctagctatatatttatttataccattttcctataaagctttagactctttcaaaaatgctaaatatattgttacaaagtggtcgtgagagggattttcacaaagctccccatttcaattactagtacttctttggttcattcgatacaaccctataaagataaatggagaatgattgatttatctaatcaaaggtcacgccccagaaataaagctctttcctctctctgtagtatcattttcaaaacaatcattctttatttaaatgtacaactatattttcattaaaatattaaaatacaaacccatgtaagtctagyaaacttaggacaaacatttccacagaaaaactttaaggaatgctgacaaaatcctaagcttccaaattccaatttgatttggtaatcttttactttgtattccaaaatgtatgaatgttcccatgatcaaattattaaaatttaaaaatca

SEQ ID NO: 414777 - DNA, 626 bp, Homo sapiens
ctctagaacagaggccttaaaagaatattaaaagatcaagaatttgttttgaatacttttcaaagtctgatttattagctatgttattctaaccartgaaaatccagtaaaaccatccctaattttatcttaattttttaaatggcctttttttctgattataaaatgaatcatatatgttaattataacaaagacaaatgaagaagaaaataagcagccacatcccaagatgtaatactggtaatattttagcacaattttctaggtatgtacatatgtatgaatacagagctatatacacatattatatgttagtataatattgcatataaaattttatattctgtcttttctcctagtattataccatgagaattttccccactgaattaaaattatttccaaaacatcattaatgtgaaagtctgtgtctgggcattattaaagcaataaagtttaaagacattacaatacataaagttatttcatataatttctgatcactggatttttaggctatcactggaccatgtaactactgcattaaatttctgtaagtcaaaaatattaaaaatgtttatgagatagcctttagatagatttaaatgcaaatctaaaattactg

SEQ ID NO: 414778 - DNA, 626 bp, Homo sapiens
ctctagaacagaggccttaaaagaatattaaaagatcaagaatttgttttgaatacttttcaaagtctgatttattagctatgttattctaaccagtgaaaatccagtaaaaccatccctaattttatcttaattttttaaatggcctttttttctgattataaaatgaawcatatatgttaattataacaaagacaaatgaagaagaaaataagcagccacatcccaagatgtaatactggtaatattttagcacaattttctaggtatgtacatatgtatgaatacagagctatatacacatattatatgttagtataatattgcatataaaattttatattctgtcttttctcctagtattataccatgagaattttccccactgaattaaaattatttccaaaacatcattaatgtgaaagtctgtgtctgggcattattaaagcaataaagtttaaagacattacaatacataaagttatttcatataatttctgatcactggatttttaggctatcactggaccatgtaactactgcattaaatttctgtaagtcaaaaatattaaaaatgtttatgagatagcctttagatagatttaaatgcaaatctaaaattactg

SEQ ID NO: 414779 - DNA, 455 bp, Homo sapiens
attcatatctgtctattgtgttccttctctaactgtccccctcttacttcctattgtaagttccaggaagcaaggataatgtcaattttgtgtgctgccttctcccccatatttacagcaatgtgtgtgtggcacacagtaagaattcagtggatttattgaatgaatgcttattatcctaagaataactactcaaacaagaatccacagacctccacaaaaaaagtgatagttttttttttttttttctttctgagatggggttttactcttgttkcccaggttggaatgcaatggcacaatcttggctcactggaacctctgcctactgggttcaagtgattctcctgcctcgcctcccgagtagctgggatcacacatgcgtgccaccatgcccagctaatttttgcatttttagtaaggaagggatttcaccctgttggccaggctggtct

SEQ ID NO: 414780 - DNA, 521 bp, Homo sapiens
gttccctattatattcttttaaaattgtatgtatatgcttacatactcacttacttatgtatatataaaaatagagaaaaataacaaaataagaagctcctaataagaaactcctaaaaggaggagttgggagatggaaaaacctccctggcacttctgtcacgtcacatttagtctagtttctgatcctcagggacatgccttagggttactgtggtaattggcacctgtgcctttaccaatcatctgatcasagtaagcagttccaactagtgcatgaagcagtttgccagctgcctcctatcaccaaggcaaagggttcatgttggaattttctttctttttatgagcaccagaatttattctgatttatgcttgtttgaactgtgtactcctgtctaaatgctgtcttagacattaattttaatccagttttccctgtatctaaatgtgagggctggccaacaatgtaattactgcttatagttattcaaactgagaaatgatgtttagaaaaagta

SEQ ID NO: 414781 - DNA, 521 bp, Homo sapiens
gttccctattatattcttttaaaattgtatgtatatgcttacatactcacttacttatgtatatataaaaatagagaaaaataacaaaataagaagctcctaataagaaactcctaaaaggaggagttgggagatggaaaaacctccctggcacttctgtcacgtcacatttagtctagtttctgatcctcagggacatgccttagggttactgtggtaattggcacctgtgcctttaccaatcatctgatcagagtaagcagttccaactagtgcatgaagcagtttgccagctgcctcctatcaccaaggcaaagggttcatgttggaattttctttctttttatgagcaccagratttattctgatttatgcttgtttgaactgtgtactcctgtctaaatgctgtcttagacattaattttaatccagttttccctgtatctaaatgtgagggctggccaacaatgtaattactgcttatagttattcaaactgagaaatgatgtttagaaaaagta

SEQ ID NO: 414782 - DNA, 521 bp, Homo sapiens
gttccctattatattcttttaaaattgtatgtatatgcttacatactcacttacttatgtatatataaaaatagagaaaaataacaaaataagaagctcctaataagaaactcctaaaaggaggagttgggagatggaaaaacctccctggcacttctgtcacgtcacatttagtctagtttctgatcctcagggacatgccttagggttactgtggtaattggcacctgtgcctttaccaatcatctgatcagagtaagcagttccaactagtgcatgaagcagtttgccagctgcctcctatcaccaaggcaaagggttcatgttggaattttctttctttttatgagcaccagaatttattctgatttatgcttgtttgaactgtgtactcctgtctaaatgctgtcttagacattaattttaatccagttttccctgtatctaaatgtgagggctggccaacaatgtaattactgcytatagttattcaaactgagaaatgatgtttagaaaaagta

SEQ ID NO: 414783 - DNA, 617 bp, Homo sapiens
taacattttaatattttaacatttgctaatctggtagatagataaaagtatgattattytattgtgaatttatttaattaagagtgtcttagaacatcttttcattatttactggtcattttcattcttttctgtgaacttctattcatgtcttttggccatttttccattgggttgttgactcattgatttgtaagagtttcttttcagtgaaaggaattccttaagtagctataacattagctgtatgtattacatattaatttctaagttactcatctgttttgggtactagatacagttgatttatcatatctgtgggttctacatctgcggatcaaaactatttggggaaaaacaataaaataatacaacaatacaaaagtaatgcaaattaaaaaaccaatatagtataacaactgtttacacagcgtttacactgtattaggtattataagtaacgcagagatgacttagagtatacaggagaatggtataggttttatgcaaatactatgccgttttatataagggacttgagcattcaaggatgttggtatccatggggttcctcgagccaatctcccgcggatactgaagaaaaaccgtatatcata

SEQ ID NO: 414784 - DNA, 634 bp, Homo sapiens
gtaatggcttaaaattgttctaaaagactcaatagaggaaaaccggattaaaaaataatgttcataaattaaaagtgttttttttttttactattttggtctataccatggtggaaaaaaatctctttcccacctatctgyatatttcattgctagaatcaaaatgatgttaaaataactattatcaaaggaaaccaaaatattactctctaaaatactggagattgtttagctaaaaagaaaggctaaaatgcagggacacactctgccactcttctctgcctttcccatctaaatgtaattccatttacaacacttgctgatgagctcagaaacagagctcagagacaatggcaccagaggatctaagaacagactttagtcttcccctaaatttaccttcacacattttcttgccattgaaaagcctcaagatgctctcttctttgtcattaatatgagttatgactctttactaaactactacttaaacaaggcccctaactaccgccttaagagaaaaatacttttaagctgaggcttctcccacatgacaggtacggcacacattaataaacttctggggtgttgttgctattgttgttgttgttaatctgacttttgttttcaggaa

SEQ ID NO: 414785 - DNA, 594 bp, Homo sapiens
cccactatgtctctctgcatctggagaacactctaatacactgcaggatgctttaaggagtgtttgtgatctgaaagtargcagacatattaggtggaaaatatttttaggattacaccaagtgagtgcttttactacattcacctatataagaaaacttttttttctctttttctaatttgaaccaaagctctctgcagtttagcaaactataatgacctcaatatgagcttacagttcagtggaaaagctccagtcctagagtggaggatgatttggataacacttctagacaaaaacccagagacttgaaacaagatttctgggctagttttcatggtatataattggcaaagaggaagtggcaagaaggctccattatcagaatttaagaacatagaaacagtgagagatgtaaaaatatgatcatcatataagaaaaagaataagagatccagagccagattgctttggttcaaatccagattctattatcttatactgtaataaactctggtgtgataacatctctgttcctaacttttctcatctatatgtggatatattagtggcctatcattcaaaatgctgtta

SEQ ID NO: 414786 - DNA, 594 bp, Homo sapiens
cccactatgtctctctgcatctggagaacactctaatacactgcaggatgctttaaggagtgtttgtgatctgaaagtaggcagacatattargtggaaaatatttttaggattacaccaagtgagtgcttttactacattcacctatataagaaaacttttttttctctttttctaatttgaaccaaagctctctgcagtttagcaaactataatgacctcaatatgagcttacagttcagtggaaaagctccagtcctagagtggaggatgatttggataacacttctagacaaaaacccagagacttgaaacaagatttctgggctagttttcatggtatataattggcaaagaggaagtggcaagaaggctccattatcagaatttaagaacatagaaacagtgagagatgtaaaaatatgatcatcatataagaaaaagaataagagatccagagccagattgctttggttcaaatccagattctattatcttatactgtaataaactctggtgtgataacatctctgttcctaacttttctcatctatatgtggatatattagtggcctatcattcaaaatgctgtta

SEQ ID NO: 414787 - DNA, 599 bp, Homo sapiens
aagacttattacatgttcatgaattaaaagagtctctcatctagaggaaaacaacaccagacaagcactttaaaygtcataggaaagacactgagcttttttcttgggcttttatttccagtttaccactcgctcattgagtcatcttgtaaactgaagctttccatgcaggattgtaatgaaggcttactgataacaatgcagttaaagagcctgtgagaactcaactaaacttacctatttctattaatatgaattaagatcattgtaaatcaggagtacaattgctttaattgggatattgacagaacagcatgggaacagaagaaatcatgccttgtcctggctcataaggtcaagaaaggtacaatgcagaatgtaggatatttcttctcatgctgtgtctgaaagatgaggatgagttttcttagtagacatgtttggaaaaggcttcccatgcagagacaaccttgtgtacaaggtatggtttacaatttcaataacactgtagcatttctcaaacataaaataaaaactataaagtcaacaaagataaagctaaacaggaagcaggagctaataatggtaagcatcttaaa

SEQ ID NO: 414788 - DNA, 599 bp, Homo sapiens
aagacttattacatgttcatgaattaaaagagtctctcatctagaggaaaacaacaccagacaagcactttaaatgtcataggaaagacactgagcttttttcttgggcttttatttccagtttaccactcgctcattgagtcatcttgtaaactgaagctttccatgcaggattgtaatgaaggcttactgataacaatgcagttaaagagcctgtgagaactcaactaaacttacctatttctattaatatgaattaagatcattgtaaatcaggagtacaattgctttaattgggatattgacagaacagcatgggaacagaagaaatcatgccttgtcctggctcataaggtcaagaaaggtacaatgcagaatgtaggatatttcttctcatgctgtrtctgaaagatgaggatgagttttcttagtagacatgtttggaaaaggcttcccatgcagagacaaccttgtgtacaaggtatggtttacaatttcaataacactgtagcatttctcaaacataaaataaaaactataaagtcaacaaagataaagctaaacaggaagcaggagctaataatggtaagcatcttaaa

SEQ ID NO: 414789 - DNA, 574 bp, Homo sapiens
agatggaatataatgtgtctaatatggaatccaagcagcatttcttgactcctctgtgggataggctaagtgctatttatattactttatttaatctttataataattctatgagattgtattattttgcctatttacaattgaggaaaataatgtcccagagcaagaaagttgttgagctaatagaatgaactcctttagaatagatgtccttgactttcttaactttgaatttcctctgtataacaatatgcataggacatgctggcccctacataaaatgcatattttctgaatgaatgaattgaaataatatgtgttcaagaccaaaagcctagaaatcctagaggtaaggtgttcgctctgatttagggtgagaaggaatgtgggcaaaagagaattgaggaaagagttttattgtaatagttaatctttggtcctggtattcagtaaacatatgcttgcatataaatagggtcttattgcacayatataaaaaaggatatttatttatttataccattcattacacaaaactgtatagttatataatgtcctcaggtatctcaacagc

SEQ ID NO: 414790 - DNA, 603 bp, Homo sapiens
tgcaggataatctgcctaaatccatatctttaatttaagcatctgcaaagtcattttgccatgcaatgtaacatattcacaggttttgaggattacaacatacatatcattgaagggacattattctgcctaacaaacatactaatcacgtgtttaatattcaatatttattaaccgaaggaatttgtgagatttttagttattagcatttatagtagacttttactagattatgaaattcttgaggtgagggagcatgttttctttatccctctattctcatgtcctaagtaaaaaattattaatagattccttaagagagacacaactaaatgctacctttaataaatatagctaatgaaatatctttatatatatataaaataacactttccagaagttatgcaytttgggtctattaaatctcgttccagatatagtatcagatcagaagggaaagtagaaattactacacagagctggcagcttttcatttggaattgttgagttctctttgattccctttatgggtcatttctaagctatatccttacttctgttatcaatattggtgatgctgattccagttcataactatatgta

SEQ ID NO: 414791 - DNA, 603 bp, Homo sapiens
tgcaggataatctgcctaaatccatatctttaatttaagcatctgcaaagtcattttgccatgcaatgtaacatattcacaggttttgaggattacaacatacatatcattgaagggacattattctgcctaacaaacatactaatcacgtgtttaatattcaatatttattaaccgaaggaatttgtgagatttttagttattagcatttatagtagacttttactagattatgaaattcttgaggtgagggagcatgttttctttatccctctattctcatgtcctaagtaaaaaattattaatagattccttaagagagacacaactaaatgctacctttaataaatatagctaatgaaatatctttatatatatataaaataacactttccagaagttatgcactttgggtctattaartctcgttccagatatagtatcagatcagaagggaaagtagaaattactacacagagctggcagcttttcatttggaattgttgagttctctttgattccctttatgggtcatttctaagctatatccttacttctgttatcaatattggtgatgctgattccagttcataactatatgta

SEQ ID NO: 414792 - DNA, 470 bp, Homo sapiens
gattttaaccgtcttggctgatgtaactgcagatatgaaattatggcaggagaaacagactcagggagatgctgaaaaattcagttatagacatgtttcggttgaaatgctttctatccaagtggagcttccaagacaagagtttaatatattagagcaaggagattgtagatgaggtgttggagataaaaattttrgagtcattaagaaatatagtatgttttatggtgataaagtaatgaatctggatgagatcacctaggaaggagtttagatagaggagataagtggtctaagaactgactatcagggctgttcattataaggaggtctgggagataaggatgaaatagaaaagtagactgaaaaagaaaagtcaaagtagtaggaggggaactgggaggctgtgatatgctgatggcctgtgagaaaacagaaaaaaaaaaaagattaacaatattaaatgtgac

SEQ ID NO: 414793 - DNA, 519 bp, Homo sapiens
ttttaacatctatctcaactccttctttccccttcccactatgccatcaagggactccttgcctttccaaatttcctcttctttctaaaaaaagccacttcatgtattgtatattttcaaatcttcattctcacttctgagtagccaatgcttatagatcccagtactcatatatgttctctgcattatctgcatctgttttagagtaaatttacctgtgtttcattacccacaggctccccattgtctccgttctttattgaatatgtttaactcttaactcagttgtaagtactaaacttggcttagttattttgtatatttatttccctacttacatgtacttcatgagttttagcattcygtgtctcccaggtatattgcaggcatgggctaatgttggtataatttgccttcttatcaatatgggttttgagtgtgtgtgtgtgaatgtggtgtgggaaacatatggagacacccaatctaaagaagcttttttattctatagaaacctagaac

SEQ ID NO: 414794 - DNA, 620 bp, Homo sapiens
atatacaactttgctgtttgtttatttggcaatttttattctgatcatttttactggagataatcaaaagtcataatagtagtatgatggatataaaaattatcacagacgtcttatattgtgattgacttcactccctctacctatcacacattcttctgtgggtgctgtaatgtcttcatgcactttcttctcaatgctgctattttaattttccatgttgattgctcaggagcacaactctatcattatttttattttttaaatcatcttttaaaatctactgttgtttcatatctctttctcttcttgcagcatttcataccctgtagattttcctttaagttaaaaaaagtcaataattcagtgcattccataaaaatatatgtcaaaagtaatgacttggcaacactaagatatggaattgtcttttaaattattaargaaagacaaaattgcatggactttttaagtgctatgcacatttaattagaatatgtactttttttttaaaaaaaaagaacctctttccttgtcaattaacagagtattttcttcaaagtccagcacaaacatcaccttctctgtaaagatttccttgcctcattttaaataaaatg

SEQ ID NO: 414795 - DNA, 537 bp, Homo sapiens
  misc_feature (1)...(537): n = A,T,C or G
caaaatcacttcatgctctttccactctcctctatgccatgcagtttttattcctgtttcacagaaaggaaagctgagtttgtggaagatagttactaagaaggagctcaattggcttcatccctagtgttatttccactactaaaattatcctcactgtcaaggagaacacttaaaatttatattttagagaagtggtgtaatacagatggtgataagccatccacattacatacttaccactcctttattccttccaccttctgtttatgcagtgaatcagaacaagcatagctgaattccaacttcagctctacctcttagaaatcatagrgatagaagccatgtatctataaaatgtggattaacaaatatataaggtccctatcatagtgaaccaaagcagacaatgaatcaatgtgaattatcttccactgtaacttctctatgtaagaatccttactgataaatatgcatatgatcaaatctgagcaagtcacaattagaaatgggccttaaaaacagttgtnnnnnnnn

SEQ ID NO: 414796 - DNA, 537 bp, Homo sapiens
  misc_feature (1)...(537): n = A,T,C or G
caaaatcacttcatgctctttccactctcctctatgccatgcagtttttattcctgtttcacagaaaggaaagctgagtttgtggaagatagttactaagaaggagctcaattggcttcatccctagtgttatttccactactaaaattatcctcactgtcaaggagaacacttaaaatttatattttagagaagtggtgtaatacagatggtgataagccatccacattacatacttaccactcctttattccttccaccttctgtttatgcagtgaatcagaacaagcatagctgaattccaacttcagctctacctcttagaaatcatagagatagaagccatgtatctataaaatgtggatwaacaaatatataaggtccctatcatagtgaaccaaagcagacaatgaatcaatgtgaattatcttccactgtaacttctctatgtaagaatccttactgataaatatgcatatgatcaaatctgagcaagtcacaattagaaatgggccttaaaaacagttgtnnnnnnnn

SEQ ID NO: 414797 - DNA, 606 bp, Homo sapiens
aggacacaattaattgttaagtcttgaagtcactcaaagtgtcttttatgagtgtcttagttgtaaattagaactaaataaccaaaataaatctagaaaatgtcaaaacatttggaaaacatgcaattataaatcacctatgggataaaaaacaaaacacaaggggaattgaaacctaatttggcctgaacattaatgaaactacaacacatttgtggggtgcagataaagctttgtttagaggagatatatataagattatatgcytataataaaatagagattcaacatcaattatctacactttcatatcaagctaaaaaaactagcaaaacagagagaaagtagaagaacaaggattattaatagaacaatggggaatcaatgggctatatattacaaataatagaagaaatcataaggccaaaagtttgctggctggttgcagtggcttattcctataatcccagcactttgggaggctgaggcaggaggatcttttgatcccaggagttcaagaacagcctgggcaacatagtgagatgccatctctacaaaaaaagtaacaaagtagtcaagtatagtggcacatccctgtagccccag

SEQ ID NO: 414798 - DNA, 606 bp, Homo sapiens
aggacacaattaattgttaagtcttgaagtcactcaaagtgtcttttatgagtgtcttagttgtaaattagaactaaataaccaaaataaatctagaaaatgtcaaaacatttggaaaacatgcaattataaatcacctatgggataaaaaacaaaacacaaggggaattgaaacctaatttggcctgaacattaatgaaactacaacacatttgtggggtgcagataaagctttgtttagaggagatatatataagattatatgcttataataaaatagagattcaacatcaattatctacactttcatatcaagctaaaaaaactagcaaaacagagagaaagtagaagaacaaggattatwaatagaacaatggggaatcaatgggctatatattacaaataatagaagaaatcataaggccaaaagtttgctggctggttgcagtggcttattcctataatcccagcactttgggaggctgaggcaggaggatcttttgatcccaggagttcaagaacagcctgggcaacatagtgagatgccatctctacaaaaaaagtaacaaagtagtcaagtatagtggcacatccctgtagccccag

SEQ ID NO: 414799 - DNA, 616 bp, Homo sapiens
  misc_feature (1)...(616): n = A,T,C or G
gaaaatctaatcatgaaaaactgaaaagagaatgaatgagagaaaggaaacacattactgatatcaataatatttgcaaagataacactatggatcctaaagacatcaaaaagataatgaggaaatattataagtggctttatgccatcaactttgtaattaaatagcataatatttttaaaaacataactccaaatataacacaagaagaaataaaaaatctaaatagctacatatttactaaagatactaaatttgtaatagacatttcatggggaagataaaaaattttcatataggtcataaaaactatcagttaaaaaaagtaattaattggaatttattaaggtcaaaatcttctstttttcaaaagtcagtgtaagaacgtgaaaagacaagccatatattggaagataatattcacaatactttctaacaaaggacttacccagaatttatacagaagtacaaattaataattaaaatatttgaaaagcacattaaagaatatatagactacatattatatataatatatattttgacatatatggctaataaacacagggaaaaaatgttccttgtncatagtcatcaatgaaatacatgctaacta

SEQ ID NO: 414800 - DNA, 602 bp, Homo sapiens
aatactactactgtttatgacaaggtgaagtgattacatttaaatatttttatccatgttgccctgactataaacttgatgctattgtttatcaaactgaaataacataaatttaaagttaagagaaagggaataaagtcttataaaatagaacaagggagtagatggtttctgaagaaagttatatcatcagtagaaagcacttctattttaagaaggaggtggggcagttaactccataggctaagaaaaacagtccttttctaccctaagaaccaaaattgtctartgtaggtattattaaaccatattttaatatgcaaaacacaagaccaaaaggagtctagaaatgtcaaaaatgtcaaaatgtgcaggtttttcatttaagaaaagtgccttctacatcatgtcatgcacagctttcaggtgttttcagttaattaacttaatagaaaaaatcttgagtacacccagaagatagatatacatctaaatgcacaagcacatacctgcgcacttttcgcaaatatgaacagagtacctgctacaagcacgacgttccattagcctggatcttgttcctaatcaaacaaggtaaaagt

SEQ ID NO: 414801 - DNA, 604 bp, Homo sapiens
gtttctgaagaaagttatatcatcagtagaaagcacttctattttaagaaggaggtggggcagttaactccataggctaagaaaaacagtccttttctaccctaagaaccaaaattgtctaatgtaggtattattaaaccatattttaatatgcaaaacacaagaccaaaaggagtctagaaatgtcaaaaatgtcaaaatgtgcaggtttttcatttaagaaaagtgccttctacatcatgtcatgcacagctttcaggtgttttcagttaattaacttaatagaaaaaatcttgagtacacccagaagatagatatacatctaaatgcacaagcacatacctgcgcacttttcgcaaatatgaacagagtacctgctacaagcacgacgttccattagcctggatcttgttcctaatcaaacaaggtaaaagtctttcatagcataatagctttaaaataggattcctggtgcccacagagatcccttgaataaggtcccaaagatggagccwggaaatttgaacatttactcaatctcactggtctttcaccaatttataaaaacaaacatacggacacagacaatagcagttaatgagct

SEQ ID NO: 414802 - DNA, 541 bp, Homo sapiens
ttcagctctgccaggtcagttatgttcttttctatactggctattttgtctgtcagctactgtattgtttgatagcrtttcttggcttacttggattgggtttccactactcttgcctctcaatggtctttgtttctatctagcttttgaattatatttctgtcattttagacatctcagcccagttcagaaccctggtttgagaggtagcacactcatttggaggcaagaaggcgccttggctttttgagttgtcagagtttttgcactggttcttttacatctttgtaggcttttgtcagtttcttcagactttgaagttgctgacatttggatggttttttccttcttttatcctatttgatgacctttagggtttgattgtgatataatgtgggctcatttgactggctttgtttctggaaaattttagggggtcagtgctcaactctcaactcctgaactgcattagcgtttcctaatatagaagattattaattctgcacttttttcatttctaatatgtgcattcaatactatt

SEQ ID NO: 414803 - DNA, 594 bp, Homo sapiens
gaacaatattttggactcaaatatatatttgtactcaatgtgagaaagatgtatctttattagagggttttaaaaaaggttttcaataattaatcacctatcatatacacatatcactgcctaacccagtgatacccatctcctttctcaagctagttgcagtgcatgtggtccaaatcctctgcattttttttctatcgttgcattttttaaactagattatcattgtttcttataagctagggcaggtaaaacttcttcartctgtacattttcagtggtcattgctgggcctagcacatagaagattctcagtaagagagcttattttgtaaaatccttttctaaaatcacttgataacacacattacttctaggatatagctgtggctcctttaaatttttatagaaggatcctcattgtccctcccaatttcaccgctcaacctcacctcctgccactccttgtttcattcacactagcaacaaaaaccttcttctttttcccttttacaaattgtgatgcatagatttttgttggtatagaacaaaactctattctttttgaggacctatggtcaaataattgttcaa

SEQ ID NO: 414804 - DNA, 642 bp, Homo sapiens
aagaaccctaaaacttttctgtcagattgcaaatgagactgaattgaagggaggagaataattgtgatgggaacaaaaatttggagactacaaccaaaattcaagttataagasattaactgaggtaatgggaatgggagtgctgcgtaaagtgaactataaagggagaaagtggataagacctggtgatgattgctagttagagatgggggaaaaaaagagatatttatggtaactcaggttctggttctgacaatctactaagtaaatggtgactttattcacatagactggaaatgcagggataaaaacagacttgcagaaaagagctcattttctcaccctcattccaggaaccaaaaaataaaaaataaaaaaccaaaaaactgactatgctgctaagtgaaaatgaacatttatactttgatttattcatttgtttaagacaaacaatatgctaaacactactagattttggaccaaatatatagaatggaagcaagaacactattctggcaaaaagaaaccaagcaactaattataacagattgtgataaatctttcattgttatgtaaaaaaattgctgttcttattggtaaacatctagagttcagatcttcttcctcctacacagaattatt

SEQ ID NO: 414805 - DNA, 630 bp, Homo sapiens
atactacagcactgtttccgtgtagcacttgattgacacttggtttatttccacgtgtggacaattatgagtaaagctgatttaaacttttgcatacaggtcttgctaatttcaagcttttaaattattaccttaactcaatgccagatgaacatgtgatatagtttggatgtttgtccccttcaaatctcacattgaaatgtgatctgcaatgttagaagtagggtctagtgggaagtgtttgkaacattggggaagatttcttatgaataagttagtgtcccctccccgccccatagtaatcagcaagttctggtggtattagttcacatgagagctgtttgtttaatggaggctggcacctcctcccctctcttactttctctcttgccacttgacacgcctgcctcccccttcacattctgccatgagtaaaagctttctgaggcctcatgagaagctgagcagatgctagtgccatgcttgcacaagctgcaaaactgtgagccaaataaacctattttctttgtaaattatccagcctcaggtattcctttatagcaatgcaaaatggactaatataccatgaaatgtatatagtagctgcttaattttttatatggaatgaat

SEQ ID NO: 414806 - DNA, 508 bp, Homo sapiens
cgattttggcttgctacagcctccacttccccagctccagtgattcccctgcctcagcctcccaggtagctgggattacaggcacatgccaccatgcccggctaatttttgtatttttagtagagacagggtttcgccatgttggccaggctggtctcaaactcctgacctcaggtgatctgcccgcctcagccttccatagtgctgggattacaggggtaagccacagcacccagcctcataggtagttataaattggcctatcatcacatgatatgaagttagtgttatggaaaaacattttctcattttaccaactcaccccataattcttaggaatattcccttcaagtccacaggaacttcagtkctcatcattatatccagtgatttgattaagaatagggtccctctaaagtgcaaatagccatttccaagtctgctctgtgtttaatatttctttagcagatttttcatttaatattaagatttatgacactatcgtaaa

SEQ ID NO: 414807 - DNA, 586 bp, Homo sapiens
tagaggcagagtaatgttttccattgaggaaaaggacaaagggaagctacagaatataggtgtatattttwaaaaaaattgtgtacacaaaaaaatcccaagcatatccatgtttgaagaatgttataggaggggcagcgaatggttgaagagaaaagagaataggaagacataagcctgataatggagggttttgcaaacaatgctaagagaactggactccattcattatgtgatcatgaggatttgaaaggtgttacacagaaaatcagaacggtgttattttcattttagctagatctgatataagccacaaagttttttgatgttgcttttgttgttttagtaaaacacacttatattacttctctgttttaaatcatacattgttgtccacctgaataacaacaacaaaatagaagacttgaaagaacaaaatgatctataagtaaattgactgcttggccaaaaaaaaaatccactatttaaagaaagacaacaaaatccaacatcctacaatgtaaattaataatgtctaatatccactgaaaaaaaaatcactaacatgagaaagaaagagaaaaat

SEQ ID NO: 414808 - DNA, 586 bp, Homo sapiens
tagaggcagagtaatgttttccattgaggaaaaggacaaagggaagctacagaatataggtgtatatttttaaaaaaattgtgtacacaaaaaaatcccaagcatatccatgtttgaagaatgttataggaggggcagcgaatggttgaagagaaaagagaataggaagacataagcctgataatggagggttttgcaaacaatgctaagagaactggactccattcattatgtgatcatgaggatttgaaaggtkttacacagaaaatcagaacggtgttattttcattttagctagatctgatataagccacaaagttttttgatgttgcttttgttgttttagtaaaacacacttatattacttctctgttttaaatcatacattgttgtccacctgaataacaacaacaaaatagaagacttgaaagaacaaaatgatctataagtaaattgactgcttggccaaaaaaaaaatccactatttaaagaaagacaacaaaatccaacatcctacaatgtaaattaataatgtctaatatccactgaaaaaaaaatcactaacatgagaaagaaagagaaaaat

SEQ ID NO: 414809 - DNA, 607 bp, Homo sapiens
ttcctttggagttaaaataaagacgatggagtggcttagaaaatgaatttgaaggatccactttcaaggaattgacacttcaagaatcaaaggtacaatctgactcagaatcaagctgcttctctactgctcacctctatgtcattaaaactcactgtttttaaggagtgataggatagtggatagggggaggctggcctctggtgcagatggttggcaaagctgcctctttaaaagattctctaagagccggcggtatcacctccaccctgtttcttttgagggatccttcctcttcatccaccttagtgagaaaactttattgagagacctctagctttggaaaggtaagttttctctattttcaaatggtcagtcattgctgaagctacaccttgtagcaagagagtgaatgcctccagactgtcaaagaaaggacgctatccactgccttycttctcataatccaggtgctacagagtcacgtgcaagcatcctccaagaattcattactacaacttggacaggaggagataaaggggctgcaagatgttctgagaggaagaatgccaagaaaatagggcaagaggggaaaggaagcacgggc

SEQ ID NO: 414810 - DNA, 631 bp, Homo sapiens
tcacatgacagaagactggaagaaaggaaacccactctctcaagtctgtttaaaaggatcctattcccatccatgaaggttccaccctcatgactgaatcacctcggaaaggccccatctcttactacatattggccattatgtttcaacacgtgaattttgggtgatacattcacattatagcactttgtaattttcacaatatcaaaatttccttagttctaagatgtaattaattataagattcaactttcaatttatggcttttcaggggaaaagaaaactacggcattaaatatgcacatttatgtttaaaaacatccaaatgcmaaaaaaaaaagtatctgaggatcaagaaatattggtgttatatgacaaagaagacactaataaaaatgaaaaacactcttccaatgataacatttgaagctatgttggattctacagcaaagttgtgcctggataatgatgtttagttatatattgatattaatatataatgattatttaagaaatagcaaatactgctggagaaaggcaagcaaaacaaaagtgcctcaatttatctgatgctttttaaattggccaagggcctaaaaataataacagagaaacgatatcagagttgcta

SEQ ID NO: 414811 - DNA, 642 bp, Homo sapiens
aatttatctgatgctttttaaattggccaagggcctaaaaataataacagagaaacgatatcagagttgctactgtggatgtttttcctggcttgtggaatacgatgactttcatataatgtcagagacaaataataaatcacttcacagttatttayatattcatagagatgggggttttccttataagaacctttgatttccatcatataagaaaaaagaaaccaaaaacaccaacttgaaatgctattttcctactggattttaacttgaattgccacaaatgtgtgaagaagtgaactgcttatttaaaaaaaaaaaaaactattgacaagtctctggcttttattagtcaactggaaaatcaaacagcaaatggggaataaacaaaattcctatgactgtaaatttcaacaagaagtgaaaatagaacagatgtggaacattttccttaatgtgttactatttagcagtacttccctccaaggtgcaaaacatgaccatcttcttggaatgtactcaaatgggctcttttacaggctttccaagaaaacacaaaagcagcaagcttccagttgttatgcctgaaaatgactcatgccatgaaaatatgcaacttaagatagctaatgagagaagacc

SEQ ID NO: 414812 - DNA, 642 bp, Homo sapiens
aatttatctgatgctttttaaattggccaagggcctaaaaataataacagagaaacgatatcagagttgctactgtggatgtttttcctggcttgtggaatacgatgactttcatataatgtcagagacaaataataaatcacttcacagttatttatatattcatagagatgggggttttccttataagaacctttgatttccatcatataagaaaaaagaaaccaaaaacaccaacttgaaatgctattttcctactggattttaacttgaattgccacaaatgtgtgaagaagtgaactgcttatttaaaaaaaaaaaaaactattgacaagtctctggcttttattagtcaactggaaaatcaarcagcaaatggggaataaacaaaattcctatgactgtaaatttcaacaagaagtgaaaatagaacagatgtggaacattttccttaatgtgttactatttagcagtacttccctccaaggtgcaaaacatgaccatcttcttggaatgtactcaaatgggctcttttacaggctttccaagaaaacacaaaagcagcaagcttccagttgttatgcctgaaaatgactcatgccatgaaaatatgcaacttaagatagctaatgagagaagacc

SEQ ID NO: 414813 - DNA, 609 bp, Homo sapiens
actcataccagccagaatgggaggatgtgtggtcttttttgtggtttggacaattttcatgttttgtctgtgttaaggcatgattaccaggggtctcgtttttgttctgatccatcaccaagccacgagcaaccccaatgcctaactgatagcaccgggccagttcccgaatagcaaagaatatataagctgtcagaaatattcagaggcaggtagtatgattagggttatttctgaaaacaaacataatgcaaacctgatggggttattttgtagattaagtaatacatgtgagtgtgatttataaatataaacagccacatgcatgttaccatttgctaatatcttcaccatcactgtcatttatatcaatctcatctagtgcaggaggatctatatctttggaaaggggcgggctgcaacggaaacttgtacattagtttcagtttaccaaaatggttagagatgacggaaattaagacctaaatcttagaaatggacacatatgaaaacttcagacacaactcttaaaatacgcatcccctcataatgygtcacttctgacaaacccatgagaaagcaaaaaatttaacacctatcccaaaatag

SEQ ID NO: 414814 - DNA, 587 bp, Homo sapiens
ttaaatatgtgccatagacacttgcagacactattactagaagcataaattactgaaaccttaaagaagacaatccagcaataactgtcaaatcataaaatgttctttgaycagggattcgaatggtaggaatttactctacaggtatacttgtaatctcttcaaatttccatgaatttactacagctttttttatttttttaatttttattttttgaaacggagtcttattctgtcacccaggctggagtgcgatggcgcgatctcagctcacggtaacctccgcctcacagattcaagcgattctcctgcctcagcttcccgagtagctgcggttacaggcacccaccactacacctagctaatttatatatttttagtaaagacagggcttcagaaccatgtagaacaggctggtctcaaactcccggcctcaagtgatccgcccgcctcggcctcccaaagtgttgggattacaggtgtgagccactgcatctggccctactatagctttttttatgacggtaaataaataaaaacaaagacctggaaacaaccaaaagggagcaattaaagcacaattcatc

SEQ ID NO: 414815 - DNA, 587 bp, Homo sapiens
ttaaatatgtgccatagacacttgcagacactattactagaagcataaattactgaaaccttaaagaagacaatccagcaataactgtcaaatcataaaatgttctttgaccagggattcgaatggtaggaatttactctacaggtatacttgtaatctcttcaaatttccatgaatttactacagctttttttatttttttaatttttattttttgaaacggagtcttattctgtcacccaggctggagtgcratggcgcgatctcagctcacggtaacctccgcctcacagattcaagcgattctcctgcctcagcttcccgagtagctgcggttacaggcacccaccactacacctagctaatttatatatttttagtaaagacagggcttcagaaccatgtagaacaggctggtctcaaactcccggcctcaagtgatccgcccgcctcggcctcccaaagtgttgggattacaggtgtgagccactgcatctggccctactatagctttttttatgacggtaaataaataaaaacaaagacctggaaacaaccaaaagggagcaattaaagcacaattcatc

SEQ ID NO: 414816 - DNA, 557 bp, Homo sapiens
ataaattccatcagggcatgagctttgtcttgttcaccagtgttttcccagtgcctggcatgtgttggggcctcagtaaatatttgttgaataaatacaatatataatgccatgaatacacacacatatacataaacagagatatatttatatgtatataataacagattattatactgggatttgaacggtaagattctatcaattcattctaacaaaaacataaactataatgtctactaaaaattattgacaaagccctcaaaaaggattatctcattcartacacacaacaaacttatggattaggtgctattattatccctattttgcaaacaaggatactgagaaatagacactaaggaacctgtccaagaccacaggttggagaggcagaccatgaacctaggattcccactccagaccactgttctttaacagtatatgatactgtctctatgtttcctgtgcctgacacttgagatgtaaatttaaaagttgtgaactacctcaagggatttgtcatcacctgccaggggaggcacgaaacgggaaca

SEQ ID NO: 414817 - DNA, 551 bp, Homo sapiens
ctccagaccactgttctttaacagtatatgatactgtctctatgtttcctgtgcctgacacttgagatgtaaatttaaaagttgtgaactacctcaagggatttgtcatcacctgccaggggaggcacgaaacgggaacaaattaggaaacagtgtaagagtagactttttaacctgaaggttctagcatgctgattatgagaagcaaacatctatactataaccatcctatgcccaatttgcagctatttaaaatattcagatttcagatagaagaattatgtgcactaaaaatacattttgcctgagtaaagtgtgtactaagtgttgagtgtttttgacttatgaaaattgtgaatatccagtgtaggtrtggatgcggttattcacatgggcagatgatcagagactgcacagtgctaagaacttcagcgccactaggcacatatagtcggttatttaattgcattacatttcaacgaagagatcctagacatagggaaatatcgttgcttattatataggaaaacgttgaccttaaatcaccaccg

SEQ ID NO: 414818 - DNA, 462 bp, Homo sapiens
tttaactccaggaatatttcggggatctctaagcagggaattaaagaaaacttcgccagctccccccatcttcataagcagaagaacagccaattatagcacagatttcatttggtcactttcattatcaacagagaacattctacgacagagtttgccaacagagctcatcacaacagactgcttctaaggcctgccaaagaacaggactctagacagtctcgctttctttaaccagaaacaagaactctcttcacccctattttatctctgtgtccccaaaaattataccattggcagctgcycttttgcagaccttctaggaagcaaaacaataacattattgaatgctgacatcctcttcctaattaacatgcagaaatatgcaacccataactccaatttgaaatgtcaccctggcactgcacttctatgctgaaggaaaacctttgcaatgctcaa

SEQ ID NO: 414819 - DNA, 462 bp, Homo sapiens
tttaactccaggaatatttcggggatctctaagcagggaattaaagaaaacttcgccagctccccccatcttcataagcagaagaacagccaattatagcacagatttcatttggtcactttcattatcaacagagaacattctacgacagagtttgccaacagagctcatcacaacagactgcttctaaggcctgccaaagaacaggactctagacagtctcgctttctttaaccagaaacaagaactctcttcacccctattttatctctgtgtccccaaaaattataccattggcagctgctyttttgcagaccttctaggaagcaaaacaataacattattgaatgctgacatcctcttcctaattaacatgcagaaatatgcaacccataactccaatttgaaatgtcaccctggcactgcacttctatgctgaaggaaaacctttgcaatgctcaa

SEQ ID NO: 414820 - DNA, 622 bp, Homo sapiens
gcaaatctagcttttcttggggccctgatcctatgaattacttacttcgggaagggcctgtgaaaactgaaatttgcatctgcctacagagggaagtttaggaaatctaacttaattcattccacagccactcttgacatgacatatgaaccttcaaccagatgcatgtgttatgccttggtttaattatgagatgaattmataggttttgtgtaatatcctgattaacttatgtctcctgttcacagattgtaaacgtaaaatttctccaggagagggaattatatcctcctgcaacttgaggtttttgctgatctgttcagcgtggtaatacatctaagggatgtttagtccccacttcaaacataaatagctattcctgatactcagatgaaaaagaaaaaaagatgccttaattataacttcactcaactgcattaataccattctatttaaaataacaatactgagttgttggtttttttttttgagcccctgaagatggatggaaaaattaagtctgatttaatctatcagctatgcacggtataacaatattaagtcatacatttggagtgtaagtagctagaggtagtttctacatcaaactcacttggccacc

SEQ ID NO: 414821 - DNA, 350 bp, Homo sapiens
ctaatgcacttatgtggaagatccttcaataatatggttaagaacttggggttttggagccagaaaaacttatatttgaacacagttgtatcacttaacaggtaacccttggcaaattaattagttttcctgaacctcagtcagttacctcatctgcaaatgggaagagtaatggggcctagtttcttgagatrttgtgaggttacaaggagataatgtaggtaaaatgctttgccccatgcctgacacttaatgagtactcaaaaaaagtgagctattaataggattgattttttaccattttaaaaatggcaccatatcattcaacattctcaaaaatggaagcttct

SEQ ID NO: 414822 - DNA, 602 bp, Homo sapiens
gcatgctactatttattattattatacttttaaaaagagacagggtcggccaggcacggtggctcatgcctgtaattccaatgcgttgggaggccaggcgggcggatcccaaggtcaagagatcgagaccatcctggccaacatggtgaaaccctatctctactaaaaatacagaaattagccgggtggggtggcacatgcctgtagtcccagctacttgggaggctgaggcaggggaatcgcttgaacccaggaggtggaggtagcagtgagccaagattggaccactgcactccagcctgccaacagagcaaaactccatctcaaaaaaaagagagagagagagagggagacagggtcttggtatgttgtccagtctggacttgaacttctgtgctcaggcaattctctcaccctcagcctcttgagtagctgggactatcagtgtgtgccactgcacccagcttattattacactttttaaaggacccagagcttgaaaactagggcaagaaattgtttttgataatttctgctatttcaattcccygtgcccctgtaaagatttttgaactgtgcatcagtcagtactgccttctcca

SEQ ID NO: 414823 - DNA, 613 bp, Homo sapiens
ttggactgtcttttgtcaaattcccaaagcaaatatggaagggtttcagtgcatcattcaattccacagtggaccatgctcaaatagaaacgaggatgtagaaacaatgaataaatgcatcccagtcgacaaagtgtcaacacatcctactctgctgccctggtgtgtgagtctgaaaatagtgaagggcattgaagttatgtagactctactgcagaaccaagataggctgaaygatagatcgcaacaggtggatatctgatacatcaggccatgcagaattcctagtggtcactcgcattctaactctctctcagctccaaggggctctctctggaggttggatctcatccacaaggttttggccaggatccagaaacatgtaataggaaaactggcaaaggtcccaacccagcccattaatgatctgcaaatggtaccctttagatcaaatactcaagccacaggacttggaggtgcagcctcacgtttgtcttccagaaacaattatttcaccatcgaggttcacttgtgctgcttgctagaaatcattctcctctccccttggctccagcaccctcagtcataatttcaaacacctacttggaattgc

SEQ ID NO: 414824 - DNA, 554 bp, Homo sapiens
acacatctctagtctcagctactcagaagctgaggtgagagaatcactggaaccctgaaagcagaggttacagtgagctgagactgcaccactgcactccagcctgggcaacagatggagaccctgtttcaaaaccaaccaaccaaccaacaaaaaacaaaaacaaaatattgtcattaagtaatgcctaattggtaaatattctttttttaaaataaaaaaaaaaagscttggactttctgctcccaggttaaaagaaagagattttgagtagatacttttcacattttggtaaaatacacttagcataaaagtcatcatttgagcaattttaaattgtataattcagtgacagtacattcataatgttgtccaaccatcatcactatctagttctggaacatttcatcaccacaaacagaaactccatacccattaagcattaattccctgttctcctctcccccaagttcctggcaactactatgaatttgcttattctggatatttcatacaaatggaatgatacaatatgtacccatttgtgcctgtct

SEQ ID NO: 414825 - DNA, 554 bp, Homo sapiens
acacatctctagtctcagctactcagaagctgaggtgagagaatcactggaaccctgaaagcagaggttacagtgagctgagactgcaccactgcactccagcctgggcaacagatggagaccctgtttcaaaaccaaccaaccaaccaacaaaaaacaaaaacaaaatattgtcattaagtaatgcctaattggtaaatattctttttttaaaataaaaaaaaaaaggcttggactttctgctcccaggttaaaagaaagagattttgagtagatacttttcacattttggkaaaatacacttagcataaaagtcatcatttgagcaattttaaattgtataattcagtgacagtacattcataatgttgtccaaccatcatcactatctagttctggaacatttcatcaccacaaacagaaactccatacccattaagcattaattccctgttctcctctcccccaagttcctggcaactactatgaatttgcttattctggatatttcatacaaatggaatgatacaatatgtacccatttgtgcctgtct

SEQ ID NO: 414826 - DNA, 599 bp, Homo sapiens
catctcatagaaagccagcctcaaggtcaacaatactttacttgccttaccgatgaataggaatatactacaagtagatttgagaaagtggtactattttttccacttgattttatttttaaaccccaaactgctcatcacttaaacagggtcctttttaagtatttaagtacctccaagatttgtactagaatagtgaatatcaacccttcccaccactagataataacttaagtaattaatttgagctgtgycctagtgagtgtctcagaaagaattagcaatgcccccaaacttcatccagtaaagcttgagtggctatctgcttcttacacacattttatggttcataaacttgcagtgtatctggcttcagagactcctgctgaggaaatgagaaagtgaccttccttatcactgaaatccacaaaccatgactacaaaaaggaaactggactgggaacttatctgcgctatctttttattctagacattctcttgaaatatccagttgaggcagaaaaagaaaaatcctactggtgaaattctgataagccatttcccactgcttcaccttcccaacgccatgcggtttcaag

SEQ ID NO: 414827 - DNA, 503 bp, Homo sapiens
aaaaggaaactggactgggaacttatctgcgctatctttttattctagacattctcttgaaatatccagttgaggcagaaaaagaaaaatcctactggtgaaattctgataagccatttcccactgcttcaccttcccaacgccatgcggtttcaagatgttgagatctcactcarcaactgtccaaatggtcttatggccagactgttaaaggaaaataatcagcccacaaagattacattgtcaatattccatgatatcacctgctgttaaattaatcagggtcctgcttgtcaaaatctaacaagacttcaaaaaatgacagtcactgcaactgcttacgtgttaagaacagatcatcattttcctattctaacacaatcatttgcatctgataaatatccagagtatcagttggatatccaggacagcctcatgcagttcattctttagctgatagagctagagcacagtagaatgtattagtcctccaaattcactca

SEQ ID NO: 414828 - DNA, 503 bp, Homo sapiens
aaaaggaaactggactgggaacttatctgcgctatctttttattctagacattctcttgaaatatccagttgaggcagaaaaagaaaaatcctactggtgaaattctgataagccatttcccactgcttcaccttcccaacgccatgcggtttcaagatgttgagatctcactcaacaactgtccaaatggtcttatggccagactgttaaaggaaaataatcagcccacaaagattacattgtcaatattccatgatatcacctgctgttaaattaatcagggtcctgcttgtcaaaatctaacaagacttcaaaaaatgacagtcactgcaactgcttacgtgttmagaacagatcatcattttcctattctaacacaatcatttgcatctgataaatatccagagtatcagttggatatccaggacagcctcatgcagttcattctttagctgatagagctagagcacagtagaatgtattagtcctccaaattcactca

SEQ ID NO: 414829 - DNA, 643 bp, Homo sapiens
ggtgctcattccgttctctgtggcctttataaaggctgtgcagttttacaggtcagtgccgtagattcctacatsattatcacaagctcccacagtgatggctgttcttccccaagggcgtctcacgtggccctgggcccagagctaccttcaaaaacccatctgcggggcctgggaagccttctcttctcttaccaaagcaactctgagactactactcaaaatgtcttattctgcagaaagacaaatatccttcaaatatttgtccctcaaatatccctcaaatattctgcagaaagacaactatccctcaggggctttgagcaccaaggaagagcctggcttctcagccttggaacatgagagcacagcttctttgctgaccttggtgtgtgtttatcacaggtgacacataaagctttctttcagacccaggacataggcacacagcttctcggttagcctcccaagtttctgaagccctgattgtgggtgtggggactttgtgcaagccagggttatgttcttggagggggtagtgttgaagccctgtttttcagaccctggacatctgcacgtaactgctccactggcctaggggcatgtcaggtgcttggtgggttgaggacctgttctccttggg

SEQ ID NO: 414830 - DNA, 643 bp, Homo sapiens
ggtgctcattccgttctctgtggcctttataaaggctgtgcagttttacaggtcagtgccgtagattcctacatgattatcacaagctcccacagtgatggctgttcttccccaagggcgtctcacgtggccctgggcccagagctaccttcaaaaacccatctgcrgggcctgggaagccttctcttctcttaccaaagcaactctgagactactactcaaaatgtcttattctgcagaaagacaaatatccttcaaatatttgtccctcaaatatccctcaaatattctgcagaaagacaactatccctcaggggctttgagcaccaaggaagagcctggcttctcagccttggaacatgagagcacagcttctttgctgaccttggtgtgtgtttatcacaggtgacacataaagctttctttcagacccaggacataggcacacagcttctcggttagcctcccaagtttctgaagccctgattgtgggtgtggggactttgtgcaagccagggttatgttcttggagggggtagtgttgaagccctgtttttcagaccctggacatctgcacgtaactgctccactggcctaggggcatgtcaggtgcttggtgggttgaggacctgttctccttggg

SEQ ID NO: 414831 - DNA, 622 bp, Homo sapiens
ggagtgcaatggcgtgatctcggctcactgcaactttccgtctcccagcttcaagcgattctcccgcctcagcctcccgtgtagctgggattacaggcacccaccaccaggcttggctaactttgtatttttagtagagacggggtttcactatgttggtcaggctggtctcagaaccatacatgtctaattgctggcttttcmttctcaggaatgcaggatcaccaagttgtatatcattactttctctatcagtgatccaagtattttaattgtgccttcacctcttcatggattttctttttctactcacaacggcttttttaaagacataattttataacagatggagcattcaatggataatttatatcccaatacctttcttaaaccttcactaatcacaattaatggtcatgcagtgttcattcaaaagattattgatcagtgttctctggatttgacaggggaaatattctgctgctttctaacttaagtcctaaggctcataagtttgaccttgatgcagctcacgtcttggttttttaaaagaggaggagttctcagcagacagagttctccctcccaaggggaatctggatcaaaacttatgagataatat

SEQ ID NO: 414832 - DNA, 622 bp, Homo sapiens
ggagtgcaatggcgtgatctcggctcactgcaactttccgtctcccagcttcaagcgattctcccgcctcagcctcccgtgtagctgggattacaggcacccaccaccaggcttggctaactttgtatttttagtagagacggggtttcactatgttggtcaggctggtctcagaaccatacatgtctaattgctggcttttcattctcaggaatgcaggatcaccaagttgtatatcattactttctctatcagtgatccaagtattttaattgtgccttcacctcttcatggattttctttttctactcacaacggcttttttaaagacataattttataacagatggagcattcaatggataatttatatcccaatacctttcttaaaccttcactaatcacaattaatggwcatgcagtgttcattcaaaagattattgatcagtgttctctggatttgacaggggaaatattctgctgctttctaacttaagtcctaaggctcataagtttgaccttgatgcagctcacgtcttggttttttaaaagaggaggagttctcagcagacagagttctccctcccaaggggaatctggatcaaaacttatgagataatat

SEQ ID NO: 414833 - DNA, 582 bp, Homo sapiens
ctatttgagttggcttaggcaactctcaaggctcccagtttccatgtccaattaataccgaacaaaaacaaatctacaagttattttttaaatcttacccagtagggggaggaatttcctttcagagattatatccataccagttacattttcagataacagaaataccactgttccatggattttatcatatattctgatattaatcagagtttaatttgcattctctccacagtcacatccccaggtctccctaaatgaattctatcaccccaaacagctcgttaccagagttagaaagtaatatacagtgtgctcttgcatccaatagaagtaaaagaagttgaacaatgagaacacatggacacagggaggggaatatcacacaccggggcctgctgggggctggggagctaggggagggatagcattgggagaaayacctaatgtagatgacgggttgatgggtgcagcaaaccaccatggcgtgtgtatacctatgtaacaaacctgcacgttctgcacatgtatcccagaacttaaagtatatatatatatatttaaagaagtaaaagaagcgtt

SEQ ID NO: 414834 - DNA, 582 bp, Homo sapiens
ctatttgagttggcttaggcaactctcaaggctcccagtttccatgtccaattaataccgaacaaaaacaaatctacaagttattttttaaatcttacccagtagggggaggaatttcctttcagagattatatccataccagttacattttcagataacagaaataccactgttccatggattttatcatatattctgatattaatcagagtttaatttgcattctctccacagtcacatccccaggtctccctaaatgaattctatcaccccaaacagctcgttaccagagttagaaagtaatatacagtgtgctcttgcatccaatagaagtaaaagaagttgaacaatgagaacacatggacacagggaggggaatatcacacaccggggcctgctgggggctggggagctaggggagggatagcattgggagaaatacctaatgtagatgacgggttgatgggtgcagcaaaccaccatggcrtgtgtatacctatgtaacaaacctgcacgttctgcacatgtatcccagaacttaaagtatatatatatatatttaaagaagtaaaagaagcgtt

SEQ ID NO: 414835 - DNA, 632 bp, Homo sapiens
aatgttatgaaataatggatttaagtaatgatcatcaatgactactgtaaataatacaaataaataaatacaaataaagaggcagccagtcattccaccggaatagaagaatacaaygtataggaagtagccaaaaaacaaaacaaaacaagaattggatctggattttatcaagcctctaggtcttattagtgttgccaagatatttgggggatagagtgacatgataaatacatttctgggaatgcaataatcagcagaatccagagggcgggaaactatagagagaaagtgattttttgtttgtttgttttgttttgttttttggctttttttttcctttcttttcttttttttttttttttttgagacagtgtcttactatgtcatccagactcccgggctcaagcaaccatctggcctcagcctcctgagtggctgagactacgggcatgtgtcaccatgcccagctaattgtttcttgtatttttcatagagacagggtctcgctatgttgcttctggcctcaagtagtcctcctgcctcagcctcccaaagagctgggattacaggtggtgtgagccaccacacccagctaacaaatacagcacaaggagagaaggtggggacgt

SEQ ID NO: 414836 - DNA, 508 bp, Homo sapiens
tttgcatattttcaaaatatttcataayaaaaagatttttgaaaaattaaaaaacaaaactttggtgctctcaaataaaataaaaaatgttaacatgcacaggggattcagattttgtgatcctgaagttgtacgatcggggttttcttttaaagaatacaaaattaagaattcaatgttaggtacaaagcctaagatggtgctcatgcaagtgaaggcaactgaaggtcaagttttgttaccttcatggtaaatccaactccatgatcacagctttgcagctcctgaccctctggtacctgcatatcagtctagctttaactctgctgggcaccctgtaagtctactctctgagcgtccccacactggcttcctcccgttcttccaatgtatcttagtcgcttccaccccttggctcacactgttctgcccagaaacttctctgcactcccacaattcttggaattgttctttttcctccctgtttcagatatattagttgctgctt

SEQ ID NO: 414837 - DNA, 541 bp, Homo sapiens
tctctgtcgcccaggctatagtgcagtggcacgatcttggctcactgcattctccacctcccaggttcaagggattctcaggcctcccaagcagcggggactataggtacgtgccatcatgcctygctaatttttggatttttagcagagacagggtttcaccatgttggccaggctggtctcaaacccctaagctcaagtgatctacctgcctcggcctcccaaagtgctgggattacaggtgtgagccaccatgcccggcccatgcattattattaatgttgaagtagataatttaacaaacatcaatgaagtataagatttttcactcataggtgcaaaatatcatgccaattgccttctatgagctgtcataagccacagcctagagattcaattccatttcaagattcaaccaaagccaactcataaacaagaacatgtaaaagacagaaaaacccactaccggcaggctgaaacagatgctgtgacgtggacctggcctgtcatggcgtgtcacagcatggcacaggcctatatc

SEQ ID NO: 414838 - DNA, 541 bp, Homo sapiens
tctctgtcgcccaggctatagtgcagtggcacgatcttggctcactgcattctccacctcccaggttcaagggattctcaggcctcccaagcagcggggactataggtacgtgccatcatgccttgctaatttttggatttttagcagagacagggtttcaccatgttggccaggctggtctcaaacccctaagctcaagtgatctacctgcctcggcctcccaaagtgctgggattacaggtgtgagmcaccatgcccggcccatgcattattattaatgttgaagtagataatttaacaaacatcaatgaagtataagatttttcactcataggtgcaaaatatcatgccaattgccttctatgagctgtcataagccacagcctagagattcaattccatttcaagattcaaccaaagccaactcataaacaagaacatgtaaaagacagaaaaacccactaccggcaggctgaaacagatgctgtgacgtggacctggcctgtcatggcgtgtcacagcatggcacaggcctatatc

SEQ ID NO: 414839 - DNA, 541 bp, Homo sapiens
tctctgtcgcccaggctatagtgcagtggcacgatcttggctcactgcattctccacctcccaggttcaagggattctcaggcctcccaagcagcggggactataggtacgtgccatcatgccttgctaatttttggatttttagcagagacagggtttcaccatgttggccaggctggtctcaaacccctaagctcaagtgatctacctgcctcggcctcccaaagtgctgggattacaggtgtgagccaccatgcccggcccatgcattattattaatgttgaagtagataatttaacaaacatcaatgaagtataagatttttcactcatagktgcaaaatatcatgccaattgccttctatgagctgtcataagccacagcctagagattcaattccatttcaagattcaaccaaagccaactcataaacaagaacatgtaaaagacagaaaaacccactaccggcaggctgaaacagatgctgtgacgtggacctggcctgtcatggcgtgtcacagcatggcacaggcctatatc

SEQ ID NO: 414840 - DNA, 541 bp, Homo sapiens
tctctgtcgcccaggctatagtgcagtggcacgatcttggctcactgcattctccacctcccaggttcaagggattctcaggcctcccaagcagcggggactataggtacgtgccatcatgccttgctaatttttggatttttagcagagacagggtttcaccatgttggccaggctggtctcaaacccctaagctcaagtgatctacctgcctcggcctcccaaagtgctgggattacaggtgtgagccaccatgcccggcccatgcattattattaatgttgaagtagataatttaacaaacatcaatgaagtataagatttttcactcataggtgcaaaatatcatgccaattgccttctatgagctgtcataagccacagcctagagattcaattccatttcaagattcaaccaaagccaactcatmaacaagaacatgtaaaagacagaaaaacccactaccggcaggctgaaacagatgctgtgacgtggacctggcctgtcatggcgtgtcacagcatggcacaggcctatatc

SEQ ID NO: 414841 - DNA, 591 bp, Homo sapiens
ttagatgatatttatctagtggagataaatttggtaaaattagctgtttatcatatccttgttattctgtcatagtctcatgtgtatcccagtaacatactttttcctgtggaggtttgaaatgtgggtatatgtaatatggagtggttcatgtggtagcaatatttggtgtagtatcatcctttggacctacttcataatcataatcttcatttccttcaagcctgggtttcttcatttccttcagaattcatatcaagtattaacaaatgacttacttgtagaagtgtattatattcaagsatgtcatgttagatcctgcaatatatggttctatctgtggtattatgattgctctttggtctgatttattgcttcttatgcaatgatctattttgattgatatgtctgtttctgttagcatttcgctatccattatgtgtgctgtctattggtttgaagtgttattgaatgcttggttgtagctgcataaattggctgtgtcacatttagtcatgtcatttatgcattcttctgaggggtgcttaaaaatgtgtgcaaagcttctataaagacgcgttggctgggttg

SEQ ID NO: 414842 - DNA, 404 bp, Homo sapiens
caaaatcagtgccaatgtctagactttacagatgtaatgattatctagttatgtatctcataagagcaaccaggtatatgtggagaaagatcctggttatcttccttaatatcaatgtaattgatttgggatgatgccaaaggttctagtttcctttaacaatgcactctggagctgctatccacaattacttgtcccaaaggggttttttttttttttttacaatawtgatgttggcctcactttgcagattttgattttcaaggtctaaggccatgaacccccatctgtccttaggcagccagctttgttctgtatgcaaagttatgactcacacagaaaggcttcctgtgggtgaaaaggaatgtgtcgccgatttcagtggaacagtgaggacagagctt

SEQ ID NO: 414843 - DNA, 574 bp, Homo sapiens
atcaactttcaagtcttattatttaagaaatacatattgtaaggctatagctgccatagatagctattttctgatgggtctgaacaaagtaagttgaaaaccttctggaaaggaatcattatagatgtcattaagaacattcatgcttcatgggaggaaatcaaaatatcaacattagcaggagtttggaagatgatgattccaaccctcagggatgactctgaggggttcaagactttagtggcgaaagtcactgcagatatggcagaaacagcaagagaactagaattagacatgaagcctgtagatgtgamtgaactgctgcaatcttatgagaaaacttgaatggatgtagagttgcttcttgtggatgagcaaagaaagtgcttttttgagatgtaatctactcttagtgaggttgccctcaatattgttgaaatgacaatggatttaggtagagtattatataaacttagttgataaagcactggcagggcttgagaggactgacttcaattttgaaaaaagttctactgtgggtaaaatgctgtcaaacagcattgcatgctataga

SEQ ID NO: 414844 - DNA, 574 bp, Homo sapiens
atcaactttcaagtcttattatttaagaaatacatattgtaaggctatagctgccatagatagctattttctgatgggtctgaacaaagtaagttgaaaaccttctggaaaggaatcattatagatgtcattaagaacattcatgcttcatgggaggaaatcaaaatatcaacattagcaggagtttggaagatgatgattccaaccctcagggatgactctgaggggttcaagactttagtggcgaaagtcactgcagatatggcagaaacagcaagagaactagaattagacatgaagcctgtagatgtgacygaactgctgcaatcttatgagaaaacttgaatggatgtagagttgcttcttgtggatgagcaaagaaagtgcttttttgagatgtaatctactcttagtgaggttgccctcaatattgttgaaatgacaatggatttaggtagagtattatataaacttagttgataaagcactggcagggcttgagaggactgacttcaattttgaaaaaagttctactgtgggtaaaatgctgtcaaacagcattgcatgctataga

SEQ ID NO: 414845 - DNA, 574 bp, Homo sapiens
atcaactttcaagtcttattatttaagaaatacatattgtaaggctatagctgccatagatagctattttctgatgggtctgaacaaagtaagttgaaaaccttctggaaaggaatcattatagatgtcattaagaacattcatgcttcatgggaggaaatcaaaatatcaacattagcaggagtttggaagatgatgattccaaccctcagggatgactctgaggggttcaagactttagtggcgaaagtcactgcagatatggcagaaacagcaagagaactagaattagacatgaagcctgtagatgtgactgaactgctgcaatcttatgagaaaacttgaatggatgtagagttgcttcttgtggatgagcaaagaaagtgcttttttgagatgtaatctactcttagtgaggwtgccctcaatattgttgaaatgacaatggatttaggtagagtattatataaacttagttgataaagcactggcagggcttgagaggactgacttcaattttgaaaaaagttctactgtgggtaaaatgctgtcaaacagcattgcatgctataga

SEQ ID NO: 414846 - DNA, 428 bp, Homo sapiens
tcagtgtcatgattgatggctccatagaagggaactctagcactttaattggactgtaagaatcccagaagaaggaagcacattgtatacttttacatcttgacaacttctgggcaggatctagaacatgtaatagatggctactaaatacatgttgcattggaggctgctgctaacatatatgatatctttgggcaagtttggaaaaygcccaataaaggctaaaaattatacaaagattcccttccttgcatgtccatgcagcttctgtaccaggaagcatggctggatatgcaaacagtgggtcaggttttagccccacacaactccgtggccgggtgcccctgctagggcgtaatttatatgcatgaccttcttgcaaaccaagccatggttggtgtgggagacagtgactcaggacccacagg

SEQ ID NO: 414847 - DNA, 498 bp, Homo sapiens
tggaagtcaatggagggtctgcgacagtggcgttcagcagtggacggtgagcgaaagctcagcttgagccagaacaaacatggaccagaagagtgtgcagttgcaagatttaatagagtgaaaacagagctcccatacaatgggaggggacccaaagtgggttgccactccctgctcgaatgcctgggtttataccccgatcattgtccctcccactgtggtctcaggtgatatatgatttgactatttctttacctcctgcttttagcctaatttgtattttagtgagccctctttactacctgatttgttgggtgtgagctgagttacaagcccagtgtttaaaggtgggtgcaatcaccttccccagctaggcttaggaattcttagtcagcctaggaaayccagctagtcctgtctctcaccaggaaaactaatacagacactaatggagaaataaaaactagaataatgagaatattgctatttataggaaga

SEQ ID NO: 414848 - DNA, 492 bp, Homo sapiens
gcaagccatattcaactcacacttaggaaggaattgctaataagagcaatgcaccattttctaccatggagtagaacaaacagaattgaaaggagagaatattagtggtgcctcaattcctattttacctctcactattagacttcaatgagagcagaagtaaaacttcaatcatgaattaaagattgacattctccacatatcatccctgcctccaaaatgattatctcagttccagttcaaggatgttatacagtctttgcaatttatgactagccgtagagttcatgaaattacttcagattatgtgagtagrcattatgggttgtaacaattaagaaatctagcttcagtttttttttaaatctgaaattggagttaaaaagtaaaattggagtaaaaacacttcccatccatctatccttccaactatccttccatccatccatccatccatccatccatccatccatccatccttccttccctgct

SEQ ID NO: 414849 - DNA, 606 bp, Homo sapiens
tgattctcttgtttatgaacttttactttgttctttaacttttcttatcagaaagcagtactttgttgaccatctttgtctacatatcattacatacctcaggaagctgaattttggattaaaagtctttgatttttagtttctgatattactgycaattccctttaaaaacattatttcagtttatatttccaccagtaattatatcaaatcacttctctcttcatattctggatgttatcattcaactccttaacaacctaataggttaaaatttgatagcctatatgtttttctgatctttgatgaggttggttttttggtatgctaattatatggagctcccactccagtttccagaaagatgcccattactacatctctcagatctttaggaaagttccctgtgggcctgtctcacatgtattcaaaccagcatcttgggattttctgctccttgtttggtcgtttatccctaggctgcctctcccactgatgatcttgcagttcatgcagctgtcctctgctagtgactataattattattgtcttctggtatcagggaggggcaccttgctaccttgtggctctgttgtatcactcgta

SEQ ID NO: 414850 - DNA, 547 bp, Homo sapiens
cagactttatcccaggccatccatagatgaggacaggaagccagatctcttgatcccagctcagtaccggtcctctcgagagctttattccattttcttacttgctatcttttggataataaatcaatcaagacactgggaaattactattaggacaaaatcctccataattctctaccttagtcagatgaagccttattatccagatgaaaatgtctttgctctcaaatgcaaacatataataaccaaataaacaaagaaatkaagatatgcgcactctgatcccttggttaatctgcctcacctcagcactgccacgtgtgattttatctaatatatgattatattctcttcaacaaacggaaacaacggcacaggcacctgagcatgtcacatgtgccggtcactgagttaggggttgtgggttttcctattagactgcaaggacctggaaagatacatttttaattaattttcaaaactacagtctacaaatacgtattgaatgctgcaaggctacaaggcgaaagtgtgtgatgtcactcac

SEQ ID NO: 414851 - DNA, 547 bp, Homo sapiens
cagactttatcccaggccatccatagatgaggacaggaagccagatctcttgatcccagctcagtaccggtcctctcgagagctttattccattttcttacttgctatcttttggataataaatcaatcaagacactgggaaattactattaggacaaaatcctccataattctctaccttagtcagatgaagccttattatccagatgaaaatgtctttgctctcaaatgcaaacatataataaccaaataaacaaagaaattaagatatgcgcactctgatcccttggttaatctgcctcacctcagcactgccacgtgtgattttatctaatatatgattatattctcttcaayaaacggaaacaacggcacaggcacctgagcatgtcacatgtgccggtcactgagttaggggttgtgggttttcctattagactgcaaggacctggaaagatacatttttaattaattttcaaaactacagtctacaaatacgtattgaatgctgcaaggctacaaggcgaaagtgtgtgatgtcactcac

SEQ ID NO: 414852 - DNA, 547 bp, Homo sapiens
cagactttatcccaggccatccatagatgaggacaggaagccagatctcttgatcccagctcagtaccggtcctctcgagagctttattccattttcttacttgctatcttttggataataaatcaatcaagacactgggaaattactattaggacaaaatcctccataattctctaccttagtcagatgaagccttattatccagatgaaaatgtctttgctctcaaatgcaaacatataataaccaaataaacaaagaaattaagatatgcgcactctgatcccttggttaatctgcctcacctcagcactgccacgtgtgattttatctaatatatgattatattctcttcaacaaacggraacaacggcacaggcacctgagcatgtcacatgtgccggtcactgagttaggggttgtgggttttcctattagactgcaaggacctggaaagatacatttttaattaattttcaaaactacagtctacaaatacgtattgaatgctgcaaggctacaaggcgaaagtgtgtgatgtcactcac

SEQ ID NO: 414853 - DNA, 567 bp, Homo sapiens
atccatgttgcaattggtagtatctcctttttaaggctgaatagtattccattgtgtatatataccacattgtctttatccgttcatctgtgggcacacacttcatttgtttccatgtcttagckattataagtaatgcttcacatggttgactatttattgtgagaccaggtgaaggtcagggtatcagatcagtactcagcagtaaatgctctgcacactcataagagataattgaattggggaaagttaaatgaagatgtctattagtgaataaagggcacttgatcatgatgaaaacacagtatcaaattgaggaaaggtcacatgatataaaaaccatggcaatgctgagataagacagattaaccaagggatcagagtgcaaggtatcttgatttttttcatttattttatgtttatgtttgagaaaaaacgtgtttttttgagacagagtctcactctgttgtcagattggagtgcagtagcacaatttcagctcactgcaccctccacctcccaggttcaagtgattctcctgcctaggctcccaaatagctgggacta

SEQ ID NO: 414854 - DNA, 567 bp, Homo sapiens
atccatgttgcaattggtagtatctcctttttaaggctgaatagtattccattgtgtatatataccacattgtctttatccgttcatctgtgggcacacacttcatttgtttccatgtcttagctattataagtaatgcttcacatggttgactatttattgtgagaccaggtgaaggtcagggtatcagatcagtactcagcagtaaatgctctgcacactcataagagataattgaattggggaaagttaaatgaagatgtctattagtgaataaagggcacttgatcatgatgaaaacacagtatcaaattgaggaaaggtcacatgatataaaaaccatggcaatgctgagataagacagattaaccaagggatcagagtgcaaggtatcttgatttttttcatttattttatgtttatgtttgagaaaaaacgtktttttttgagacagagtctcactctgttgtcagattggagtgcagtagcacaatttcagctcactgcaccctccacctcccaggttcaagtgattctcctgcctaggctcccaaatagctgggacta

SEQ ID NO: 414855 - DNA, 567 bp, Homo sapiens
atccatgttgcaattggtagtatctcctttttaaggctgaatagtattccattgtgtatatataccacattgtctttatccgttcatctgtgggcacacacttcatttgtttccatgtcttagctattataagtaatgcttcacatggttgactatttattgtgagaccaggtgaaggtcagggtatcagatcagtactcagcagtaaatgctctgcacactcataagagataattgaattggggaaagttaaatgaagatgtctattagtgaataaagggcacttgatcatgatgaaaacacagtatcaaattgaggaaaggtcacatgatataaaaaccatggcaatgctgagataagacagattaaccaagggatcagagtgcaaggtatcttgatttttttcatttattttatgtttatgtttgagaaaaaacgtgtttttttgagacagagtctcactctgttgycagattggagtgcagtagcacaatttcagctcactgcaccctccacctcccaggttcaagtgattctcctgcctaggctcccaaatagctgggacta

SEQ ID NO: 414856 - DNA, 410 bp, Homo sapiens
cctcacacctgctagaatggctattatctgtaaacacttttggttgtcacagcctgggaaggggagctactggcatctggtgggtggaagccagtgatgctgctaaacatcgtacaatgcacaggacagtccctcacaacaaagaattatctaccaaaattgtcggtagttctccsactgagaaaccttgctgttgcagagaatcactgtgtgtcataagaaatggtgtgaagggtatatatttggcacatgaatggggtaaagggtagagacagaaaaaagaatggaaaactttgcaagaaaaggttagaaatgatccttcttggactcaagccatggagcagttgagtagtgaggtgaataacctgaaaaggttgaaaattaatgtggagtcatcccctcctcaactg

SEQ ID NO: 414857 - DNA, 567 bp, Homo sapiens
taagataaacaaactagataatttaagacacggtgagtgctctgaagaaaktgcaagatggagatgcaatgtggaggggaatcaggttcgttacttaggagagctcagaaaggacttcctgagggtgtgacttttgaaccaagacctcagtgatgattgaaactcactgatgggaagacttggcgaagggcttctccagggaagctcgggggcaggttctagaagggaggcagggctggctggcttggggacatgctgtgtgtgaggaagcagtggttttcttcctaacctttatagggtcctacctgtcttgactcttgccagcttcttacctacaaacaactagatgcaaggggtcctatttatcctccagggagaaaagataatgcaagctgctctttgctatcatttagaattttagactttattacagagcgctgtgttaaccaggctgggggtggtagacacagaaactctgaagtcaccagggaaacttcacagcaatgctttgactgggactattccctgccttcatctggcagaaaggactcagtgtagctgccccat

SEQ ID NO: 414858 - DNA, 541 bp, Homo sapiens
aaatatctcttcaatatgctcatgtycttccttggagaaatgtgtgtccaaatcctttgtccatttaaaatacctggcaatgagattgctagatcataaggtagttccatattcttagttttctgaagagcctccatactgctctccatagtactaacttacattcccaccactagtgtttgagaggtcccctttcgccatatcctcaccatttattttcagtctttttgataatagccattttaactgagatgaggtgatatctcatggttttgatttgcatttccctaatgattagcggtgttgagtattttttcatatacctgttggccatttacatggttttttttttttgagaaatgtctattcaaataatttgcccatttttaaatcagattatttggtttttggctactgagttgtttgagctctttatatattctggttattaatcccatgtcagatgaatagcctacaaatattttctctcattctgtgggttgtcttttcactttgttgattgttttctttgctgtgcaga

SEQ ID NO: 414859 - DNA, 538 bp, Homo sapiens
tccatactgctctccatagtactaacttacattcccaccactagtgtttgagaggtcccctttcgccatatcctcacmatttattttcagtctttttgataatagccattttaactgagatgaggtgatatctcatggttttgatttgcatttccctaatgattagcggtgttgagtattttttcatatacctgttggccatttacatggttttttttttttgagaaatgtctattcaaataatttgcccatttttaaatcagattatttggtttttggctactgagttgtttgagctctttatatattctggttattaatcccatgtcagatgaatagcctacaaatattttctctcattctgtgggttgtcttttcactttgttgattgttttctttgctgtgcagaaactttttagcttgatgtaatcgtatttgtcaatttttgctttggttgcctgtgcttttgaggctttactcaagaaatctttgcccaaaacaatgtcctgaagcatttccccaaagttttattttagca

SEQ ID NO: 414860 - DNA, 541 bp, Homo sapiens
aaatatctcttcaatatgctcatgttcttccttggagaaatgtgtgtccaaatcctttgtccatttaaaatacctggcaatgagattgctagatcataaggtagttccatattcttagttttctgaagagcctccatactgctctccatagtactaacttacattcccaccactagtgtttgagaggtcccctttcgccatatcctcaccatttattttcagtctttttgataatagccattttaactgagatgaggtgatatctcatggttttgatttgcatttccctaatgattagcggtgttgagtattttttcatatacctgttggccatttacatggttttttttttttgagaaatgkctattcaaataatttgcccatttttaaatcagattatttggtttttggctactgagttgtttgagctctttatatattctggttattaatcccatgtcagatgaatagcctacaaatattttctctcattctgtgggttgtcttttcactttgttgattgttttctttgctgtgcaga

SEQ ID NO: 414861 - DNA, 559 bp, Homo sapiens
cctttgcccaatggatgttctcagcccctttgtcaaaaatcaactggctgtaaatgtgtggcccagcatgcttctgtgttaatctgtaaaacacattcttaaaagattttagctgaccaaaagcgacacaagaagaagaaaatatgatgaaattggaacaaaataaatgcacacaatggcatggttttyatggtttggggcagtagggctggtgggggaaggagatggccccacacttagctccaggctcctgagggccaaggcagaacggggaacgctgttagtcacaacatcatggtgtccatcggatgaaaaaaacttgcgagaaaagatagtgtttcttgaaaagaaaacagtctttctgatactggaatgtgctgaaaacttctttttgggtcttcccaaaaagaacacagctccaactggtgtggaagagtgggggtttcagggaggacctcaccagaggggaaactgaaactgacgaatgtaatctaacatttaactctggagagtgttgttgaaggcttccgcagagttggtggagagcagagttggtgga

SEQ ID NO: 414862 - DNA, 467 bp, Homo sapiens
acagagctgtaggagggagtggtgggttgggtcttgattccactgttctcacctaatgccagctaacatccagatccaaccctgtcccacctctgaggctggggacgggggacaaaggggctccaggggttccacagataacaggaccccaacaggactgaggctaccttccccctggggctacatgcattcatgtagaaatgaataggaagagtggcaggcaaggtgggctccaaggctttctaaggttgatgccatacrcacaccaaggctgggagtgaaatttgggctaattaacagtgacatgtaagtacaggaatctttaatttaaacgtaagcctctgcataccaataaaccttgccaactttttgggagttacagaacctcatgtaaacttgagaaacaacaggaatacacctttacagagagctctggagcacggaactaagtatgcccatcatgcaac

SEQ ID NO: 414863 - DNA, 609 bp, Homo sapiens
cttatattcattttatatagttctgtgcctaaaatggcacctctaagtatttttggcatctaaaaagtgatttctgagagtgaaaggatgcttcatggtttgcaccctggtgggctttgggctccttgactttgctcctttcctttctcttgtggtttgttcctggtgggctggccatgctgattgcagagacagtttccttagcaaagctgctggacacacttgtgtttgatttctgctcctggagatgcagtaattgacagtgttgagaggtgaggaatgctgaaaggtagaattcctaataactcataaaaggttattttgggggcatggagatcgggtctttcatgtggattcagtcattttagttttcttctatacagcaaaataatgcctacaataaatctcattcctgttccatgcacacgatgtgacagacattccaaagggtgggtcgtggattatgatgacacagaaaacttcagcttgtagacaytgccacagaaagcacacagactttggaaaccaacagacctgaagtcaaatgccgactttcagcttgctcctgtgtcacctttgcaagtcaattcacctcttcgagaccttagt

SEQ ID NO: 414864 - DNA, 601 bp, Homo sapiens
ctgagctttggctgatttcagtgagctttcagtgtgctctaagagaaagcattaacttcattattacattttatttctaagtcaagacatatcagacacagctattaatgctgtgatagtccagtacaattttctaatttgtaactcaaaaagaaaaaaatcccagacattgtacattgaaaatataccttagtatttagtagctcttggctgggcaccatggcccacacctgtaatcccagcactttgggagaccaaggcaggaggattgcttgagtctagtagttcaagaccagcctgagcaacatagcaagaccttgtctctattaaaaaaaaaaaaaaagaaagaatttagtagctctttgttagaataatgcttctaaatattgcctgtgtattgraaattttccaccatatgcttatttgtagcttttagtattttcaaccaatatctgtaatgattgggatattatcatcactatttctaaagacaaatgccatccagttcatttaaggtcaaactttgagactgccgtggtgacctagtatctggaattagtatatttataatgttggttcttttgtctcttgaatctataaa

SEQ ID NO: 414865 - DNA, 601 bp, Homo sapiens
ctgagctttggctgatttcagtgagctttcagtgtgctctaagagaaagcattaacttcattattacattttatttctaagtcaagacatatcagacacagctattaatgctgtgatagtccagtacaattttctaatttgtaactcaaaaagaaaaaaatcccagacattgtacattgaaaatataccttagtatttagtagctcttggctgggcaccatggcccacacctgtaatcccagcactttgggagaccaaggcaggaggattgcttgagtctagtagttcaagaccagcctgagcaacatagcaagaccttgtctctattaaaaaaaaaaaaaaagaaagaatttagtagctctttgttagaataatgcttctaaatattgcctgtgtattgaaaattttccaccatatgcttatttgtagcttttartattttcaaccaatatctgtaatgattgggatattatcatcactatttctaaagacaaatgccatccagttcatttaaggtcaaactttgagactgccgtggtgacctagtatctggaattagtatatttataatgttggttcttttgtctcttgaatctataaa

SEQ ID NO: 414866 - DNA, 552 bp, Homo sapiens
cacaattgctttacttagcattgtttcactggtagtgcattaccttctgtttctgcttcctttactcataaataacatccagtctacatttatcattccttgtctttacattcttctaagtagaattgtcagatttagcaaataaaaacagaagggygcccagttaaatttaagtttcaggtggtcagcaaatacatttttagcataagcatatcccttgtaatatttggggcatatttatactaaagaagtatttgctttttatctgaaattcaggtatggtgggtgtcctgtatgttatctgacaattctacttttagggcttttgcccatgctgtaccactttttttatgcatatctcttttgtctgttggcttatttttacaaagacttttaattaggctttgattgtttttttctgtacagatatcaaaaatttagtaaggcagttgagtgaaagagatttttaagagtacctctcagacataataaatgctgtttctctaatgtgtcagataccaacctcgttgaatgtctcaccaagatcaaccg

SEQ ID NO: 414867 - DNA, 577 bp, Homo sapiens
tttatcataaatatatatctgcagaaatgcaagttcagtggggacggaagctttttatatcttatatcttgttcactgctatatatccagcatctaagcagcacttattacatagttggtgctcaatrtatatctgttgaataaatgagtcaatagatgaatgccagtcactcctctgctaaacatctttcaatgactcctcatttccctggatataatgaaattccttagcctgtcataaaagactctacataaaaagagtactatccttatagtgttagagtgagtattaatcaagttaatacttgcagtgcacttgaaacggtgcctaacatggaataaattttcagtatgtattagctattgtttgttatgatgattattaactgtactcatcttactcttcagattctgtgctttgactgtctcagtcaattcccacttgccattaggtctccttggcatgtaacacactctgcattttctttccaaattctaaccccatgttaggtgctcccacactcattgactggcacctatgacccagttgctctgcactggaattgaccgttacttg

SEQ ID NO: 414868 - DNA, 583 bp, Homo sapiens
tagtgcacatcacttattgatgctgtttctttcttagatcactagaaaaggttgaattgtttttrgctattatccaaacatgctttccattctcagaaaacatctattcaaattatataaaatattattatagtcacctaaataccccattatgaaggaattatatttatggaacatgatatatagtgttatactgaaataggttaaaatattaatgagttaattctttcattagggatcagatggtgtcgatagagagttagttggaggaaacatgagatgctatcagaacactggaatatagggaatatgataacatttactgaaattttgttaaagagaatttatcaaatagttctttttgtttatttgtttgtaaatgtctaatgcatataagaaaaagtaactcatccaacacatcttaattcgaaaatccatgccaaggcagacattcttatcaaagcttataattactgaaagtgatgtgattatcctaatcattcctataatacatttcttttttaattcaataagatctctgcaaaaatagtaaattcccttaatgcaagatgcaaacacagca

SEQ ID NO: 414869 - DNA, 590 bp, Homo sapiens
agtcagtatatttggaaatgtgtgtgtgtgtgtgtgtgtgtgtgtgtstgtctgtctgtctgtctgtctgtctgtctgtctgtctgtctgtctatctatctatctatctatctatctatctatctaatcatccatctaccccataaaaggctttgtattaatgaaagatccacaaagctgccatttgacatgtgggtgtgtgtgatctgaacaggtgttctaaggaccagctgacagggatccaccagtacattctaccatcccaaaagctctcgaatggaagccctgttggattagctctggctggaaagtacaaaatcaggccagattataagtctccataggcaaagatattagtgaactggtatgatcccaaggtttagcattatttaaaataccctattttaaactgagaatataggaaacatacacttttgcctggctacaattgctccctatataacagtagtatctgtttataaatttagaaagaatataaaagaagcaggaaaaaaattcatacacaattttacctctcagaggcaacttctttttaacaataacaaacacaactttttatcattccacaa

SEQ ID NO: 414870 - DNA, 560 bp, Homo sapiens
ttaataccttttacttttttagttgtaataattaygtacatagtcttttaagtcctgcttaattttcagtaaaaacatcataaatatttttccaggtcgctagaaactcaacataaccattgtaccaaagatgatttaatgggaatggtactgttgggcatatacattgtttccaatttttcactattatgaattttgcttcagtatatatctttgttcacaaatttttgttcatgttttacataaaaaatttatacttgttaaattcttataagtagaattatagtattacagtaaagtgagactttataaaagctttcaggtatataataacagattatacaacaaaatatattactaatccccccatatctgccaccaccaccaccctgaaagtttgcacccaattgtgttttattccatggtggaggaaagtcaccattgtcctgcagtatctgcaccttgctggctatcagcagaatttacatctctgctgactttatagggagaagaggctcttgcattcaagtttgtgtatacttaattagtaaacatgaata

SEQ ID NO: 414871 - DNA, 611 bp, Homo sapiens
catgactgcttttgctcagagcaactgaggactcgcttgctgtaattcatctacagtatgcctttgacctcaggacaccccaagctgctctccagcttcacttgtagccgtgtatttcagcttcagtgttttcttctgttttgctrtcttattaccaaattgatctacattgtaatgttttaaataacaagatatgttcactctgctttctaaagatactcttagctttttgtagctcttattaacaagttatgagcctttccactgaagaaccatgcaggtgtcatcttgctccatttcaaagatgctctctttggaaccagaatcttgagcaagagtcttcatgtaagaatattggcagtcgctgtattaaaaattgtgaaattttagagtgtcacctttacaaaaaaaaaaatggtgcttcattagttatttgtgctgaagtctgcctgtatggttaggggggaaagagagaaaaaaaattctaatttgaatgctgtattttctgtgcagtgatatgtgtgtgtgtgtgtgtgtgtgtgtgtgtgtgtgtgtgtgtgtaaccctgggaaaatttgatcatgaatccttactttcacagttaaatttga

SEQ ID NO: 414872 - DNA, 611 bp, Homo sapiens
catgactgcttttgctcagagcaactgaggactcgcttgctgtaattcatctacagtatgcctttgacctcaggacaccccaagctgctctccagcttcacttgtagccgtgtatttcagcttcagtgttttcttctgttttgctgtcttattaccaaattgatctacattgtaatgttttaaataacaagatatgttcactctgctttctaaagatactcttagctttttgtagctcttattaacaagttatgagcctttccactgaagaaccatgcaggtgtcatcttgctccatttcaaagatgctctctttggaaccagaatcttgagcaagagtcttcatgtaagaatattggcagtcgctgtattaaaaattgtgaaattttagagtgtcacctttacaaaaaaaaaaatggtgcttcattagttatttgtgctgaagtctgcctgtatggttaggggggaaagagagaaaaaaaattctaatttgaatgctgtattttctgtgcagtgatatgtgtktgtgtgtgtgtgtgtgtgtgtgtgtgtgtgtgtgtgtaaccctgggaaaatttgatcatgaatccttactttcacagttaaatttga

SEQ ID NO: 414873 - DNA, 526 bp, Homo sapiens
tgatatataaaattcccttcatttttatttttaatttggaggggtctgtgtgtgtgtgtgtgtgtgcgtgtgtgtgtgtgtgtgtgtgtgtgtgttaaggaaagttagacatattctatgatgagttgaaaagagtgaccaaatggttgacagtaatttttctttcagttggttccttttggctttcctgattcacaaacatcgtttgcatattgacaatgtttacctattcttttttttatttttatactgtatttcttgttttttgtccattgtattgaattgagtaatacttcctttttaatattatgcctttaatactttgcctttaatgttatgccactaaggacataggggactttattgtcttattctcagttttaaagcagaaatgctcccagtgttcatcttcaaacaagatgaattttggtgtgaggagcatgtgtcccctycttagttcccgtaattaaattaaaaaaaaagttacaagataaaaaggcatgaagtaaaaggtattcctgatgaa

SEQ ID NO: 414874 - DNA, 497 bp, Homo sapiens
tgtaggtttttgagcaaatctatatgtagtttccaaatgtaacttcagttgtgaagggttagattcagaatcttgacggatgtgagaatgtttttaacgccacaacacacaccactccttcatgtttctgagcctgctctgtaccttggacattttatatttgggagcttaagatgatttttaaaaaaatctctttccaaccaattcttctagaacaaatctagtgaagcagatgcaacgcaargtggagacactgggaactggctgggctgccgggtgaattccagtacagacccaacaccaccacagaaactaggaatttccctagaagcatttaggagaactagctctacttttccaggagcttagtttattgattcatcgcctactttaggtcaggcagtttgccaagagctgtggatacacagatgattgtgacatagttcctactcctcaaggagaaattagaatgagattcagacaagtgaactgtcaat

SEQ ID NO: 414875 - DNA, 497 bp, Homo sapiens
tgtaggtttttgagcaaatctatatgtagtttccaaatgtaacttcagttgtgaagggttagattcagaatcttgacggatgtgagaatgtttttaacgccacaacacacaccactccttcatgtttctgagcctgctctgtaccttggacattttatatttgggagcttaagatgatttttaaaaaaatctctttccaaccaattcttctagaacaaatctagtgaagcagatgcaacgcaaggtggagacactgggaactggctgggctgccgggtgaattccagtacagacccaacaccaccacagaawctaggaatttccctagaagcatttaggagaactagctctacttttccaggagcttagtttattgattcatcgcctactttaggtcaggcagtttgccaagagctgtggatacacagatgattgtgacatagttcctactcctcaaggagaaattagaatgagattcagacaagtgaactgtcaat

SEQ ID NO: 414876 - DNA, 525 bp, Homo sapiens
ccacagtcactcttgtttacatgctccacagcctgaagtttcaggtttaagacattgcaaaacaaccttttagagctggaagagatcttgttagctggaaggctcctaggctggttgagcaggaggagagctctgggggtgtcaggggcaggttggggacaggagacgttcttaagagcagaagtagtaccagtagcgtgcatgctgcctcagtttttcttgrtgtattaaagacttgtggggcctcatctccactccttctccaactaaattaaccctattctttttatttttattccactttctaaacggtttcccattttcatcgccctgccaagacctcagcagctctctaaaccaaacactgaaatgctcaaagtgagaaaactgtttctttctctccagggcaggattgtgtcttaactgtggggctgccctgacaaatcacctttaactcacaggtctactatccttccagatctaaagaacgtcggcctaatcggttcttggcctattttggaacgg

SEQ ID NO: 414877 - DNA, 525 bp, Homo sapiens
ccacagtcactcttgtttacatgctccacagcctgaagtttcaggtttaagacattgcaaaacaaccttttagagctggaagagatcttgttagctggaaggctcctaggctggttgagcaggaggagagctctgggggtgtcaggggcaggttggggacaggagacgttcttaagagcagaagtagtaccagtagcgtgcatgctgcctcagtttttcttgatgtattaaagacttgtgkggcctcatctccactccttctccaactaaattaaccctattctttttatttttattccactttctaaacggtttcccattttcatcgccctgccaagacctcagcagctctctaaaccaaacactgaaatgctcaaagtgagaaaactgtttctttctctccagggcaggattgtgtcttaactgtggggctgccctgacaaatcacctttaactcacaggtctactatccttccagatctaaagaacgtcggcctaatcggttcttggcctattttggaacgg

SEQ ID NO: 414878 - DNA, 450 bp, Homo sapiens
acttgttacccaagaaatggaaccaaaggaatccaactttcattttgtgtagaatcatacctacttatacttaatgctagcactgtaagaaataagtcttttttgtttaaaaaagggaagataagattaaagattcttagtgagatcatcttgccaatttgttgtacatctctcattcattgttgggggaaaaaaaagcacaactatacctctttaatgttattttcttccattatccctcatttatttggaaagataagggaaaccttgtctgtattatccagaagcacagatatttgcttgacacaatatttaaattcagcccaatctttaacattaaaaaattttctttttaacttgctggaaaagttggatacattggcaaatatagggaattcatgtcttttttttttttttttyctggtcttgctctgttgcctaggctagagt

SEQ ID NO: 414879 - DNA, 619 bp, Homo sapiens
tatcttggtgaatattccgtgtgtacttgaatgtgtattcttgcaactgtttcaatactataccaaacaactgcagaatccagttggcrtagctcagtaagtgtaaattatgtcaacttgtttttttgtctacttattttatcagttactgataaaacccccaattgaacaattgaactcatggatctagagagtagaaggatggttagaagtgtctaggaagagtagtaggtgtttggggcagtgggaaaggtggggatggttaatgggtacataaaatagaaaagatgaataagacctactatttgatagcaaaataaagtgactatagtcaataataacttaattgtatattttaaaataatttaaagtatgtaactggcttgtgtgcaattcaaaggataaatgtaagaggatggataccccattttccataatgtgcttatttcacattgcatgcctgtatcaaaacatctcatgtaccccataaatatatatacctattatgtgcccacaaaaaaattgttttgaaaaataatttaaaaatttaacataaaacctccaattataattaggaattttcctgtttctttatctgttaaatagtgcttaatatgct

SEQ ID NO: 414880 - DNA, 576 bp, Homo sapiens
gcatatctaactactagaaatgagcaattggaaacagaaactaataaagtcaaaaccacttctaatagttcaaaaaaatgtaaatacttgggactaaacctaacaaaccacatgcaggatctgtatattgaaaacaaaataccaataacagaaaccaagaaagaactaaattaatggagaggcttgctgtgtttatgaattagaagactaaatatagttaagacatcaattttctgtaaattgatccagagatttcatacaattctaatcaaaatygcaggaggacattttgtagatacaggcaaactgatttttaaatttagaaagaaatgcagagtaactagaatagctaaaatgattttcaaaaagaatgaagttggaaaactcagattgcttgattttaagactcactttaacatttctgtaaccaaaaaatgtgatattgacaaagggatagacatataaattaactaaacagaagaaaaagcccataaatagacctacacaactatggcatattgatttttgtaaaggttaacaaacaattcaatggcatagggatagtattttcagcaa

SEQ ID NO: 414881 - DNA, 576 bp, Homo sapiens
gcatatctaactactagaaatgagcaattggaaacagaaactaataaagtcaaaaccacttctaatagttcaaaaaaatgtaaatacttgggactaaacctaacaaaccacatgcaggatctgtatattgaaaacaaaataccaataacagaaaccaagaaagaactaaattaatggagaggcttgctgtgtttatgaattagaagactaaatatagttaagacatcaattttctgtaaattgatccagagatttcatacaattctaatcaaaatcgcaggaggacattttgtagatacaggcaaactgatttttaaatttagaaagaaatgcagagtaactagaatagctaaaatgattttcaaaaagaatgaagttggaaaactcagattgcttgattttaagactcactttaacatttctgtaaccaaaaaatgtgatattgacaaagggatagacatataaattaactaaacagaagaaaaagcccataaatagacctacacaactatggcrtattgatttttgtaaaggttaacaaacaattcaatggcatagggatagtattttcagcaa

SEQ ID NO: 414882 - DNA, 587 bp, Homo sapiens
atcctttttggtagaatccagcacttatttttaaaaactttagttaaaatctcatatattggttacacaattaatcttcagggtagatgcaaaatgggtgtttcattgcaactytttggattttacacagtcattttttaaaacagtttcattaatgtttaaaacacatactagtaagtaaaagactgtaatatattaaaacataaggctttatgttttaaaagagaagttaaggatcccagggaattaaataatgtaatcaaaacactgaaatctgtttcaaagcagtactagttcaccgataaccaaaaataaaggagaaaaggggaagttccccctgcttaatgcttacaaaaaggacttttctatattgctttcacactacattataggtttccacattaccaggactagagaatgaaagaagcgtatgaacatatatggaggatatgaccattttaagttttacttttgggataagacatatcagagtaacgcaaaggcaaatttgagtatttcctctcaacatgatatgattggcaaatatatacatacaattagtaatatatatgattaataatatagaa

SEQ ID NO: 414883 - DNA, 587 bp, Homo sapiens
atcctttttggtagaatccagcacttatttttaaaaactttagttaaaatctcatatattggttacacaattaatcttcagggtagatgcaaaatgggtgtttcattgcaactttttggattttacacagtcattttttaaaacagtttcattaatgtttaaaacacatactagtaagtaaaagactgtaatatattaaaacataaggctttatgttttaaaagagaagttaaggatcccagggaattaaataatgtaatcaaaacactgaaatctgtttcaaagcagtactagttcaccgataaccaaaaawaaaggagaaaaggggaagttccccctgcttaatgcttacaaaaaggacttttctatattgctttcacactacattataggtttccacattaccaggactagagaatgaaagaagcgtatgaacatatatggaggatatgaccattttaagttttacttttgggataagacatatcagagtaacgcaaaggcaaatttgagtatttcctctcaacatgatatgattggcaaatatatacatacaattagtaatatatatgattaataatatagaa

SEQ ID NO: 414884 - DNA, 587 bp, Homo sapiens
atcctttttggtagaatccagcacttatttttaaaaactttagttaaaatctcatatattggttacacaattaatcttcagggtagatgcaaaatgggtgtttcattgcaactttttggattttacacagtcattttttaaaacagtttcattaatgtttaaaacacatactagtaagtaaaagactgtaatatattaaaacataaggctttatgttttaaaagagaagttaaggatcccagggaattaaataatgtaatcaaaacactgaaatctgtttcaaagcagtactagttcaccgataaccaaaaataaaggagaaaaggggaagttccccctgcttaatgcttacaaaaaggacttttctatattgctttcacactacattataggtttccacattaccaggactagagaatgaaagaagsgtatgaacatatatggaggatatgaccattttaagttttacttttgggataagacatatcagagtaacgcaaaggcaaatttgagtatttcctctcaacatgatatgattggcaaatatatacatacaattagtaatatatatgattaataatatagaa

SEQ ID NO: 414885 - DNA, 471 bp, Homo sapiens
gtctaaaccttccagagactatttctatttcccatgtataccatgctttcataaatataattaattaataatagtttatatgtgtatgtgtgtcagggggacaataaaatagtatttgggtaagaaaaggctcataggtatcctctggtactgttatagcaatatttgttgagcacttactgtgtgccctaaattctgtacacacagaatgctcaatccttataatgttcgaaaggggtagatatcattattccaattttacagattaagaaatttgaggaataaagacattaaatttattgctcaaaatcctacagctttaagagagggaggcacaattaggacctgctcagtctaactccacmgtatatgtgtgtattgatagactacattaatataacaatgaagcaaactgttaaacccacatgaaactttgaatgctagaaagaaaaccaaacagaacacaatcaa

SEQ ID NO: 414886 - DNA, 471 bp, Homo sapiens
gtctaaaccttccagagactatttctatttcccatgtataccatgctttcataaatataattaattaataatagtttatatgtgtatgtgtgtcagggggacaataaaatagtatttgggtaagaaaaggctcataggtatcctctggtactgttatagcaatatttgttgagcacttactgtgtgccctaaattctgtacacacagaatgctcaatccttataatgttcgaaaggggtagatatcattattccaattttacagattaagaaatttgaggaataaagacattaaatttattgctcaaaatcctacagctttaagagagggaggcacaattaggacctgctcagtctaactccacagtatatgtgtgtattgatagactacattaatataacaatgaagcaaactgttaaacccacatgaaactttgaatgctagaaagraaaccaaacagaacacaatcaa

SEQ ID NO: 414887 - DNA, 515 bp, Homo sapiens
tttcctaggtggtagtccctgtgccaggcatattttacatgtagattctagtttggttttcaacactgaccatttaaggtaagtattaatatccccattttacagcctagggcactgaggtttgaacgggtttaatcacacagttccaggtggctgagccagcttcaaagcctgaattcactgtacttcatcaaaacagtagttcccatctaaaaaatattgtggtgtgccaaatagcaaaacctaactgrctggttaaaaatgcaagagcaggtaatttttatcgtaaatttattctggagcaaagtgaagaatgataatgcttggacttaataatgggagaaaacaagtgtatggggcaggccacagttctaagctatttctcagatattctgaattcatcataatcacataaccttttctcagcattggagactgtgaggacttaatgggatctgcaattcatatgggtctactatacttgtctgcttcgtcacagcaatgctgcttgtggt

SEQ ID NO: 414888 - DNA, 629 bp, Homo sapiens
tatgatgtaactattttggaattctggagtatattgaaggattgcaacttctaggagaaggcttgggaagtaattgtggtttattttggtcaattatagttcttagcatagtagcaagtcttccaaccttcacccttcagccctgtggcaggcagctgtgccaagtgttcctggagcagcttgcaaactgtttgcaggagccggggtgagcaaaaaggactctgttctccaaatatcaaaaatctgtgttctgatcactgatgctggttctgatcaaagagatgcagacaaaatcgccaccattgttgttgcacctccccttactgggaagctcctccccttggctgaagtgattgtcaggagatttaaagggccagsacccttttaatttttttcaccttcgattttctttttctccaccttcgattttctttttctccttttgggggcctgacattaaatattaggtcattaaaaaataactacatacacagagaaattaggaggtgactttgcaagcccaaggaaaggcatggacttagaaaagacctgaggagaccttatgtttctatctcaggctgattcccagaacagagacagtctacaacaacaaaatcaacaagaataaa

SEQ ID NO: 414889 - DNA, 537 bp, Homo sapiens
tagcagaacctagggcctttggcttcagagccccaatatgcaatatgtggtccaaagaccaccagcatccaaatcacctaagagtttgttagaaatgcagaaagaatctcagaccccaacagtacctactgctatggacygaatcacatcccccagccagattctaatgcccaatgtaactataaagatagggcttataaacaggtaattagattaaatgaaagcataaacattgggccccgatctgatagaattagtgtccttataagagagtgctgtctctctcagcatgtgtgttcaaagaaaaaaagtcaggtgagcacacaatgagaaggccaccatctgcaacccacaagaaaagccctccgcaggaacttaattggccagcatcttgatcctgggcttcccaatcctcagaactgtgagaaacaaatttctgtttgaaccatccatttccagtttatggtaatttgttacggtagctcaagctgctaatatacctactgattcaaagtctttatcctaacaagatcctca

SEQ ID NO: 414890 - DNA, 566 bp, Homo sapiens
gacagaatgtttttgctctctaaaaattcatatgttgaagctctaatccccattgtgatgatatttggaggtgaggcccttgtgagggagttagatcatgataatagaacccttagaaattggattagtgcccttataagaagaaacacaaaagtgatgatctctctctcctcggtgtgaggacatagcragtagatggcctttggcaaaccaggaagaggactctcatcagcaccaaatcagctggcaccttgattttggatttcccagcctccagaactatgagaaataaatttctgttgtttaagccattcagtatatggtatttcatttcaccagcctgaggagattaagacaacagccaaatctcactttttgaaaaagtaaagatataatgaggcagaaaaatattccctgtcccctacatttttcctgttgttttcaaattttctctggttattttggtgacagtgtttgtttccatgagccagcctgggatgtaaagcaagcactcaggataattgatgatggctgcccctgcagagaaaactatcttgtaccaaagg

SEQ ID NO: 414891 - DNA, 566 bp, Homo sapiens
gacagaatgtttttgctctctaaaaattcatatgttgaagctctaatccccattgtgatgatatttggaggtgaggcccttgtgagggagttagatcatgataatagaacccttagaaattggattagtgcccttataagaagaaacacaaaagtgatgatctctctctcctcggtgtgaggacatagcaagtagatggcctttggcaaaccaggaagaggactctcatcagcaccaaatcagctggcaccttgattttggatttcccagcctccagaactatgagaaataaatttctgttgtttaagccattcagtatatggtatttcatttcaccagcctgaggagattaagacaacagccaaatctcactttttgaaaaagtaaagatataatgaggcagaaaaatattccctgtcccctacatttttcctgttgttttcaaattttctctggttattttggtgacagtgtttgtttccatgagccagcctgggatgtaaagcaagcaytcaggataattgatgatggctgcccctgcagagaaaactatcttgtaccaaagg

SEQ ID NO: 414892 - DNA, 502 bp, Homo sapiens
atctagaacgtctagaattctgtgacagcaaatggcactcttatagttctcaatacttccctaacaaacatcttaatgctacgctrtgtgatgtacctttgtgttttgtattgatctgtagaaaaatctgctaagtaaagcaaatgaaagcaagtgttatttaaggacatttaaatagtttaactgacagattgtgtaggacttgtagtgagataaattatacaaactaatttccttgaaatgcgattgaggaaattgaattagtataagatagttcattgatagaagaagttctgaatgtcatctgtcaaataaaaggctttgtctcaattatctatagcttattatttgagcaagagacatcatactataacttaaaccaagtaatgcttggtttaggggatgttatttcattagcaacttagaaattacctgtactatatttaaatataataaactatattatacactgtattatatattatatcatatattatataat

SEQ ID NO: 414893 - DNA, 498 bp, Homo sapiens
ccatctgtctgtccatccatctgtccacctacctagccctctgtccatctgtccatccatttacacaatcctctgtttgtccactcacacacctgtctgtccatctcttcatccatctttccaacaggatttgttgagctcaggctggatgaagagcactaggtcctattctggcttggatatacctctttgcttttgtgctgggcacaagaaaatcccctagtctgcagctcattctcagaagcgcaacactacacctgcctkctctatgtgatcacaaatgcccatcacctgacaccttcactcctgggcagaggcctgacagtacacgggcaggatgggtgtggctgcagctgtgtccctgcctagagacaaagagccagccacacatccaaacaggagcacagaagcctccagacttaccggcttggtttgtggtgatgttgacagagacgtgctgtggggggaagggactcttgctggagactccattgatgg

SEQ ID NO: 414894 - DNA, 576 bp, Homo sapiens
agctgtaaaagagacatgtgctgcctctctccaggtatccagaaaaggccctcgttcctaagacaacaattcaaggtcaagagaacaaaaaagaaattgaaaaaggtaagtatactttccagggtgttataggtcacccaagagaaagtcctgattttgacatttcatagacacagtaattcacggcatgcaatgaaaccttggtggtcagtgtatctctggtgacaaacaccctctacaktccctccctgttggccagcctctgttagatgtccactaacacaagatgcccagcagaagaaagctcactattcccaccactacactgtcatctgttaataatcataacctgtttgaaaatataataaaaaattatttattcacaatagccacaaaaccataaaatacctaggattaaatctcacaagacctctgtgaagatgactacaaaactttaccgaagaacgtaaaagaagacttgaatacctcatgcctggatggaataaagaatatcataaagaagagaatcatccccaaagtaatctatatatccaatgcaattccaaccctgattaa

SEQ ID NO: 414895 - DNA, 592 bp, Homo sapiens
ctgggcaggggagctgcacctgcagtcactgtgaccatcctcctccaggcctggaggtctgagtcttctggcctgaaggtccagagcccctcctcctcagagcagcccaccaggctgcacaggcgggcttccatcctgccatgcccactctttagcccctttctggacatcaccagccccatggagttgtgggcctcttcttgattctgactttcccactgactactgagcccacccccaccctgggccctccacttacaaatcaggaaactcccctgtacccacctccttccctcagagccttcactccatgcctgcattaaggaagagcagctgtcccttgaggacacctttgccttgcagccctctcacctgatgacagtttatgattttgcatccagcacacctcagggtcaggaagggggtgtgtcatmcttgctccccactgtctctttcacaccatcactcgccatctcctgcaccctttgcaaaaatgccatttggctagaccaccactctccaggtcttgggaccaccatatgctccctcccaccgtcacgcccccattcatcggaggcatgagcttcagtct

SEQ ID NO: 414896 - DNA, 601 bp, Homo sapiens
gattgactttagtcagatatcaccagttttacatacacttgtgtgtgtgtgtgtgtgtgtgtgtgtgtgtatttagatctgttcagttttatcacatgtagagttgtatgactaccgccatagtcaagacacagaacagtttcatcacaagcttccctggtgatacccttttatagccatggccagcacctttcctccttcttctccctgatcactgacaatcaatgtgttcttgatctctataattttgtcattacaaggtgctgtataaatggaatcatatagtatgttaccttcagggatgggcttttttttcactcaacataatctcaacctggatggatctcatttccatacaagttgttgtgaatattaatggtccattccttttattgctgagtagcattctatggtatggatgtactacagattgcttcaccattcatccattgagagacatttgtgttgtttccagttttgggcaattaagaatgaagctgctataacattcatgtacatgtttttttatgtgaacatatattttgttttcatttttctagagatgacyaatgagcatatgaaaggaagtttaacatcatta

SEQ ID NO: 414897 - DNA, 563 bp, Homo sapiens
gcgttttgcagaatggaaatctcagtttggcgagagctttggatggaggagtaggcagtaagaygaagggatgccagctagaaggaatacatatatagaggcatagcatgcttaggaaaaaaaagtagatcagtggctctcaaacttaaatgtccatcaacatcacctgcaggacttgttaaaacacaaattgctgggcgctgccccccagagtttctgatttaataaatctggggtagggactgaggatttgcatttctaacaagttctcaggtgatactaatgctgctggtttggagggccccactttaagaaccaacagaagtagatgatggaatactccatgccatgccaaaaaaaaaaaaaaagaacctgggattttctctagctcctcaccttttaaaatgtgttccaggggccagcagcatcagcatttctgggagcttattataaaagcagactctcaggcccccacctcagacttgttgactcagaatctacagtttaaccagatcaccaggtgatcgttatgtgtgtaaaagtttgataagcactgctctatc

SEQ ID NO: 414898 - DNA, 620 bp, Homo sapiens
acgtctcctctttgcttcacaggccccaggctgtatgcgtgtctgcctctgtgtgtgtgtgtatgtatgaatgtgtgtgtcctccttcatgcttatgtattaaatacttgtagctgcaaggcaaaaacttatcacagagttgtcttagaccccttcctctaatgggaggatgccagtccaaggtttaacataagatgctgggggcacagatcagaagggcattgggaaagaaagaactttggggctcatattagaaattaagcccagacttcagtggtcaatgaagctgagtaacagagaactgcattctgattccgagagcctctagagtcatacagctaagaggactgggcctacctagccaggatgcgaacgtcacagaatgatcaatgcctgggaaaatgtggccaggagaaatagtacttttcactcctcaattcactttcattttctactgtggcagtttaaggtaagaagagttagatgtataagttcgtcaatacctgccttgatacttgcactatatacaggatagagaaaagggattggtgttgtgtccctaaattcwgggtatatgatataaaatttgttccctattttgctaatcttattatattgga

SEQ ID NO: 414899 - DNA, 552 bp, Homo sapiens
ttactaatcaaggaagacaaaaacaatgttaacaggatgcttctatcatgctctttctagaagtccaggtataggcttggtatattttttagttttaaagagcttcctaaatgcactagggactcaaactttccctccaggaatgtctgtaggatccaccatattgcttttcctactatttactctgtagagtccaagagttttgttaattttgatggttcatttgtcatgcttctttatcatccttctctgggaaaacaacttcaatctttggaatccagttaaagcactacrgttcttaggaaagtatgtctgaccctcttacaatcacccctgactcccctgaattcttctgaacccttttagcaacatttgcatcacccattttacaaaatcatatgtaacatcttttgcaattttatacatctatatgtagtctccctaaggccttatattcaccagggtacctcgcatgcctgcccttaatagatgcttagtgatactagaatccttgcttttgactgatgtttgcatctctcactgtggaatttg

SEQ ID NO: 414900 - DNA, 659 bp, Homo sapiens
actgtattttatatcacttttgctgtattctttatctctcatcttttttatcacttctaaactacaagtcagatattctctatcagcctgcattctagtcccctaatttaaattctgctaaattcctaataacagatattgcattttcatctatataatttttatttgattctctaatacattcatttttattgaaattctttatctattaagctatctcttccctttttttgaaaatataaattatactccttctaaagtcctggttggctaattccaaaatgagggtcatttatgtgtctggttctattgtctgatttttctcttgttcagttatatagtcatgtttcttatatacctagtatttatttttactaaatactggaactgttatatttaaaaactgaagagcatccagataaataatatttcttttcaggtagaatacatccatttctcctctaggcagatgtattaaagtggtatgtcatctaacattctcagtgacactatggtaggtaatattattactagccattcatagatgaaggcattgaggtttcgatttgcagtgattgacscactcctgccccagcctgtagagatattctctttgattaagtttacttccatcttattcaatttacaaagcatttatg

SEQ ID NO: 414901 - DNA, 634 bp, Homo sapiens
caaatagttgttatactgtattttctgtttgtattaattttattgctttgttcccccaatattttcaatccatggttgattgaattcttagatgcagaacccacagatacggggggccaaccatatttaataactgaatatgtttttgtttccctcttgtatactgtaagtcctagaggccaaaggctacagcttaattatctatatactatcacggctctattcttcccttcacagcaaatttattaaatgagaarttggcactcactctgcactttctcatggctcattcactccttagctcaatgcaaactacccatgctgtctcataacaacactagtcctctcaataacaacactagttattattttatactgtgtcaaaaatagcccatattaccagatcccacaggaaaactttaggccctattatacaatgtctctggaataaataactgctaatcactcttcttgaaattctttttttctctgtttctgtaacacttacctcttttgattcaattcctatgcttctggtcattacttttcagtatgctctatatactgtaatttctctactgtgccattatgtgcctctgttcatttatattcctcacttcattttgcccacttc

SEQ ID NO: 414902 - DNA, 578 bp, Homo sapiens
agaaataatccaaatatccaataattaagaatcaattttgctataaaatatcacactataatatttagtaatcaatctgataaattcatggatattgactaagaagttggtaaacttacataggtaaacactaaaaataaaattataatgaaaaaaggcatgaaaaggtgtttaatttcattagattttagggacatcaaatttaaaccacattatgatatctaccagaaagactaaactgggaaacacagataataccaggtgttggtragactctggaattctctgacatgctagaggaagtgtaaattgcataaccgttttgaaaaaccatttgctggtgtctcctgaagctgaacatatttagactttatgacccagaatttccactccttggcttatgaccaaaatacctgtatatatttaccaaaagatatgtactaaaatctttatagatgtactatgtctaatagctcaatactgtaagatatctcaatgcccaaacacagtagactaaagaaaccatgacatatatcacacagaggaatattacacaggaatgagaataaacgatctgt

SEQ ID NO: 414903 - DNA, 578 bp, Homo sapiens
atgtttataactgttttattagtaatattcccaaactgaaaaaaagttcatcagtggaatactatattccattaatatagcaatgaaaaatgaatgaactayacacactgcaacatggatgcatctcaaaattattttgatcaaaaaaacccagaagcaaaaatacacatactgcctgaacctatttatatgatttcctagagaggcaaaactggtctgtggttgtagagctcagaagaggtggcctgcagaatgtagaaatggattggaaagggccatgaaggaaatttctgtggtgatgtggtgacaagaatgttttgtacttgatggaggtatagttaatcattaataattttatcaaaacatcgaattttatacttaagatctgtgtttcactgtctatacattttacctcaataataaaaaggagactgaacatagggaataaggaattccctaattagggactaggaattcaattgataggcttgatgaatggactttagggtgagcttacaggaatggtctcccaagcatgacataactgccccactagggtagctactacttctgccaaa

SEQ ID NO: 414904 - DNA, 578 bp, Homo sapiens
atgtttataactgttttattagtaatattcccaaactgaaaaaaagttcatcagtggaatactatattccattaatatagcaatgaaaaatgaatgaactacacacactgcaacatggatgcatctcaaaattattttgatcaaaaaaacccagaagcaaaaatacacatactgcctgaacctatttatatgatttcctagagaggcaaaactggtctgtggttgtagagctcagaagaggtggcctgcagaatgtagaaatggattggaaagggccatgaaggaaatttctgtggtgatgtggtgacaagaatgttttgtacttgatggaggtatagttaatcattaataattttatcaaaacatcgaattttatacttaagatctgtgtttcactgtctatacattttacctcaataataaaaaggagactgaacatagggaatwaggaattccctaattagggactaggaattcaattgataggcttgatgaatggactttagggtgagcttacaggaatggtctcccaagcatgacataactgccccactagggtagctactacttctgccaaa

SEQ ID NO: 414905 - DNA, 602 bp, Homo sapiens
cttcttgcaaattcattttatgcttctatctggcaccctttcccttcatcctgagtatcttcttttagcatgcattgtagtgcaagcctgctctcgcaagttttgacgctcttaaatatttttattcacmgtcatattgaaggatatttgtctaggaaaagaattctaggttggtatgatttttttctttcagcaattaaaaaattttgtcctatttctttctcatctctgttgtttctgctgcatgagcagtagttacattcatgttaccttgtgtataatatgtctttctatatgggtttatatctgctctgtgtcattgactataatatgccaatgtggggattttgatttatttattctgcttttaaatttttacttacctctttggaaatacaggttgaggtctttcatcaattttggaaagttctcatctagtagtttttcaaatatttcctttgatccatccattttctctcttctctcctcatcccttttgggatttattttacaccagaggatatcaaccaggtgcaattttgtcccccaagagacatttaacaatgtctagacacatatttagttgtcaagactagaaggca

SEQ ID NO: 414906 - DNA, 540 bp, Homo sapiens
aaacatttacagagaaggattggggttcaggagacctcattccaaatctgaccatatgaccatacactaactcacagagtaattttgggcatgttgtttctggtggattaacatttatcacaaattctttgacatccsttttactcagaagtggagttccttctccacccctggttctgggctggcctttgactgatttgtccagtgaaatatggcagaaatgacgccctcccagttactaccctagtctttaagaggactgacaagcttcaccttggtctccggaagtcctaagctagctactatataagaagttcagctacctagccagagagaagacatagagatcccctgagactacagggagagggagaagggccaatttgagcccagctttctaactatctctgtaaaggtgcaggcatgtaattgaagctgtgttggacccctctaccccagctcgaacatcagctaaatacctctgagtaatccctaaggatggcatataaagccaaattgcctagccaacttggcagcttg

SEQ ID NO: 414907 - DNA, 540 bp, Homo sapiens
aaacatttacagagaaggattggggttcaggagacctcattccaaatctgaccatatgaccatacactaactcacagagtaattttgggcatgttgtttctggtggattaacatttatcacaaattctttgacatcccttttactcagaagtggagttccttctccacccctggttctgggctggcctttgactgatttgtccagtgaaatatggcagaaatgacgccctcccagttactaccctagtctttaagaggactgacaagcttcaccttggtctccggaagtcctaagctagctactatataagaagttcagctacctagccagagagaagacatagagatcccctgagactayagggagagggagaagggccaatttgagcccagctttctaactatctctgtaaaggtgcaggcatgtaattgaagctgtgttggacccctctaccccagctcgaacatcagctaaatacctctgagtaatccctaaggatggcatataaagccaaattgcctagccaacttggcagcttg

SEQ ID NO: 414908 - DNA, 540 bp, Homo sapiens
aaacatttacagagaaggattggggttcaggagacctcattccaaatctgaccatatgaccatacactaactcacagagtaattttgggcatgttgtttctggtggattaacatttatcacaaattctttgacatcccttttactcagaagtggagttccttctccacccctggttctgggctggcctttgactgatttgtccagtgaaatatggcagaaatgacgccctcccagttactaccctagtctttaagaggactgacaagcttcaccttggtctccggaagtcctaagctagctactatataagaagttcagctacctagccagagagaagacatagagatcccctgagactacagggagagggagaagggccaatttgagcccagctttctaactatctctgtaaaggtgcaggcatgyaattgaagctgtgttggacccctctaccccagctcgaacatcagctaaatacctctgagtaatccctaaggatggcatataaagccaaattgcctagccaacttggcagcttg

SEQ ID NO: 414909 - DNA, 427 bp, Homo sapiens
gttactaccctagtctttaagaggactgacaagcttcaccttggtctccggaagtcctaagctagctactatataagaagttcagctacctagccagagagaagacatagagatcccctgagactacagggagagggagaagggccaatttgagcccagctttctaactatctctgtaaaggtgcaggcatgtaattgaagctgtgttggacccctctaycccagctcgaacatcagctaaatacctctgagtaatccctaaggatggcatataaagccaaattgcctagccaacttggcagcttggactgctgtttactaatggcttttttcttaaagaatatatttcacattgtttgaacatgaccacttaaatgggttgtaattcctagtcacaacagaaatttattcaacagaaatggtgttt

SEQ ID NO: 414910 - DNA, 427 bp, Homo sapiens
gttactaccctagtctttaagaggactgacaagcttcaccttggtctccggaagtcctaagctagctactatataagaagttcagctacctagccagagagaagacatagagatcccctgagactacagggagagggagaagggccaatttgagcccagctttctaactatctctgtaaaggtgcaggcatgtaattgaagctgtgttggacccctctaccccagctcgaacatcagctaaatacctctgagtaatccctaaggatggcatataaagccaaattgcctagccaactyggcagcttggactgctgtttactaatggcttttttcttaaagaatatatttcacattgtttgaacatgaccacttaaatgggttgtaattcctagtcacaacagaaatttattcaacagaaatggtgttt

SEQ ID NO: 414911 - DNA, 547 bp, Homo sapiens
acagatgccaagaataaataattcaaaaaacaagagagagagtaatagagtcatagttttaattaatatcaagtgctgagggaagtcctctttcattagaggatgtattcatttcctagggatgttgtaacagagttctacaaactaggtagctcaaacaagagaaaagtattgtctcacagttctggaccttggaaatccaagatgaaggtgtcagcagggttgttaccttctaaggactgtgaaagaaggatctgttycaggaatctatccttaacttgcagatggctgtctttctattcatttggcatttcccctgaatgtttgtcttccaagcctcccctttctatgtaaggacaccagttacattggattagggcccaccctaatgatttcattggaacataactacatctgcaacaacccaatttccaaataagatcaaatgcttagatacggggggttaagacttcaacatatgaatgggggtgtgcatagttcaacctaaaacagatgctaattgagcagagatctgaagaagagaaag

SEQ ID NO: 414912 - DNA, 547 bp, Homo sapiens
acagatgccaagaataaataattcaaaaaacaagagagagagtaatagagtcatagttttaattaatatcaagtgctgagggaagtcctctttcattagaggatgtattcatttcctagggatgttgtaacagagttctacaaactaggtagctcaaacaagagaaaagtattgtctcacagttctggaccttggaaatccaagatgaaggtgtcagcagggttgttaccttctaaggactgtgaaagaaggatctgtttcaggaatctatccttaacttgcagatggctgtctttctattcatttgkcatttcccctgaatgtttgtcttccaagcctcccctttctatgtaaggacaccagttacattggattagggcccaccctaatgatttcattggaacataactacatctgcaacaacccaatttccaaataagatcaaatgcttagatacggggggttaagacttcaacatatgaatgggggtgtgcatagttcaacctaaaacagatgctaattgagcagagatctgaagaagagaaag

SEQ ID NO: 414913 - DNA, 605 bp, Homo sapiens
gcaaatctgagagttattggccttaaagaggaggtagagaaagagatagaggtagaaagtttattcaaagggataataacagagaacttctcaaacctagagaaagatatcaatatccaaatacaagaaggttatagaataccaagcatatttaacccaaagaatactacctcaaggcattaaataatcaaattcccaaaggtcaaggataaagaaaggatcctaagagcagcaagagaaaagaaacaaataacatgcaatggagctccagtacatctggcagcagacttttcagttgaaatcttacaggtcaggagagagtggcattacatattaaagtgctgaacaaaaacaaacaaacaaamaaaaaaaaaaacttttaccttggaatagtatatctggtgaaactatccttcaaacatgaaggagaaataaagactcccagaaaatcaaaagctgaggaatttcatcattacaagacccatcctataagaaatgttaaaggaaatacatcaactagaaagaaaaggaaattaatgagcaagaaatactcacccaaaggtacaaactaactggtaacagtaaatacacagaaaaacacagaa

SEQ ID NO: 414914 - DNA, 583 bp, Homo sapiens
cacatcaagaaaagaaaactacctgccaatatatctgatgagtattgatgtaaaaatcctcaacagaacactagcaaaccaaattcaacaatacattagaaagatcattcatcaggaccaagtgggatttatccctgggattaaaggatggttcatcatatgcaaatcaatcagtgtgatatatcatatcaaaagaattaaggataagaaccatgtgatcattttaaccratgctgaaaaagcatttaatattattcaacatcccttcatgataaaaattcttcaaaaactggggacagaaggaacatacctcaatatcataaaaagcatacaggtaagacccacagctagtatcatactgaatgaggaaaaactgaaagtctctccttttatatcagcaacacaacaaggatgcccactgccaccactgttattcaagattgtacgaaagtcctagctcgaggggtcagacaagagaaacatataaagggcatccaaattggaaaggaaaaagtcaaactgtccttgtttcctggtgacttaatcttatatttggaaaaacctaaagaccccacaagaaaac

SEQ ID NO: 414915 - DNA, 605 bp, Homo sapiens
cattttaagtttatgggtaaaaggcacagggaagatacaattttaacatattttccttctacaaccattgtctcttctagaataaagcctgaaagtctagagtttgtcatgtctagcaaaaaaaaaacgaacctgattggcatgaagaagtatgtgctactaccattcaatgcaactgttaagttcttaaaaattgtattagtgataggttccaaactacttcaattatcagcctaatgaaataccactctttccatgtatcagtcctaaaatttcagtattattttttatacaacctagatttttaaagaagagcatgagstttcgaacaagaatagaaaaggatggtgcataatgtgatagccaagaaacaggagaaataaaagtaatgcctggggagagaagactcaggaggccagacatatttcagcatgatgaaagagtgctctgaagaaccgtaggccacttgagatttagtattcattgaaaagacagtgcccccaagaagagaaccatagttaggttttatctatttcatgtttttatcaagcatggaggggttctacagtacaggaagaaagtctatgggagaaatcaatcccctt

SEQ ID NO: 414916 - DNA, 605 bp, Homo sapiens
cattttaagtttatgggtaaaaggcacagggaagatacaattttaacatattttccttctacaaccattgtctcttctagaataaagcctgaaagtctagagtttgtcatgtctagcaaaaaaaaaacgaacctgattggcatgaagaagtatgtgctactaccattcaatgcaactgttaagttcttaaaaattgtattagtgataggttccaaactacttcaattatcagcctaatgaaataccactctttccatgtatcagtcctaaaatttcagtattattttttatacaacctagatttttaaagaagagcatgagctttcgaacaagaatagaaaaggatggtgcataatgtgatagmcaagaaacaggagaaataaaagtaatgcctggggagagaagactcaggaggccagacatatttcagcatgatgaaagagtgctctgaagaaccgtaggccacttgagatttagtattcattgaaaagacagtgcccccaagaagagaaccatagttaggttttatctatttcatgtttttatcaagcatggaggggttctacagtacaggaagaaagtctatgggagaaatcaatcccctt

SEQ ID NO: 414917 - DNA, 590 bp, Homo sapiens
gagaattggcctaagattcttcatttcccacaatctcatggtgataccaatgctgctggtctatagacccactttgagtagaaaggatctaagtttcttcagctgagaggttactgatccctcttctagcgctctgctgacattgtggttgtttctctatgtgtctgtagtttctatcccatttccaattactacaaattacacaagaaaaaaatgattgtatttatttatctcaaggcagtaggaatataagcatcttttagaatactcttttataccttggagatgttcaacaatgagctagcactactcacataatcaaaaaaaaatattttctgctatttggaactaataacattactactttggctgccttaaatgcaatactgaccaaacaaaaacccctcagagacccacagaactggagagaaaatgccgytttgagaagcaaagaataaaacacagagcagtaaagaatatatcctgtggacgcagccaacatctttggaaagaattactggattctaagcggccaacaaattgcattctaacaagaagagccttgctcttcatggactgaggatacttct

SEQ ID NO: 414918 - DNA, 590 bp, Homo sapiens
gagaattggcctaagattcttcatttcccacaatctcatggtgataccaatgctgctggtctatagacccactttgagtagaaaggatctaagtttcttcagctgagaggttactgatccctcttctagcgctctgctgacattgtggttgtttctctatgtgtctgtagtttctatcccatttccaattactacaaattacacaagaaaaaaatgattgtatttatttatctcaaggcagtaggaatataagcatcttttagaatactcttttataccttggagatgttcaacaatgagctagcactactcacataatcaaaaaaaaatattttctgctatttggaactaataacattactactttggctgccttaaatgcaatactgaccaaacaaaaacccctcagagacccacagaactggagagaaaatgccgttttgagaagcaaagaataaaacacagagcagtaaagaatatatcctgtggacrcagccaacatctttggaaagaattactggattctaagcggccaacaaattgcattctaacaagaagagccttgctcttcatggactgaggatacttct

SEQ ID NO: 414919 - DNA, 558 bp, Homo sapiens
ctgaactaagaaaaaaagagagaagacccaagtaaataaaatcagaaacaaaaaaggggacataacaagtgagaccataggaacacaaagagtcattaaaaactattacgaataattatagccaacaaattggaaaacctagaagaaataaactcccagagacataaaatctaccaagattaaaacatgaagaaaagaaaacctcaacaaaccaataatgagtgacgagatcaaagccataataaagtctcccatcaaayaaagcccaggacctgatggattcactgctgaattccaccaaattcaaagaaaaacaaacaccaattctgctcaaaatgttccaaaaaaaatgaagagggagaaatgctgtcaaattctttctatgaggctaacattaccctgaaaataagactaaacaaggttacaacaacaaaaaataaagactacaggcatcaatatcactgattaacatagatgcaaaaattatcaacaaaatactagcaaactgcattcaacaatatcattcaccacgattaagtgggattcatactaaggatg

SEQ ID NO: 414920 - DNA, 539 bp, Homo sapiens
acttactttaattctcatcttgcatttcatattttacacctgaggtttcttgaattatttttggaccaatgaaggaaataagtaaatttttattatacaaatgactgagatttataaattcataaccacttgaaatccaccaaatataattttattgtacaaattttatattttgacctcctatacaaaacctacactatacaaatttaacatttaacattacataatttttattgtacaaattttatattttgacctcctatacaaaacctacactatacaaatttaacatttaacattacataatttttattgtacaaattttatattttgacctcctatacaaaacctacactatataaatttaacatttaatgttacatatttaatattattgaaaaagaagtcagtaaaaaattaaaagaaacatgcatttttcagtaagtatttagaatcatgcagagycagaaaaaaacacatttctaggcataggcagataagaactttccacagcacctcttttttgttaacagtagcag

SEQ ID NO: 414921 - DNA, 572 bp, Homo sapiens
taataacgccttggatgaattgctgtcagactttccaaaccagccatttcttctaacttgtcattagtcaagaaatgccctgtactacgattgtttgtcaatattatgctagtttaaagtaacaacataagaaacaaacaaataaatcttttggggacttaaacttattagacaaattagatacargacaaaagtatttctaaggataaaactgttaattcataatgtaattgtaacttgaaaataaaattcttttcatcagtcatccctctcctctcagtccccccgcaaaaaagattctatcctattaacttcaacactataaccagaggagcaatacagttcctggtggaagggaagagaagatttttcacaaagcatgacagaggtaagaaagtggagagaacacctcaccatccatgacacttggctgggaaatggccctggatattttcagggatgaaaatgtctgtttcattttgttgtatctttgaagatagaatgaaactaccaggaaagctgagcccttgtctgcttttgttactcctcttcttgggggaagttttttcctt

SEQ ID NO: 414922 - DNA, 543 bp, Homo sapiens
ggctgggaaatggccctggatattttcagggatgaaaatgtctgtttcattttgttgtatctttgaagatagaatgaaactaccaggaaagctgagcccttgtctgcttttgttactcctcttcttgggggaagttttttccttttgaggaaagtcactataaagacatcagatgaagacaatggcttttctctgcagtcagagtcacccagagtttccacacatactaagactctatccttttacgagaggcggtagatgaaaaggagaaggcggggaaagcaggggctttgtgtagacagatctagcatagcatcacggctcttcctttctgagttatttgaccttgagcctccttttctttgcttgtaaaggaaggcaaattctatccaccttgcagtgttgtcgtgagaatcaaatgagaaaacrtatgcaaagcacaatgcctagcaaatggtgggcattcaggtaatacgattttccctttccattttgtcatgttttccttcttcttgtctgcctttcttccatacacttctgctc

SEQ ID NO: 414923 - DNA, 595 bp, Homo sapiens
atatttatttatctttttctggtacatttgtaatgaatgtgtatggaaatttgatatcagaatatttaatttccaaacatgtctcactctttaaacatcctaactgcaggtgggaaaaggagatattatgcataaaagttaataacttaagaaatcttattacaatgctttattctattcagaactctttcacttataaaattgcacttgcttatcacaagsctctataagttagataagaagggatgtattattctttacacccagagatatgaactagttcaaattcaagtttattcagtgactaagatcacactacttacactttcaggattttggcctcaaagattcccctatgtgaatactggccctaaaaatacaaaaatatctggatgtggtggcgtgtgcctataatcccagctactcaggaggctgaggcaggagaatcacttgaacccaggaggcagatgttgcagtgagccgagattgcgcccctacactccagcctgggcaatggagtgagactccgtctcaaaagaaaaaaaagctagagaagaactcataatatacgacctcttcttttctcctggctcta

SEQ ID NO: 414924 - DNA, 597 bp, Homo sapiens
atggctgttgtagccaacactgctggccatcagtatccaattctctccaccctaggttccaggaagactgtacttcccagaccccttgcagctaagcagggcmatgggaccacttctagccagtgaaccatgagccatagtgacatttgtggcttccaactgacactatgccccttgagccttcttgtcatcccctccaccaggaacacaggaccccatgctgcattggtggagcaagactgcagccccagaggacagctgccctgggcttctcccactctcatggagaattttttgggaaaggcaaatacattggtgttgtgttaagcagtggagattctggaatttgttgttgttgttaactccagcacagcttcgcttatgtagactaatctaataactgagcataatttaaggtgaacataaaaaagggtaactattgtcaacctactgtatgaagtagctttgtgaaaacttaactgaagtaatagccagttcttagccactgcaaaggcttctgagggcgacaacaaagggacctcaggatccctgggtgaaatgcccatctcacgggagcctgttggcctgtgcagatgt

SEQ ID NO: 414925 - DNA, 593 bp, Homo sapiens
ggggaccgtgggaaaaacaagacaagacataaggagatggcatcagtttgcacccctagaattgtggcagcgtatatgtgatgcactgctattcataggcagggagatggcagatagggagattcaggactgagaaagcacagcaagtgacatcccacggtgtcctccamacacagccattgtttgtcatgatcctttctgttcacttcccactcatttgtttaatgaggctgataaatatcagccaagtcgtggcacaaagactccagatctaaagccaagacattgccatcaaattttagatggttgtacaggtgaggaaagtgaggcccagcaaggtggaaatgacgcatccaaggtcacacagctagtgactacacaggaggtcggtggcttagaatccacttctgccaacttccagtctactcttcagtgcattccagggctgtgctgagctcacccactgggtcacagctggacgatgagggaaaatgtgggatgagtgtgatttaaaatattgaagaacaggatgggacaggcaagctgtttcccatcacttttgtggagagaatattgcagcaagaggattttga

SEQ ID NO: 414926 - DNA, 400 bp, Homo sapiens
gcagctgagatgatccatcagatatggtttgcctcaatgaattaagctgctggtggctaatacacaaccttcctgagagtctgagaatgaatcgcactcatgggccagtggagcctccagaaatgtgcttcatgtctggggcagaaatctgyccagattctgattcgtggattataatttttgaatcatacctcctggacccaaaaaccaatttcgagggtaccaaaacagcctaagtacttcaacttgtgtgattaggtttgttggtcatgcttttgttattattattattgtatttctaggtgattatctctgaattgtaggattatcgataatttttttttatttctgtattttctgatggatttccatgaatggggagtacttctaaaaagggaaa

SEQ ID NO: 414927 - DNA, 460 bp, Homo sapiens
gcttccattccactctgagaggtctagtgacacaaagaaaaggggcagtggaagcagtccacgggtctgtagccagagcgtcttcctccttattctgcaacccctctttccttatggtaacatccttctgatttgagtatctgggggaacctgcatttgtctgtgtaacatcagccatgtattaaccttttgcatttcagtttttcagatatttaaaaactgcagttggtccttcgaattcctatcagctttgaagttctgttatggtagaattcaaagcatgatcttagaatcataagaaaatctgcccyccaaaaatctgtaacatgaggtggatgagacttgctatgggacaagacagcgttgtccttggttctgagtactgggcaggggggccgggccctgttcttcattggtaagcatagttcatgtctcaccttcctgttagcaagaaccaaag

SEQ ID NO: 414928 - DNA, 630 bp, Homo sapiens
ggtggtgaattagatttctactgagttctctggtgggtctgtgagtctggctctattcagggctgttgtttctgcagttggtgatcccagatgggtgggctttttctgagtatttatgtcctttttatggcctttaagaccccttcttgcagtttattagaactatctacttttactgtgtttaatctgtgcttttagcagtgcagaaacaatgtcaagcacaaacatcagaactaatttagcatcaggcatttttatttggacttcagtagccagctttgttggtattgcacgtaaaagaagagactaaagaagctctgggtcagaatctaaggatctgtctgggagtaagttccccagtttagggaagtggacagactttttgacatttataggtctggatttttagttaccacatygggtgaaccatgtggtctgcctttttagaagatgaacacaattttagacataattggtagacgagcaagttttacatcctggtaagtcacctttgtggaggagaaagaattttagttggaagtcaggagaaccaacgttaccatgactctgacacttctaatcatttggtcttgagaaaattccatggtttttttgcacctcagtttatca

SEQ ID NO: 414929 - DNA, 520 bp, Homo sapiens
acacactgtgtatatatacatatgcatacacatatacagccccaccaactttttttttttcttttttgagatgcagtcttgttgtgtcgccaggctaaagtgcagtggtacgatctcagctcagtgcaacctctgcctcccaggttcaagcaattctcctgcctcaaccttctgagtagctgggattacaggtgcccgccaccctgtgcagctaattttttttgtatgtttattagagacagggtttcgccatgttggccaggctggtctcaaactcctgacctcgtgatccaccagcctcagcctcccaaagtgctgggattacaggcttgagttactgcacctggtccccaccaactttttatctgctcatatgagagcattacrtgggctgggctctgtgaaaattatattcagatatttagtagatgctagttgacctttgggcaaattaaccttccacaggtctttttttaaagtaggcagtgtagaaataaaaaacgtatttacatggggcaac

SEQ ID NO: 414930 - DNA, 610 bp, Homo sapiens
ttttgccaaagtctattattgcattaggggttgccaaggagtcgttttccaattttcactctttttagctatgatttttagaaaagagacctttccttcatcccaacaaatacatgacaaacgtttgagtatttgcctttatttgtaagttttcagaataataagctgatgccttagcaacccttataggatgtagtagtggttgtttttttggagagtatcattacgaaattacttaattatgtttttatgtattatgtgtttttccaatacgttgtcatcattcttcttcytatgtttatattgtttcatctccaaccattggaacctcttccacatggtgtctgccttcacatttgttatgagccatgaggttttgagagcttccttggttttaggaacaataccatgtcccaggatcatttaatgcatttcctgtccatacctggaatcagagtcttggttctttctctagagtcttggttacttttaatgggatatgggatttatagctcatagtctggatgcacagtccaaattcattattcaacatgtgcctttttattaccgtctatgattcaggacaatgtagtaataataatagtaagaa

SEQ ID NO: 414931 - DNA, 610 bp, Homo sapiens
ttttgccaaagtctattattgcattaggggttgccaaggagtcgttttccaattttcactctttttagctatgatttttagaaaagagacctttccttcatcccaacaaatacatgacaaacgtttgagtatttgcctttatttgtaagttttcagaataataagctgatgccttagcaacccttataggatgtagtagtggttgtttttttggagagtatcattacgaaattacttaattatgtttttatgtattatgtgtttttccaatacgttgtcatcattcttcttcttatgtttatattgtttcatctccaaccattggaacctcttccacatggtgtctgycttcacatttgttatgagccatgaggttttgagagcttccttggttttaggaacaataccatgtcccaggatcatttaatgcatttcctgtccatacctggaatcagagtcttggttctttctctagagtcttggttacttttaatgggatatgggatttatagctcatagtctggatgcacagtccaaattcattattcaacatgtgcctttttattaccgtctatgattcaggacaatgtagtaataataatagtaagaa

SEQ ID NO: 414932 - DNA, 558 bp, Homo sapiens
attctactggaccagtattaaaagatggatagggtatatttcttttgttccagaattatacaaatctattttattccattgctccattatattttattgattctgtcactatactkccagaatattgcagattttagaggaatgattgtccatatagctacctttaaagcatacaaatgatttttttctcaaaccgcatcatgaatacgagtctaaatctcactaacagctatgaaactggacaggtccacaagagtggctttttttttttcctgcttctcataaactcactttggtagtgactagaatctactttcattaaacaaaagtgaaaaaagacacatgtatacaagtaatcccaatgagagttttgagatttttacaagactttttcatagaaaaatttttgacttatagtaagtatgcaataattgctactattttttttaatttgcagaagggaggtttttcaaatgcagttctttctttttcactctctagcagtttagagtggctggacaatatcacatcacttatatagtcaaggaaagaaacagg

SEQ ID NO: 414933 - DNA, 544 bp, Homo sapiens
ggcaattcataaatcgacaactgcaggaagtctctgtcacctctagggctagagggacagcgagagaagatggtgttattagcatcaaggagctcaggctataaaacagagctggaacctgggagaagtggccacctgagaggcctgttgatgggcatggtgggagggtcatacggcagaactagaactctggagaagggaatcgctccaggagagttggagcctcagtgaggrctgcctgtctgagttggagccacagggacaggttcgcctggagagagtgcttctcagtaggaaatggaagctcaaaggaattattagctattgccagacactgattgagaaaaagagatgggaggaaatacttactctctcctccctttcagcccactaatatttatatttgtatttttatttcttgttcctttgtgtatgacgtgaggtagaatactgattttatttttctctatatagtgggaaatattcccagcctctttggctaaattatccatcatttcttcaataatttataataccacatcac

SEQ ID NO: 414934 - DNA, 544 bp, Homo sapiens
ggcaattcataaatcgacaactgcaggaagtctctgtcacctctagggctagagggacagcgagagaagatggtgttattagcatcaaggagctcaggctataaaacagagctggaacctgggagaagtggccacctgagaggcctgttgatgggcatggtgggagggtcatacggcagaactagaactctggagaagggaatcgctccaggagagttggagcctcagtgaggactgcctgtctgagttggagccacagggacaggttcgcctggagagagtgcttctcagtaggaaatggaagctcaaaggaattaytagctattgccagacactgattgagaaaaagagatgggaggaaatacttactctctcctccctttcagcccactaatatttatatttgtatttttatttcttgttcctttgtgtatgacgtgaggtagaatactgattttatttttctctatatagtgggaaatattcccagcctctttggctaaattatccatcatttcttcaataatttataataccacatcac

SEQ ID NO: 414935 - DNA, 544 bp, Homo sapiens
ggcaattcataaatcgacaactgcaggaagtctctgtcacctctagggctagagggacagcgagagaagatggtgttattagcatcaaggagctcaggctataaaacagagctggaacctgggagaagtggccacctgagaggcctgttgatgggcatggtgggagggtcatacggcagaactagaactctggagaagggaatcgctccaggagagttggagcctcagtgaggactgcctgtctgagttggagccacagggacaggttcgcctggagagagtgcttctcagtaggaaatggaagctcaaaggaattattagctattgccagacactgattgagaaaaagagatgggargaaatacttactctctcctccctttcagcccactaatatttatatttgtatttttatttcttgttcctttgtgtatgacgtgaggtagaatactgattttatttttctctatatagtgggaaatattcccagcctctttggctaaattatccatcatttcttcaataatttataataccacatcac

SEQ ID NO: 414936 - DNA, 595 bp, Homo sapiens
agcgactgtcacgaataaatcaaagtattactaatagtaaatgattcattctagaaagtcttggggmtttctattagggctcttagggactatgtcttataagatgctaagcctagaccaatctgagacatgaaaagtatgtatttctaataagttttaaaaaattacttatactctaatttgttccaaaaataatttaatgtgaccgtgctaacaataatggaaatgtctctaccctgaaaagctaattacagtacttcctcttgtctctgtgcaaccatcttggattgattgtgaaatgccggtaggggcggcattgacagttattaactctacctgtttgtaatatttgctgttgttttatttttgagtctgagaagatggcttaaaagtggtctagactactgtgtatgacttcaaataccaagaggttggaaggtgttcaagccattttcagtccggttagactcagcagaataccttcttaccaggcaggttttacattttatctgtcatgaggcctactcaagactacaaaataaaaagagtaaaatcatatcagataataaggcaaaaagaattttagtaacttctc

SEQ ID NO: 414937 - DNA, 595 bp, Homo sapiens
agcgactgtcacgaataaatcaaagtattactaatagtaaatgattcattctagaaagtcttggggatttctattagggctcttagggactatgtcttataagatgctaagcctagaccaatctgagacatgaaaagtatgtatttctaataagttttaaaaaattacttatactctaatttgttccaaaaataatttaatgtgaccgtgctaacaataatggaaatgtctctaccctgaaaagctaattacagtacttcctcttgtctctgtgcaaccatcttggattgattgtgaaatgccggtaggggcggcattgacagttattaactctacctgyttgtaatatttgctgttgttttatttttgagtctgagaagatggcttaaaagtggtctagactactgtgtatgacttcaaataccaagaggttggaaggtgttcaagccattttcagtccggttagactcagcagaataccttcttaccaggcaggttttacattttatctgtcatgaggcctactcaagactacaaaataaaaagagtaaaatcatatcagataataaggcaaaaagaattttagtaacttctc

SEQ ID NO: 414938 - DNA, 595 bp, Homo sapiens
agcgactgtcacgaataaatcaaagtattactaatagtaaatgattcattctagaaagtcttggggatttctattagggctcttagggactatgtcttataagatgctaagcctagaccaatctgagacatgaaaagtatgtatttctaataagttttaaaaaattacttatactctaatttgttccaaaaataatttaatgtgaccgtgctaacaataatggaaatgtctctaccctgaaaagctaattacagtacttcctcttgtctctgtgcaaccatcttggattgattgtgaaatgccggtaggggcggcattgacagttattaactctacctgtttgtaatatttgctgttgttttatttttgagtctgagaagatggcttaaaagtggtctagactactgtgtatgacttcaaataccaagaggttggaaggtgttcaagccattttcagtccggttagactcagcagaataccttcttaccaggcaggttttacattttatctgtcatgaggcctactcaagwctacaaaataaaaagagtaaaatcatatcagataataaggcaaaaagaattttagtaacttctc

SEQ ID NO: 414939 - DNA, 343 bp, Homo sapiens
ttattttgcattttgttgatcttatacaggttagagatagcttgwggaagtttagataaaaagcaaacacctatttaaacttgaaaagtaacaatgtgctgcatattaaagtattggataaatacaatttagaggttaataaactacctgctttatattcttcatattggttttgttctactttcattggttatttaatgagaatagataacacaaagaaaaagctttgtattaaactaacatgcttaaatttagatttgaaacatataagagcaaaaagtgatagttaataggaatttatggtaaagctcgtcaaaattgtgaatatttggtttatttgcat

SEQ ID NO: 414940 - DNA, 534 bp, Homo sapiens
aatatctgaggctggaactcaggaggaaagtctggctggcagaggatgctcaggaactaacagggttttaggagaaatggaaaccgtaaaaatgaatgaaggatgagactgagctgaaatggaggatggcagaggagcccttgaaggagagagagaacaattatcccagattaactacttcatctcctaacaaaggcagtaaagtgatagcatagtgaagactttagtttcattctactgattctctggggtctgttttttattttgcaggctgcctggatccccagagtttgtctggaaagcctcttgagatggggttatgtgctccgaggatcccaggaggaaggatggggcaagagcagacaaacctatgcctctrcagcagctgtaccgttgtcctgggagtgagccccagccgtggctcaaggcacacgtgcctccagaggacaatctgggatgctcaggggacagagaggcagagggactatcagggtgaagctgtctttttcacttgtttggcactcagcccagggc

SEQ ID NO: 414941 - DNA, 615 bp, Homo sapiens
gacggctgtgtgcacccactggaggaagccatgctgagctgcgacatggatggtgagggctcaggcgcagggctgatgcgcaggagggcccaactctgtattccaccagggccagggctgtgtctgcctctgatctcttccctcccttggtctgttgggtcctttccaggtgtgtgtgcctctgctgtcccattatgtgtctgtcggctctgtctctgagtctgctttcctaagttttgtgactgctgagtttctgctctctcttgaggccataccgctgtgattttcytgtgtgtctgtctctggttccctggctgggcctctgcggataatttgctgtttcttctgccccatctgctcctgccttgctcctcctcggctggctgctgtgggagcctcctcagtgcctcctgctggtcaagtaggggacgtctctctgctggccctggggcactctcctgaccccagacaggctgcttggctgacttcactcctgtctcccaggctcccgccacttccccgagtcccgaaacagcagccacatcaagaggcccatgaacgccttcatggtgtgggccaaggatgagcggaggaagatcctgcaagccttcccag

SEQ ID NO: 414942 - DNA, 580 bp, Homo sapiens
ctcactttgtcagcaaggctggagtgcagtggtatgactatagctcactgcagcctcacttccttgcctcaagccatcctcctgcctcagccccctgagtacttgggaccacaggtatatgccaccatgcccagctaattttctttctttctttctttcttttgtatgaaggggtctcgctatgttgcccaggttagtcttgaactcctggcctcaagcaatcctccctccttggcctcccaaagcactgggattacagatatgagccatcacacctggccgaaatataccagattcaagtatacagttcgatgggttttgacaaatatataaacccatgtaaacagcaccacaatctagatataaaaygtttctctaaaagttccctcctgcatcattgcagccagtctctctgcagctactggccccaggcaaccactgatctggtttctgtcactattgaatagttttgcaaatctgagattttcatataaatgaacacatagaatatgggctcttttgtgtgtggctttcctcagttgttgcatgtaccagtagtttgtttctttttatcgttgag

SEQ ID NO: 414943 - DNA, 570 bp, Homo sapiens
ttaatcgcatgagctacctgctcctccctccacaattttgaaaactgacatctgaagaagattgagtctcctcattcatgaccataatttatcatcccatatatttagcccccctttgatttctttcataaacatatyatagttttcagcatacagattctacacatattttgttagacatatacctaagtattttatggtttggggtgctatttattacacataatattgtcttgaaaatatcaatatccatttgctcattgctggtatatagaaatatgattgatttttgtgtatttaccttgtatcctgcaaccttgcaaagctcgcttgttttagttgcttttttttttgtacaattcttttggattttctaagtcgaccataatgccatctaaaaatagagaaaattttactttttcctttgcaatatgtatttttcataaaaagttatttttcttgtcttatttcagtggatagaacttccagtacaatgttgaataggagtggtgaggggaaatacattttccttgttcagattaggaggaaaagagttaatctttcaccatt

SEQ ID NO: 414944 - DNA, 373 bp, Homo sapiens
ttgaagccaggacttcaacaccagcctgggcaacatagtgataccccccatctcaacagaaaataattttttaaaaatagccgggcgtggtggcttgcttctgtagtaccagctattgtgaggctgaggctggagaacagcttgaacccgggaggttgaggctgcagtgagccrtgattgcaccactacactccagcctggacagagaaaaaaagatagatacaacaaacagttgtgttgctgctagagaatgagagaggttacttcttttttttttttgagacagtctcactttgttgcccagtctggggtgcagtggcacaatcatggctcactgcagcctcgactacaggctcaccactaagctcagata

SEQ ID NO: 414945 - DNA, 583 bp, Homo sapiens
gttgatctgtctaatgttgacagtggggtgttaaaatctcccattattattgtgtgggagtcttttttgaaatatgttagtaaactgtgtattagctaaaagataaaagcaacatggtctcctttattagaaaatttctgtggacttaaaactgaagagtggtgtcataaactagaagtttcagttcaacatatcaaaaccaaacttctttctattctacaaaatagaagtcagtgcaactatgtttatttttgcttactgaaacccagctccttccagaggcatctgaagctattaggtctaaataacatctttgmctttcaaggggcattcaacctcttgaactgaatagatttgagcagagtaataaaatagggtccatgcctgagtttaccaaattaaagtagctttacttggctacattagtacttcatgtactcgtgaagcaaaacaattttaaatttcataaaagtttcagtggtttcattgccattgaaaccacagattttgaatctcaatcttttttctataaatgcccaagttaatctactcatctcaatcacaccttcttcataaatactca

SEQ ID NO: 414946 - DNA, 609 bp, Homo sapiens
ttaatgatgtcacatatatgggaaatctaaaaaaactgaactcataaaagcagagaatattaatggaatactgggtaccagataatatagtgtggatgtcccctccatatctcatgttgagatgtaatccctrgtgttgaaggtggggcctggtgggaagtgtttgggtcctggtggcagatccctcatggcttggtgctggcctcacgataggagtgagttctcatgagatctgtttaagtggtgtggcacctactcctgtgcccctctgcccatcctgcttttgccatgaaacatgcctgctcccacgtcaccttctgtcatgagtaaaactccctgaggccgtcccagaagctgagccgatgccagtgccacgcttcttgtatagcctgcagaactataagccaattaaatctcttttctttataaattatccagtttcaggtatttctttatagcaatgcaagaatggcctaacacatcaggggttgagggtggagtgtgtgaggagaaagattggaagatgttggtcaaacaatatgaggtttcagttagacagaaggaataaactctgggctctattttatagcacagtggctgtagttaaca

SEQ ID NO: 414947 - DNA, 540 bp, Homo sapiens
taagtttctttagcatatgaaccataaatttgagagaatatgccacagagtagtttctggctgtatacagttccaacctttttgtcctccaaaacatatrtatttcccatcctgggggcctcaggatatggacgtattacatcatgacctctggccctgcacctcttttccagcattggatgactgtgtacaatgggcagtaggaatactctggatgccatttctacacaggatactacaataacccagccataaatgaaagtaattattgtccaataaatacatcccagcaaacctagcctgactgcatcccaactcaactttctttagctcagtttcaaaaataaccacagcgaattgaacgctacccaacatgacagaaggaagctgggatgtaaagaagacagcagccatatcatttgcagttaaaacactttgcttttgcacatttgtaaaggtatgtgactatgtgaacacagtgctaaggcccctcccagaacctggaaagggattcgtacaagtaaggggccttgaaactca

SEQ ID NO: 414948 - DNA, 537 bp, Homo sapiens
tattcaagtgttaattcacttaggataacggcctccagctgcattcaggctgctgcaaagaacatgattttatcctttttatggcatataatattccatggtgtatatgtaccacatgttttttatccagcccactgttgatgggcacttaggttgattccatgactttgctattgtgaataaaagagaacagactcttgagccaagcagccacagtttgagtyccaacttcagtgttggctatctggatgattcagggaaatattcttagcctctttggtacttagtttcctcagtattaaaacaaggataataatagtacttgtttcatagtgttgttgtgaggattaagtaagtaaatatacttaatgcacttaaaacagtacctgatatggtgagtgaccaatcaattattaactaagatgatatttgatttggaacttggaagataaatatgatgcagacaggaagggaagggggcaggaagagtatttaagtagagggagcaatggcaatataagccagagtgtaaaaatg

SEQ ID NO: 414949 - DNA, 560 bp, Homo sapiens
agctagcaagtcctttcatattgtcatgactgttttctcatcaccatcctggaagcagtaatcctcattagaggcatgcaagggtcattaaaatgatttcagttgtactttgccatatttcatggggcaaattatcagctatattgtggtatttataagctaacatattttatatttttaaggatctactttcttcataatagaatgtgcttcatattatttttagggttaaacataagtgtgtcgtctatcatgcttggtacttactaaatgctcaaaaattagtaatggtttatattaacatcagtcactctaacttctgatcgtaataaaaattgtagctaacacttattaagggattactacatgcccagtaatacctccaaatgctttgcctgtattctgttgttattgcttcacttaawcctcataataatgacgtgacatggtactctttttatcgcgcccatttttagagttgaggaaccaaagcaaagaataacccagtgacttgcacaaagtcacatgattgacaaggggtagaaccaaaatttgaaccc

SEQ ID NO: 414950 - DNA, 573 bp, Homo sapiens
taattgttttgaatatatccatwcttaacatcatatgaaatccaaaatttaatgataaatttcatctggatgtgttattataaaagtcatctttttttcctttgtaaaatatccatgtaacatagcttccattactccatattttatgtatggttaaaattatcaaagtgcattatgtattttatattgtttatttttgtctgcatgaaagattggaatagtaaccgtgtatgataaatgttaataataataaagtgaaatgtagtatgaccaattcagcttctttccatttaaacttaattcctattatgttcttacctatttggaggacaaaaaccgttaaacacagattttcacccttcaagcattcacaagctcgatagaagaaacttgacacacgtatgaaacaaattctacaaatatgagctggagggacagtaactgctaggaaggaatgagagagaagcttaatatgggccacagcataggaaaacttcacgagagaaaagagacttacactgtcccctgaattaactagccaacctatcaaggtttatttagtacttattatgt

SEQ ID NO: 414951 - DNA, 573 bp, Homo sapiens
taattgttttgaatatatccatacttaacatcatatgaaatccaaaatttaatgataaatttcatctggatgtgttattataaaagtcatctttttttcctttgtaaaatatccatgtaacatagcttccattactccatattttatgtatggttaaaattatcaaagtgcattatgtattttatattgtttatttttgtctgcatgaaagattggaatagtaaccgtgtatgataaatgttaataataataaagtgaaatgtagtatgaccaattcagcttctttccatttaaacttaattcctattatgttcttacctatttggaggacaaaaaccgttaaacacagattttcwcccttcaagcattcacaagctcgatagaagaaacttgacacacgtatgaaacaaattctacaaatatgagctggagggacagtaactgctaggaaggaatgagagagaagcttaatatgggccacagcataggaaaacttcacgagagaaaagagacttacactgtcccctgaattaactagccaacctatcaaggtttatttagtacttattatgt

SEQ ID NO: 414952 - DNA, 573 bp, Homo sapiens
taattgttttgaatatatccatacttaacatcatatgaaatccaaaatttaatgataaatttcatctggatgtgttattataaaagtcatctttttttcctttgtaaaatatccatgtaacatagcttccattactccatattttatgtatggttaaaattatcaaagtgcattatgtattttatattgtttatttttgtctgcatgaaagattggaatagtaaccgtgtatgataaatgttaataataataaagtgaaatgtagtatgaccaattcagcttctttccatttaaacttaattcctattatgttcttacctatttggaggacaaaaaccgttaaacacagattttcacccttcaagcattcacaagctcgatagaagaaacttgacacacgtatgaarcaaattctacaaatatgagctggagggacagtaactgctaggaaggaatgagagagaagcttaatatgggccacagcataggaaaacttcacgagagaaaagagacttacactgtcccctgaattaactagccaacctatcaaggtttatttagtacttattatgt

SEQ ID NO: 414953 - DNA, 581 bp, Homo sapiens
gggcttctcctaggtggtcatgtttgagcagacttgagcaaagtgtcatactaaaccacgagaatatctggggaagtacctaactggaagaggaaagagtaataacgccctgggacaagaaagaccttgatgagtttggtgcatttgacagtaggcaagaagaccagttatgacacccatgttcataacaacattatttgtratggccaaaatgtggaagcaacccaaatgtgcatcgacagataagtgaatgcacaaaatgtggtgttattcttacagtggactattattcagccttaaaaaggaaagaaaatctgacccatgctcaacatgaatgaaccctgaagtcactgtgctaaatgaaataagccaacacaagaagtcaagtactgtgtgattccatttaaatgacgtaatttgagtgatggggctgaaaggagggaggaatagggagttgtttaatgagtatgtactgttagttttgtgagatgaaaagagttctgaagattggttacacaatagtgtgaatgtacttaacaccactgaactgcacacttataaaacggttaagatggtaaatt

SEQ ID NO: 414954 - DNA, 581 bp, Homo sapiens
gggcttctcctaggtggtcatgtttgagcagacttgagcaaagtgtcatactaaaccacgagaatatctggggaagtacctaactggaagaggaaagagtaataacgccctgggacaagaaagaccttgatgagtttggtgcatttgacagtaggcaagaagaccagttatgacacccatgttcataacaacattatttgtaatggccaaaatgtggaagcaacccaaatgtgcatcgacagataagtgaatgcacaaaatgtggtgttattcttacagtggactattattcagccttaaaaaggaaagaaaatctgacccatgctcaacatgratgaaccctgaagtcactgtgctaaatgaaataagccaacacaagaagtcaagtactgtgtgattccatttaaatgacgtaatttgagtgatggggctgaaaggagggaggaatagggagttgtttaatgagtatgtactgttagttttgtgagatgaaaagagttctgaagattggttacacaatagtgtgaatgtacttaacaccactgaactgcacacttataaaacggttaagatggtaaatt

SEQ ID NO: 414955 - DNA, 538 bp, Homo sapiens
tggtgcacacttatagttccagctactgggaaaactgagacagcaggacccttgagctgcagtttgaggctgcagtgaactatgagtgygccactgcatctaggctgggccatacaacaagactcagtcaaaagaaagaaaggaagaaagagagcaagagacaaagaaagaagagcaacatgaggatatgcatacccatttatgtatgttaaaactctgagcatcccaaaattgcacatttaaaattcagggagtattttcaaagcttttcaaggccaacattaaatatcacctccttcataaagcacttcttggttctttctatttatccctaaacatggcttcattactacaataaacatttattgcatagcttctcagtgacagacattatgttaagactgggaattcaaaggtgaaaggctttgtctttgtcctcagttgcttcgtcttgttgaggcaatcggcatatatataaataatggcatcagatgctgggcttggtggctcacacctgtaaccccagcactttggtaga

SEQ ID NO: 414956 - DNA, 611 bp, Homo sapiens
ttgttcaataaggaaagagtttcagttttgcaagatgaaaaaattctggagattggttacacaacaatgtgaatatacttaacactgaattttatacttaaaaatggttaatatggtaaatactatggtatgtgtattttaccatawttttttaagtgaaaacccagaaacaacctaaatgtctgaaaacaggaacctgatattataaaacacggcattgccatgtgacagaaaactctatgtcctctaaagataaggcatagtggaataatatttcatgacttcaagagtccatgatttagtattaagaaaaaagtaggattataaaacagcgtgtgaactagaatccactttttaaaaacatgtatatctaaataagaagtctagaatgttcacaagcattatgactaagtgacacaattacaggtatttttgcatcatttgatatttttgaaattttctataatacattatttttgtgatcaaattttaaagttattaaaaacaattttaggctgggcacagtggctcacacctgtaaccccagcactttgggaggctgagacaggtggatcacttgagtctaggagttcaagattaacctgggccac

SEQ ID NO: 414957 - DNA, 585 bp, Homo sapiens
gggtcatctgggctcatcagcattatctcttgtacttcagagtccttaactcgttgtgctggaatatacccaactctcatataatactaacaataacaataatagaattgatttattcaagtggtatgtactggcatattagcacctactatgtgccagcactgttctcagccctggggccacggtgataaattaaaacaggaattattgctctcatgagggagatagcaaatgaaataataaactttatggtatataaaatacttcatagaagattagcacttcatttatttatttatttttaagatggagccttgctcttgtcacccaggctggagtgcaatggtgtgatttcagctcactgcaacctccgccttctgggttcaagcrattctcctgcctcagcctcatgagtagctgggattacaggcatgcaccaccacgcccagtatttttagtagagacagggtttcactatgttggccaggctggtcttgaacttctgacctcaggtgatccacctgtctcggcctcccaaagtgctgggattgcaggcatgaggcactgcacccagctgattagcgc

SEQ ID NO: 414958 - DNA, 569 bp, Homo sapiens
  misc_feature (1)...(569): n = A,T,C or G
tgcccagctggggtcctgtctggacaattccaccaacgtcccagaaacatttattaagcacttctgcataccagctccatttgtaagtgctttgtrtatgagtgtatgaactcatttaatcttcccaaccaacctgtgaagatatgccattcttaggtttattttactggtgagcacactgagatgagaaattacttgcctaaaatcatagagccagtcaatggaaactggatctcagcccaaagggtgtgatgggatgacagctggcacttttaaccgtagcactgtgcagctcaaaaactatttactgcctccagcccccacgcctgccatactgaatgctgcaggctcttttgcaccttagtaccttggttcagactctcctctggctccaactccttccctcgccatcttttccacctggtgatctgttcctcatctttcaagtcttgggtcaggcatcattctctctgtgctgctctacctggatgctcacctcacgaagtannaatggccacactctccttttgtcccttcccagatcctgtgcaggcttctgctccagccct

SEQ ID NO: 414959 - DNA, 569 bp, Homo sapiens
  misc_feature (1)...(569): n = A,T,C or G
tgcccagctggggtcctgtctggacaattccaccaacgtcccagaaacatttattaagcacttctgcataccagctccatttgtaagtgctttgtgtatgagtgtatgaactcatttaatcttcccaaccaacctrtgaagatatgccattcttaggtttattttactggtgagcacactgagatgagaaattacttgcctaaaatcatagagccagtcaatggaaactggatctcagcccaaagggtgtgatgggatgacagctggcacttttaaccgtagcactgtgcagctcaaaaactatttactgcctccagcccccacgcctgccatactgaatgctgcaggctcttttgcaccttagtaccttggttcagactctcctctggctccaactccttccctcgccatcttttccacctggtgatctgttcctcatctttcaagtcttgggtcaggcatcattctctctgtgctgctctacctggatgctcacctcacgaagtannaatggccacactctccttttgtcccttcccagatcctgtgcaggcttctgctccagccct

SEQ ID NO: 414960 - DNA, 569 bp, Homo sapiens
  misc_feature (1)...(569): n = A,T,C or G
tgcccagctggggtcctgtctggacaattccaccaacgtcccagaaacatttattaagcacttctgcataccagctccatttgtaagtgctttgtgtatgagtgtatgaactcatttaatcttcccaaccaacctgtgaagatatgccattcttaggtttattttactggtgagcacactgagatgagaaattacttgcctraaatcatagagccagtcaatggaaactggatctcagcccaaagggtgtgatgggatgacagctggcacttttaaccgtagcactgtgcagctcaaaaactatttactgcctccagcccccacgcctgccatactgaatgctgcaggctcttttgcaccttagtaccttggttcagactctcctctggctccaactccttccctcgccatcttttccacctggtgatctgttcctcatctttcaagtcttgggtcaggcatcattctctctgtgctgctctacctggatgctcacctcacgaagtannaatggccacactctccttttgtcccttcccagatcctgtgcaggcttctgctccagccct

SEQ ID NO: 414961 - DNA, 431 bp, Homo sapiens
gaattgtagcatcagcagcctttatcagtaagggcccttggcattagaagggcatgcagacggggaagtattgcgttgatcctgccagcatgattcagtgactaagaagggggaaatggtctctttcctgggtggtaatagttggtgtgactcatgatcatattaactatgagtgtcaatgtgaagccttttattaagtgcctatttttgctgggttctctgcagagcattgtgcaaagtaaacattgtctgtgcttcaggtgacatgtacacagaatgyaacacaaattggatagggactaatgagttcagaccaggaggctattgaaccttgacagatgtgtgggagttgaaactaggaacaagaggctagctgtggttgttacctggaaatattttggtcatctattgcttaaattattatctatttc

SEQ ID NO: 414962 - DNA, 581 bp, Homo sapiens
cacagcctcattctgatgaacatgtctgcattttstaactgctgttaaagagtgtatgcaagcctttctgtgcaatctacaaggatccatgtaattttctttcagaacttagtaacataaactgtcctgcctaaagaaatggtatgtttctttattcccccaatgagaactgtatttgttttccttttgagtctcaaaggctcatagctaaatttaacattcaattccaggaagaaagattatagctattactatctctttctcctctttcaatcttttatttgtattcttaatagcattatcacgtgtcttttattataaaaaactttaaattcctttaggaagcgactattaattaaaaataaatagaatgttaccattagtgactttactcatctttacttattaattttaaaacactgtctctattatagtacggttttgagaaaccattagaaatatttaaaaatttatgttaaaaatattccaaagacagaaaagtatattcctttaataaacaaatcatcaaaagaaaaaacctttatctgtttggaaaaaacaaacagacaacaggaaaggaa

SEQ ID NO: 414963 - DNA, 552 bp, Homo sapiens
tactagtcggtttctgaaataatagtctccatttcttgtgtatgtgatatgatgaagaatctattatatctggcttttgtcttcggttcctgacaatgagcttcaaaaaatcttgggatttccttatagatgtatcttttgttattcataacaagagtctcttttgaccacacctgagtttatcctaataaggtgactctgggtgggcccttagatagttcaggaaaggagctgtccacatcagagagaccttggaacttttagccccatcccctggtctctggggagggggcagtgactagatagcagagcccagtcatctggctagtgatttaatcactgatgcctaggtcatgaagccccrtataaaaaccctggaatagcagtgaacatactggtttgctaggaagatgacacctggatttcttcaggggagagcagggaagctttgcatccctctgccctctttcctagaccttgcccttgctctgtgcacctcttccattgggctgttcctgagttgtagcctttataatgaaactgtgattgtat

SEQ ID NO: 414964 - DNA, 548 bp, Homo sapiens
gtctattttcagaaacagataaaagcattcagattatgcagtacaaatctcagcctgaaagcagctggaaaaatctgtttcttgccactgtcactgacccccctgacccttgcaagtaatgacattcaggcctgcttctccctcctcccttctccctcctcctccctcccagtacagactgacccatccactgcacatctggtccttgtctacattgtcagagcatttatccctcagagagctagagacagtggaacaggaattaagttttcttgsgattgaaaaaaaaattatcaagtggttcaaggagaagatagtgttaaatccatatctcctatctggatttgtgaggagcatatttgcaacactgcctggtcctctgctctatactcaggggtcacagggcaggaggctcaatctcaggcaggcacacaggcttcatttgccaagatcctctcctgggtaggacagtattctaccccgggtagagctgcttaagaccagatatctccctgtcctgatctctcataagcacatgaggtttggga

SEQ ID NO: 414965 - DNA, 619 bp, Homo sapiens
  misc_feature (1)...(619): n = A,T,C or G
actctgttagtaggaatgtaaattagtacagccattatgagaaaccgtatgggggttccttaaaaaattaaaaatagacttgccataccatccagcaatcccactactagatatttattcaaaggcaagaaattagtatgtcaggccaggcaccgtggctcatgtctgtaatcccagcactttgggagrccgaggtgggcggatcacctgagatcaggagtttgagaccagcctggccaacatggcgaaacctcgtctctactaaaaatacaaaacttagcccggcgtggtggtgggtgcctgtaatcccagctacttgggaggctgagacaggagaattgcttgaacccaggaggcagaggttgcagtgagccaaggantcgtgccactgcactccaactggggcgacagagcaagactccgcctcaaaaaaaaaaaaaaaagaaaaaaaacttaatatgtcaaagagctctctgcactcccatatttgctgcagcactattcacagtagccaagatatggaatcaatctaagtatccatcaacagaggaataaagaaaatgcattatacattcacaatgaaatactacaccactttgaaaaagaagaaaatcctgtc

SEQ ID NO: 414966 - DNA, 619 bp, Homo sapiens
  misc_feature (1)...(619): n = A,T,C or G
actctgttagtaggaatgtaaattagtacagccattatgagaaaccgtatgggggttccttaaaaaattaaaaatagacttgccataccatccagcaatcccactactagatatttattcaaaggcaagaaattagtatgtcaggccaggcaccgtggctcatgtctgtaatcccagcactttgggagaccgaggtgggcggatcacctgagatcaggagtttgagaccagcctggccaacatggcgaaacctcgtctctactaaaaatacaaaacttagcccggcgtggtggtgggtgcctgtaatcccagctacttgggaggctgagacaggagaattgcttgaacccaggaggcagaggttgcagtgagccaaggantcgtgccactgcactccaactggggcgacagagcaagactccgcctcaaaaaaaaaaaaaaaagaaaaaaawcttaatatgtcaaagagctctctgcactcccatatttgctgcagcactattcacagtagccaagatatggaatcaatctaagtatccatcaacagaggaataaagaaaatgcattatacattcacaatgaaatactacaccactttgaaaaagaagaaaatcctgtc

SEQ ID NO: 414967 - DNA, 600 bp, Homo sapiens
attaaatagaccagataattatattctaaacatctggtaagcaaacatttatttgaaaaaaaaatgygcatagcaatcttaaatactccctaaaattacatcaaattgtcaacaaggtaaaactggtatagtctcaaacagtatatagttgaccactacgatgcagccattctttttcctatcatttcctcctgcaaactccaactttaattccctttttaactctcactggcaaacatgctgttttgtttgctgcttacacttatgcctggcttaaattactctgtatttgtttgctttcgaggttctaaaatctttttttctccagtccaaaatctgttcccattagtagtttgcattttcatgaaatcctatcaagcttacaaatagttaagagcctacaatgggtaagatactctataagtagcttataactcaggaaggaaaagaaaataaacaaatggaacagttaagaatgaaatacttaaataggggctcaagatgaattttcctcttgtcttgcagaaggacaggtttggaatgataaaaatgactacagcagtaaagagtaggagaaataaacactcagtagtgaaggaa

SEQ ID NO: 414968 - DNA, 619 bp, Homo sapiens
tctgcaatttagcctttccctcagtgaggtaggcttccagggtggctggtttcactgctgtaaagataaatgggaggctaagcgggggtgcgcgcacctcctagggccatggctggggacttgacaagtcatttattccagggcatagcctggcttctcgccagcctccagtgtaatctcagccaaagagaaacctgaagtggacgacccccagcgtgggtcctctgcttcccagccagcacctcccggcatctggtggatgtgcacaatttgtaatacttttgaggataatgacttggtctcatggaaaaaggagaattggtccaagataatgtctggtaagccttgacattccaccctgaagcgatcctacactcrtgtagaatcaccgaacagctgcatgatcatattacagaatcttcctcaacagccagcttgtcattgaatttccccaaattccagcttttctcaaacaaaaggagccctgatgtgggaggagctggagtcagccagatggaagagaagtgcagattgccaaggctgggagcaccctttgaatgttttggtccaatccctctcattttgtatgtgaaaaaactgagatccaaagaaaagggga

SEQ ID NO: 414969 - DNA, 442 bp, Homo sapiens
tagttaatgattcatttctctgggcaatcagtttagatgtatactttgctaccccagagtattcgaggagtcttaaaaacccattcagtaagcctaggggtttgcattatccataaatggctgtaggaacttagtattggcctttgacttccaataatttttctttgattagcatttaattgttaatttgagagattctgaattttgtaggaggcttccatgtatagtaaagctgagtattcaatctgttaacttctagagaactagtattataaataaattgaaacttggattatttaccttttcagggaagyaattataagccttgaaagttatgcaaaaactatttcatcttaaaacacttagaaattcattttggtttttgtgattacagtgttcagtaagacagacatctaaatagggattgcatttggcagttatg

SEQ ID NO: 414970 - DNA, 649 bp, Homo sapiens
tgttttccatgcatggttggcttcatttggtttggtccccgcttagctgaatagttttaagctgactagaaagatatatagctaacgtttacatgacgtatttggaacttaatgaagcactacactaggcttccagttaatggaatttgtaccgttttaattttttggacagcttttttctctatttttaaggcagtatcgtgcaatgtcatctttttcaatacttgccattagtggtgtgtaaggaagaaaggttgaacaagtgattttttttatagaactatgattttattagaggttaggaattaactttgtcttaaattcacgtttccattgtcataaatagttgctcttaagtgttctttttktttaagatttaaatttaacacttttattccaaataaaatttatttttatctcatagttgaatgatgacatttgaatttctctagcaaaaagagcactttactttcttcattgctgtatttaatggtaactaaacattttcctctgtaacctatagtaaataggaaaatagtagattatgccatttttaggtgaaaaggagttcctttaggaatggaactttgaattaatgctataggaacatttggattaatgctatagcagattgttttttagcatgcta

SEQ ID NO: 414971 - DNA, 523 bp, Homo sapiens
tattttggttttcaggagcctctggaataattggagagtacagcctatatgcctcgcaaagcctttcatagaatgcactttggcttttgtcaggcttttggcacacttctgatattttactcatattcattgccttccttcctcctgcttttttcccatttgggagtgcctttctatatagctgcagccattccatgtcccttgcctcatttgggtattgctccacagtgaactggcatgggttaggggtggcctctggggcttccccttctaaccagctgagagctgcctgattaactctcctatgctcctctgtattaaataaagttagcaaaagttgttgacaatctggycaggttgggttgtgtgtcataataatagaattcaccaaatcaatgagggcctgaggcttttctgtataggaaggggtgtgctgtttccaatttaagagatcagtagtggagaaaggctgataaacgtaaaccctagagccaccttgtgtctgcccctggtcatcataaac

SEQ ID NO: 414972 - DNA, 527 bp, Homo sapiens
aagttgttgacaatctggtcaggttgggttgtgtgtcataataatagaattcaccaaatcaatgagggcctgaggcttttctgtataggaaggggtgtgctgtttccaatttaagagatcagtagtggagaaaggctgataaacgtaaaccctagagccaccttgtgtctgcccctggtcatcataaacttgtatcctggtctctcaaagtggcatctgcaaagcctgtggttcrcctgagcagaggtgcccagctgcctcgccctgtccatcttccctgtttttttctaacgggggcttctgttactctttcaggggagactgagcctcactttcctccaagcctgactctccagatgctcctgactctgcctcctgccttattctggccaaagacgggtagactggcacatatgggggccgacattctctttcctctggtggggcctgaagaactggttttggctgaggcttcagggattccttttcctgggagatgctaggggctttaggttcctctgctttct

SEQ ID NO: 414973 - DNA, 597 bp, Homo sapiens
tcccccacactcacctccaagcacacagcccctgctaagggatctatgcctcctgtcactccccacattggcctctcccaacactgtctctttcacacactttcacacatctcccctgccccaggactcctcatcagatgaaacaagcctctctcatgtcccaggtgagcctagttaggctcccacattctcacacatacacacaccactcctaccccaggacttcctatcagatgaaatgagcctctctcgtgtcccgggtaggtttacatgcacscacacactcccagttcctgtctccagatccaatgaaccactttcactttgttagtggggacatgaggttcatccaaattggcaagcgactcctgccacccccagccattctgggttggattagtggttgttccctgggaggtgatgaagctcccctttgtccttatgggatgggcttccctgccttgggcccttgctccttaccatggttcctgaagtgctggtatcatactgcagccccacccctggctccattgcactgccaggcaggctgccaggatgggggaagagccagtctccatccaggtgaagctccctcat

SEQ ID NO: 414974 - DNA, 597 bp, Homo sapiens
tcccccacactcacctccaagcacacagcccctgctaagggatctatgcctcctgtcactccccacattggcctctcccaacactgtctctttcacacactttcacacatctcccctgccccaggactcctcatcagatgaaacaagcctctctcatgtcccaggtgagcctagttaggctcccacattctcacacatacacacaccactcctaccccaggacttcctatcagatgaaatgagcctctctcgtgtcccgggtaggtttacatgcacgcacacactcccagttcctgtctccagatccaatgaaccactttcactttgttagtggggacatgaggttcatccaaattggcaagcractcctgccacccccagccattctgggttggattagtggttgttccctgggaggtgatgaagctcccctttgtccttatgggatgggcttccctgccttgggcccttgctccttaccatggttcctgaagtgctggtatcatactgcagccccacccctggctccattgcactgccaggcaggctgccaggatgggggaagagccagtctccatccaggtgaagctccctcat

SEQ ID NO: 414975 - DNA, 575 bp, Homo sapiens
agaatggactcagagacacagagaacagcggaagtgagactttcaatggtgatcttgcaagattgggtgtctggcacgcrggcacatccagcacagtatcaacaagcaatttatcccatagtgtgcaagtccctcccctggttcctcataggctgaatatatgaggttacaatcttctcggacgtcgcctattgatttttgggtagtggcttcaggtgtttttttagggttgtcttgctgcattttttttgcaacccacaatgccttgcaatcctaatgagctcaggggctttttacatatttgacttatgacctaagtagctgggcaggctgataagaacacacaaagtgagctactttggagactagtaaattttatcttagactaaatgtctttggttcaagtgagggcagctaagtgaggagggaggcgggagggggaggctgagaagtaggcatcagctattcaagcagggtcttagtatatcctgtctcttctgtagttctaagccaattcaaggcactttgtcttggaaatggaccactgtatacattatttccttcagtaggttatt

SEQ ID NO: 414976 - DNA, 575 bp, Homo sapiens
agaatggactcagagacacagagaacagcggaagtgagactttcaatggtgatcttgcaagattgggtgtctggcacgcaggcacatccagcacagtatcaacaagcaatttatcccatagtgtgcaagtccctcccctggttcctcataggctgaatatatgaggttacaatcttctcggacgtcgcctattgattkttgggtagtggcttcaggtgtttttttagggttgtcttgctgcattttttttgcaacccacaatgccttgcaatcctaatgagctcaggggctttttacatatttgacttatgacctaagtagctgggcaggctgataagaacacacaaagtgagctactttggagactagtaaattttatcttagactaaatgtctttggttcaagtgagggcagctaagtgaggagggaggcgggagggggaggctgagaagtaggcatcagctattcaagcagggtcttagtatatcctgtctcttctgtagttctaagccaattcaaggcactttgtcttggaaatggaccactgtatacattatttccttcagtaggttatt

SEQ ID NO: 414977 - DNA, 364 bp, Homo sapiens
gtgttaagcccttacctattaataattaccttgaatgtaaatggactaaattctgcaattaaagacgtagaatgaytgaatggattttttttaacttaattatatgctgcctataagagactcatttcaactataaggacacacgtagacttgaattgaacaaaaggaaaaagtatttcatgcaaatgaaaactaaaaaagactaggagtagctatgcttatatcagataaaataaacattatggtcttgtttctttttgcagtttttttttttttttgccagaaactgcaaaaagagataagaccatatataatacttaaggggtcaatacagcaataggataaaacaattataaatatatat

SEQ ID NO: 414978 - DNA, 326 bp, Homo sapiens
tatatatttcaaaagagctataagaaaggatttgaatgtcctcaccccaaaaaatgatgtgtttaagattatagatatgctaattaccatgatttctatgtatcaaacgtcacactgttccccataaatatgtgcaattattttgagtcaattaaaaacaaaataaaaggccaaggcagggggattgcttgaacacaggagttcaagaccagcctgggcaacatggtgaaacccaatctctactaaaaatacaaaaatttagccatgtgtagaggcrtgtgccagctactcgagaggcagaggtgggagaatcacctgagcccagg

SEQ ID NO: 414979 - DNA, 632 bp, Homo sapiens
tttaacatatcataaatgacacattgctatgatcctactggttttgcagtaatgtctacccatcacacttgggcaactataatgtgatggtcattctctggcacccacaagccttcagttcacagggttaaggaaagactaaacatggtacatctggcaaaggtctacaacactgttttccatatctgcatcttcaaacaggctgaatcctatgtcatgaaacatcttctcagttcctataggtaaatrctatggtttggatataccctccagactcatgttgaaatatagttactattgtgattgtattaagaggtaggacctttaagagtaaggacctttaagaggtaggacctcgtgaataaattaatagagttatcctgaaagtgggttagtaatcatgggaggggctcctaacaagagaacgaagttgagcccccatcctttctctgtcttgtgccattgctcgcccttccaccttcttccagggatgatacaacacaaagtccctcaccagatgctggcgccatgctcttggacctttcagcctccagaaccattagccaaataaacttctattattttaataaattacccagtctgtgaccttctgttataggggtagaaaatag

SEQ ID NO: 414980 - DNA, 632 bp, Homo sapiens
tttaacatatcataaatgacacattgctatgatcctactggttttgcagtaatgtctacccatcacacttgggcaactataatgtgatggtcattctctggcacccacaagccttcagttcacagggttaaggaaagactaaacatggtacatctggcaaaggtctacaacactgttttccatatctgcatcttcaaacaggctgaatcctatgtcatgaaacatcttctcagttcctataggtaaatgctatggtttggatataccctccagactcatgttgaaatatagttactattgtgattgtattaagaggtaggacctttaagagtaaggacctttaagaggtaggacctcgtgaataaattaatagagttatcctgaaagtgggttagtaatcatgggaggggctcctaacaagagaacgaagttgagcccccatcctttctctgtcttgtgccattgctcgcccttccaccttcttccagggatgatacaacacaaagtccctcaccagatgctggygccatgctcttggacctttcagcctccagaaccattagccaaataaacttctattattttaataaattacccagtctgtgaccttctgttataggggtagaaaatag

SEQ ID NO: 414981 - DNA, 621 bp, Homo sapiens
accactcactgtcctaccagaaatcccctagaattttaaggtcatgcttactcacaaagtcttgaacccttctaaacacacttcccaagagactgacttatctggaatctcatctctatagagaagcagcctcttcatctcccttcaactatcwtcccatacttctctgaacaatttttcttgtcctgccaattcagtgtgattgaaaacctgaaaaccacttagcagagaatctgggcttacatagtgcttgcctgtgcagttggagacagaggagggagaaggaagcaccgcaaatactgcatgctgcagattcatctactcacagattcagacctaggaaaactgtagagaagaccctcaactcagtgtccattccagagaagggggaagatggaggaaaatgtttcaagatgaaagggcccaatgcagaggatgccctgcttttgaaaaagctacaagatgaggatccacatatagcctgctggaattccttttagtctgtttcctgatacctggtacccaagtgcaaattatgacgtcctagtctgctgcataaatgtctgtactgaacatcttccttgtaggggaggaaggatcccttggttcagtgtacttttt

SEQ ID NO: 414982 - DNA, 582 bp, Homo sapiens
ctgtcagcactgagtgttgtgtacaagacacagaaatgacatctccattaagcctgacaggtcagggtttggaaatctggtgccacaacatgtgatttagaaatatgagaacagttactgtcttagtccatgttctgctgctataacagaaggtcacaggataggtaatttattcacaatagaagtttatttggttcatgkttatggaggcttggaggtccaagagtttggcatcagcatctgatgagtaactttgtgctgtatcatctcacagcagaaggtggaagggcaagcaaggtcacaagacagagaatgggggctggatttcatcctatcatcaggatcccctcctgcaataacccacctccgcgatatccacatgaacctattcacctcttaaaggtctcatctctttttttatttcaacttatattttatatacagagggtacatgtgcaggtttgttatgggtatattatacccaggcagtgagcacagtacccaacagtggggttttttcaacctatacctttcctccctccttcctccctctagtagtccacagtgtctattgttcccatg

SEQ ID NO: 414983 - DNA, 582 bp, Homo sapiens
ctgtcagcactgagtgttgtgtacaagacacagaaatgacatctccattaagcctgacaggtcagggtttggaaatctggtgccacaacatgtgatttagaaatatgagaacagttactgtcttagtccatgttctgctgctataacagaaggtcacaggataggtaatttattcacaatagaagtttatttggttcatggttatggaggcttggargtccaagagtttggcatcagcatctgatgagtaactttgtgctgtatcatctcacagcagaaggtggaagggcaagcaaggtcacaagacagagaatgggggctggatttcatcctatcatcaggatcccctcctgcaataacccacctccgcgatatccacatgaacctattcacctcttaaaggtctcatctctttttttatttcaacttatattttatatacagagggtacatgtgcaggtttgttatgggtatattatacccaggcagtgagcacagtacccaacagtggggttttttcaacctatacctttcctccctccttcctccctctagtagtccacagtgtctattgttcccatg

SEQ ID NO: 414984 - DNA, 582 bp, Homo sapiens
ctgtcagcactgagtgttgtgtacaagacacagaaatgacatctccattaagcctgacaggtcagggtttggaaatctggtgccacaacatgtgatttagaaatatgagaacagttactgtcttagtccatgttctgctgctataacagaaggtcacaggataggtaatttattcacaatagaagtttatttggttcatggttatggaggcttggaggtccaagagtttggcatcagcatctgatgagtaactttgtgctgtatcatctcacagcagaaggtggaagggcaagcaaggtcacaagacagagaatgggggctggatttcatcctatcatcaggatcccctcctgcaataacccacctccgcgatatccacatgaacctattcacctcttaaaggtctcrtctctttttttatttcaacttatattttatatacagagggtacatgtgcaggtttgttatgggtatattatacccaggcagtgagcacagtacccaacagtggggttttttcaacctatacctttcctccctccttcctccctctagtagtccacagtgtctattgttcccatg

SEQ ID NO: 414985 - DNA, 582 bp, Homo sapiens
ctgtcagcactgagtgttgtgtacaagacacagaaatgacatctccattaagcctgacaggtcagggtttggaaatctggtgccacaacatgtgatttagaaatatgagaacagttactgtcttagtccatgttctgctgctataacagaaggtcacaggataggtaatttattcacaatagaagtttatttggttcatggttatggaggcttggaggtccaagagtttggcatcagcatctgatgagtaactttgtgctgtatcatctcacagcagaaggtggaagggcaagcaaggtcacaagacagagaatgggggctggatttcatcctatcatcaggatcccctcctgcaataacccacctccgcgatatccacatgaacctattcacctcttaaaggtctcatctctttttttatttcaacttatattttatatacagagggtayatgtgcaggtttgttatgggtatattatacccaggcagtgagcacagtacccaacagtggggttttttcaacctatacctttcctccctccttcctccctctagtagtccacagtgtctattgttcccatg

SEQ ID NO: 414986 - DNA, 511 bp, Homo sapiens
aatgaaaattaaaacacaacacattaaagactaagagatacagcaaaagttttgctaaagtgaagtttatagcaataaatgcttatttcaaataaggtttcaaataaacaatatcacagtgtacctcaaggaacctgaaaaggaggaataaatcragccccaaaattaatagcaagaaagaaataataaagattggaaaagaaccaaacaatatagagactttttaaaaagcacaaagcctaatgaaatgaaagattggtgttttgaaaagacaaacaaaatggacaaactgctagctacacaaccaagaaaagaaaagacacaaaatccaaataaataaaattagaaatgaaaaaggagacattacaatagcgatcacaggaatacaaaagattgtttgagactattatgagcaactgtacactaagaaactggaaaacctagaggaaatgaataaatacctagatgccaacaatctaccaagattaaatcaggaagaaataaaaacctg

SEQ ID NO: 414987 - DNA, 559 bp, Homo sapiens
ctgtgacaagcccacagtaaacatcatagagaatagtcgaaaactagaagatttcccattgagagctggaataagacaactatactcactctcaccactcctattcaacgtagtacgcaagtcctaaccagagcaatcaggcaagagaaataaataaaaggcatccaaatagaaaaagaagaaaatttatctctcttcactgatgatatgattctatacttagaagaccctaaagctgccaccaaaaggctattagagctgataaatgacttcagtaaagtttcagaatacaaattcaatgtacacaatttaccagcatttctatacaccaataacatttaagttgagagtaacatcaagaatgcaattccgtttaaagtagttgggaaaaaaactagcttggaatacatctaaccaaggaggtgaaagatctctacaatgagaattacaaaacagtcctgaaacaaaatcatagacggtacaaacaaatgaaaaaatcccatgctcatggatcaaaagagtcaayatcattaaaatggccacaagtcccaaagcaatc

SEQ ID NO: 414988 - DNA, 541 bp, Homo sapiens
tccattcaggctgtgaccctgacttcctctgtcattcatgacctagtaccatttgyggcatactataattttttgataaatactttacatttacttaataatccatggggtggaaaaaaagataaagacttcccccaggcatttccactcagccatgctttaaagcttatagtaagtagaagaaactccatacaaatatagatttggactggtgttggtactgtcatatttccaagaaagaatgaaatcttgaacaggtaggcactcactaaatatatcttgaatgaaagaatatatgacagagtgaacaaataagtgaacctccttatgttctattctgtttgctccctaatccttccttcctctgtccttattaccctgaaagaaggccacagaataataactgggaagtaatgaactaatttaggttactttctattatggagttagagtgagtccagtgcaaaatttgcattgttaacactctgtgcctctgcctctgttgagtaaaatatctgtgtcccatcctttcagcaacagg

SEQ ID NO: 414989 - DNA, 585 bp, Homo sapiens
tttacttaataatccatggggtggaaaaaaagataaagacttcccccaggcatttccactcagccatgctttaaagcttatagtaagtagaagaaactccatacaaatatagatttggactggtgttggtactgtcatatttccaagaaagaatgaaatcttgaacaggtaggcactcactaaatatatcttgaatgaaagaatatatgacagagtgaacaaataagtgaacctccttatgttctattctgtttgctccctaatccttccttcctctgtccttattaccctgaaagaaggccacagaataataactgggaagtaatgaactaatttaggttactttctattatggagttagagtgagtccagtgcaaaatttgcattgttaacactctgtgcctctgcctctgttgagtaaaatatctgtgtcccatcctttcagcaacaggatattctctttcaatgttaatccaatgttgacacccattgagaatgatcgtgaggtgagatgacccataactmtacctgtgtttctctcctttattcaccttatgaacaccaacaagtatagatgacaattta

SEQ ID NO: 414990 - DNA, 524 bp, Homo sapiens
cattagggtttgtaaagtaaatagaaggaagagagagcacaggacaagatgtaaattgttcgttttgcctttatgtttttaactggagcaactatgcagttcttagaaatgtatacaggtaaattgatgtcccttcctatcatccaatatcacctacgacaattaaaagcatctcaaactttatcacaaatttctttatagggatgtacatataaacatagatcacaattaaggatatctactcaaatattttcctctattggagaaaacatttttgtaataattctgtttctacaatacttgttaaggaaaggatggtcaggaacatgaataactcccaggcaatgatttattgctatgtcctgtcttatgggttattggtttagcaaatgaaaacgcagtagtgatggctgacatgacagaagcagaattcagaatatggataggaatgaagttcactgagctacaggagtacaytgtaacccaatgcaaggaagctaaaaatcatgtaacacattgcagga

SEQ ID NO: 414991 - DNA, 445 bp, Homo sapiens
ggctggcaccgaacaaatcttaagtccctttcctcccctgaactccaggaaggaaatgtgaagacaatgcatatgacaaaacactattgttccccaagagggaggggacctggaattctagtgatgctgggattaaacccaacagagagccctctggagaagggaaaaggggtgaccactaatgtttcccgaatagctaatgtttcccgagtgcccactgtgtgccaggctgcccataaggtatgtcatgtccctgagccctcctgacaaagctgcagggcacaaaagtctgagattyggagagtgtaagcaatggacccaagttccaaagcagtcacagcagaagacagctttgaacccagcaccctctcatttcctgtgtcccctgcatcttccctggctcccaggaggtactactgaagcacaagtcagtgtgccaaggaaa

SEQ ID NO: 414992 - DNA, 305 bp, Homo sapiens
tgtaaatttcccacagcctttcaccttatggttctagcagccattattataatgtgatytaatatataatatatgtatataaaatatgtaatttagtggctcattattttattagttctgcaaagtggtgatggcctatcattctttctgcacttcctaggtgaaattcttctataacattcttcacttcattgattatttccttagactgaggtttatacaggaaaggcagggtaaatgcttgattctttctcttttaaatgttttcaaaataatatattggttccctagcatcctccaaaagt

SEQ ID NO: 414993 - DNA, 529 bp, Homo sapiens
tttgcacttgtggtcccgtstccttagagtggagggttctaaggagaaccttgcctctgtccttgtctttcatgacctttgcacttttgaagagtcctgatcagttgttttgtggaaatgtctctcagtgttgatttgtcttatgcttcctcatgttcaaattcagatgatgtatgtatttttgggcaagaaaaccacagaagggaagccatgccctactcagtgcattgcatcaggagctacttgatattgcacgaatcccattttcaagatgaataaactgcagcactgaaaagtcaagaaacagattagaatgcagctaacagctcacatctgtcgagcacttgcccatgcacctggggcatgtattcagccacttctacccctggggcacagcgagtggatccccaactcagcagtgagcaggggagggaaagggtgaggacagagggtggtggatgggagcagccagggtgaaggacagagccagctcctgcagcctccagggaggggccaggcccacagaggc

SEQ ID NO: 414994 - DNA, 577 bp, Homo sapiens
atttattattcataaatgttcaatatttgcatttcaagatttattttgtattcctaagaacttacagaaatctgtctcattccaaagtaaatattaatgttcagtgaatttctattgaagtgacagccagagagaaagtttgctcaggtgttatcaggagcacatttgggatgattataaacatataaagacaaacattttttccacatctgaaaatgaataaaggccccatccatcctccccaagatggtatttagtcttgctgtttaactatttctaggtcagctggatgtatattgctttttaggtggaattcctaagaagaatgcttttgagttttccatgtgcatccttgaacccacatagattttgtctacagttgcagatagaatgttgactcaccacactattcaaaaagacatgatgaatctcatccactgacctgccatttacttttctttagtgttctyaacccccttctctctgtttttttctttgagtttcccagctttttttcaagcttacactagatgcattgccttttccttttgttttaaaccatttcttcagactcttc

SEQ ID NO: 414995 - DNA, 582 bp, Homo sapiens
taaacagattgagggctaataagtcactgtgttgagcatttagcttaggtggtagaaagagacaatgagtgtgagcataagagagctgcctcctggtacttactttcagtttactgtggatgacagtcagtatggtttacaaagggattggagaaagaggaatgttgaggttggttacaaagtctggttttttttgttgttttttttttttgtttttttgagacaaggtctcactctgtctcccaggctggagtacagtggcaygatctcggctcactgcagcctctgcctcacgggttcaagcgattctcctgcttcagccgccaaagtagctgggatcataggcgcacgtgaccacgcccggctaattttttgtatttttagtagagatgaggtttcaccatgttggccaggctggtctcgaactcctgacctcgtgatctgccctcctcagcctcccaaagtgctgagattacaggtgtgagccaccgcgcctagcccaaagtcttcttttgtatataaagtatacacatacatatatgtgtatgtatactacacacacacacacacacacagacacag

SEQ ID NO: 414996 - DNA, 601 bp, Homo sapiens
aaaggaaaagagtggttcccagcagccaaacaaagtgattgacaagaataaaatgcaaagagccaactctgttactgtagatggacaaggcctgcaggtatgattttttaaatcaaaattttagtaggtttcatatttgatacttctaggctctaaaggggcatatgttcagctrtcaacacatttgtttaatctgcatattagcttagtagactctttcagaaagatctttattaatttatcaagatgtcagtcttacggttgattgacagagtaacattctggttaaattaatcatttatgattttatctccatttaaactcaaattggcaagagatcttttgaaagatttgaaaattattgctaaatatacacacttattaaatacatatgtgttatttatttacaggtatactttatatctctctatatatttatatttagtatgggtatgatatgaagagtcactctgatagcaaaaaagactttaggaaagaagaaaatgaactctgaatgcatttttttctaaataaatatttttaataataaagaatgtattgtaatatatttctagctttcaaatttttaagtcaaaatttt

SEQ ID NO: 414997 - DNA, 601 bp, Homo sapiens
aaaggaaaagagtggttcccagcagccaaacaaagtgattgacaagaataaaatgcaaagagccaactctgttactgtagatggacaaggcctgcaggtatgattttttaaatcaaaattttagtaggtttcatatttgatacttctaggctctaaaggggcatatgttcagctatcaacacatttgtttaatctgcatattagcttagtagactctttcagaaagatctttattaatttatcaagatgtcagtcttacggttgattgacagagtaacattctggttaaattaatcatttatgattttatctccatttaaactcaaattggcaagagatcttttgaaagatttgaaaattattgctaaatatacacacttattaaatacatatrtgttatttatttacaggtatactttatatctctctatatatttatatttagtatgggtatgatatgaagagtcactctgatagcaaaaaagactttaggaaagaagaaaatgaactctgaatgcatttttttctaaataaatatttttaataataaagaatgtattgtaatatatttctagctttcaaatttttaagtcaaaatttt

SEQ ID NO: 414998 - DNA, 555 bp, Homo sapiens
atgtagtacaaaatatttatggggctgaggttttgtttcccagcttagagtgagtattcgtgttacaggactaaagtttttacttttgtcaaaataaaacagtaggaggcactgaatcagttaagtaaataactgtctccactgtgtccccaagtgccccaccctcaacccagggcttaaacaattctcttaaatgctctctttttctctctctctcacacacacacatacacacacactcacacacacatgcacactcatacagaatgatgrgaaaaaacaaactgacttacttttcaaaaatacaattaagtactttcctttaaatgaatacattttctgcaagcatttgcagctattagttaaattatgtttacatttgaaattttctcattatgaaagatagttttttaaaagtgtttggttagtataataaaatgtctaacgatgattcaaattttacacatgaattactcaaacattgaattcccagttttaagaagatcataactacttcatttttaaaaacattcatgtagatttttaaaaaccagt

SEQ ID NO: 414999 - DNA, 574 bp, Homo sapiens
ttgtccatgtcacacattttttcctaatcacctgaagttcttgacaaagtactgagtgtagaaaagtcttcagtaagatcactttaatctctgatatgctattcttacagtagaatattaaatttcaaacatatgtmctatttaagttttgttttataatatcatcctgtaatactcaaatctccatcagatatgcaagtaaacttaaacaaatacttaagaatcaattttcacacccatttttcagttcatacttgcagtttcttgatttactagttggctatcttgtagatataaagttaggctcttagaatgaaattttctgttcatttgtaaatctagccacttcaaaattaaaaatacgaaaagcttaggaaagatcagtggaaaactgccttctgataattaggcaaccagtctctgtgttttatatttcaatcctctgtgacaggcaaaatattcacctcagttctcttttctgtcttgattactaacatccttaatatcccactgcttatacctgttcatttcttctgaaactgtgttttcttgaccttcgttgtataacatgttg

SEQ ID NO: 415000 - DNA, 492 bp, Homo sapiens
ttgtcaaggtaagctctcactggtcaggcaggactcaccaggatgggaagttgagggattttatttaggcttgaaaaaataacacctatttcataaaaatgaattactaacttttgctatgatatagagataatattgtttattaagatactaaattcctaacagtaatgtttaaaggtttccaatgccatggaaacatttctgcttcagtaaatgccagtcttaggaagtaccccaaactgcaaaatattaggggccagtgtaacaggtgaaccagtaaatatgtgcctccaaatcaggtcttcaaatttttctttagaaaagtagcttatttctcttcttattttcctctaaattcctatgaacacttattttccatttttcctccttttgacttctcagatyccattttcttctctgaccagcgcagccactcttcctaactccatccatagaactatatgctggcacacatgcacacagacatccaca

SEQ ID NO: 415001 - DNA, 492 bp, Homo sapiens
ttgtcaaggtaagctctcactggtcaggcaggactcaccaggatgggaagttgagggattttatttaggcttgaaaaaataacacctatttcataaaaatgaattactaacttttgctatgatatagagataatattgtttattaagatactaaattcctaacagtaatgtttaaaggtttccaatgccatggaaacatttctgcttcagtaaatgccagtcttaggaagtaccccaaactgcaaaatattaggggccagtgtaacaggtgaaccagtaaatatgtgcctccaaatcaggtcttcaaatttttctttagaaaagtagcttatttctcttcttattttcctctaaattcctatgaacacttattttccatttttcctccttttgacttctcagatcccattttcttctctgaccagcgcagccactcttcctaactccatccatagaactatatgcyggcacacatgcacacagacatccaca

SEQ ID NO: 415002 - DNA, 542 bp, Homo sapiens
tccacacactttctttttctttctatcttgagacagctttttctaataaacatagatctggctctaaattaggtgctactggaagttgtcataaactctgaaattatttccaagtgtttaattcmcttccaggaaaagctggtttctattatatgattttcctacatatggcactgaatcccttaacatgaatgggaatttctggatgtatatttaaaaatgagctaaggatttctatgccttggcttgaaaaaaatacaaagataactgaacaaaaatgtttttttaaattttaaatagtaaacatttgattttctctggtgcgctattggttattttactaaagaggcagcatcttcaatgctgtagttcatttctattcttgatgaggaccctggtgtttaggattttgctgatttgggatataggttatctttaaaacaatagtcagccttcagcatcttatttacactgagaaggacccagctgtgtctttttcttatattcttgtccacgaaatatgatgataagtttaagcaact

SEQ ID NO: 415003 - DNA, 542 bp, Homo sapiens
tccacacactttctttttctttctatcttgagacagctttttctaataaacatagatctggctctaaattaggtgctactggaagttgtcataaactctgaaattatttccaagtgtttaattcacttccaggaaaagctggtttctattatatgattttcctacatatggcactgaatcccttaacatgaatgggaatttctggatgtatatttaaaaatgagctaaggatttctatgccttggcttgaaaaaaatacaaagataactgaacaaaaatgtttttttaaattttaaatagtaaacatttgattttctctggtgcgctattggttattttactaaagaggcagcatcttcaatgctstagttcatttctattcttgatgaggaccctggtgtttaggattttgctgatttgggatataggttatctttaaaacaatagtcagccttcagcatcttatttacactgagaaggacccagctgtgtctttttcttatattcttgtccacgaaatatgatgataagtttaagcaact

SEQ ID NO: 415004 - DNA, 568 bp, Homo sapiens
gacaatggaagagtggccctgaaaacgtttcagagatcttcaaggctgccactcccatcacaggcccacagtgtcagggccttgaggacagaaagacttcaaagagggattcagagcacctgtgggatctcagggctcacttcccagagctgcctcaagtttctgctcaatgcattctagtgcagcactcctgggccactccatctgtggctccagtgagcctcagtgcaaccagagccacccttcaggagacagaggtggcaaaggtttgcagcatccagctggtgctaactctgcaggcacagagtgcaaaagctgtgaaggcatgcctacctctgcctagatttcaaaggatggagaggtcctkgagatccccagaccccagacagagaactgctacatggttcaggcccctgcagagagcctccactaggacaatgcctagtggagctatgggggctgggccacctctgagactccaggctagtaaagccagcctgagagagctgttggcattcaactctaacaagtgagaaatgcagtgtgggctgcacacagcacagccatg

SEQ ID NO: 415005 - DNA, 651 bp, Homo sapiens
gggatagaatggatgtattttacttatcagaagaacataaattttgggagagcagaggcagaatgctatggtttgaatacttgtgtctctccaaaatttatattgaaccttaatcaccaatgcaatcatattaagaggtggagcaatgagcaaatgattaggttatgagggctctaccctcatgagttggatcaatgcccttataaaatggctcaagggaactagctctcrcctttccccttctactgccatgtgaagatacagcattcatccctctgccatgagtggatgcatcaagaacgtgccatccttgaagcagataataagccttaccagacaacaaatctgttgatgtcttgaccttggacttcccagcctccagaaatgtgagaaataaatacctgtcatttataaattatccagtttcagttattttcatatagcagcacaaatgaactaaagtaatctgtttctgattttttttctataggagttaagtttttaataaataacatattttacttaaatatcctcccatttactgttatgtaagtgtacatagtaaaattactggctcaaattcacctccagccccaggcagttaactgatgatagcttaccaataagtaaaaataagaaaacccatagcag

SEQ ID NO: 415006 - DNA, 651 bp, Homo sapiens
gggatagaatggatgtattttacttatcagaagaacataaattttgggagagcagaggcagaatgctatggtttgaatacttgtgtctctccaaaatttatattgaaccttaatcaccaatgcaatcatattaagaggtggagcaatgagcaaatgattaggttatgagggctctaccctcatgagttggatcaatgcccttataaaatggctcaagggaactagctctcgcctttccccttctactgccatgtgaagatacagcattcatccctctgccatgagtggatgcatcaagaacgtgccatccttgaagcagataataagccttaccagacaacaaatctgttgatgtcttgaycttggacttcccagcctccagaaatgtgagaaataaatacctgtcatttataaattatccagtttcagttattttcatatagcagcacaaatgaactaaagtaatctgtttctgattttttttctataggagttaagtttttaataaataacatattttacttaaatatcctcccatttactgttatgtaagtgtacatagtaaaattactggctcaaattcacctccagccccaggcagttaactgatgatagcttaccaataagtaaaaataagaaaacccatagcag

SEQ ID NO: 415007 - DNA, 579 bp, Homo sapiens
tcctagtgatactctcacatctcttctgctccctgctttacatttcttttacaccacactgctagcaaagctgtctttctacaacacaaagttaatcatttaagctcatatttatattggataaagccgatctccttgacaagacaggccaggaagccattatcttggaccttgtattttctccctctccagcctcacccttacacatgccctttaaaaaatattttggagtttcatgatcacactatgtactctcttgtcactgagactatttatataaacatcactttacattttccttcaaaatacctatttatgctcagacatcatttctttaagaaaaagtttaatttactgttttcccttgggatggattaagattcccacctctagagcccctgtaggtgagtatgtatcacaccctaatatttaacctctttggatgcttcatctaatttactctgaattgcaggaragaagacaactgctcttatctggatttttagctccattgtctttagtaaaaattaaggggaagaaaaaggaagaaaagaaagaaggaaggaaagaaggcaggaa

SEQ ID NO: 415008 - DNA, 491 bp, Homo sapiens
acaagcccccgtgacacaagcttacctatataataaacctgtacatggacccttgaacctaaaagttaaattaaaataaggaatattgtttctaaattataacacaaaatgtgtacatacagaaaacaaaactaaatcatggaggtgaatacaacagaaatgatttttgtgataatctgcttsattttactcttcaaagtttaaaatgtgattttctcatgagatatctcaagtcttcttttgttgatggtggcagaattaattgaataaaagcccctccaaaactgaaaaataattacataaatatgtgcactcttaaagagccactttacctcatcataaaaattatataaaacttagaatgaatgtaaaactaaaatataattctagagaaattgatcagatttgtagcctcctatatgagattactctaaaatcaaagggattctataggcctattttatcgatttctgtgacctcacaaatttatg

SEQ ID NO: 415009 - DNA, 577 bp, Homo sapiens
atggacttaagccattgcagagaaacagaagagaaatttatgaatagaatagtgataaaggtatatataaacacataaaaataaacaacttatattccaacatcatagttcaatgttagtataaatttaattataagcttcttaagtaccaaaaataaaagcatgatggcaacgacacatgaagtctaagagataacatcatgataaacagaactgagaagaacttttgtcaggtaatgaaggacatttccaacatatctttttttgttaaaatagggagttttatatgattaatttttaaaactccctttcaatgcaggctgatgacataattgctgaagcccaatttaatttaagagaaactgmgaagggctaaaacaacatagactacatctgtcttgagttaggggtaaattagaacatagaagagtgagtggcttgcatatggcctcattaggccatattccatatgagattattaaaatttatttgcaatgtcactttgttttggattggccagctgagatttcagtgtgttatctgcagcaagaaccaagaatgcattttttaatagatt

SEQ ID NO: 415010 - DNA, 573 bp, Homo sapiens
cttgttgtgcttttatttcattgctcagtttacagaaaaaaacatataatatcctttgagtttagtcaatgttcatacacaggatttcttttgcaatattaaatttagaaaccttccacaactatttaaacctttagcttgaccttatctaatttaaaacaatcctttaaccctaggcaaaaagttacttggatttccatgccttcttacaatcttttcctgaaaacacattttactsttcttacacaccttgcatgtcaatctattttcagtggtggtctcaattacatgttataatggtaactcttagcaattttaaactttaatgtaaaatctgataagttgttttaattatgtactaggcaccaataaagtttgattccttctagcctgttcaagggcttggttaattcagtatgtcctcaggccttaccaagttgtaaagcaggcaagttgaacagttctctaaggccaaagaagcagtttacaaccttaaaacatttagcgaacctagtatctgacttccataatgtagaccacctatttaaattttaatgacatttgaattttacc

SEQ ID NO: 415011 - DNA, 595 bp, Homo sapiens
taaattcggttcctcagtactgaattatgatttatgtggattcatcttgttaaccatttagagaaccaattttcattcaacagtatttatgaagccagactctttgttaggggataggggtgataggtggggtagagagaattcaaacacctgagctataatagtaaaaatagttacaaaaggccattgtattaaaatttcaatcctaaaaacaagatcatataaacatattaaatgctagcatcatttattttgcattaaaattagcagagaggaataattgtttttaagcatttttacatcatagttttgtctatttttttacatatacatgacatagacactaaaatcaatcaaaaaacataccgttctccttgttttccaccacttttggggttcacaaaaactaaaagtgggtgagtaccaggcacaggagtgacctataagaaaagttayatacatggaaaaattattaggcccattatatatgaagaagactccttgttatttctaaattataaaataccaatacgcaatttcaataatattactttccacaatgtgtgtgtgtgcatgtgtgtgtgagtgtgtgcgt

SEQ ID NO: 415012 - DNA, 500 bp, Homo sapiens
caacctacagatttacatatttcaaatatgcatatttcatagtgaaactttggaatatattctcctattaaaataaatgtataatttagaaaatgcataacagatttcacagatttcattatcttcttaatttaaaatatcattttatataaccaaatttctaccatattttatttaaggaaaatcagmgcttatgaccttttacatatgcctcttgttatgaaattatgacacagaaatgaacagaatcctcaaaaggctaaggaaatgttcatcaaaatttaattgagctctgttgcaaatttcaaaaataaaaaattttctttactaatataaaagtgaagcactcaactctatccttctcatgattaatcataaaataaaatgcagatgattcggcaagctctcccccaattaaatgtgtaagcataattctgattctgccttggtcactggagtgatggagtatgaaaattgattcatgcttctaaaattaaaga

SEQ ID NO: 415013 - DNA, 485 bp, Homo sapiens
ttaagaacgttattacagctagtttgtagcagagatccagtttcagtgaggttattctcagtaaaacatagtcaggccatgtaaatagtctcctgagagcagtagaatttggtagtatgaggggaaaccagtttagcattccacacgtgtttttttcttttgatcttggacttcaagttcaattccaaattgttccactcacagctgagatatggraagaaagtggcagatgtatacagaaatatattttaatctttaagagtatggagagatgctaggtgtgacgctaatagaaggatatcttaggaatgggaaatacatattcaaaatctaatatacctttatatagatggttatatttctcttaatcctctaaaatattttaatcacactgtatgtgttacatattatatttatctaatgtcagaacagtttgcttattatatacaaagattgatctagtcattgattctgaaattttagtg

SEQ ID NO: 415014 - DNA, 485 bp, Homo sapiens
ttaagaacgttattacagctagtttgtagcagagatccagtttcagtgaggttattctcagtaaaacatagtcaggccatgtaaatagtctcctgagagcagtagaatttggtagtatgaggggaaaccagtttagcattccacacgtgtttttttcttttgatcttggacttcaagttcaattccaaattgttccactcacagctgagatatggaaagaaagtggcagatgtatacagaaatatattttaatctttaagagtatggagagatgctaggygtgacgctaatagaaggatatcttaggaatgggaaatacatattcaaaatctaatatacctttatatagatggttatatttctcttaatcctctaaaatattttaatcacactgtatgtgttacatattatatttatctaatgtcagaacagtttgcttattatatacaaagattgatctagtcattgattctgaaattttagtg

SEQ ID NO: 415015 - DNA, 500 bp, Homo sapiens
acagccactgtaatttcatgtccaacacgtaaagtacaattataacatcagaatgatactggtggacttagatacagatcctacatcttacaatattctataaagagrcattggtaacatggcaactcattgactgtggcgagatttactagcctccatttcagagcatggccttttcctgatttcatctctgacttttctggaaacttgtttccccaaatatggactaaataggctttatgacacttaagaggcaatcccttggagtaaatgatttgttttcatttactctaatgtagtcattcaagaatgtctacattttcaggactcggctattaaatgacttttgttgagcacccaacaaacacacctttctccacaacctacatccttactagaggctgtctgaaaattcatgtcaaaataagctctagctttttggagagtcagcagagtgagtttcttccttccttttccttgcccagtctttgtttcatgtg

SEQ ID NO: 415016 - DNA, 418 bp, Homo sapiens
gctttatgacacttaagaggcaatcccttggagtaaatgatttgttttcatttactctaatgtagtcattcaagaatgtctacattttcaggactcggctattaaatgacttttgttgagcacccaacaaacacacctttctccacaacctacatccttactagaggctgtctgaaaattcatgtcaaaataagctctagctttttggagagtcagcagagtgagtttcttccttccttttccttgcccagtctttgtttcatgtgcagtggcttagtaggcaagcaattgcagttacagaatagaaagaattgacaaaactgagggtrttcaaggggagaagaatgacagcctgcacatattactgctctatgtgtgctctttgtctatcagtgttctctgagtgtaggatttcctc

SEQ ID NO: 415017 - DNA, 615 bp, Homo sapiens
ttcatacagatgctcccctatctcagtcaatggcaatttcatcatttcagttgcatggtccaaactattaatatcttggagaagttcctgattcctcacttttctcataaaccctgtagtcaattcatcagcatatcttttgctcattcctcaaaatatatgtagaatcccatcacatctctctacttccactgctccatcctaayaagcctacgtcttataacccctgaataacttcaacagtaatctactggactcttggctccccaacaatctaatctttataagagtaagccttttaaaataccattcaatcatgtcactcctctgcttatctttcccaccaatatcttctcatcacactcagatcaaaagtcagtctttattgaagccttcaagcctttaaaaattctagcccctgttacttctctgaattacttgctaccactttccatcttgcccaccctactccaactacagttcttactgaccctaggcatatacttaccttagggttgtccattccccatatatccaaatgaccaactgcttcatctcttttaagtctttacccaaatatcactttattaatggggcctaaactagccattgttc

SEQ ID NO: 415018 - DNA, 598 bp, Homo sapiens
gtatgaaggcccatgaggaaccaggagttgattttattgcaaagttgcaggaagtctgtgggatgaaaataktcacaagcattgtggttagaagcaaagttacttatggtagcgcttccttctgttcctaggtcttccataatcagtattttgtttagcaacataacagatgataaggggcatggtctttgaagtcagactacctggatcaactcttgaatccaacacaagctgtgtcactgtggacaatttaagctctctgtgcctcaatttcttcatctataaaattagaataatagcacctacttcttgatttgttaggaggaacatattatttactatttttaaagcatctgaatgacatctggcacatagtaaacattgtatgtaattaaataaatttttgtgtaaagaatatccattttaaaaattcataatttgaaacaatatttgaagaagaagcctcaaagccacattacttcacatgttttcatatgcatttaacaaaccatgcatggttcattgttgtccttgttgctgctttaaaagctggtaataaaatgtgaacttccagaagtagtaaaggactagaaattgg

SEQ ID NO: 415019 - DNA, 598 bp, Homo sapiens
gtatgaaggcccatgaggaaccaggagttgattttattgcaaagttgcaggaagtctgtgggatgaaaatattcacaagcattgtggttagaagcaaagttacttatggtagcgcttccttctgttcctaggtcttccataatcagtattttgtttagcaacataacagatgataaggrgcatggtctttgaagtcagactacctggatcaactcttgaatccaacacaagctgtgtcactgtggacaatttaagctctctgtgcctcaatttcttcatctataaaattagaataatagcacctacttcttgatttgttaggaggaacatattatttactatttttaaagcatctgaatgacatctggcacatagtaaacattgtatgtaattaaataaatttttgtgtaaagaatatccattttaaaaattcataatttgaaacaatatttgaagaagaagcctcaaagccacattacttcacatgttttcatatgcatttaacaaaccatgcatggttcattgttgtccttgttgctgctttaaaagctggtaataaaatgtgaacttccagaagtagtaaaggactagaaattgg

SEQ ID NO: 415020 - DNA, 441 bp, Homo sapiens
agtgagctataattgggccacagtactccaatctgagcaacagagagagaccttctcttaggaaaaaaaaaaaaaaaaaagaggtttgtgttttcccacattgcaagccctatctaatgccagaaaatgtgagataaattaattttgctccaaagaacacagtgaagaagtttgagaaasaagcttacattgtcagtaacacttcagcaataaataatgtgatgtcatcctgtagaaataatttaagaattgaggaaatttttactccattcttatatctgtaataggcttttatttttcaaaggaagattttttttttttagaattattgccttataaaagttgttatttgtctctgttatctgacacagaaatgttatagcaaagtgtttgagacacacaaaacctgaagtttttattcagaaagatgcaatgaatttt

SEQ ID NO: 415021 - DNA, 441 bp, Homo sapiens
agtgagctataattgggccacagtactccaatctgagcaacagagagagaccttctcttaggaaaaaaaaaaaaaaaaaagaggtttgtgttttcccacattgcaagccctatctaatgccagaaaatgtgagataaattaattttgctccaaagaacacagtgaagaagtttgagaaagaagcttacattgtcagtaacacttcagcaataaataatgtgatgtcatcytgtagaaataatttaagaattgaggaaatttttactccattcttatatctgtaataggcttttatttttcaaaggaagattttttttttttagaattattgccttataaaagttgttatttgtctctgttatctgacacagaaatgttatagcaaagtgtttgagacacacaaaacctgaagtttttattcagaaagatgcaatgaatttt

SEQ ID NO: 415022 - DNA, 441 bp, Homo sapiens
agtgagctataattgggccacagtactccaatctgagcaacagagagagaccttctcttaggaaaaaaaaaaaaaaaaaagaggtttgtgttttcccacattgcaagccctatctaatgccagaaaatgtgagataaattaattttgctccaaagaacacagtgaagaagtttgagaaagaagcttacattgtcagtaacacttcagcaataaataatgtgatgtcatcctgtagaaataatttaagaattgaggaaatttttactccattcttatatctgtaataggcttttatttttcaaaggaagattttttttttttagaattattgccttataaaagttgttatttgtctctgttatctgacacagaaatgttatagcaaagtrtttgagacacacaaaacctgaagtttttattcagaaagatgcaatgaatttt

SEQ ID NO: 415023 - DNA, 606 bp, Homo sapiens
gggcagctgaaaaatcccaaggctgtcagcatgcccagataactggtggctataattatgcctgctaagattggttgcatggggcttggctttggtttgctcctttggtcttattttcccagaggaacctctgggttatgggcaccctatttactcctatcagatgtcaggatttgcaggataactgctcagaattaaaatattgatccagattattacattacccatgccttttgtttcttctgagttgtagccagaaattgctggttggttcacaggaataagagggttaatgtaaaatgtaggcaaaaaaaaattcaaaacaactaatgagactagaayttaatgacaaatgtgtggtaagttttgaaacataatttttatctccccagtcctcatttttgttaaaaacaattcatgataggactgagttgtttgcaaaatagacttcagtcttatacttggcctgacagtttgcataaagtgcagcaagaataattattcttacatacacttttaaaattgcttttgatggaattctgttccataaggaatctcagataggactttggaaagcccagcccagccatgggttagcaccctcaa

SEQ ID NO: 415024 - DNA, 320 bp, Homo sapiens
taattgaacctgaagctggaattaaaattatctattaaatacaacttttgaggttattgtttcaagaaatgaagtgtctagattggagtataatgaaaatcatgtgcttagaaatgtgataatcrtaggcaacattcgatatgactaatgctaactactttttataactaaagctttgaagaaaagaatgtgtatgtgtgtatgtatgtatgtgtatatataatgaacttattttaacagaaataaatgctaagtacaagataattattcctaaaagactaatacgctctaattacaatgcttacttttcactttatttt

SEQ ID NO: 415025 - DNA, 569 bp, Homo sapiens
taattttttactttatttcttactgataaataatatatgcacgtatttgtagggtatatgtgatattttgatacatacatacaatgtgtaatgatcaaatcaggatatttaggatattcatcaccttaaatatttatcatttatttgtgttgggaacatttcaaatattctcttctagctattttgaaatatacaatatattatcattaactatagtcaccctactgtgctatcgaacactagaacttattccttctatctaactgtttatttgtatccattaactaacttctctccctattctcttaccccataaaaccttccaagctcctggtagctattattctactctttaccttcatgagatcaactttttttagttccttcatgtcactgagaacatgtgatatttttgtctttctgtgcctggcttacttcacttaacatggtgacttccagttccayccatgttgctgcaaatgacaagattttattactttgtggctaaatagcattctattgtgtacatatgctacattttctttatccattcattccttgatggacac

SEQ ID NO: 415026 - DNA, 544 bp, Homo sapiens
gtgcacgacctactaagatcagactacagtcaatgcttggagagaatgcaggtttgatatccccatacaatgcattccccactaaataaaaaatgccaacgatataaaatccctaagcacagaagatggagtagattttggtagttataggcaagagtaaagataagagatgacttgttctaaggttcattcttgctggaaagttttcagcatcaaacagattttgctktatcctaattgatgtattttaaacctgagagcaatgtgggaaagtaggtcttctatctacatttaaagatgagaaaacaagactcagataagttgagggatttatccaaacacagtttcagaacaataaagaattgtgtcataatctgtgtaaacccatttccaaggtgtccatttcccgtagcaccttgcctatgtagtggaagatgggttctcctacttcatgtgttatctggtgtggttggttgtgctgcttatctcctgcttgtccctccagagctctactgttctccacctcactttctgtcctggctcc

SEQ ID NO: 415027 - DNA, 506 bp, Homo sapiens
tttctgctaataaatctgctgttagtccaacaggctttccattataagttacccgatgctttggtctcagttcttaaaactattatcttcattctgactttagatagcctgatgactacgtgacttggtgataatcttcttgcaatgaatttcccaggagttcttggagcttctcgtatttggatatctaaatctctagcagggccagaaaagtttttctcaattattccctcaaataagtttttcaaactttargcttctcttctccctcagtaacaccaattattcttaggtttggccattttacataatcctatattctttgagactgttttcctttgattctttttctttatcttttctgattgggctaatttgaaagccttgtctttgagctctcaaattcttttttctatttgttctagtctattgttgaaattttcactgcatttggtatttctctgagtgtgtctttcatttccataaggtctgattggtttttcttt

SEQ ID NO: 415028 - DNA, 587 bp, Homo sapiens
taatcttttgaaaatgaggaacaaagtaggagaactcatacttacggctttaaaacttactacaagacaatggtaataaggacagcataatactggcaggatagatgtatagaccagtgggatagaattcagagtcagatatgaacttatacataaatmatcaactgatttttgacaagggtgccaagattatttagtgtatatatgtatatgtatatgaatatgtatatcatatatttgtcagttgccaggactgctgggcaagcctggcaaagagaacactgaggaaaagcagccacctgctccctgtaccttctctgagcctgatgatcacttgatatggaactataatcacatccagtttaccctctgaaattccttgattgttcttttttatatccttgacactgtccttttccagaccaaatgatcttatctgaaatactgcaacaattttcctttctcagtgcttttagaataacctgtcataaactcatctgattatagtactgcctgcttaaaactttttaattactccccattccctacccggcctgtgtggctcacttgagctctgctagctggtg

SEQ ID NO: 415029 - DNA, 604 bp, Homo sapiens
ggcagagggcagcttgtctgtattcagtgagcaggaaaccttgttcccactatggagaacttttgtagcatggatgagaaagagctagagagcactctcaatgcaaggtgagcaatgcttagagaatccaaaatagccaaggaaagtagaataaggggaggagccattctatgtagcaataacatcctggatataaaattaggcattgccgaaggaccaaaaaagaccaagcttagtgtgggaccatgttggaytagagagagatgaggtgggttaggtaaaataggtggggagggaggcgccaactgggagaatggttaaagtcttggcaccagaggagctgaggggagacttacttcctggtggtggagttgaagcagggcctggatggggttgtatgtagtggcctgtaaaaacatttttcccatttttccttgtttaattttcaccgttgttaattcataaagctttgtgaactcttgtcatgtttgattttcaagggaagttattttctttaacaagtaaatgggcatttatataataaggtggcaaatcatattggaagtgaacatcatgaagttctctttaactctgaggaaggctt

SEQ ID NO: 415030 - DNA, 549 bp, Homo sapiens
tacatgttaatttagtggacaaattataactagtaggagaacaaagaagatcaaaccatagtttccctcctcacgtggacagaaagaaaataacaaggaagagagaaacagagttgaagaaatgggctatagatctactaaggaaataacataatttgaagtgctaaaagttttcctaagtaattcattattccataaattttgaaatgtatttttattgtcacctgttcaaaatacttcccaatttccctattgatttcttctttgacctgtgggtttcttagaagtatgtgatttagttttcaagtatttggggaattttccagcatttctttatttgttgatttcctattttatttccattatggtcagaaaacattgtttgtgtgatttgaattattaaaaatttattaagttttttaaacttttattttaagttcaggggtacatgtgcatgtttgtatataggcaaacccaygtcatgagggttattttgtcatccaggtgttaagcctggtacccaatatttattttttctgatcttctccc

SEQ ID NO: 415031 - DNA, 587 bp, Homo sapiens
tctcttttcccaaagtccttctctaaacaaacaaaccaaacaaataaacaactaagtctcagctaccagaagaaatcaccaaaattctcacttaaaaataccatacctgttggccaagcaaccaaccaagcaaccacaaaaactataggaaatagcttttctgccaaaaggaaacatcttttgcctcttatgctggaaaatttcaacaaccttgagactcagtatttcccaaacaaaggagtcttttgttcttggtttgtccatctaaaaagccttatttaattatttatttatttatttagagatgaaggcttgctctgttgcccaagctggggtattgtggcaggatcttggctcactgcagcttccacctcccaggttcaagcaattyttctgcctcagtctcccaaatagttgagactacagacacgtaccactacacccggttaatttttttttgtattttcagtggaaacaggatttcgccatgttggccaggctggtctcaaactcctgaccccaggtgatgtgcctgcctcagcctcccaaagtgctgggattacagacataagccaccatgccctgcc

SEQ ID NO: 415032 - DNA, 366 bp, Homo sapiens
tttttaaaatttaattttacttattgtttcattatttctttatgaaaatataaataaatatgtatatttatgttttattacccactttttgcacaaaaattaaaatacctgaagtaggatactatacaaggcttttgtccctttacaatataacctaatgatctttccctatcagtatatattgttctcattactttttatagttacacagtctyccatcatatgcatgtataatagtctactcaatcagtccccttttgatggaagttgggttgttttcagctttatgcttatgcaaatgatgttgcaatgaatagctttgtgtagatatcatttggtgttttttaccaacaggtcggagctaga

SEQ ID NO: 415033 - DNA, 611 bp, Homo sapiens
ttatagttacacagtcttccatcatatgcatgtataatagtctactcaatcagtccccttttgatggaagttgggttgttttcagctttatgcttatgcaaatgatgttgcaatgaatagctttgtgtagatatcatttggtgttttttrccaacaggtcggagctagatttccaggagtgaggttgaaggggaaaagcgcccatgtataactttgctaggtgaggacagctgaaattgaagatagcaaaggaaatctattgggagaggtgagaaggcagtagaagcaccaaggaaagtggagacccagtgagagcaatgaggtggccccttagctggccactgtgagagcaggcagttcctagagcctcctgaatgtccttcgagtttcagattccaattttaggtccaattcacctgtatctttaaaaactattttcttaaggtaacttgagtgggattctgatctttagaaacaaaggagtctaactagaatagttagtggaactatattgaaaagtttttgtcattacaatttttataaattttatttaatctctgatattttattatgaaaattatcaagcacacagaaaagttgaaagaatagtg

SEQ ID NO: 415034 - DNA, 582 bp, Homo sapiens
atttagactgtttcacatatcattgcacttcagttcctaaatacttcagtatgcatttcctaagaataaggacattctcctaataactacaacactattatcaaaactaagaaaattatcaatattttcctaacatcatctaatattttatagatatttaaatttccacataatttctagaatgattttataaattcctttttttcaaggcatatccaaccaggatacatgtactgcatttgaaatatatatgtaaacacaaattcatgttaaggaaatatgcttcactttatagtttattaagttttattagaaaagttatatactttagttgaaaaaatttaagcatctgtggggaagatcaactgatttttcccctgaccttttaatatgatgaattttatattaatgggtttttcaatattaattttccctttaatttcctcaataagccccacttggtcatgatatatttttagaaggctgctgtygtattttgcttgctaatattctatttaaggttttcacggcgggaggtacccaagatggccgaataggaacagctccagtctacagctccca

SEQ ID NO: 415035 - DNA, 619 bp, Homo sapiens
taacttactttcccagggattcagctgtgcagcagacacaggtccgaactgattccaagctggtctcctttccactgtcccaagttgtggaccaaataaatattcactgtgtttgtaacagttgggaacagggaggagaggtacaagacagcgtgctgtgctcatctccaagcagaactgcytgagaaggccatgctaccctacttttgaacacagcgcaaagatactaaaaatatgaggcatgtttcaaaaggaaatattatatattcataaaacaaatatttgaaatatttgagaagcaaacagaatcaaagaatggctctgtgccataatctcttcacttgctctatcttgaggattattgcactttagtattcaaatgtatatcattttccctaaaattaaacaaggtttcctgatatagacagagttctgttttgttgtatggtttactctattccagtatatacaaaggttttttaatttatttatcagaaacttaatggtggacattgcagtaatttccaccctttaatagaaatcagcaataagcattgttgatttaagtcaacaatgtttggctgggcacagtggctcgtgcctataatcccagcacttt

SEQ ID NO: 415036 - DNA, 585 bp, Homo sapiens
gtaatgagcatagtaactgataggtagtttttcaattttcaccctcctctcaccctccaccctcaagtagttcccggtrtctgtttttactctctttgtattcatatgtactcagtgtttaacttccacttataagtgagaacatggggtaattggttttctgtccccgtctgtgttagtttgcttaggataatggcctccagctgcatccatgttgatccatgttgctacaaagaacatacttcattatttttatggttgcatagtattccatggtatatatgtaccacattagctttatacagcccatcattgatggacattcaggttgattccatgcttttgctattgtgaatagtgctgcaatgaacataggtgtgcatatgtttttatggtagaatgatctatattcctttgggtatatacccaataaggagattgctgggtcaaatggtaattctgatttaagttctttgagaaatcaccaaactgctttccacagtggctgaactaatttaacttcccaccaacaatgtataagcattcccttttctgtgtagctgcacaagcatctgtagttttttg

SEQ ID NO: 415037 - DNA, 556 bp, Homo sapiens
gcaaggctgcctagggttcagcaagaactcctttctggattaaatgctatgaatttggaggccaaatatgaatatagtccaatgataacaaaagctgatacattttgaaattttattgtgttccaactatcctgccagtttgcaaatcttcacattattcctaaatctcccgaacaagcctgcctagttcttatcttttttccgcttggcaagtgaagaaacagaatctgargggacttgctcaaggtcatatagtttaaaagtaatgtagctgaggtttccatatttgatctgtatgatgccatagcccagatcgtcactccctcaattctctggactccagttgggtgtccaagcattcagttccattctaaccatttacctagagtaagcatgaaccccaaaggttaacggctcagtcccacaagactgccctcatttcagaaacgaatcccaagtcccaggcctcccatacttctgactgattggttgcaaactcgggttcacaggactccctcttcatgtttgataatttgctagaatagctcacagaaca

SEQ ID NO: 415038 - DNA, 424 bp, Homo sapiens
aaaatttctagttacctcttatgaggagactgtatgaacataaatgactatagcaatgttttagatttaggacttttatttttttcacattcaagttagcctgagttgactttcattgttcccctatctacccatagtccccatacaataagaagaaatatttgctttcatattacagcataaagagcacctaagctttggcagctgacttgtagtgggtcagtgtgtgggcagaagggtcagtggcatcgatccacttgggcacccagtaatggctcagccagtcagcctggcctrggaaatggtgttcaaggatttgatggtagtagtatcctttggttttaggagtattgaagggaaatttctgggctgcatttgccatcattgcatcatcaacctgtaagaataaaaatataagagcaga

SEQ ID NO: 415039 - DNA, 571 bp, Homo sapiens
tcacatgacccaggactttataattccaaacattgtcttgtcattaactgtggaactcttgctaattgagtctgagtgtctaggagacagtaacggatatgatgaaaacaattatttgtaatttagcagagtaaactatgtaatttttcttaagctaaacattttaggcattcctcattataaacaagtcaaaattcctttccatgtttcccattcttgtccatttccagactggccttctgatttttaatttccaaaatgacctccattttgaaatttaaaattcagggatcatctttgaggcatttctctttttcatctcactatcaaacttgtcattaaataattacatttctctctcttcattcccagtatgctagtccagaatatccccaaatccatatctgaattattgccactgccacttcactctttttctagaatcaaggctctcctgcctgcagtccattttacttagtgctgtcaggatgaattccttaatatacctacaagcctgaatatgccccacattgacttytacatcaagaccacatagtttggccttattatc

SEQ ID NO: 415040 - DNA, 571 bp, Homo sapiens
tcacatgacccaggactttataattccaaacattgtcttgtcattaactgtggaactcttgctaattgagtctgagtgtctaggagacagtaacggatatgatgaaaacaattatttgtaatttagcagagtaaactatgtaatttttcttaagctaaacattttaggcattcctcattataaacaagtcaaaattcctttccatgtttcccattcttgtccatttccagactggccttctgatttttaatttccaaaatgacctccattttgaaatttaaaattcagggatcatctttgaggcatttctctttttcatctcactatcaaacttgtcattaaataattacatttctctctcttcattcccagtatgctagtccagaatatccccaaatccatatctgaattattgccactgccacttcactctttttctagaatcaaggctctcctgcctgcagtccattttacttagtgctgtcaggatgaattccttaatatacctacaagcctgaatatgccccacattgacttctacatcaagaccasatagtttggccttattatc

SEQ ID NO: 415041 - DNA, 648 bp, Homo sapiens
taaaagacttatggaaaggcttataaaaggcttatattataagatgtaatatcttatggtcaagatgattaaaaatttatagattgtttataaaattgtgaaaagcaaatttagttgaacacatgctgtttgtattaggaattgctgtttgaaaaattaagtctcctttctcaaagaataaaggttttcaacttttgttttgaaatttctgagttattactttggttaaataaatgacttattttacaatcacctgtgattctattttgtgatatcaagcattttaaamctttgatatttgacaaattttccaaaatcaaattatcagttatgtccttttctgacctaattaatcttttaaatattaagttccctaaagtccaaaaatgacaaatttggtgtatttggtacaaaaatcatacaggaagcattgtcaaacatgaaattgtatttggctttctttgggctgtatctgtataaatatgttattggtatatgtttcaaaattatggaaaattcctgatatgacttagtgtaggttataagtaatacttataattgttatattaaattactatgtgccaaagagataacaaatttccttgtcaattgtgactttgactgtgactgccttaaaacattttgtca

SEQ ID NO: 415042 - DNA, 625 bp, Homo sapiens
tggcaatatagttatttgcaaaagagcagtaagaatgtttgcatttgcaacaggaagccattggaggaactggttatttttaccaactctttgactgtaatggtgtgcttttctttaaggaaacacacttgacttaaagagccaataaaagccccttgggaaaactgccctcataccttgtctacagagtttccatacaggattcctgacctattgtgagtaaagagtttcactttctgacaggtccaggatccccaagttatcttgggacctcaaggggaggtgaatttaaagagacagcctctcacacaataatactgggagactttaacacccatctgtcaatattagacagatcaatgagacagaaaattaacaaggatatttaggacttgaactcagctctggaacaagtggaactaatagacttctacagaactctccaccccaaatcaacagaatatacactcttagtgccacatagcacttattctaaaatctamcacataattgtgagtaaaacactcctcagcaaatgcaaaagaatagaaatcaaaacaagcagtctctcagaccacagtgcgatcaaattagaactcaggattaaaaaactcactcaaaacca

SEQ ID NO: 415043 - DNA, 592 bp, Homo sapiens
gccacagaaaagcagccagttaatttttaaaggactccagctctttctttctaagggggaattgggttttctcacatacaactgagtttctgcttacacattctttaatttcttttaattcctgtcccagtgcaacagacatgcttccactaatggaaaagagatggcaacatttggcgcagtggctcacgcttgtaattccagtactttgggaggccraggtgggtggatcatgaggtcagatattccagaccagcctggccaagatggtgaaaccccatctctactaaaaatacaaaagttagccaggtgtggtggcgcatgcctgtaatcccaactactcaggaggctgagtcacgagaattgcttgaacccgggaggtggaggttgcagtgagctgagatcgcaccacagcactccagcctgggcaacaagagcgaaactgtgtctcaaaataaataaataaataaataaataaataaataaaatacctaaaaacaaaataaaacaaaatccctcagggcttttcttcagggaaggcaggagaaaattgtaacttagctttgctataatgttcagctaattttgaaaa

SEQ ID NO: 415044 - DNA, 547 bp, Homo sapiens
gtgatatgtattattttgtgtgtggcgtctttcacttattaatagcgtcatgttttgggaggttatccatgttgtagcatgtatctatccatctatctatatgtattttttgcaacaaggtctctcactctgtaggctggaatgcagtgatatgatcatagctccctgcagcctcgacctcccgactgaagtgattcttccacctcagcctccccagtacctgagactacaagtgctcaccaccacacacctggctaactttttgtagatagggggtctggctatgttgcccaggctggtctggaactcctggtctcaagaaatcctgcccccgcctcccaaagtattgggaccaagcctggcctcctttttatttttaaatagttttccattgtacaaatgtagyacattttattcatccactcaccagtctctagttaatgcatctgttgtgtttgttcagattgactggggttcagtacccaccggacaagttcctagatgagtgacttttggtaaatcataatctctccaagactgcctcagt

SEQ ID NO: 415045 - DNA, 455 bp, Homo sapiens
ttaattcaagaaggaaaatggagatccactggaattgtgaagaacactccagatcctgagaaggagaatgctggcaaacagccaccataatgctgtccagctgagaaaagtgaatgaagtcccagcacatgagaggtagaagcttccctctgtgactcacgtttccactgaggatcagagmaatccaggctgagagacagcactttgtttctcccaaatcctggagctaacttcaggagaggcttggagatgctgatagggacagacactggataaagctacaggcattttcccagtcccaggacagagaacaggataccatttttaatttgggtgcatctaaagtcagccattctttggcaacccagcagtgtggccatgcaggcattttagtattggggtagagaatggagcacctgctctggatcagggtagggtcctccacagccagaacc

SEQ ID NO: 415046 - DNA, 645 bp, Homo sapiens
gaactgttagaatgtgcttaattttccactgtaagaataggttgctttgatgagtatctattgggataagtttttgcctttgtgaaatttcttcaaaatagattcccagaagtaggattagagtgggaagggtagaaatatattaagggctcatcatagatgccaaatccctttcttttcactcatccatacaaacaaatacttattgagcacctgctgtgtaccaggtactcttctaggtgctgaaatttggttgtgaaygagataggtgaagtttctgatatcgtggaatactactttactggttaaggaagacaatcaataagtgggcaaaaaatacataatataattataaatggtaacaaaagctataaaaacatataaaatggaacgatagagaataggggttggcttctgtccttttgcagtccatacaatttatcaggaaaattggtcagcttttccttctaagtacgtagagaacttaatatcttctctacctctgtattgttatctccctaatccaggtcaccatcatcctttgcttggacttttgcaagagtttcttaattgatcttcctgctaccatattaccccccatagtctgttctccccacagcagtcagaatgattcttttaaagtgt

SEQ ID NO: 415047 - DNA, 562 bp, Homo sapiens
ttattatgagtaactatacactaataaactggaaagcctagataaaatagatacattcctggaaacatacaaactaccaagattgaatcaggaaaagatagaaaacttgaacaaaccaataatgagtagtgacattaaatcagcaataaaaagactcccaacaaagaaaagcacaggacaagatggactcactttcaaattctataaagaactaatatcaatcctcctcagactattccaaaaaatcaaacaacgtggaattctccctaacttactctaggaggtgagcattgccctgataccaaaaccagacaagtacacacacacaaaaagaaaactacagaccaatacccctgatgaacatagacacataaattctccacaaaatactagtaaaatgaatttaacagcatgtcaaaaagatagtaccccatgagcaagtgggtttcatcccagggatacaaggayggtttaacatatgcaaatgaataaatgtgacacatcacatgaacagaatgaagggcaaaaactatatgatcatttcaatagatgcagaaaaggc

SEQ ID NO: 415048 - DNA, 460 bp, Homo sapiens
gatgagatattatctcatcctaatgagaatggttattcctaaaaagacaaaaaataaataaataaaaacagatgctggcaaggatgtatagaaaagggaatacttaacaatcgcaaaggtatggactcaatctaaktgttcatcagtgggtgaatggataaagaaaatgtggtatatatacacaatgaaatactatttgttcataagaaagaatgaaatcatgtcatctgcagcaacatggatggaaataaaggtcattatgtcaggtgaaataatccaggcacagaaagacaaataccacatgttcttactcatatgtaggaactaaaaaccttgatctcctggaggtagacaatagacgggtagatatgacaccagagtttgggagggtgtgagagtgggtggagggagaaaggaaaagaggttcatgaagaagcacaaacttacagttagatagagg

SEQ ID NO: 415049 - DNA, 460 bp, Homo sapiens
gatgagatattatctcatcctaatgagaatggttattcctaaaaagacaaaaaataaataaataaaaacagatgctggcaaggatgtatagaaaagggaatacttaacaatcgcaaaggtatggactcaatctaattgttcatcagtgggtgaatggataaagaaaatgtggtatatatacacaatgaaatactatttgttcataagaaagaatgaaatcatgtcatctgcagcaacatggatggaaataaaggtcattatgtcaggtgaaataatccaggcacagaaagacaaataccacatgttcttactcatatgtaggaactaaaaaccttgmtctcctggaggtagacaatagacgggtagatatgacaccagagtttgggagggtgtgagagtgggtggagggagaaaggaaaagaggttcatgaagaagcacaaacttacagttagatagagg

SEQ ID NO: 415050 - DNA, 460 bp, Homo sapiens
gatgagatattatctcatcctaatgagaatggttattcctaaaaagacaaaaaataaataaataaaaacagatgctggcaaggatgtatagaaaagggaatacttaacaatcgcaaaggtatggactcaatctaattgttcatcagtgggtgaatggataaagaaaatgtggtatatatacacaatgaaatactatttgttcataagaaagaatgaaatcatgtcatctgcagcaacatggatggaaataaaggtcattatgtcaggtgaaataatccaggcacagaaagacaaataccacatgttcttactcatatgtaggaactaaaaaccttgatctcctggaggtagacaatagacgggtagatatgacaccagagtttgggagggtgtgagagtgggyggagggagaaaggaaaagaggttcatgaagaagcacaaacttacagttagatagagg

SEQ ID NO: 415051 - DNA, 579 bp, Homo sapiens
aatcagtagtctgtgaaggtagtttagcaggttgtgatcagcttcttgttaacaaaagagaattcatccaggctggaacaaaatagaattgaattgaaaaaaatactttctcacatgtaatatggctgagtgttgttttgtgaaagttcgttttaattatatgtaaatgggctttttgagcacataatgaaatatgatataaaaagtatttgttattataggtcacagtgttttaaaaaaaaccaatggcctacaatattgattctcrggaatccacccaaaatttccaggaaataaaaataccagaagaaaacaatgaactggaaaaacaatgaaagagaagcaaagagagaaccaatgaccaaagagttgttcctttgaaaaaagtccataaattaatagtgactagccatatcggccaagataaaaagagagaagacacaaattatcaattttaggaatgaaggttagaaaattatttcagatccttcctagtcatttataaacataaaaataaatcatacatgtgtcatacatggcacagcagcaatactcactgaagaagaaataggtatcttg

SEQ ID NO: 415052 - DNA, 579 bp, Homo sapiens
aatcagtagtctgtgaaggtagtttagcaggttgtgatcagcttcttgttaacaaaagagaattcatccaggctggaacaaaatagaattgaattgaaaaaaatactttctcacatgtaatatggctgagtgttgttttgtgaaagttcgttttaattatatgtaaatgggctttttgagcacataatgaaatatgatataaaaagtatttgttattataggtcacagtgttttaaaaaaaaccaatggcctacaatattgattctcaggaatccacccaaaatttccaggaaataaaaataccagaagaaaacaatgaactggaaaaacaatgaaagagaagcaaagagagaaccaatgaccaaagagttgttcctttgaaaaaagtccataaattaatagtgactagccatatcggccaagataaaaagagagaagacacaaattatcaattttaggaatgaaggttagaaaattatttcagatccttcctagtcatttataaacataaaaataaatcatacatgtgtcatacatggcacagcagcaawactcactgaagaagaaataggtatcttg

SEQ ID NO: 415053 - DNA, 485 bp, Homo sapiens
tgtttttggcacatggagttaaatggaatcaaatacatagaaaacacataatatttctgagagaattatattggcaaaagtgtcagcagcctggtcttaaaaaagctgaggctgcacatgtatacatatgtaacaaacctgcacgttgtgcacatgtaccctaaaacttaaagtataataataattttaaaaaattactggctgactctctttttggactcagcccacctgcatccaggtgaaataaacagctttattgctcacacaaagcctgtttggtggtctcttcacatggacgcgcatgaaatttggtgccgtgacttggatcgggggacctcccttgggagatcaatcccctgtcctcctgttctttgctccgtgagaaagatccacctacgacctcaggtcctcagaccraccagcccaaggaacatctcaccaattttaaatcaggtaagcggcctcttcttactctctttctccaa

SEQ ID NO: 415054 - DNA, 632 bp, Homo sapiens
ggaatttcactggactgggagtggtgacgtccgtaatcccaacactttgggaagctgagtcaggcagactgctcgagctcaggagttcaagagcagcctgggcaagatagygagacctcctctccactaaaaattcaaaaaaatcagccaggtgtggtggtgtgcacctgtggtcccagctactcgtgagtctgaggtgggaggatcacttgagctcaggagatagaggctgcggtgagctgtgatcactgtactccagcctgggcaacagagtgagaccgtcttaaaaaaaattcattagtttgtatctaaaaactacttaaatattgttttaaaaagaaccaccctgttcaaaattttacgtttaaatactgttttaaaaataacttgctccaattactatgcaaatgattttagaaatacttttggaaaacattttatttagagatgagtgcctctaagatagcttaaacgtttttgctaaagggcatcaatgtgcaaatttcagagacaagcttgcagctgaatccctgatagggagaaattgtaatttcctctaagagtgaagactttgattaggggatgtactgatgagtggatgaacactcatgaacaataatctttgggcacct

SEQ ID NO: 415055 - DNA, 555 bp, Homo sapiens
catttactgagaggcaagtgttgaattattctactcgaattgtgtatttttttatttttaattttagacagaatctggctctgacatgtaggctatggtgcgtggcacaatcacagctcactgcaacctctgccccccaggctcaagcaatcctcccacctcagcctttggagtagctgggaccacaggcacgcaccaccatgctgggctaattttttaatattttgtagaggcagtgtctcactatgttgcccaggctggtttcgaactcttaagctcaagagatacacctgctttggcctccgaaagtgctgggatcacaggcatgagccatsgggcctggcctgatacctttttaaatttttgtcctttttttgctgcatatattttgaagctctgctgttagatgcttatacattcaggaggtcaagcttactattattttattttacagtgcctaaactattgttaattccatctagtgaaatttaaattttacgtattttatttttcatctttacaagtcttgtttagtttcttctgtttctaggcctg

SEQ ID NO: 415056 - DNA, 625 bp, Homo sapiens
ctgctatgtgcaacttactagacctctatgagcctcagtttcttcatttgaaatgcatgaataataataatgcttatctcacaacattttaagtaagatcagatgaacaaatgaatatgaatgtgctttgtaaagtataagtaaacrtaagtggctgttactatgctcaacaagtccaaattacagaggtaaagtctacccagtgccatggggacaagaaacaatagaatatgtgctataaacgtcagaaagttttcagaatgtgggtcataaagccccttgaaatgcattatattgcttaaaccacctaattacagagaccctgttaaatatagtgaagaatcaaagtagagggttcacctgtactcagtgagtaggtagtacatgctctgcacacagtgtgaacttagtactattttattccaatacattttggtgatgtttttagatgatgaaaaactatttttattgatagatggcctcgttcttagctttttgggacagagaattttattccacttttctcaccttggtaaacatgtactgagcactgttcagcgcctggtccagtggaaggtattgggataacaaatcaatcagtctggtctcctgcttaggaactcag

SEQ ID NO: 415057 - DNA, 625 bp, Homo sapiens
ctgctatgtgcaacttactagacctctatgagcctcagtttcttcatttgaaatgcatgaataataataatgcttatctcacaacattttaagtaagatcagatgaacaaatgaatatgaatgtgctttgtaaagtataagtaaacgtaagtggctgttactaygctcaacaagtccaaattacagaggtaaagtctacccagtgccatggggacaagaaacaatagaatatgtgctataaacgtcagaaagttttcagaatgtgggtcataaagccccttgaaatgcattatattgcttaaaccacctaattacagagaccctgttaaatatagtgaagaatcaaagtagagggttcacctgtactcagtgagtaggtagtacatgctctgcacacagtgtgaacttagtactattttattccaatacattttggtgatgtttttagatgatgaaaaactatttttattgatagatggcctcgttcttagctttttgggacagagaattttattccacttttctcaccttggtaaacatgtactgagcactgttcagcgcctggtccagtggaaggtattgggataacaaatcaatcagtctggtctcctgcttaggaactcag

SEQ ID NO: 415058 - DNA, 437 bp, Homo sapiens
cataagtcccagtgcaatgacgggtaattgattttgatgtggaggttgaggggtgagagaggkagggctcctcccacaccacattgcaagccttcctaaaaatcacccagacatctttgatgtcctgaaatccctttccccattacagctgactccttcccagtaactcaggcttcctcacttagatgcctatgcatgattctgctcctggacagggtcatgtgttgaggcaggcatcttatggagagaaggatgtgatggagcactgagcttctcagggctgagggtctggtatctgactccccaacatcatatattgttggtcactagcagcggaactgtggcgtcttcactagagcagtccctctatatgctgtgccttggttcctggcttcatctttgcccaactctattgtcctcctacagattctgtgggt

SEQ ID NO: 415059 - DNA, 651 bp, Homo sapiens
tctaattgaaactttacataatttccttattatgtattaacattgaacgggcaytatgcattccatttctagaaaagaagtctttccttaataaattacaagtgcaaacatgaagtccaggacaatttttacttcaagatcaacttgtctatatgctaggataatgaatttgaatactctttactgatgttccctgaagacgtagctattttgttttctataatgatattattttcttgagtctccattctgttgggtactgtagaaagaagacaaaaagcaaacaatataatataccaattaaaggtatcttagtttttttacagtataaatggtctctgttaacttaaaatgatctttccaggtaaatatttaattaatttgaagttctaccttatatcagagtggtatatttctttttcttccttatcaacagggcttctgggcataagacaaaacctgatagtactgacttgtggggctttgaatggatatgtagaatcactcttgttttgtgctggtcctggtgctggcttctgcagctggacaaccactcgaatctttgcttattcacgtggcaggtttctgttgagacatagtttatgtggatccaacctgtgtcatccactgttggaggctgtggccaaggaa

SEQ ID NO: 415060 - DNA, 651 bp, Homo sapiens
tctaattgaaactttacataatttccttattatgtattaacattgaacgggcattatgcattccatttctagaaaagaagtctttccttaataaattacaagtgcaaacatgaagtccaggacaatttttacttcaagatcaacttgtctatatgctaggataatgaatttgaatactctttactgatgttycctgaagacgtagctattttgttttctataatgatattattttcttgagtctccattctgttgggtactgtagaaagaagacaaaaagcaaacaatataatataccaattaaaggtatcttagtttttttacagtataaatggtctctgttaacttaaaatgatctttccaggtaaatatttaattaatttgaagttctaccttatatcagagtggtatatttctttttcttccttatcaacagggcttctgggcataagacaaaacctgatagtactgacttgtggggctttgaatggatatgtagaatcactcttgttttgtgctggtcctggtgctggcttctgcagctggacaaccactcgaatctttgcttattcacgtggcaggtttctgttgagacatagtttatgtggatccaacctgtgtcatccactgttggaggctgtggccaaggaa

SEQ ID NO: 415061 - DNA, 651 bp, Homo sapiens
tctaattgaaactttacataatttccttattatgtattaacattgaacgggcattatgcattccatttctagaaaagaagtctttccttaataaattacaagtgcaaacatgaagtccaggacaatttttacttcaagatcaacttgtctatatgctaggataatgaatttgaatactctttactgatgttccctgaagacgtagctattttgttttctataatgatattattttcttgagtctccattctgttgggtactgtagaaagaagacaaaaagcaaacaatataatataccaattaaaggtatcttagtttttttacagtataaatggtctctgttaacttaaaatgatctttccaggtaaatatttaattaatttgaagttctaccttatatcagagtggtatatttctttttcttccttatcaacagggcttctgggcataagacaaaacctgatagtactgacttgtggggctttgaatggatrtgtagaatcactcttgttttgtgctggtcctggtgctggcttctgcagctggacaaccactcgaatctttgcttattcacgtggcaggtttctgttgagacatagtttatgtggatccaacctgtgtcatccactgttggaggctgtggccaaggaa

SEQ ID NO: 415062 - DNA, 579 bp, Homo sapiens
actatgatttatctgtatttaagaaattaaaaatacaaaaaaaaaagatactcaagtgttgggggctgcaggtcttcaaaatgttttttacagcatctgatcaacatagttctctctagtcctttttttgatgttatagatcctaagaaaacatcgtttctagattctagtatttctgtcctgtttatatttatcagagagtgaaataaatccagaagagtatttttacattctatacaatctcaacagaaaaacaaaacaagctaagtgaagatgtatttgattactaccagtagacttcattacttttattttcaagaaaaaatatataaattgttagatgttttaccttcaatatggtgaaaatgacagcagcgcacttcacacttacctttttatttagtgctgtaccttcctaatttggcagttttttaaytggcattcagaaacctatcgcccatgttacctgtctgctcagatgtggtttgcgaacatttcctaaccataccatcccatccctttcctttagtcctcagtggcttcccctgcacttccagctctgaagtaacacatgctttt

SEQ ID NO: 415063 - DNA, 485 bp, Homo sapiens
gaggatatctgcaagtaactgcagctttccatattgaagttttactaccattagctgaggctttgccaggtgcctgtgagaagatgctaagaacacttcgagtggaatttttyattattaagtcttgtagctcaatgtcattaactccccaaaatatcttgagttccaacaggtaacaaaaagccacaggcagaactgatacctgaactctatgacatttgccatgtgagtctgaaaatgggatgacaaaactaagacatgccatctcctcattttcatgctgaaaagaaattaaagagaatctgcacaagagttacatttttcaataatgtgttactactggaataaataaactatactttttaaaaaatataacatttaatttttaattataagagaaatagatgttaattttaaaattcgagagaataaagttttataaagataattaaaatgacctaaaatcccaccagccaagacgacca

SEQ ID NO: 415064 - DNA, 564 bp, Homo sapiens
tctctcccgccttgtggggcatcctttacttcctggcacggaggtacacttgcatggggttttcctgccactctggtagggaggccaggctgtcagccacctccttctggataggccagccccaggcctcaaagaagggaaccagattcttcttcactttttcagagaacttcttcacccatagattcatcctgccagtgttgtctttggggaggtgagagagggtctggtactcagcaaagagctgggtgaatggctcccacccgaaggcctsttggagctgaaaagggaaagaaggaacagaatgaggtgtcaagtttgcaaaagtgacgtgacatgtgcgttcttaaatatatttcattcacatgatcacctcccctcaatcgttaccttcatcctgggtatgtgcccctatctccccactctgcccctgcacaataatgcaatcttgttggctcattcctcctcttggccacaaaacaacaccccctgaatctagtgggggtgctcaggggaaacctaatgtctgaatagaggtaaatactcaataaatgtccactatta

SEQ ID NO: 415065 - DNA, 568 bp, Homo sapiens
taattatctttataaaactttattctctcgaattttaaaattaacatctatttctcttataattaaaaattaaatgttatattttttaaaaagtatagtttatttattccagtagtaaaacattattgaaaaatgtaactcttgtgcagattctctttaatttcttttcagcatgaaaatgaggagatggcatgtcttagttttgtcatcccattttcagactcacatggcaaatgtcatagagttcaggtatcagttctgcctgtggctttttgttacctgttggaactcaagatattttggggagttaatgacattgagctacaagacttaataatraaaaattccactcgaagtgttcttagcatcttctcacaggcacctgacaaagcctcagctaatggtagtaaaacttcaatatggaaagctgcagttacttgcagatatcctctccacagctaattaaaatgactgcatatattcatccacatgcccacacacacaaactacagtagcattgggaatctaggaagtgactagaatggttgacaaaagctgcaagaaccac

SEQ ID NO: 415066 - DNA, 568 bp, Homo sapiens
taattatctttataaaactttattctctcgaattttaaaattaacatctatttctcttataattaaaaattaaatgttatattttttaaaaagtatagtttatttattccagtagtaaaacattattgaaaaatgtaactcttgtgcagattctctttaatttcttttcagcatgaaaatgaggagatggcatgtcttagttttgtcatcccattttcagactcacatggcaaatgtcatagagttcaggtatcagttctgcctgtggctttttgttacctgttggaactcaagatattttggggagttaatgacattgagctacaagacttaataataaaaaattccactcgaagtgttcttagcatcttctcacaggcacctgrcaaagcctcagctaatggtagtaaaacttcaatatggaaagctgcagttacttgcagatatcctctccacagctaattaaaatgactgcatatattcatccacatgcccacacacacaaactacagtagcattgggaatctaggaagtgactagaatggttgacaaaagctgcaagaaccac

SEQ ID NO: 415067 - DNA, 579 bp, Homo sapiens
ttttcacagttattagttacaatttgctggaaattgcaacccattgragtttttttcccttgttttcttaaattcactaataaacatatgtgacactttttgaactatttaccaaacgtgactttgaggctacattaccaacttcagccaggtggtttaacacatttgagcatcacacttggtgcttaaaaggtgctaagtaaaatattaaatgaatccagcaggaacaaatgagaaacccatttataatcattgcattggcaaaaattaaaatgctggaaagcataagtgttggtgaggttgtagagaaacaagaactcttctctactgagagtggagggataaattaatgttgttattctggagaataatttaataatactagtgaaattacatatattcatattctatggctttgcagtttcattactgagtatacacccctcagttactcttctggagatatattaaagataagttctcagaagtttacttactgcagcacagtttgaaccaacaaagagttggaaataactcgaatgcccattagtgagaaatggataatcaaaatgtgaaata

SEQ ID NO: 415068 - DNA, 621 bp, Homo sapiens
ccattagtgagaaatggataatcaaaatgtgaaatatgcaagtagtggagtaccatgcagtagttagaagtaataaactacatttaagtacatctacattaataaatctcaaaaatatgatgataagtaaaacaagttagaagaagaaatgtagcaaaatgccaagtatgttaaaaacacaagagtgagtacctgcatgtaatgttaaataatactaccaaatataaggatataaaaagagcaatcctgcatcactgataatattctactataagctgattgttgtaaagttagtttttttgcctctaaaataaaaataaaatttgcagtaaccttcaaaattagtaaataaaattaaaaaatagaactattaggagctacaaacgatttgggtcagtgtgagtctcatgtatataatttccattcacatttagtgtgctgcacattttcttacatcaattcattcattctrtgaattcattcattctatgaattcattctatcaattcatttattgcttattgataactaataccattcataattcataattgcttattgataactaataccattctaatgattgttccttctcttattatccatttttctcatttgagg

SEQ ID NO: 415069 - DNA, 523 bp, Homo sapiens
cacgagttgatatcagaaagtcttgttaccattgtctataaatttctaagattacttttaccatctttgatgatttctggtaataaaggctgggcaatatagggatgcagacaatatttttgatctacttgcwgtcacataatcagtttcctaaatgaagtaatacttcatttatggaaacttgttgtcaattttcctgtccatctgtcttctggtacattttcagtgacttcagcatttatgttataatatgctaaccatgcttcccattctttactatttctattcctctgcttagctagtagcaaggagatccttaagccccatgaccaattgtcactaatcctctaagatatctcctgaaccttttaactataaacccttgtttatatagtaagactgcccatttattataatttcagccactccattagctttgcttctgatcagacacttagcaacttttttgattaccagtgcctggccaaagttcacgtgggttcctatacatgcttaataattg

SEQ ID NO: 415070 - DNA, 523 bp, Homo sapiens
cacgagttgatatcagaaagtcttgttaccattgtctataaatttctaagattacttttaccatctttgatgatttctggtaataaaggctgggcaatatagggatgcagacaatatttttgatctacttgctgtcacataatcagtttcctaaatgaagtaatacttcatttatggaaacttgttgtcaattttcctgtccatctgtcttctggtacattttcagtgacttcagcatttatgttataatatgctaaccatgcttcccattctttactatttctattcctctgcttagctagtagcaaggagatccttaagccccatgaccaattgtcactaatcctctaagatatctcctgaaccttttaactataaacccttgtttatatagtaagactgcccatttattataatttcagccactccattagctttrcttctgatcagacacttagcaacttttttgattaccagtgcctggccaaagttcacgtgggttcctatacatgcttaataattg

SEQ ID NO: 415071 - DNA, 573 bp, Homo sapiens
gacaaaaactgatggatagctgagatacctgcactagttttaggtgaaatattatgaagatctgggcagagttggccaaagagttttggctagttcaaaaactgatggagctggagcaaggaagggcagcagatgtgcaggtgggcagttgggtgggctgacagggagggagataggttggtggacagaagaacagatagaaaacaggaaaaaaaggccaggcamggtggctcatgcctgtaatcccagcactttgggatgctgtggtgggtggatcacatgaagtcaggagtttgagaccagcttggccaacatggttaaaccccgtttttactaaagatacaaagatcagctgggcatggtgttgtgtgcctgtagtctcagctactcaggaggctgaggcacgagaattgcttgaatctgggaggcagacattgcagtgagccaagattgtaccactgcacaccagcgtgggtgacagagcaagactctgtctcaaaacaaaaataaaaaacaaacaaacaaaaacaggaaaaaagataaagcgaaagagacctagctccatttacttac

SEQ ID NO: 415072 - DNA, 573 bp, Homo sapiens
gacaaaaactgatggatagctgagatacctgcactagttttaggtgaaatattatgaagatctgggcagagttggccaaagagttttggctagttcaaaaactgatggagctggagcaaggaagggcagcagatgtgcaggtgggcagttgggtgggctgacagggagggagataggttggtggacagaagaacagatagaaaacaggaaaaaaaggccaggcacggtrgctcatgcctgtaatcccagcactttgggatgctgtggtgggtggatcacatgaagtcaggagtttgagaccagcttggccaacatggttaaaccccgtttttactaaagatacaaagatcagctgggcatggtgttgtgtgcctgtagtctcagctactcaggaggctgaggcacgagaattgcttgaatctgggaggcagacattgcagtgagccaagattgtaccactgcacaccagcgtgggtgacagagcaagactctgtctcaaaacaaaaataaaaaacaaacaaacaaaaacaggaaaaaagataaagcgaaagagacctagctccatttacttac

SEQ ID NO: 415073 - DNA, 573 bp, Homo sapiens
gacaaaaactgatggatagctgagatacctgcactagttttaggtgaaatattatgaagatctgggcagagttggccaaagagttttggctagttcaaaaactgatggagctggagcaaggaagggcagcagatgtgcaggtgggcagttgggtgggctgacagggagggagataggttggtggacagaagaacagatagaaaacaggaaaaaaaggccaggcacggtggctcatkcctgtaatcccagcactttgggatgctgtggtgggtggatcacatgaagtcaggagtttgagaccagcttggccaacatggttaaaccccgtttttactaaagatacaaagatcagctgggcatggtgttgtgtgcctgtagtctcagctactcaggaggctgaggcacgagaattgcttgaatctgggaggcagacattgcagtgagccaagattgtaccactgcacaccagcgtgggtgacagagcaagactctgtctcaaaacaaaaataaaaaacaaacaaacaaaaacaggaaaaaagataaagcgaaagagacctagctccatttacttac

SEQ ID NO: 415074 - DNA, 573 bp, Homo sapiens
gacaaaaactgatggatagctgagatacctgcactagttttaggtgaaatattatgaagatctgggcagagttggccaaagagttttggctagttcaaaaactgatggagctggagcaaggaagggcagcagatgtgcaggtgggcagttgggtgggctgacagggagggagataggttggtggacagaagaacagatagaaaacaggaaaaaaaggccaggcacggtggctcatgcctgtaatcccagcactttgggatgctgtggtgggtggatcacatgaagtcaggagtttgagaccagcttggccaacatggttaaaccccgtttttactaaagayacaaagatcagctgggcatggtgttgtgtgcctgtagtctcagctactcaggaggctgaggcacgagaattgcttgaatctgggaggcagacattgcagtgagccaagattgtaccactgcacaccagcgtgggtgacagagcaagactctgtctcaaaacaaaaataaaaaacaaacaaacaaaaacaggaaaaaagataaagcgaaagagacctagctccatttacttac

SEQ ID NO: 415075 - DNA, 627 bp, Homo sapiens
aatcagtaggtctggggcggaagacaaagacataaattcctgaggcttagaatgccaagagcagaacagaaacaaaagcaagcctcctgtcaaggctaagcaggtgaatacacagcaagaattagccacagaattgggagcagagcatatttcaggaagtccttaattaatataaaacacaattattttataatcaatgctagcacttagtgtgtgggtcaggaattatttaatacaagctgttcttacagcaacttacaatgactaaatcacttattcctctaacaaccccgttatcgttagcatttttcagatgaagaaactcaaacccagaaaagcaaagtaatttgcccaagcttacataactagtaagcagcagagccaggacttgcaggcagtgtcattggcctyagagtccagcccctgtactgctatgctgcagttgccagcgttgagaagtggctagaaaatgcaggtcacccatcccatcatccacactcccatggtttgggggtggttatttgttaacctctgttctctctatctctatactcctgatacccttttatgccactgatcagtgtattcgttatcactgagtattactcctaacacaaaggatggctt

SEQ ID NO: 415076 - DNA, 601 bp, Homo sapiens
gctctcatctgaaattagtctgctggatagctgtcactctagggtgagatacccttttggctgtcactctagaatgagacatcctaagtaaggtccactgttttatggatcccatttcttcttctttcctggttttcatcctcattttgctggagaatttcctcaagatacttcctcagtaagggtgcaaaggagggagactttctgaaaatttgcctgacagaaaatgtcttcactttgatgttcttcttgacagtctgccttactatgaaattctaggtacaaaaattttccwtaagctctgaagatgttgatccattgacttctggcattcagtgttgctgatgacaaatctgttagcagtctatttctcatccatttttgtgttgagctaatcgtgatgacctcatttgttttctccctggccactttaatatcttccttctatccttaatattccaaaattttacaatattgtgtctagatgtagattgtattgggccctctcaatctggagacttagcttgctctgttcttcaattctttttctttttatttcttcacctacactgtctctgttctctcttccaggaactcctaa

SEQ ID NO: 415077 - DNA, 467 bp, Homo sapiens
tttgttggaaaaaaataatttcttgggctgctttttgttaaaggggaagctctgctgaggactcttttaccctcactatctgcttaaataatttctttctacctcctgtatcaatattgatgtgtagaggacagaacacaggactcagaataacatcttattccgaawatcttcctcaagcaatcttgaataagtcacttaaactctgagcatacattttctattatataattatgataattcttattttgctcttggttgtgagaataaaatgtgctgatggagatgagatgcttagcatagtgcttgattgatatgataagcactttatgaattattagaatctagaggatgagatttccaaattaaggtatacctgtgtcaataccctaccaaagcatctaaataaaaatatttgcaaaatttacttaaattttaatctaaatattgggggcaacagacaggca

SEQ ID NO: 415078 - DNA, 662 bp, Homo sapiens
ttggcatggaattcaatcaacaagtatttattgcaaatatggatgaataaataaattctggaattttcctagtataacttacatttgtacttaagttttgtgccaatttgtgctctttgacatactcgcatatgttagtgtaacattgtttagaaacagttatgtcaagtgaatttatttgctcattaatttttacaagacagtgcggattattattcttcctcttaatgtctctttactttatcaatgacagtaaggtttccttcaagctactgggggattaaaatgctttgtgtaatgctactctcttttttggagggaggggaagtttcactcttgttgcccaggctggagtgtgcagtggcacaatctcggctcactgcaacctctgtctcytgggttcaagggattctcgtgcctcagcctcccgaatagctgtgatcccagctattcaagggaagagtggaggatggggcaacctctgggaggctttctctttcctggatgcagtccttgagtccccttgttggctttccccatgcagacccctcatgatggggaaaactctacggagcggagcggccccctctgcctggtacgggcctgccatcagagctcgcgcagatccccgcctggagcttggcctggccgccggcgcccca

SEQ ID NO: 415079 - DNA, 662 bp, Homo sapiens
ttggcatggaattcaatcaacaagtatttattgcaaatatggatgaataaataaattctggaattttcctagtataacttacatttgtacttaagttttgtgccaatttgtgctctttgacatactcgcatatgttagtgtaacattgtttagaaacagttatgtcaagtgaatttatttgctcattaatttttacaagacagtgcggattattattcttcctcttaatgtctctttactttatcaatgacagtaaggtttccttcaagctactgggggattaaaatgctttgtgtaatgctactctcttttttggagggaggggaagtttcactcttgttgcccaggctggagtgtgcagtggcacaatctcggctcactgcaacctctgtctcttgggttcaagsgattctcgtgcctcagcctcccgaatagctgtgatcccagctattcaagggaagagtggaggatggggcaacctctgggaggctttctctttcctggatgcagtccttgagtccccttgttggctttccccatgcagacccctcatgatggggaaaactctacggagcggagcggccccctctgcctggtacgggcctgccatcagagctcgcgcagatccccgcctggagcttggcctggccgccggcgcccca

SEQ ID NO: 415080 - DNA, 567 bp, Homo sapiens
tttgtcaattacacaataaaatttaaaaaaagtgctctaaagcaagtcaaaggggctaattaaatggaaaagagactaaggcgtgtttctgctcttagagtttttaggaggtattgtcacaaattctaggaatgtatgtttcagtcttttctctgggagagggagggagaamagatactttcaaagcttcagtgattcaaatccaactctaccctaggaggagaagttacagagagagaagaaaacaccacaaggcctgcctaagccaccttcctcccccagggagaaagcagatgttcttactcttccgagtgatgaataacatcagctataacagctaacatttaagagactgccaggcaatgctcacgaggactttgcaaatttaatttaacttattcttagtgacagtgcaataaggttagtggactctctccatacccatgttatagatgaggaaattgaggcctaaggaaatgaaacatcatctagctaattaacagtatagccagatttatacccaagcaatctagcccccaatagtccatagtcttatccactatatag

SEQ ID NO: 415081 - DNA, 574 bp, Homo sapiens
taaaaatatacaaatgaaatggaactaacataggctagttttaagactttttacagaaatgaagtagtcaaaacactttgatattggcataaagatagacatgcagatcaatgaaacagaccagatagtttagagatagacccacaratttatggtaaattgttttttgacagagttgctcaggtaattctatgaggaaattacagtctttccaacatatggttctggaacaactggatacccttatggaaaaaaggtgaattgtgaccctcaccctactccataaaagcaaatatttaaaaatagatctagacctaaatgcaaaagctaaattttaaaaacttctaaatgaaagcataggagaaaatatctgtgaccttgacctttgcaatttttgcctacataggacacaaaaagtacatgaaccataaaaggaaaagattaataaattgagctttatttttaaaaagtaaatagctctgcagttcaatagacagtattaaggaaacaaaaaggcaagccatagactggaaaaaaaaatatttgcaatacttatatctgacaatggacttgc

SEQ ID NO: 415082 - DNA, 466 bp, Homo sapiens
aagatctgtctttctagtaatggacggcgaagttgaagaggctggagcctgtgctttgggtgccatcttgaggagagtcaggaaaagactcgagttatataaagacacttggggatcttccaatttagaggaatgcccttgatccagagtgtagtgacaaagcaggacaaggtgaggtgataattcagagaaaagtgtctccaaaattaatgttggctgagttcaagtgaggagagagaagaaacaggcatggtaagagatgaagacaaggaccgtacaatgtcaagggccaagaaatttaattaaaagctaattatttcctctgaaagttttcatcatygtcccccacaaaaatattgctaaaaatattcccataagttctgattcttgcatgtataaatggggaaaaggggaccattgcaaagtttcctcttattcaatctgatgaccaatatcacccaaagtt

SEQ ID NO: 415083 - DNA, 555 bp, Homo sapiens
gctcaccggatttttggttcgtatgaaggtattttttctgtgtagatagttgttaacctggtgtccttgtggtggcagggcagactatcagtggagccttctattccgctatcttgctttgcctcctcccctctggaaaactaatttttaaaaaatcaattctcggccgkgcacagtggctcatgcctgtaatcccaacactttgggaggccgaggtgggtggatcacaaggtcaggagttgaagaccagcctggccaatatggtgaaaccttgtctatactaaaaatacaaaaattagctgggcatggtggtgggtacctgtagtcccagctactcgggaggctgaggcaggagaatcacttgaacccaggaggtggaggttgcagtgagccaagatcgtgccactgcactccagcctgggcgacagagcgagactccacctcaaaaaaaaaaaaaaaaaaattcaagtctccactaattgatgtatattcttaaaaaattacttagaatcaaaatctcaacagggtttttcattattgtagttgtttactcac

SEQ ID NO: 415084 - DNA, 575 bp, Homo sapiens
tgagcacttcaaaataaaagcaaaaatcaaatgtttagttaatatatgcaaagctgcttaacatcattagtaatgaggaaaatgcaaatkaaaaccacaataatatattactatgcactcatcactttggaaaaaaatgtatctcataatatcaagtgttcctaaggatctagagcaatggaaactcatatactctaagtgatatgattttgacttgtctttatctacagcttggttttatctaagaaggttgaagctatgcatattctacgatacagcaattcctttcctagggtatgccagagaaactctcgcccagatatacatgtaaaggatgtttgtagtatcagataggccccaaataaaaacaatcaaaaaccaatcagcagcaaaatagattaactgattgtattatagttatataattgagtattaggcagaaagaaaaatgaagtagagctacacaaatcaacacagacgatgtcacagtattgcactaaagaagcaagccataaaagattacataaaatataactttcttgtattcttatacagtttaaaacaagttaaaacta

SEQ ID NO: 415085 - DNA, 575 bp, Homo sapiens
tgagcacttcaaaataaaagcaaaaatcaaatgtttagttaatatatgcaaagctgcttaacatcattagtaatgaggaaaatgcaaatgaaaaccacaataatatattactatgcactcatcactttggaaaaaaatgtatctcataatatcaagtgttcctaaggatctagagcaatggaaactcatatactctaagtgatatgattttgacttgtctttatctacagcttggttttatctaagaaggttgaagctatgcatattctacgatacagcaattcctttcctagggtatgccagagaaactctcgcmcagatatacatgtaaaggatgtttgtagtatcagataggccccaaataaaaacaatcaaaaaccaatcagcagcaaaatagattaactgattgtattatagttatataattgagtattaggcagaaagaaaaatgaagtagagctacacaaatcaacacagacgatgtcacagtattgcactaaagaagcaagccataaaagattacataaaatataactttcttgtattcttatacagtttaaaacaagttaaaacta

SEQ ID NO: 415086 - DNA, 575 bp, Homo sapiens
tgagcacttcaaaataaaagcaaaaatcaaatgtttagttaatatatgcaaagctgcttaacatcattagtaatgaggaaaatgcaaatgaaaaccacaataatatattactatgcactcatcactttggaaaaaaatgtatctcataatatcaagtgttcctaaggatctagagcaatggaaactcatatactctaagtgatatgattttgacttgtctttatctacagcttggttttatctaagaaggttgaagctatgcatattctacgatacagcaattcctttcctagggtatgccagagaaactctcgcccagatatacatgtaaaggatgtttgtagtatcagataggccccaaataaaaacaatcaaaaaccaatcagcagcaaaatagattaactgattgtattatagttatataattgagtattaggcagaaagaaaaatgaagtagagctacacaaatcaacacagacgatgtcacartattgcactaaagaagcaagccataaaagattacataaaatataactttcttgtattcttatacagtttaaaacaagttaaaacta

SEQ ID NO: 415087 - DNA, 582 bp, Homo sapiens
ttagttttcttcacgtgtcgctgaagattaattatgagtatgtggcttagtaatgcgcattcatcatggacttgcagtgacactgatccttcagcacagaatatcctggcacacgttcctgaccaaaaagcagccatttgtggggcacaagccaatatttattgcatattcttgccttggtctatctttctgatactaacaccaaattttctaggatagaagacttcttactctcaggaagtagtttgtttctcaaagagaaaacatggggtgttcagttggctgtgtggctgctcccatctgtagaggtgaggtggatgtacgtagtcttctatgctgacagaataattcaaaagaatgctttgaaggtaaatatataaatcagtacactcccccaactcaataccttcatgaaatgtatcttcatgaagtctgcctattacattaaagctttttttttctttgacagagtttcrctcttgttgcccaggctggagtgcaatggtgcgatcctggctcactgcagcctctgcctcctgggttgaagcgattctcctgtctcagcctcctgagtagctggga

SEQ ID NO: 415088 - DNA, 589 bp, Homo sapiens
actcaccatgcatgaatagatcatttgaataactctataaccattaagaaaattgaattcataattttaaaactaccagaaaaggaatctctaggtttagatggtttcactggagaattctaccatgtttaaaaaaaaaaacacyaattctacacaatcttttccagaaaacagaaaaggagagaacactccccaatttattttttgaagctattattacactgataccaaaaccaggagagagagtgggtgtgtgtgtgtatatgtaaagatatgtataacttaatattaacaaatagagttctacagtatattaaaaaaatgtaccccatgtccaaggggggttgtttccagaaatacaagcctgattaagtctcaaaaagtcaatcaaaataatccaccatgttaacaaacaaaagaaaagttacgttgcatcagttgatgcataataaacatttaacaaatttaacacatttcaatatccattcatgataaaatctctctataaagcaggaatagaggaaactttatccacttgataaaaagcatctacaaaaagctaacattatacagtcatgtgttgtttaac

SEQ ID NO: 415089 - DNA, 476 bp, Homo sapiens
acacacttgcagaagacatttgcaaacaacatatctgaccaaggagtagtatacaaaatatataaagaattctcaaaactcaagarcaaaacaaaacaaaacaaaacaaaacaaaacaaaaacaactaaccaatttgcaaacaacatatctggccaaggagtagtatacaaaatatataaagacttctcaaaactcaagagcaaaacaaaacaaaacacaaaaacaactaaccaattagaatatgggcaaaagacatcaacagacatttcacagaagaggacatacagatggtaaatgatcactgttaaagattagccatcagagaaatgcaaaactgcagttgagagatcactccacacctaccagaatggctaaaatataaaatagtgacataccaaagctggtgagaatcagaaaaactgaatcactcatacattgctggtgagaatgtaaaatgctaccatcactgtggaaa

SEQ ID NO: 415090 - DNA, 476 bp, Homo sapiens
acacacttgcagaagacatttgcaaacaacatatctgaccaaggagtagtatacaaaatatataaagaattctcaaaactcaagagcaaaacaaaacaaaacaaaacaaaacaaaacaaaaacaactaaccaatttgcaaacaacatatctggccaaggagtagtatacaaaatatataaagacttctcaaaactcaagagcaaaacaaaacaaaacacaaaaacaactaaccaattagaatatgggcaaaagacatcaacagacatttcacagaagaggacatacagatggtaaatgatcactgttaaagattagccatcagagaaatgcaaaactgcagttgagagatcactccacacctaccagaatggctaaaatataaaatagtgacataccaaagctggtgagaatcagaaaamctgaatcactcatacattgctggtgagaatgtaaaatgctaccatcactgtggaaa

SEQ ID NO: 415091 - DNA, 511 bp, Homo sapiens
acaagaacatggtttttgccaccttgctactctgtattagtttgttctcatgctgctaataaagacatacccgagagactaggtaatttataaaggaaatagctttaatggactcatagttccacatggctggggaggcctcacaatcacggcagaaggcaaggaggagcaaagccacgtcttacatggtggcaggcaaagaaggagaggccatgtgcaggggaactcccctttatcggatcatcagatctcatgagacttattcactgttttgagaacagcacgagaaagacccacccccatgatccaattacctcccactgggtccctcccatgacacgtgggaattaygggagctacaattcaagatgagatttgcgccaggtgtggtggctcacacctgtaatcccagcactttgggaggctgaggtgggcagatcacctgaggtcaggagtttgagaccagcttggccaacatgatgaaacgctgtctctactaaaaatacaaaaa

SEQ ID NO: 415092 - DNA, 525 bp, Homo sapiens
cacagtgccctagtcatagcggcaggacctctcagggccacctcaatgactctttgtgaccagttcccctctgccattaacagatgagcaaatataccttgtttttttgagacagggtctcgytctgtcaaccaggctagagtacagtggtgcaatcttggctcactgcaacctctgcctcccacgttcaagcgattctcctgcctcagcctcctgagtagctgggattacaggcacccaccaccactccagactaacttttgtatttttagtagagatggggttttgccgtgttggccaggctggtctcgaactcctgacctcagatgatccgcccaccttggcctcccaaagtgttgggattacaggcttaagccactgcacctggccccaaatctaccccttttacaggaaacctggcatcagattcagtgccctgacaacctacttgccaagcccacaaacattcacttactccactaatcaacaaatactcatgagatgtctaccatgtgtaggacattt

SEQ ID NO: 415093 - DNA, 525 bp, Homo sapiens
cacagtgccctagtcatagcggcaggacctctcagggccacctcaatgactctttgtgaccagttcccctctgccattaacagatgagcaaatataccttgtttttttgagacagggtctcgctctgtcaaccaggctagagtacagtggtgcaatcttggctcactgcaacctctgcctcccacgttcaagcgattctcctgcctcagcctcctgagtagcygggattacaggcacccaccaccactccagactaacttttgtatttttagtagagatggggttttgccgtgttggccaggctggtctcgaactcctgacctcagatgatccgcccaccttggcctcccaaagtgttgggattacaggcttaagccactgcacctggccccaaatctaccccttttacaggaaacctggcatcagattcagtgccctgacaacctacttgccaagcccacaaacattcacttactccactaatcaacaaatactcatgagatgtctaccatgtgtaggacattt

SEQ ID NO: 415094 - DNA, 525 bp, Homo sapiens
cacagtgccctagtcatagcggcaggacctctcagggccacctcaatgactctttgtgaccagttcccctctgccattaacagatgagcaaatataccttgtttttttgagacagggtctcgctctgtcaaccaggctagagtacagtggtgcaatcttggctcactgcaacctctgcctcccacgttcaagcgattctcctgcctcagcctcctgagtagctgggattacaggcacccaccaccactccagactaayttttgtatttttagtagagatggggttttgccgtgttggccaggctggtctcgaactcctgacctcagatgatccgcccaccttggcctcccaaagtgttgggattacaggcttaagccactgcacctggccccaaatctaccccttttacaggaaacctggcatcagattcagtgccctgacaacctacttgccaagcccacaaacattcacttactccactaatcaacaaatactcatgagatgtctaccatgtgtaggacattt

SEQ ID NO: 415095 - DNA, 594 bp, Homo sapiens
acaatctgtgatctggatgaattgacaagcattaagtgggcaggtattggcaagttctggggaaaaaccatccgcagagatgtctgtgacttggaaagtgcagccacagacgttcttttcccctggccctgctgtcagttggaacaaactttctggcactctgggaaggaagacggtcaccacctggcctacgcstctgtagctccgaggttggactggtgcaattccgctcggattagcaattaggttggaagccagcacaggctccatttgggcaatagttctgggagatgagatgaaggcccctgagatgttttgctctctgttctcattaaccttctgtctggggaaagaaggtcctgtccttaagccaggaagccacagcagggcggcacatcagtcaccaaatcccacccaaccagctggggctttcaccaaatccaattagtcactggctgtgtttcttctcatcagcaagaagggtgctgtgcagggacagatactcttctctgggcaaacccatcccagcaaacaagcccagagacaggtcctgcaacagaggcacatttagggagggatgtgagccccgtgcta

SEQ ID NO: 415096 - DNA, 589 bp, Homo sapiens
aatgcattagagaggtgatctctctgtatttctggcagcatcgactagtgtgcttttggaagtatttgataattttgaaggcaagatggtaactcgttgcttgaattagctttcttasgattaccagcaagagtgaaattttagacttatcttgttggatgataagataaatcaatttcttctccagaggccaccgactgcccctcttcatttggtggttaaatcctccctttcccattgacttgccacgcctccctaatcctttaggaaattttacctctgctgggatctgttcctggacaatctgttcctggacaatctgttctgaattattggcatcttgatgctcacatctgcttggcattgtgaaataggttttgaatgaatattctttgaaggtgaatgcactctgagagggcattgatttatgtgtgggcatttggacaaactcttgtgtgcagacacctggctgtctgtgctggctgcagccaaggtagggatgtggtgaacttttgatggagttgcccttttgagcagttcagagggtgcagaatgctacactgatgactcctggaggacccaacaatgc

SEQ ID NO: 415097 - DNA, 630 bp, Homo sapiens
tgaaggcaagatggtaactcgttgcttgaattagctttcttaggattaccagcaagagtgaaattttagacttatcttgttggatgataagataaatcaatttcttctccagaggccaccgactkcccctcttcatttggtggttaaatcctccctttcccattgacttgccacgcctccctaatcctttaggaaattttacctctgctgggatctgttcctggacaatctgttcctggacaatctgttctgaattattggcatcttgatgctcacatctgcttggcattgtgaaataggttttgaatgaatattctttgaaggtgaatgcactctgagagggcattgatttatgtgtgggcatttggacaaactcttgtgtgcagacacctggctgtctgtgctggctgcagccaaggtagggatgtggtgaacttttgatggagttgcccttttgagcagttcagagggtgcagaatgctacactgatgactcctggaggacccaacaatgccttgaaggttcgctcttgtctgttgagttggctcaagtccaccttctgattactgtcagctctagcatgaaagatccagcagatgctgaattgaacaaagaaagaacgagcaagag

SEQ ID NO: 415098 - DNA, 630 bp, Homo sapiens
tgaaggcaagatggtaactcgttgcttgaattagctttcttaggattaccagcaagagtgaaattttagacttatcttgttggatgataagataaatcaatttcttctccagaggccaccgactgcccctcttcatttggtggttaaatcctccctttcccattgacttgccacgcctccctaatcctttaggaaattttacctctgctgggatctgttcctggacaatctgttcctggacaatctgttctgaattattggcatcttgatgctcacatctgcttggcattgtgaaataggttttgaatgaatattctttgaaggtgaatgcactctgagagggcattgatttatgtgtgggcatttggasaaactcttgtgtgcagacacctggctgtctgtgctggctgcagccaaggtagggatgtggtgaacttttgatggagttgcccttttgagcagttcagagggtgcagaatgctacactgatgactcctggaggacccaacaatgccttgaaggttcgctcttgtctgttgagttggctcaagtccaccttctgattactgtcagctctagcatgaaagatccagcagatgctgaattgaacaaagaaagaacgagcaagag

SEQ ID NO: 415099 - DNA, 611 bp, Homo sapiens
ctattctctgtatcactgagaagcaatcctatcaagcactaggtgccttttcctaataaaatccttcttccaggccagacagggtggcttatgcctrtaatcccagcacttagggaggccgaggtgggcggatcagttgaggcggggagtttgagaccagcctggccaacatggtgaaacctcatctctactgaaaaaaaaaaatacaaaaaaaaaaattagctggatatggtggtaatcgcctgtaatcccagctactcaggaggctgaagcatgagaatcatctgattctgggaggtggaggttgcagtgagctgagatcgagccactgcactccagcctgggtgacagagcaagaccctgtctcaaaaataaataaataaataaaataatttttttccagtgctttccttactggtgttctagcctatagtgccaagggtagaataaaatcaaatgggattcagcaaaaacagctatttattggttggtactagtcgcaaaagttatgagcccctggctctttgcaggaaattgattaacagtgaagggggaatatagttggctacaaatgcggcttcctttccggggaggatggtctgagagtcatg

SEQ ID NO: 415100 - DNA, 584 bp, Homo sapiens
cagaggctaaggagagtccttcaggctgaaatttacggacactagacagtaacttgaagccatatgaagcaataaagatcacaataaaggtgcaattatgtgggcaatcataaaagctaatattaytgtaacattggtttgtaactctacattttgttttctacataatttaagacattaatgcgttttcaaaaattactagtttgtggtttgggccatgtaatgtataaagaggtaattttgtgacatcaacaattgaaaggagtgggaatggaaatgtaaaggagtagtatttttgtatgttattgcagttaagctggtataaatccaaattagagtgtataactttagtatattaaatgtaatccccatggtaactacaaagaaaatagatataaaatatacacaaaaaggaaatgagaaaggaatttaaatatttcactacaaaaagatcaactacacacaaaagaatacagcaatgcagaaaatgaggaaccaaaagccttaaggcatgtggaaacaaataggaaaatgacagaagtaagttcctccttattagtctaaaaaaggaaggaaatgctggc

SEQ ID NO: 415101 - DNA, 394 bp, Homo sapiens
ttataatatattaattatatagwtatataatacataatatggaattatatataatataatacataatatataattatatataatatagattttatatataatatataattcatatataaattataatagatatagattttatatataatatataattcatatataagttataatatagatatatgatagataatatgtatataatatagagcgttccacccccaaaacagtcctggtccttgagttaggagagtagcttctccccactcaaacctcaccttctcccttttcaggggagcccttttcccctcactgagtcctggtcccctcacctggattcagatgctcgtgtgtctttcttggggacctcctttgggccagggccctgtgctgc

SEQ ID NO: 415102 - DNA, 394 bp, Homo sapiens
ttataatatattaattatatagatatataatacataatatggaattatatataatataatacataatatataattatatataatatagattttatatataatatataattcatatataaattataatagatatagattttatatataatatataattcatatataagttataatatagatatatratagataatatgtatataatatagagcgttccacccccaaaacagtcctggtccttgagttaggagagtagcttctccccactcaaacctcaccttctcccttttcaggggagcccttttcccctcactgagtcctggtcccctcacctggattcagatgctcgtgtgtctttcttggggacctcctttgggccagggccctgtgctgc

SEQ ID NO: 415103 - DNA, 477 bp, Homo sapiens
tttaaaagtatgaagttgtatgcagaagaatgttccttgaagacaaaaccaaaaaatctgaaacaaatgtcttgttggtagatatataatacaatactttttaatgggaaagatatgcaatattgagggagacagggaaaagagaaagcagaaaaaagaagagagaaaawgaaaattactattaggacttaaagctatttctccccagtctgttttccatacacagaacaatacagatgtgaccgcagtacacatataattttgtattctcctttacactttgattttttcttatcaaaaacactttatacatggcatttaaatggcttataactttcctaaatggctactacactgtgtacttaaccattctgtttccttctacttatgatttttgctgcaaacctttcccctccaatctgtccacatttaaattcctttaaggaagggggctgtatagaaattttaatttatgtg

SEQ ID NO: 415104 - DNA, 477 bp, Homo sapiens
tttaaaagtatgaagttgtatgcagaagaatgttccttgaagacaaaaccaaaaaatctgaaacaaatgtcttgttggtagatatataatacaatactttttaatgggaaagatatgcaatattgagggagacagggaaaagagaaagcagaaaaaagaagagagaaaaagaaaattactattaggacttaaagctatttctccccagtctgttttccatacacagaacaatacagatgtgaccgcagtacacatataattttgtattctcctttacactttgattttttcttatcaaaaacactttatacatggcatttaaatggcttataactttcctaaatggctactacactgtgtacttaaccattctgtttccttctacttatgatttttgctgcaaacctttcccctccratctgtccacatttaaattcctttaaggaagggggctgtatagaaattttaatttatgtg

SEQ ID NO: 415105 - DNA, 577 bp, Homo sapiens
cgtatgtgactgacacaaaatacaacagaatgtaggaacagataagcaagaacgggttaggaggaattcaaatgcatattacgaagtgaatgaagccactctgaaaaggctacatggtatatagtcttccagattctaaccaaatggcattctgcaaaaggcaacattttggagagagtaaaaagatcagtggtttccagggggtagcagggagggagggataaataggcagagcaaagaggatttttagggcagtgaaaccattttgtaagataatataatggtgaatatgtgccattatatatttgtcaaaacccacattatcaatatcaatagtgaaccctaatgtaaactatgaattttgggtgaaaataatgtgttaatgtagctccaggaatcggactaaattagccgtagaccaaaatgctgctcttgacctacactaacaaaaacttaaaagcaagcctcaaaaggatcaaaatggactgaagtaacttaattmtttaatgtaacataacaaaatccagcattcagcaatttaaaattcaagtaaaaaatttccaagcatgcaaaatag

SEQ ID NO: 415106 - DNA, 583 bp, Homo sapiens
cactgcaccaggcctgagctttactattttagacacctcatataagtggaatcatgcagtatttgtaattctgcgactgggttcttttactcagcacaatatcctccaggtttatccttgttgtcacatgtgtcagaatttccttctttatttacacagaatattatttcactgtatgtgtatattatctttttatttttagttgatacataatagttgtacataytcatgggatgcaaaatgatacttggatacttgtatacaatgagtaatgatcaaatcagggtaaatagtatattcatcacctcacttcatccaccccctacctctcagcctctgatactcacaattctactctctagttccatgagctcaaaatgtgccttttagctccacttgtaagtgcgaacatgcagtgtttatctttctgtgcctgatttattttgcttaacataatgtcttccaggcttatccatgttgcagtgaatgacaggatttcattctttttatgattaaatagtactccgttgtgcatatgtaccacattttctttatccattcatctgctgatggacatttagta

SEQ ID NO: 415107 - DNA, 583 bp, Homo sapiens
cactgcaccaggcctgagctttactattttagacacctcatataagtggaatcatgcagtatttgtaattctgcgactgggttcttttactcagcacaatatcctccaggtttatccttgttgtcacatgtgtcagaatttccttctttatttacacagaatattatttcactgtatgtgtatattatctttttatttttagttgatacataatagttgtacatattcatgggatgcaaaatgatacttggatacttgtayacaatgagtaatgatcaaatcagggtaaatagtatattcatcacctcacttcatccaccccctacctctcagcctctgatactcacaattctactctctagttccatgagctcaaaatgtgccttttagctccacttgtaagtgcgaacatgcagtgtttatctttctgtgcctgatttattttgcttaacataatgtcttccaggcttatccatgttgcagtgaatgacaggatttcattctttttatgattaaatagtactccgttgtgcatatgtaccacattttctttatccattcatctgctgatggacatttagta

SEQ ID NO: 415108 - DNA, 592 bp, Homo sapiens
aaatttcccaggctcaggtttcttttatagcaaggcaagaacggcataactgagttatktttctcagactacattcactgtttaccatcctcctttcctattttcataatttctcctttagaagactaaaacacttgatacaagacccaaaggccaatttgagtatttctaagaatatctgaaattttataaatgttatactcaaaattagaatgagacatgtataacatttttatgttgtttatttctgattattatgtagatttcagaggcattcttacaagcctttatgatttccctttggcatgcttttatttggaaaatgaatgcaaataatctacctctccacctaaatttaattagagctcctatttaagagaaaatatacagtatctggataattacctcaggtgtctatttaattttgccttggtaaaactaattaatattcaactccttacaggacacactttcttaaaatggtagtattctaaggctttcagctgaggcttaagcagtcgttgtatttattacttcccataaattccctgaatagtcagaaggaagcattcgatgctgtgtttggtttgca

SEQ ID NO: 415109 - DNA, 592 bp, Homo sapiens
aaatttcccaggctcaggtttcttttatagcaaggcaagaacggcataactgagttatttttctcagactacattcactgtttaccatcctcctttcctattttcataatttctcctttagaagactaaaacacttgatacaagacccaaaggccaatttgagtatttctaagaatatctgaaattttataaatgttatactcaaaattagaatgagacatgtataacatttttatgttgtttatttctgattattatgtagwtttcagaggcattcttacaagcctttatgatttccctttggcatgcttttatttggaaaatgaatgcaaataatctacctctccacctaaatttaattagagctcctatttaagagaaaatatacagtatctggataattacctcaggtgtctatttaattttgccttggtaaaactaattaatattcaactccttacaggacacactttcttaaaatggtagtattctaaggctttcagctgaggcttaagcagtcgttgtatttattacttcccataaattccctgaatagtcagaaggaagcattcgatgctgtgtttggtttgca

SEQ ID NO: 415110 - DNA, 592 bp, Homo sapiens
aaatttcccaggctcaggtttcttttatagcaaggcaagaacggcataactgagttatttttctcagactacattcactgtttaccatcctcctttcctattttcataatttctcctttagaagactaaaacacttgatacaagacccaaaggccaatttgagtatttctaagaatatctgaaattttataaatgttatactcaaaattagaatgagacatgtataacatttttatgttgtttatttctgattattatgtagatttcagaggcattcttacaagcctttmtgatttccctttggcatgcttttatttggaaaatgaatgcaaataatctacctctccacctaaatttaattagagctcctatttaagagaaaatatacagtatctggataattacctcaggtgtctatttaattttgccttggtaaaactaattaatattcaactccttacaggacacactttcttaaaatggtagtattctaaggctttcagctgaggcttaagcagtcgttgtatttattacttcccataaattccctgaatagtcagaaggaagcattcgatgctgtgtttggtttgca

SEQ ID NO: 415111 - DNA, 592 bp, Homo sapiens
aaatttcccaggctcaggtttcttttatagcaaggcaagaacggcataactgagttatttttctcagactacattcactgtttaccatcctcctttcctattttcataatttctcctttagaagactaaaacacttgatacaagacccaaaggccaatttgagtatttctaagaatatctgaaattttataaatgttatactcaaaattagaatgagacatgtataacatttttatgttgtttatttctgattattatgtagatttcagaggcattcttacaagcctttatgatttccctttggcatgcttttatttggaaaatgaatgcaaataatctacctctccacctaaatttaattagagctcctatttaagagaaaatatacagtatctggataattacctcaggtgtctatttaattttgccttggtaaaactaattaatattcamctccttacaggacacactttcttaaaatggtagtattctaaggctttcagctgaggcttaagcagtcgttgtatttattacttcccataaattccctgaatagtcagaaggaagcattcgatgctgtgtttggtttgca

SEQ ID NO: 415112 - DNA, 576 bp, Homo sapiens
tattgactgaataatccttaaattttgaatgaaatcaagaattatagttgcaagatcagaggcattgcaatgcaatagattgtaaaaatgtgttattttggagaagacttaattcaaagttaagtaaatcactggatgaaaatgccaggatgaggtatttccatgagtttagtgmggataccaattgccaggcttaattctcttattatttttataagtcactattcctttctgctgatagacaataaatttcccattctgtagtcttcttatctacaacattaaaacctatctaattctcatttgttttattatccctatagtagccatgcaaaaagggactaaagtcaatttctatttaatctagcctgctgtaaaaacaaacccttgcttgacaagcaacctagactgatatctcttgcagacactataaaatccccatacttagcagcttgcagggatcagaatagaaatatcatacgacaaattacatgtttgtaggaagatgaggttcgattacactaaatgtaatgtctaccacctaagacacagcatattaacagaaaactatgactc

SEQ ID NO: 415113 - DNA, 576 bp, Homo sapiens
tattgactgaataatccttaaattttgaatgaaatcaagaattatagttgcaagatcagaggcattgcaatgcaatagattgtaaaaatgtgttattttggagaagacttaattcaaagttaagtaaatcactggatgaaaatgccaggatgaggtatttccatgagtttagtgaggataccaattgccaggcttaattctcttattatttttataagtcactattcctttctgctgatagacaataaatttcccattctgtagtcttcttatctrcaacattaaaacctatctaattctcatttgttttattatccctatagtagccatgcaaaaagggactaaagtcaatttctatttaatctagcctgctgtaaaaacaaacccttgcttgacaagcaacctagactgatatctcttgcagacactataaaatccccatacttagcagcttgcagggatcagaatagaaatatcatacgacaaattacatgtttgtaggaagatgaggttcgattacactaaatgtaatgtctaccacctaagacacagcatattaacagaaaactatgactc

SEQ ID NO: 415114 - DNA, 613 bp, Homo sapiens
tatatttcaaaataagtcatgggaaagatcaagtatcatgatagtttcagttacttcagttcctagtaatgtctggtttcttgcttttaaaaactgtatttgcaaaaccataaaaggaaataaatgaacaatagccttctgatcatctacaatatgttgcctatagcacatttcaaatacatccatatcggtttctaatatttggttgacagagtcctctgtttccttttccagtgattaggaaatggaaaaacaattrctttaaaagaacatgaactgtgacctaataactctataacttcatactatgtggtattattaaatgaaactatatgtgtgatatgatattatgaaaaggttgccttaaagaaactccacaaaaatagcaactagaaaaaaataattctaaaaccaaatgagtctcctgccaaaaaaaggtaagaaataaatagaaaaggcaattcttgacatattttctactagagtggtagtactaatgacttatatacattgcagtcataataatatgaggttgtgaaaaccgtgtaaaagaagttttcattgaatttttcaaataacttcacaaattttagcatccttgatttaaaaatcc

SEQ ID NO: 415115 - DNA, 576 bp, Homo sapiens
gtaaataaaaagtgtgagtatactaaaggtggtagactttttaactttttgtaatgcattgacattcttaatctctgtgggtaattttaacacaggaatcagacagtttaacctaccttgaaattagatgtacgctattgatttgtcttttcttgatggtcagaaagggacaattgatggcattctcaattcctatttacttttaatttttccggaagtttcacatttgttattattttctcactgatttttcaactctttctcaattttacttattctgaatcaaaatttgacatggcaccattagttggaaaactcatttctattttcagatgttaatctgttacttactcatgatacatttcatattgtctctagatactattaatttgttccatatattcatttcttgcagaaaactttattagacttcacccattatccacctttaatttttgaaaycataatctcaattctcttcttcagactttatatcaaatacctgtcaaaaactaaggatatataaatgttactagtttaaactagacacatgcttcatttagcaattcagcctga

SEQ ID NO: 415116 - DNA, 609 bp, Homo sapiens
tcatctcattagtataaatgacctaggagtctgccatgaatcatcttgttagcatacactatcagtgatctgaacggctcatcatgaaaaaaaagacactcccgtcactcagagaattccaagggtttagaggctcccaaggcttctgagatggagttgaagaagaaaatactagaatacaggactttctttttgtaggatgtttaattcaaacttaattagtatttttttaagtagaattaagaaacaagaaaggtagcggagcaaagaaagcgtgaggagcagaagacagagcatcctgaaggaaaacaatgaccgcctgaagacaaaacacaggaactctttgaaatttttaaagctcaaattccatgtataaacagatctccctttactcaaytctaaactttcttcctttcactaactgctcttctatttgctgagaattttaaagtatgatatctttaaatcatttctaaattccaacacagtccatgatgtaaacactggcaaaacacaaacaaactgttttaatttggtttaaatttgtgtaggccacccactgctacctcaagcagcagggatggaagtatggaggaaatgaagtagaat

SEQ ID NO: 415117 - DNA, 395 bp, Homo sapiens
agactgaagtgatcattttgatattttgcttaaatgttgctcatcctttgttttgcttttcagagtcaaagacttttyttttgagctattaaccgcttttgacaagtatatgcctatgaacaaaatttgaagcatatttatgtctctctaactattttctctagaatttggaagttatttgtgagtattcttaatttatggcaatatggttatttgcataagtgcaataaggatctgttttcttttgaaagaggacacaattgaaaaaactggttattttgccaaggctttgatgggaatggtatgccctcctttaaagaatcaaactagacttatgaagccaagaaagtccttggaaaactggccttgtattttgtgtacacagtccctgtaca

SEQ ID NO: 415118 - DNA, 628 bp, Homo sapiens
agtttctttttcttagtttacataactactcttctggtcaggaattcctagctgcctttacttattatttttattcgctcgtcttctaaaggccaagttgcttagcattaagtcttgtgccctattttattccctctcctgctgtactataagtgaaatgcagtggttttgcctgcagagcctttagtcagagtcagagttgaatcctgacagttacttaggtgctgtaaaatctttgtgtctcagattcatcatctgtaaaatggatttgatattaacctttaggttaaaaggtattttgagtattaattgagataatacatgtaaaggacttagcacagtgccttgatactcagcagatattagcaatggcattcattatttctatcatttatacaccaataacttcccaatttataactccagcctgaatttctctggaaaccttgaatgctccttctcactcccaatttgacatttcctcttggttgtgcaacctgtgcctcayatgtaaggtgttcagaattaatctcctgatcttttgcttacctgctccccttttacttctacattttagggaaaggcaactttctcaacccagtgttaaaattcaaacacacacacagag

SEQ ID NO: 415119 - DNA, 539 bp, Homo sapiens
acataatattgatgctaactgtgttgctaatgaagaaattgaraggcacagcttagttttagatcatcgagcccattttaatttctcataagagaaaaaaatgaatgtaagtagccatgagttttgtagagggcatctaagctgattgtgatattgaggcttccctttgcctttcctggatgttgcctctaggccagatattacgatttaaaatgacataacatgacctcatgaaaaatttgaggtctaacttcgtgaactccaattacaaagttacatagatttccacagaatgaaagccagatgtaagtaatttacattttagtcatgtaaaaaaggaagagataaaaggagaaatgccatctggaagattaaaatcaacagtagccatgtaacgggcagttagtgtccacataggtcacctgcctctttaaaatgtttgacacttccagtggccagcagttattctctctctaccaattgtttactttataaaacacaagctctgagaaaacaacaagtcgtgttgagatgtgggg

SEQ ID NO: 415120 - DNA, 539 bp, Homo sapiens
acataatattgatgctaactgtgttgctaatgaagaaattgagaggcacagcttagttttagatcatcgagcccattttaatttctcataagagaaaaaaatgaatgtaagtagccatgagttttgtagagggcatctaagctgattgtgatattgaggcttccctttgcctttcctggatgttgcctctaggccagatattacgatttaaaatgacataacatgacctcatgaaaaatttgaggtctaacttcgtgaactccaattacaaagttacatagatttccacagaatgaaagccagatgtaagtaatttacattttagtcatgtaaaaaaggaagagataaaaggagaaatgccatctggaagattaaaatcaacagtagccatgtaaygggcagttagtgtccacataggtcacctgcctctttaaaatgtttgacacttccagtggccagcagttattctctctctaccaattgtttactttataaaacacaagctctgagaaaacaacaagtcgtgttgagatgtgggg

SEQ ID NO: 415121 - DNA, 564 bp, Homo sapiens
tctgaatttctgataggcatcaagtaagactagaactttctccaggagcatctgcagctcctkttaaaactgttggatgcagacagaacactaggctgtaagtaacaactgcaggctcacactggaaaaaacatcttttcctgaatattgagtcttactgcttgcccagatctctcctttttcaagtcatgcaaagcttttagtaaaggaaatttctcaacacctaactggctacaatcaatgtgttccacataactctccactgtgaggactataaaaatagaatctgaaatttaggcctgggactctggggaacagaaacacagataagtgagagaaagtgtttccctttgaattctgatacctgacatttggacctgaaaagtcagtgcaaatgacagaaaagtaaagcaatgtaagaaatgagagccgcacaggaaaatgatgtcattaagattttttctacttgtttcctttctttttaaacattgaccttgtggttataagaagatctgggagcttttgaatacaattttctacaggtaaagctcatctgtagacctg

SEQ ID NO: 415122 - DNA, 530 bp, Homo sapiens
gcagtctcaccaaagaagttattaaaatgacaattaagcatatgaaaagacacttccatcacatttcatcagggaaactgaaacaacgagacaccamacacaactcatctattagaatggtaaaaatccaaaatgctggcagcactgaacgctagaatggtgagcaacaggaactatcattcattgctggtgggaatgcaaagcagtgcagccactttggatgacaatttgtcagtttcttacaaaactaagcatacttcctcccatatgatccaacatttgaaagtgcatggacacacaaaacctgcacatggatgtttatagcagctttactcataattgtcataatatagaagcaaccacggtgtcttccaacaggtgaatggataaactgtggtacatccagataatggaacattcattagtactaaaaagaagtgagctatcaagccatgaaaagacatggagcaatcttaagtggatattgctgagttaaagaagcccatctgtggcaatgtaagacatcaccg

SEQ ID NO: 415123 - DNA, 487 bp, Homo sapiens
ctacattgaagaaaggtgatgagcatggacatcccccacttgttctcaaatttaaggggaaaacatttggtarggcacggtagctcacgcctgtaatcccaacactttgggaggccaaggcagtcagattgcctgaggtcaggagtttcgagaccagtctggccaacatggtgaaaccccatctctactaaaattacaaaaaaaaagaaaaaattagccgggcatggtggcgcgtgcctgtaatcccagctactcgggaggctgagtcaggggatttgcttgaaccaaggaggtggaggttgcagttagccaagatcacaacacttcactccatctagcctggatgacacagcgagactccatctcaaaaaaaaaaaaaaaaaaaaaggaaagcatttcagcctttcactattaagtgtgattctaactgtagggattttgaagatgctatttttcaaattaaggaagtttcccttagttctaattt

SEQ ID NO: 415124 - DNA, 487 bp, Homo sapiens
ctacattgaagaaaggtgatgagcatggacatcccccacttgttctcaaatttaaggggaaaacatttggtagggcacggtrgctcacgcctgtaatcccaacactttgggaggccaaggcagtcagattgcctgaggtcaggagtttcgagaccagtctggccaacatggtgaaaccccatctctactaaaattacaaaaaaaaagaaaaaattagccgggcatggtggcgcgtgcctgtaatcccagctactcgggaggctgagtcaggggatttgcttgaaccaaggaggtggaggttgcagttagccaagatcacaacacttcactccatctagcctggatgacacagcgagactccatctcaaaaaaaaaaaaaaaaaaaaaggaaagcatttcagcctttcactattaagtgtgattctaactgtagggattttgaagatgctatttttcaaattaaggaagtttcccttagttctaattt

SEQ ID NO: 415125 - DNA, 487 bp, Homo sapiens
ctacattgaagaaaggtgatgagcatggacatcccccacttgttctcaaatttaaggggaaaacatttggtagggcacggtagctcacgcctgtaatcccaacactttgggaggccaaggcagtcagattgcctgaggtcaggagtttygagaccagtctggccaacatggtgaaaccccatctctactaaaattacaaaaaaaaagaaaaaattagccgggcatggtggcgcgtgcctgtaatcccagctactcgggaggctgagtcaggggatttgcttgaaccaaggaggtggaggttgcagttagccaagatcacaacacttcactccatctagcctggatgacacagcgagactccatctcaaaaaaaaaaaaaaaaaaaaaggaaagcatttcagcctttcactattaagtgtgattctaactgtagggattttgaagatgctatttttcaaattaaggaagtttcccttagttctaattt

SEQ ID NO: 415126 - DNA, 487 bp, Homo sapiens
ctacattgaagaaaggtgatgagcatggacatcccccacttgttctcaaatttaaggggaaaacatttggtagggcacggtagctcacgcctgtaatcccaacactttgggaggccaaggcagtcagattgcctgaggtcaggagtttcgagaccagtctggccaacatggtgaaaccccatctctactaaaattacaaaaaaaaagaaaaaattagccrggcatggtggcgcgtgcctgtaatcccagctactcgggaggctgagtcaggggatttgcttgaaccaaggaggtggaggttgcagttagccaagatcacaacacttcactccatctagcctggatgacacagcgagactccatctcaaaaaaaaaaaaaaaaaaaaaggaaagcatttcagcctttcactattaagtgtgattctaactgtagggattttgaagatgctatttttcaaattaaggaagtttcccttagttctaattt

SEQ ID NO: 415127 - DNA, 538 bp, Homo sapiens
ttttctgaaagatagacaaaattgacaaacctttagcctagaataactaaggcaaaaaggaaagactcaaataaataaaattataaataaaagaggagacattacaactaataccacagaaatataaaggatttcttgaacaagaaaactgctatgaacaattatatgtcaataaattggcttaacctaaaagaaatgaacaaattccaagaaacatacaacctaccaagatcaaatcatgaaaattagaaaatctaagcagtccaataacaagtaaagatattgaatcagtaattaaagacattctataaaagaaaatccaaaaacctgaaggcttcgctggtggattttaccaaatatgtaaagatgaattaattccaawtctcctcaaactctttcaaaaaactaaacagggaccccttcaaacttattttacaaggctagcattatcctcataccaaagccagacaacagcactccaagaaaagagaattacaggacaatattcctgatgaacacagatgcaaaaatcttcaaa

SEQ ID NO: 415128 - DNA, 630 bp, Homo sapiens
attgcttaacactgctttcaattttaagctctgaaaaacttacctcctttatattaatatctatatatccatcatcttttcataccctttattaattcatacttttggaaattctggcattaaccatttatgtcttctatggctttactttttatttacttgtgtttatcatatctctgaattcagcaatgtcttctttacccacatcacacttcatcaccattagcacatgtgattgatggtgaaggatacagagaggactcgtgcctgtgtgtcagtgcagagcttagcatgtaatcagagacaatgcctgttagccgttcttatcatcatgaggggactgcagccaatgctaacaatggtacctcaccagtctgtgctctgcactggagcttcactgttaattgactcattcagtctttcaaaccctagtcagctttttgattgcatgaacttgattttgtttagctttataggtctcatgtgcaaaaaggaaacacccctsttttgttctttcctttctcagcaagaacgataaaataaccataatcttttccctgtgtattcaaaatactctgactgaaaacacacttaaattctagaaagctttatagtgatttaaattacaat

SEQ ID NO: 415129 - DNA, 548 bp, Homo sapiens
cccgaacacacacactgcacacacacaatctgataaatggggggaaaatacataaagctgtggtaaatacactaatggcctaacttggtaggagaagagatcagcaatttataattttagcaagaattttttacttgctatctctatataagtggaggaagctttctccatcttaattatttttcaaaatgtagccgctgacaaggtcaacctttggcagatgtcctctataaagaaaaatggttgcggtatgttctcccagaacagtgctttctgttggggaagcttgataacaaaagtgctagagtggaatttcagggcattttcctgtgtgcaactcaggaatactggtccagcagcttcctctggttactgcagccatcagtcttcttccctcctctttgtcaaggaggtagtcttcaccatggtccatrtgtctaccttccagggatatcaagcatcttcttttgtcttaaaccatttttgttacttccatttacaaagatcacggaggcttacagtctcagctgagattcttcaaatttgtg

SEQ ID NO: 415130 - DNA, 608 bp, Homo sapiens
gttactgcagccatcagtcttcttccctcctctttgtcaaggaggtagtcttcaccatggtccatgtgtctaccttccagggatatcaagcatcttcttttgtcttaaaccatttttgttacttccatttacaaagatcacggaggcttacagtctcagctgagattcttcaaatttgtgtattcttstggcatttggggtgatatatatttagatctaggtcatatttaagacccatctgaaaactttctcactattagtggacaaatgctgcatctcataagattcccaggcgcctacaagatcatggcaaaactgtggctggaaattccagttataattcctcccagttgccagtaaaggctgaagacttgttctgattcttctgactatcctcccattgcctctgatgggttgtgggttgttacaatgttgtctcaacactgaggtttgagtgactgaatactgtaatgggtatatgaaatatggaacttaaaggtttccttctttgagctaagctggaggtgtctggtaggctgcatgtcatgagtaggaggttccactatgtgttcttgcagcaccatatacttctcttttgtagcattact

SEQ ID NO: 415131 - DNA, 608 bp, Homo sapiens
gttactgcagccatcagtcttcttccctcctctttgtcaaggaggtagtcttcaccatggtccatgtgtctaccttccagggatatcaagcatcttcttttgtcttaaaccatttttgttacttccatttacaaagatcacggaggcttacagtctcagctgagattcttcaaatttgtgtattcttctggcatttggggtgatatatatttagatctaggtcatatttaagacccatctgaaaactttctcactattagtggacaaatgctgcatctcataagattcccaggcgcctacaagatcatggcaaaactgtggctggaaattccagttataattcctcccagttgccagtaaaggctgaagacttgttctgattcttctgactatcctcccaytgcctctgatgggttgtgggttgttacaatgttgtctcaacactgaggtttgagtgactgaatactgtaatgggtatatgaaatatggaacttaaaggtttccttctttgagctaagctggaggtgtctggtaggctgcatgtcatgagtaggaggttccactatgtgttcttgcagcaccatatacttctcttttgtagcattact

SEQ ID NO: 415132 - DNA, 551 bp, Homo sapiens
atgttatttaaaacactttctcaatacattttakttctcaccttatcaccacggtgtgataatggcccctgaaaccatttccttcatggcctttgcttctatttaaaattattttgcttgtttgtatttacttttattcacagtactcactgtatgtaattctcaaataaattctctgaaagaagagatttttttgtcttattcactgctaatgttttagcatcaagaacaggactcaacaaagatgtatcaatggataagtagaagattaattggcaaatacactgacttccacggggagatgagtatccctaggtggttggtagacctgcctgtcgtcctccccacccagtgtgcccaccaccaacccagccactaaaaaccagaaggagacttgcacaacatccatgtggaaaacgagtttctcctgcctcagcctcctgagtagctgggattacaggtgcctgcagccactcccagctaatttttgtatttttagtagagatggggtttcaccaagttggccaggatggtctcgatctcctgacctc

SEQ ID NO: 415133 - DNA, 551 bp, Homo sapiens
atgttatttaaaacactttctcaatacattttatttctcaccttatcaccacggtgtgataatggcccctgaaaccatttccttcatggcctttgcttctatttaaaattattttgcttgtttgtatttacttttattcacagtactcactgtrtgtaattctcaaataaattctctgaaagaagagatttttttgtcttattcactgctaatgttttagcatcaagaacaggactcaacaaagatgtatcaatggataagtagaagattaattggcaaatacactgacttccacggggagatgagtatccctaggtggttggtagacctgcctgtcgtcctccccacccagtgtgcccaccaccaacccagccactaaaaaccagaaggagacttgcacaacatccatgtggaaaacgagtttctcctgcctcagcctcctgagtagctgggattacaggtgcctgcagccactcccagctaatttttgtatttttagtagagatggggtttcaccaagttggccaggatggtctcgatctcctgacctc

SEQ ID NO: 415134 - DNA, 551 bp, Homo sapiens
atgttatttaaaacactttctcaatacattttatttctcaccttatcaccacggtgtgataatggcccctgaaaccatttccttcatggcctttgcttctatttaaaattattttgcttgtttgtatttacttttattcacagtactcactgtatgyaattctcaaataaattctctgaaagaagagatttttttgtcttattcactgctaatgttttagcatcaagaacaggactcaacaaagatgtatcaatggataagtagaagattaattggcaaatacactgacttccacggggagatgagtatccctaggtggttggtagacctgcctgtcgtcctccccacccagtgtgcccaccaccaacccagccactaaaaaccagaaggagacttgcacaacatccatgtggaaaacgagtttctcctgcctcagcctcctgagtagctgggattacaggtgcctgcagccactcccagctaatttttgtatttttagtagagatggggtttcaccaagttggccaggatggtctcgatctcctgacctc

SEQ ID NO: 415135 - DNA, 530 bp, Homo sapiens
atagagatagatagagatggacagatagaaaaatagacacagatagatagatagatagacagatagatagacaactggacacagattgaccacagacagagatagaaatagatagatagacagacaatgagacacagacagatasacagacagatagagatagatagatagatagatatagatagacagacacagatagagatagagagacagatatagatagacaaatagacacagagacagatagagatagagagatagatggacagatagacaaatagacacagatagacagatagatagagatagacagagacagatagaaatggacagatagaaaaatagacacagatagatagataggtagatagatagatagataggtagatattttcaggatcagattggcttatgcggttgtgggactggcaagtcccacatctgtaaggtagtctggcatctgggaactcagcaggatttctgtggtaaggtctggaggcagaaatccttcttctctgaaaaccccagtt

SEQ ID NO: 415136 - DNA, 490 bp, Homo sapiens
ctcccccaccggctcacacagaaggccaacttcatccttacctttgattaggtaggaatgggcacctgaccctgggaaaatccagctgaggccagcaatgtacatcttgtgacctaaaaggaaaaaagtatatattgtacccaaagtattttttgcagtaattttcagttgggaaatacaaaagctggtaagcaaccaggaaggcaaaaggcagaagcatgtgtarctttaagccagggccaagacaatcaaatttacgtaccaattggcattatgagaaagcagcaaataaaaggttttcaactactgaaaagggcgtggcttcagagagcatcagagatgacataagataaaaatggagacaccaggaaaaaggatgatgatgctgtctcaatgctaattgcagcttccatgaaatctatcataattgaagctttattttcaaataacctgtatatcctgaaagtaactgctagtgcccaactagtga

SEQ ID NO: 415137 - DNA, 490 bp, Homo sapiens
ctcccccaccggctcacacagaaggccaacttcatccttacctttgattaggtaggaatgggcacctgaccctgggaaaatccagctgaggccagcaatgtacatcttgtgacctaaaaggaaaaaagtatatattgtacccaaagtattttttgcagtaattttcagttgggaaatacaaaagctggtaagcaaccaggaaggcaaaaggcagaagcatgtgtagctttaagccagggccaagacaatcaaatttacgtaccaattggcattakgagaaagcagcaaataaaaggttttcaactactgaaaagggcgtggcttcagagagcatcagagatgacataagataaaaatggagacaccaggaaaaaggatgatgatgctgtctcaatgctaattgcagcttccatgaaatctatcataattgaagctttattttcaaataacctgtatatcctgaaagtaactgctagtgcccaactagtga

SEQ ID NO: 415138 - DNA, 490 bp, Homo sapiens
ctcccccaccggctcacacagaaggccaacttcatccttacctttgattaggtaggaatgggcacctgaccctgggaaaatccagctgaggccagcaatgtacatcttgtgacctaaaaggaaaaaagtatatattgtacccaaagtattttttgcagtaattttcagttgggaaatacaaaagctggtaagcaaccaggaaggcaaaaggcagaagcatgtgtagctttaagccagggccaagacaatcaaatttacgtaccaattggcattatgagaaagcagcaaataaaaggttttcaactactgaaaagggcgtggcttcagagagcatyagagatgacataagataaaaatggagacaccaggaaaaaggatgatgatgctgtctcaatgctaattgcagcttccatgaaatctatcataattgaagctttattttcaaataacctgtatatcctgaaagtaactgctagtgcccaactagtga

SEQ ID NO: 415139 - DNA, 490 bp, Homo sapiens
ctcccccaccggctcacacagaaggccaacttcatccttacctttgattaggtaggaatgggcacctgaccctgggaaaatccagctgaggccagcaatgtacatcttgtgacctaaaaggaaaaaagtatatattgtacccaaagtattttttgcagtaattttcagttgggaaatacaaaagctggtaagcaaccaggaaggcaaaaggcagaagcatgtgtagctttaagccagggccaagacaatcaaatttacgtaccaattggcattatgagaaagcagcaaataaaaggttttcaactactgaaaagggcgtggcttcagagagcatcagagatgacataagataaaaatggagacaccagsaaaaaggatgatgatgctgtctcaatgctaattgcagcttccatgaaatctatcataattgaagctttattttcaaataacctgtatatcctgaaagtaactgctagtgcccaactagtga

SEQ ID NO: 415140 - DNA, 582 bp, Homo sapiens
ataatgacacaacctatcgaaacctgtgggatacagcaaaggcggtgctaagaggaaagttcatagccctaaatacctacattgaaaagactgaaagagcacacagtgacactgtaaggtcacatctcaaggaactagagaaacaagaaaaaaatcaaactcaaacacagcagaagaaaggaaataaccaagatcagagcagaattaaatgtaattaaaacaaacaaaatacaaaagataaataagacaaaaagtttgttctttgaaaagataaataaaattaatagacsattagcaagattaacaaataaaagacgagagaaaatccaaataatcttactaagaaagaggagatattacaactgacaccaccgaaatacaaaagataattcaaggctactatttacacctttatgcacatatctaggaaacctagaagagaaagataaattcctggaaaaaatacaaccttactagcttaaatcaagaagaattagataccccaaactgaccaataacaagcagcgagattgaaatggtaattaaaaaattgccagcacattccaggaccagatggattca

SEQ ID NO: 415141 - DNA, 582 bp, Homo sapiens
ataatgacacaacctatcgaaacctgtgggatacagcaaaggcggtgctaagaggaaagttcatagccctaaatacctacattgaaaagactgaaagagcacacagtgacactgtaaggtcacatctcaaggaactagagaaacaagaaaaaaatcaaactcaaacacagcagaagaaaggaaataaccaagatcagagcagaattaaatgtaattaaaacaaacaaaatacaaaagataaataagacaaaaagtttgttctttgaaaagataaataaaattaatagacgattagcaagattaacaaataaaagacgagagaaaatccaaataatcttactaagaaagaggagatattacaactgacaccacygaaatacaaaagataattcaaggctactatttacacctttatgcacatatctaggaaacctagaagagaaagataaattcctggaaaaaatacaaccttactagcttaaatcaagaagaattagataccccaaactgaccaataacaagcagcgagattgaaatggtaattaaaaaattgccagcacattccaggaccagatggattca

SEQ ID NO: 415142 - DNA, 550 bp, Homo sapiens
atatgataatgcaattgggaaaaaaattaaaaaggcaaagaaatcctacttgtattttacygttttttgaataagtgaatttttagtgtgggctttcactgacttatttgatgtcctttttaatataggcaaattgtaaacagtgctagtggttataaaaatcttgcaacttgaacatttatattagaattctccattaatttgtcacattattggaaagagattttggattctgttatttaagaaataattttgaggattttggagagaattaagtgagatgaattatgtaaatgtttaatagagaatctgacaaattgaatgaggtaaggcaaaaatcaatgcttactggatgatccaaaagcaaatggtcgtgatgtaaaatatcttaagtataaaacagactgtaagaatgctacatgccaaaacacatgaaattttctaaaggtgtaccgagaggaaaattttctgaatttaaaaacttgtcttacttggaatattgaagtatttgcataaaaaatcaaatggtggtgttttgtaatctctattg

SEQ ID NO: 415143 - DNA, 550 bp, Homo sapiens
atatgataatgcaattgggaaaaaaattaaaaaggcaaagaaatcctacttgtattttaccgttttttgaataagtgaatttttagtgtgggctttcactgacttatttgatgtcctttttaatataggcaaattgtaaacagtgctagtggttataaaaatcttgcaacttgaacatttatattagaattctccattaatttgtcacattattggaaagagattttggattctgttatttaagaaataattttgaggattttggagagaattaagtgagatgaattatgtaaatrtttaatagagaatctgacaaattgaatgaggtaaggcaaaaatcaatgcttactggatgatccaaaagcaaatggtcgtgatgtaaaatatcttaagtataaaacagactgtaagaatgctacatgccaaaacacatgaaattttctaaaggtgtaccgagaggaaaattttctgaatttaaaaacttgtcttacttggaatattgaagtatttgcataaaaaatcaaatggtggtgttttgtaatctctattg

SEQ ID NO: 415144 - DNA, 525 bp, Homo sapiens
gatgtgccttatggagaaaatacctgtgttggagaagcttcctgccagtgtgagtgatagtgcagttggctgtgygtttaatgctaatgaattaacaatgcatattaggtaaggtgtcattatatagaaacacacataaaacaaggttatgtattgctcagttcatgaaatgtttgtgatcagaggctcacagaaacctaaccctgtaattcccccggggacaatggtttaatatttgttaattcagtgctcacaactaacactaattcatgcaactttatagagcataattacatggataatgagaatcgactgtatgaagaaagcagtaaccagtaaaatcatggtgtgattatagtactaccagaaaaatcagactttaaattattcctagacataaagagggggattttataatgatgaaaatgccaatttaacaagaagaaatcaaacaataaatttgtatgtatttaataacatcaaaatatactaaacaaaaattgtagagaaacaaggagaaataga

SEQ ID NO: 415145 - DNA, 525 bp, Homo sapiens
gatgtgccttatggagaaaatacctgtgttggagaagcttcctgccagtgtgagtgatagtgcagttggctgtgtgtttaatgctaatgaattaacaatgcatattaggtaaggtgtcattatatagaaacacacataaaacaaggttatgtattgctcagttcatgaaatgtttgtgatcagaggctcacagaaacctaacccwgtaattcccccggggacaatggtttaatatttgttaattcagtgctcacaactaacactaattcatgcaactttatagagcataattacatggataatgagaatcgactgtatgaagaaagcagtaaccagtaaaatcatggtgtgattatagtactaccagaaaaatcagactttaaattattcctagacataaagagggggattttataatgatgaaaatgccaatttaacaagaagaaatcaaacaataaatttgtatgtatttaataacatcaaaatatactaaacaaaaattgtagagaaacaaggagaaataga

SEQ ID NO: 415146 - DNA, 525 bp, Homo sapiens
gatgtgccttatggagaaaatacctgtgttggagaagcttcctgccagtgtgagtgatagtgcagttggctgtgtgtttaatgctaatgaattaacaatgcatattaggtaaggtgtcattatatagaaacacacataaaacaaggttatgtattgctcagttcatgaaatgtttgtgatcagaggctcacagaaacctaaccctgtaattccccyggggacaatggtttaatatttgttaattcagtgctcacaactaacactaattcatgcaactttatagagcataattacatggataatgagaatcgactgtatgaagaaagcagtaaccagtaaaatcatggtgtgattatagtactaccagaaaaatcagactttaaattattcctagacataaagagggggattttataatgatgaaaatgccaatttaacaagaagaaatcaaacaataaatttgtatgtatttaataacatcaaaatatactaaacaaaaattgtagagaaacaaggagaaataga

SEQ ID NO: 415147 - DNA, 525 bp, Homo sapiens
gatgtgccttatggagaaaatacctgtgttggagaagcttcctgccagtgtgagtgatagtgcagttggctgtgtgtttaatgctaatgaattaacaatgcatattaggtaaggtgtcattatatagaaacacacataaaacaaggttatgtattgctcagttcatgaaatgtttgtgatcagaggctcacagaaacctaaccctgtaattcccccggggacaatggtttaatatttgttaattcagtgctcacaactamcactaattcatgcaactttatagagcataattacatggataatgagaatcgactgtatgaagaaagcagtaaccagtaaaatcatggtgtgattatagtactaccagaaaaatcagactttaaattattcctagacataaagagggggattttataatgatgaaaatgccaatttaacaagaagaaatcaaacaataaatttgtatgtatttaataacatcaaaatatactaaacaaaaattgtagagaaacaaggagaaataga

SEQ ID NO: 415148 - DNA, 492 bp, Homo sapiens
agaagtatactgtttgtgttactttgattttgcagatgaacaatatatagaaaatttgtaaaattttgttttaatgcccacaaatatgttattttttatttttttgaaataattttatttcgaaaataattataaatacaactatttttgtatgactacaaattaaatccatttaattcagtcaagaaaccgatagactaaaaatatatattttgaattgtttttagtgccttcttcaactttcaaaactgtcccagttagaacaaascggtatatgatacatttctcatgacttagttcttagaagtcttctcttcttctttttccttctcttctcatatacattaactcattaagtgattttatccagtctcacagtttgaagtaccatctatatggtgttaactccaaaatctgcaactctgttgccaatctctcccctgaactttagacaatataatttatctccatgtaaatgtgtaactagtatct

SEQ ID NO: 415149 - DNA, 492 bp, Homo sapiens
agaagtatactgtttgtgttactttgattttgcagatgaacaatatatagaaaatttgtaaaattttgttttaatgcccacaaatatgttattttttatttttttgaaataattttatttcgaaaataattataaatacaactatttttgtatgactacaaattaaatccatttaattcagtcaagaaaccgatagactaaaaatatatattttgaattgtttttagtgccttcttcaactttcaaaactgtcccagttagaacaaaccrgtatatgatacatttctcatgacttagttcttagaagtcttctcttcttctttttccttctcttctcatatacattaactcattaagtgattttatccagtctcacagtttgaagtaccatctatatggtgttaactccaaaatctgcaactctgttgccaatctctcccctgaactttagacaatataatttatctccatgtaaatgtgtaactagtatct

SEQ ID NO: 415150 - DNA, 492 bp, Homo sapiens
agaagtatactgtttgtgttactttgattttgcagatgaacaatatatagaaaatttgtaaaattttgttttaatgcccacaaatatgttattttttatttttttgaaataattttatttcgaaaataattataaatacaactatttttgtatgactacaaattaaatccatttaattcagtcaagaaaccgatagactaaaaatatatattttgaattgtttttagtgccttcttcaactttcaaaactgtcccagttagaacaaaccggtatatgatacatttctcatgacttagttcttagaagtcttctcttcttctttttccttctyttctcatatacattaactcattaagtgattttatccagtctcacagtttgaagtaccatctatatggtgttaactccaaaatctgcaactctgttgccaatctctcccctgaactttagacaatataatttatctccatgtaaatgtgtaactagtatct

SEQ ID NO: 415151 - DNA, 625 bp, Homo sapiens
agactaaaaaataggaggttaaggtgtcaggaaggcacacctgcgagaacacctttatccccagaacagagggaagaggtggagataatttaaattaagaagattgaaagacgggtccagccagcctggaatttagagtatctgaggaggggccctccttgactggtgctgatgcactcagaagccccaaggatggtctggtggagctggsatctagcactctccggagctgatatagggggccctcaatgctgcttgttctgaagtgctggaaacacagcaaactgcttctgacagaacagcctctgccctaggggaaggagcctcactggggaaatgcgcccaggaaaacaagcaggaacagaaagcaagcagaacagaggaagtccgtgctctctcttcttccaggatccctctaatacctcttggcagagtctagccagagccacaaacaaaacagaaatgtggttgcagtgtcctgccccaagcgtgcaaagcacagtggactagagtgggtgtgaagctgagagacaaactggtgaccatgctaattccaccactaggatattgattcaatggaaccatccctgttatactgagacagtgaaattaacagtctcgacaa

SEQ ID NO: 415152 - DNA, 625 bp, Homo sapiens
agactaaaaaataggaggttaaggtgtcaggaaggcacacctgcgagaacacctttatccccagaacagagggaagaggtggagataatttaaattaagaagattgaaagacgggtccagccagcctggaatttagagtatctgaggaggggccctccttgactggtgctgatgcactcagaagccccaaggatggtctggtggagctggcatctagcactctccggagctgatatagggggccctcaatgctgcttgttctgaagtgctggaaacacagcaaactgcttctgacagaacagcctctgccctaggggaaggagcctcactggggaaatgcgcccaggaaaacaagcaggaacagaaagcaagcagaacagaggaagtccgtgctctctcttcttccaggatccctctaatacctcttggcagagtctagccagagccacaaacaaaacagaaatgtggttgcagtgtcctgccccargcgtgcaaagcacagtggactagagtgggtgtgaagctgagagacaaactggtgaccatgctaattccaccactaggatattgattcaatggaaccatccctgttatactgagacagtgaaattaacagtctcgacaa

SEQ ID NO: 415153 - DNA, 510 bp, Homo sapiens
aggtattaaataaggacaccatataaagcatgatccttaattgcattttctgcagaaaaattatgatgaatgtgctcttacattgcaatgcgaaatacggtaataaagtagctataataataatgtaaaatagtaactaaataatagtaacaataagttataatgatgaaagctaatactttttactgatacttattcagttaccattcactttttgccagacattttgcttttcagtcatcatgttcttcaaacctcacaacaaaactgttaggtaacttgccattaaatgagagtcaaacagacaaagaagttctcaaggtatcaggcaaacaccctgactcaggtgtctgaatctaaaatacttgcacttcatatctgacacatttcaatattgtacataygttatacatcacagatgtgtgcattaaacattaatatataataaacataatatctatatctcccatatatataataaacctctttctgtgtggttgaaattattat

SEQ ID NO: 415154 - DNA, 554 bp, Homo sapiens
gatggaactaggggccattatctgaggcaaaacgactcagaaatagaaagacaaatactgcatgttcacacttaaagtgggagctaataataaagtcgagtgtagggtgatggaaaatggagacctggagggatgggagaatgggaggggagtgggctatgtgaggttggtgatgggtacagtgggggaaggccccgacttcaccaccatgtatcaatgtagcaaaattgcacttscaccccatgaatatgtacacatacaaaaacaacaaaaataaacacatacaaataatacaaatcaagataaaaaataaacgaggcctgagggagactgttgccccttccaccgtgtgagggcatagtgagaaggtgctgcctataaaccagaaagtgggcctccattaaacgtgaaatctactggtatcgtgatcttggacttccagcctccagaactgaggacaacacatttctcttgtttataagccacctggtttatggtattttgttattgcagcccaaatgaactaagaaaataataccataatggagttctgt

SEQ ID NO: 415155 - DNA, 603 bp, Homo sapiens
aaaacagggcttgccaaaactgacacgacgaaatggagaatctatgcttattacaccttcacaaaatgaagatmcacgtccatgtgggtgtgtagggtctacagtggtatctcatgtggtttaatctgcatttccttgaggacatgcacttggtgtggaacttttcctgtgctcatttgcttttcgtggattgtctttggtgaggtatcttttagggtctttggtctgttttactgagttattttctcattattgagttttaagtattctttgtatattttggataaccgtcctttattttatatgccttttgcaaatattttctcatagtcttatggcttgtcttttcattctcttgacagtgtttttcaaacagcagaatttttagctttcctgaagttcagtgtgtccattccttcccttgtgggtacagcctgacatggtttggctatgtccccacccaaatctcatcttgaattgtagctcctgtaattctcccacgtgttgtgggagagaccctgtgggaggtaattgaatcatggggttggtttctcccatactgttctcttggtatgaataagtctcatgagatctgatggtttt

SEQ ID NO: 415156 - DNA, 584 bp, Homo sapiens
tgttacattgcactcacagtccagtcaggttctctgcgatgagactggggtcacagttcctggggttgggtgttgtcaaacaaacactgacagaaccctgttatcctcccatggatgactaatgctgtctgctgtgtgtgggctctccttcccgtgagaacacctcattactctttcctgcaagtgaggagggaggccctacatctgcccacttacaccaacagtgcaaacaaaatgctgcaagacaacagtaagcacttagtgtccagggataatacagtttccactaattttgcacattatagcattttggtggaatttttgaaagggtaagagytgccacatgatgtactgttcttattttgaataattcatcatagaacgagtggggagaatgcatggcataaacatggaagcaaagatttgggcttccaagcaatatagttcttctctgaaagacagttttaaatagtaggcatgtgaggagtattacgttgttgtaggccaaaacaatggtgaagtgcatgtgtgtgggagcaaacatactaaagtgctcatattttataaaagggagccaagaagtg

SEQ ID NO: 415157 - DNA, 584 bp, Homo sapiens
tgttacattgcactcacagtccagtcaggttctctgcgatgagactggggtcacagttcctggggttgggtgttgtcaaacaaacactgacagaaccctgttatcctcccatggatgactaatgctgtctgctgtgtgtgggctctccttcccgtgagaacacctcattactctttcctgcaagtgaggagggaggccctacatctgcccacttacaccaacagtgcaaacaaaatgctgcaagacaacagtaagcacttagtgtccagggataatacagtttccactaattttgcacattatagcattttggtggaatttttgaaagggtaagagttgccacatgatgtactgttcttattttgaataattcatcatagaacgagtggggagaatgcatggcataaacatggaagcaaagatttgggcttccaagcaatatagttcttctctgaaagacagttttaaatagtaggcatgtgaggagtattacgttgttgtrggccaaaacaatggtgaagtgcatgtgtgtgggagcaaacatactaaagtgctcatattttataaaagggagccaagaagtg

SEQ ID NO: 415158 - DNA, 601 bp, Homo sapiens
gatactgtagcaaaatgtgaagtaggacaaacctaaacacagaatgtgtaagatagtatggcaacctttaaacagaagatagtttttgcacaccttggataagagtatcaaattcctgtacaaaccgggactcctctgttaggacaacagagcatcccagcaggactgagcytgcaaagggtgcccaaccatgagtgctgggggcacccacccatgttatggacccttgttctgtcttagatgaaaggcaatttctttctcttccagaacaaacactgacagtacgaatattgctaaggcttttttctctcatttcaattggtctgtaaagacaaattcattaaaagagcattgcaaatagcattatcatttgctactaggaatggaaatttcacatactatgaaatgctataagaaaacaagaaatttgtagtaaaatctgagtgactaagaacacaggatgaaatagtcattgctatagaataatacatttctgcatctctcagggaagttaagtcaaataggattaactttagttaattggtagagaaaacaaatatgaatcatttactgactttgaggtgcacgtgtaattgaacag

SEQ ID NO: 415159 - DNA, 566 bp, Homo sapiens
aagaaataccttttttgactctttaatgtagtgaaggtaaaaaggcaatattaattccagtgatgatttgttgaaactaaactattcttactggagtgaaaatataagtggtgaaaaacttttagtggtaaatttggccttttgtttataatttttatatgaaaaatttcttcaagaatgtgtttactatctttctttgttggatgagaaaggaaaaaataatgaagtttatttatgaactaaaatrttattaaaaaaatacccgtacacaaaaatataatattcacagtattagttatattgttcttactaaataatataaaacagttaaggcaatagtaatgagataccagtccgaggagtaatatttcaaagaatattaaaattctggtataacaaattttagaagatggattggtgaggagcagacaatggtcagaacaagaacagggaatacagtaagaggagtgaatccaggtcaaaccatgtgctggacatggctcccttcctgcttctgcatagtacactgatctttctgacctacagctccctactttgagcaggca

SEQ ID NO: 415160 - DNA, 566 bp, Homo sapiens
aagaaataccttttttgactctttaatgtagtgaaggtaaaaaggcaatattaattccagtgatgatttgttgaaactaaactattcttactggagtgaaaatataagtggtgaaaaacttttagtggtaaatttggccttttgtttataatttttatatgaaaaatttcttcaagaatgtgtttactatctttctttgttggatgagaaaggaaaaaataatgaagtttatttatgaactaaaatgttattaaaaaaatacccgtacacaaaaatataatattcacagtattagttatattgttcttactaaataatataaaacagttaaggcaatagtaatgagataccagtccgargagtaatatttcaaagaatattaaaattctggtataacaaattttagaagatggattggtgaggagcagacaatggtcagaacaagaacagggaatacagtaagaggagtgaatccaggtcaaaccatgtgctggacatggctcccttcctgcttctgcatagtacactgatctttctgacctacagctccctactttgagcaggca

SEQ ID NO: 415161 - DNA, 575 bp, Homo sapiens
catgttcctgctgcagttaactagcccaacctattcctttaatttggcccatcccttcatttcccataagggatacttttagttaatttaatatctatagaaacaatgctaatgactggtttattgttaataaatatgtgggtaaatctctgttcaagggtctcagctctggaggctgtgaaacccctgatttcccacttcacacctctatatttctgtgtgtgtgtctttaattcctctagcgctgctgggttagggtctccccagttgagctggtctcggcaagtggcgtccatttcattcgtgggggctgaaatccaggtcaaagkgtcaccagagtgatggttggaatggaaaactagctggaggacacccaagtactcttaaagcaatccccatggtgagtaagaaggggagctcggaagcatcagggtaacaatgggacaagtgtgggatctggttcattctgccttggaactttttcacactgatgacaaggaagaacaagagtatagcaaagtaatagaagaggttacatagcatgtttctttgccagctcaagctaaagcagcaaa

SEQ ID NO: 415162 - DNA, 473 bp, Homo sapiens
agttaactcacacaacctagtcctttaattcagcccatcccttcatttcccataagggatacttttagttaatttaatatctatatgaacaatgctaatgactggtttgctgttaataaatatgtgggcaaatctctgttcacgggtctcagctctggaggctgtgagacccctgatttcccacttcacacctcyatatttctgtgtgtgtgtctttaattcctctagtgccactgagttagggtctccccaaccgagctggtctcagcaaagctaaagtcacaaatggaagattctgtaagagagtaaagctcagaaaaataagaacacagggaggaaacagccctttctcataactgcacttattctatagcttcaataattaaaagtgctgttgacataaatgaacatggatggaaataaaggaaaatgagagaaaaaagaataaatataaaattttcatcattataagg

SEQ ID NO: 415163 - DNA, 473 bp, Homo sapiens
agttaactcacacaacctagtcctttaattcagcccatcccttcatttcccataagggatacttttagttaatttaatatctatatgaacaatgctaatgactggtttgctgttaataaatatgtgggcaaatctctgttcacgggtctcagctctggaggctgtgagacccctgatttcccacttcacacctctatatttctgtgtgtgtgtctttaattcctctagtgccactgagttagggtctccccaaccgagctggtctcagcaaagctaaagtcacaaatggaagattctgtaagagagtaaagctcagaaaaataagaacacagggaggaaacagmcctttctcataactgcacttattctatagcttcaataattaaaagtgctgttgacataaatgaacatggatggaaataaaggaaaatgagagaaaaaagaataaatataaaattttcatcattataagg

SEQ ID NO: 415164 - DNA, 473 bp, Homo sapiens
agttaactcacacaacctagtcctttaattcagcccatcccttcatttcccataagggatacttttagttaatttaatatctatatgaacaatgctaatgactggtttgctgttaataaatatgtgggcaaatctctgttcacgggtctcagctctggaggctgtgagacccctgatttcccacttcacacctctatatttctgtgtgtgtgtctttaattcctctagtgccactgagttagggtctccccaaccgagctggtctcagcaaagctaaagtcacaaatggaagattctgtaagagagtaaagctcagaaaaataagaacacagggaggaaacagccctttctcataactgcacwtattctatagcttcaataattaaaagtgctgttgacataaatgaacatggatggaaataaaggaaaatgagagaaaaaagaataaatataaaattttcatcattataagg

SEQ ID NO: 415165 - DNA, 565 bp, Homo sapiens
gctagttaactgcagcaggagcatgttcttaaggcacagatcactcatgctattgtttgtgtcttaagaatgcctttaagcgtttctccccsctgggcaggccaggtattccttgccctcattcccataagcccacaaccttccagcttgggctttagggccattatgaatatgttacagtgctgcagagattttgtttatggccagtttgggggccagtttatagccagattctggggtgcctgctcccaccataggaggatgtgagaaactttggaactttcatagagacttgttgaatggctttgaccaaaatgctcgtagcgatatggacaatgaagtccaggctgaggtagtctcaaatggagataaggaacttgttgggaactggaataaaggtgatccttgttatgttttagcaaagaggctggcaacatttttcccatgccctagagatctgtggaactttgaacttgagagagataatttagggtatctgatggaagaaatttctaagtggcaaagcattcaagaggaaggagagcataaaagtttggacaatttg

SEQ ID NO: 415166 - DNA, 565 bp, Homo sapiens
gctagttaactgcagcaggagcatgttcttaaggcacagatcactcatgctattgtttgtgtcttaagaatgcctttaagcgtttctcccccctgggcaggccaggtattccttgccctcattcccataagcccacaaccttccagcttgggctttagggccattatgaatatgttacagtgctgcagagattttgtttatggccartttgggggccagtttatagccagattctggggtgcctgctcccaccataggaggatgtgagaaactttggaactttcatagagacttgttgaatggctttgaccaaaatgctcgtagcgatatggacaatgaagtccaggctgaggtagtctcaaatggagataaggaacttgttgggaactggaataaaggtgatccttgttatgttttagcaaagaggctggcaacatttttcccatgccctagagatctgtggaactttgaacttgagagagataatttagggtatctgatggaagaaatttctaagtggcaaagcattcaagaggaaggagagcataaaagtttggacaatttg

SEQ ID NO: 415167 - DNA, 565 bp, Homo sapiens
gctagttaactgcagcaggagcatgttcttaaggcacagatcactcatgctattgtttgtgtcttaagaatgcctttaagcgtttctcccccctgggcaggccaggtattccttgccctcattcccataagcccacaaccttccagcttgggctttagggccattatgaatatgttacagtgctgcagagattttgtttatggccagtttgggggccagtttatagccagattctggggtgcctgctcccaccataggaggatgtgagaaactttggaactttcatagagacttgttgaatggctttgaccaaaatgctcgtagcgatatggacaatgaagtccaggctgaggtagtctcaaatggagatraggaacttgttgggaactggaataaaggtgatccttgttatgttttagcaaagaggctggcaacatttttcccatgccctagagatctgtggaactttgaacttgagagagataatttagggtatctgatggaagaaatttctaagtggcaaagcattcaagaggaaggagagcataaaagtttggacaatttg

SEQ ID NO: 415168 - DNA, 565 bp, Homo sapiens
gctagttaactgcagcaggagcatgttcttaaggcacagatcactcatgctattgtttgtgtcttaagaatgcctttaagcgtttctcccccctgggcaggccaggtattccttgccctcattcccataagcccacaaccttccagcttgggctttagggccattatgaatatgttacagtgctgcagagattttgtttatggccagtttgggggccagtttatagccagattctggggtgcctgctcccaccataggaggatgtgagaaactttggaactttcatagagacttgttgaatggctttgaccaaaatgctcgtagcgatatggacaatgaagtccaggctgaggtagtctcaaatggagataaggaacttsttgggaactggaataaaggtgatccttgttatgttttagcaaagaggctggcaacatttttcccatgccctagagatctgtggaactttgaacttgagagagataatttagggtatctgatggaagaaatttctaagtggcaaagcattcaagaggaaggagagcataaaagtttggacaatttg

SEQ ID NO: 415169 - DNA, 631 bp, Homo sapiens
gtaacagagggcctaatgtcctctgaataataatggaatggaaggctttcctcaggagactgctgaagtattaaaggtaaaccagaagggttagggcagaagatattctaggcacaagaaactgcataagcaaaggccctgagtggagagcgatcttaacatattgaaggaaaagaaagagaggccctgcggttggggcacaaaaaccacagagaaagtggagccagatgaggttgcagagctaagcagaacttcaatcatgtgagttttaaggctcattgcattaraagtaatggcaaaaaccacaattagtttgcaccaaactaataagacaaatccaggctcaatttaataacaagttgaaattcaatggtgttttaatctgagagatgaaatatagtaacaggaatatttacccatatttctggtattcaaactaattgtatgataagcatatagatcctgggccatgttcactggaatcagggcccaagttagtgaagaagaatgtggaaaacacgacctattaattgctagggataagggtttgcaaagagtaggctggattggaaggacattgatcaaggagaaagtgtggactgagctgtgcatggctgttagcctggtagga

SEQ ID NO: 415170 - DNA, 631 bp, Homo sapiens
gtaacagagggcctaatgtcctctgaataataatggaatggaaggctttcctcaggagactgctgaagtattaaaggtaaaccagaagggttagggcagaagatattctaggcacaagaaactgcataagcaaaggccctgagtggagagcgatcttaacatattgaaggaaaagaaagagaggccctgcggttggggcacaaaaaccacagagaaagtggagccagatgaggttgcagagctaagcagaacttcaatcatgtgagttttaaggctcattgcattaaaagtaatggcaaaaaccacaattagtttgcaccaaactaataagacaaatccaggctcaatttaataacaagttgaaattcaatggtgttttaatctgagagatgaaatatagtaacaggaatatttacccatatttctggtattcaaactaattgtatgataagcatatagatcctgggccatgttcactggaatcagggcccaagttagtgaagaagaatgtggaaaacacracctattaattgctagggataagggtttgcaaagagtaggctggattggaaggacattgatcaaggagaaagtgtggactgagctgtgcatggctgttagcctggtagga

SEQ ID NO: 415171 - DNA, 527 bp, Homo sapiens
cacaattagtttgcaccaaactaataagacaaatccaggctcaatttaataacaagttgaaattcaatggtgttttaatctgagagatgaaatatagtaacaggaatatttacccatatttctggtattcaaactaattgtatgataagcatatagatcctgggccatgttcactggaatcagggcccaagttagtgaagaagaatgtggaaaacacgacctattaattgctagggataagggtttgcaaagagtaggctggattggaaggacattgatcaaggagaaagtgtggactgagctgtgcatggctgttagcctggtaggaaaccagggcacaaattgtaggggggggacgggkgtatagaaaggcaaaacactgctacacacacttggatattttcttttccttccggaaagaattagttggaagtgtgtttccttttgttaatattctagtattatttgcaagataccagatgactgcatttggttcctattgctggtgtaacaaattgctgcaccct

SEQ ID NO: 415172 - DNA, 609 bp, Homo sapiens
attttaaaaacgtaccattcacaataggatgaaatacatgaaataattggatattaatatcataaagtatgtgtagggtctgtacactgaaatgtagaaaatcctgatgaaagaaatcaaagacaaaacagagatataccatatccatggcctggaaaagtcactgttgctaagatgtcagttcacytgcaactctccacacactcaacacaactttaacaaaaaatccagcagcattttttagaaaaaccaaagatttaattttaaaattataggaaaataaaaaggcacatctataagtaaataaataaataagaacaaatttgaaggattcacactacctgatttctagacctattataaaatttcagtagtcaagtaatacagtaagagactattaataatcatgcagataaaggaaacagaaaagaaaggccagaaatatacccacctatttacagtcaattgatttttcagtaaaaatgccaaggcaattcaataaagaaagaaaattttttttcaacaaaagggctgggacaattgtatactcatatgcaaagacaaacaaacaaaaaacacaacatcaatttctaactcatatcctataca

SEQ ID NO: 415173 - DNA, 588 bp, Homo sapiens
cattacagactgcttttcctttgtgctccaaaaacaagacataacaaaccaaatcaaaacaaaacacagttttggatataatgttatcagattaaatcacctctacctcttcactgtggcttttccctgctggttccaacggcatcccmttcatttccctggatcactaggcctatttaactcttcgtgatttcaatattcaatgctcaggactcagttccttgtccttctctcctccagtgagttttctccctttgctgcctcagccatccccccatgatcttaccctagctctttccatcactgtaaccctccttagctttaatttaatgcatcccactatgcaccccacctcctatttttaaaatatttcttccagtaccttgaactcaacaatctttcaacctcatgggaacttttattctactgattctaccaacatttttgtcaggcaattactccttaatggtctcactccactttctacccaatttaaattctatagtaggggtccctgaccctggggctgctgactgggactggtctgtggcctgttagtaactgggccacacagcaggaggtgagcag

SEQ ID NO: 415174 - DNA, 588 bp, Homo sapiens
cattacagactgcttttcctttgtgctccaaaaacaagacataacaaaccaaatcaaaacaaaacacagttttggatataatgttatcagattaaatcacctctacctcttcactgtggcttttccctgctggttccaacggcatcccattcatttccctggatcactaggcctatttaactcttcgtgatttcaatattcaatgctcaggactcagttccttgtccttctctcctccagtgagttttctccctttgctgcctcagccatccccccatgatcttaccctagctctttccatcactgtaaccctccttagctttaatttaatgcatcccactatgcaccccacctcctatttttaaaatatttcttccagtaccttgaactcaacaatctttcaacctcatgggaacttttattctactgattctaccaacatttttgtcaggcaattactccttaatggtctcactccactttctacccaayttaaattctatagtaggggtccctgaccctggggctgctgactgggactggtctgtggcctgttagtaactgggccacacagcaggaggtgagcag

SEQ ID NO: 415175 - DNA, 492 bp, Homo sapiens
ctctagtcagagctaccaagctctccaacatctagttaacctcttgatctcaaggtgccttgctgaccactcgactttctggctctcagtgaggcatactcttcttgtttcgtttcctgatgccagtgcactgcttttcagtctcttttgttgaccccgatcttcactggttaccatgttgtagctatatttacttataaaagtttcaaagagatcataggaatgtcgtgtttaaatctttaaatggcttctcccttcacttaggatcttttcactgtactgcattcacaggacccctacasttaaccaccaatcattcttcagatcagtctccctgtggaaagcaatccttgctccttctaagagcaccttgagctttgcgttggcttgctaggggtgccatacaaaagtgctacagatgggttactcaaatacagaaagtaccccatctctagaggctggaagtccaagatcaaagatgtcagcaggttt

SEQ ID NO: 415176 - DNA, 587 bp, Homo sapiens
ccttctccagcagctaaatacaaagaatgcaaataatcaatatccagtctcctagtccaggttctcattattggatctaataatgccaaagcaaacacgggtacaaggaaaatctattctttctgtgcygttgcatcctttcttctgcccttggtcaggctgaacaagacatagttccttatgtgtaggctgttgtccgacaccagatggttagacgttatgtagcaatcatataaaattaatttaactttttactttatggttaaacacaattactgttctttggaaaaaaagaaactttacacaaatacacataaagtaaaaaagctgtcattcagaaagttgtccctgtcatcatatttcccatgtgtgtctaattttatatgcatatattaaaatatgcatgcatagtttatgcaaacatacacattaaatgaaaaggcaagtactctagtcagtgatttttcaggtgctttatctttatagtgatctttctgattgtgaaaaatgctttagatcttttaggtttcaccattagatctatctcttgtgtccatgtagaactggttttggtacattctgtaatg

SEQ ID NO: 415177 - DNA, 587 bp, Homo sapiens
cttgtgatcttcccaaatctgtacttattttactgtttactaacacagcaatggcactatattgcaatcattctgcaattaagagagcttcaagtcatcttgctgttttcttttttttccccaatttccaatgaatcaacaagtcctgttgatttatcctgttattactatttgaatttcaactcttaacatcatcaccaggctacctagattaccacacaacctttgaatgtgattttctatctttactgttgctttactccatatcttttccaccctgcagtaataaggagcttccaaaactgcaaatcaaatattgtctctctttcaacatcatcactggaataattgctgtaacattttggggtgccattcctgcctagctctttagctttacctcttgccattgacacatttaattttatctttttttttttaatctggtaaaaaagaatctatgctttgtcagcaaaaaaagatgtttctctcccagtaaagaggatatacatattgcaaataagcatgtgaaaagatactaaacatttgccattkgggaaatgcaaactaaaacaataatgagatactgc

SEQ ID NO: 415178 - DNA, 510 bp, Homo sapiens
aaagttgaaagcgttccctctgagaactggaacaagacaaggatgcccactctcaccactcttctttaayatagtgctggaattcctagccagagcaatcagtcaagagaaagaaataaaaggcatccaaattggtaaagagaaagtcaaactgtcactgtttgctgatggtgtgattgtttacctagaaaccctacaaactcctccagaaagctcctagaacttataaaaaaattcagcagtttccagatacaaaattaatatacacaaatcagtagctcttctatatgccaacaacgaccaagctgagaatcaaatcaagaactcaatccctgttacaatagctgcaaaaaaaaaaataaaataggaatataccacaccaaggaggtaaatttttagtttctagtttcctctacaaggaaaactacaaaacactgctgaaagaatcatagatgacacatggaaacacatcccatgctcatggatgggtagattcaatattgtgaaaat

SEQ ID NO: 415179 - DNA, 395 bp, Homo sapiens
gatggtgtgattgtttacctagaaaccctacaaactcctccagaaagctcctagaactkataaaaaaattcagcagtttccagatacaaaattaatatacacaaatcagtagctcttctatatgccaacaacgaccaagctgagaatcaaatcaagaactcaatccctgttacaatagctgcaaaaaaaaaaataaaataggaatataccacaccaaggaggtaaatttttagtttctagtttcctctacaaggaaaactacaaaacactgctgaaagaatcatagatgacacatggaaacacatcccatgctcatggatgggtagattcaatattgtgaaaatgctcatactgccaaaagcaatctacaaattcaatgcaattcccatcaaaat

SEQ ID NO: 415180 - DNA, 550 bp, Homo sapiens
agaaaatatccacttttattcttccacacattggtcttaggtggtcttggctcttttttttttttttcatataagtttaagaatctgcttgccaacttcaacaaaaactacctgctgggattgtaattaaaattaagttgaattaatagataagttggggcaaagcatatgtttacaatattctgggtgcatcccagcccaggccactcttgccacccgcctttcaaacatgaatttggtatatcctttcatttacttagtttttttttttaagtttcttttaatactgtcttgtaattttaaagtaatagtcttatacttaaagataaatttgcattagatatttctggtgttttcctattactaaaattgatatctaraagaaaacttttccttatgtttgtcactaatgtatatataaatacattgatttattgattaatttttgtgtgttgatcttgtgtccagccacctagttacatttaattttaattgcctattttcagtgtcttttgaattttgtatatgtactgtcataatctctgcaaat

SEQ ID NO: 415181 - DNA, 550 bp, Homo sapiens
agaaaatatccacttttattcttccacacattggtcttaggtggtcttggctcttttttttttttttcatataagtttaagaatctgcttgccaacttcaacaaaaactacctgctgggattgtaattaaaattaagttgaattaatagataagttggggcaaagcatatgtttacaatattctgggtgcatcccagcccaggccactcttgccacccgcctttcaaacatgaatttggtatatcctttcatttacttagtttttttttttaagtttcttttaatactgtcttgtaattttaaagtaatagtcttatacttaaagataaatttgcattagatatttctggtgttttcctattactaaaattgatatctagaaraaaacttttccttatgtttgtcactaatgtatatataaatacattgatttattgattaatttttgtgtgttgatcttgtgtccagccacctagttacatttaattttaattgcctattttcagtgtcttttgaattttgtatatgtactgtcataatctctgcaaat

SEQ ID NO: 415182 - DNA, 505 bp, Homo sapiens
ctcccttggtttaatgtagaggaaggtatccaaaggcctagagagattgggatggtggagtggattagtcactttagacctactcatcccagctgggaaggtccagaagatatacccctgaccaatgccttctgatattgtttgtgataggtgtgtgggggcagcacccgcatctttgaagagccctgtaattgctcttctctgtatgtcagatctaatggtgggaaatgcggtcactcagctacaaaatttaaattcagtgggaatcattggatcccaaggtggcaggggccaagtggtggcactcagccatcaaaggcaaggtgggtgtagttaccataatggacagcagaggcaaagtggcagtcagaatagtctcacttgtgcagagctctggcattggctaattaatcrcggtgttcctagagatgaaactgataggatgcctactgcattcctacttaatttatataaggagaaaacttctaggttgaatggacaaaag

SEQ ID NO: 415183 - DNA, 590 bp, Homo sapiens
gtgcccagctatggtttgtgggttgtggtccatgggagagacttgaagaagtctgttataagttgcatgatgaagcaaaccaaattcagtaactgctttggtaaagttatgtcgtttccttatttgtaagatccaggtgaaaatttcttggctatgtcatcacagattaattagcagtctgtggttgactaggcctgaatttttttcttcaatatagtaatttccaagaaatgcaatattttttttgagagggagtcttgctctgttgtccttactggagtgcaatggcactatcttggctcactgcaacttctgcctcccaggttcaagcagttctcacgcctcaggctcccaagtagctgggattatgggtgcccgccaccgtgcctggctaatttttgtatttttagtagagatggggtttcaccatgttggccaggctggtctcgaactcctgacctgaaawgatctgcccttctcggcctaccaaagtgctgggattacaggcatgagccaccgcccctggccataagagatacatttgagttagattttttttttaagtgagagctgagaaaaatcaatccacc

SEQ ID NO: 415184 - DNA, 554 bp, Homo sapiens
aagtttttgtgtgcagatgattttatcactcaggtactaagcatagtacccaatagaatttttgtctgattttcttcatctctgaccctccacgctgaactgggcttcagtgtctgttctcttatttgtgtccacgtgttctcattattttgctcccatttataagtgacaacatacagtatttgattttctgttcctgcactagttttctaaaaatgacggtctcctgctccattcatgttgctgcaaaggacatgatgttttcctttcttatagctgcatcatatttcatggtgtgtacatccacattttctttatccaatctaccattgaagacatacaggtttatgtcttgtttttcatatcgtaaatagtgctgtaataaacatgtgtgtgcatgtgtctttatggtagaataacttacattcattggttatattcccaattgtgggattgctgggtcaaatggtaattctattttcaggttattgaaaaattgccaaactgtttttctcaatggttaaacaartttatacgctctccagcagcatata

SEQ ID NO: 415185 - DNA, 607 bp, Homo sapiens
tgtttttattattccaagcctattgttgatattcttatttttctaattttatttaggtgtctggttttccatttttctcactgagcataatatggattatcttatgtttttaaaattaatatatgcctctttatttttgtagttgctttttcaaaatttttgatttttttgattagaccatgttgtcttcatgttttgtatacattgtaatctttggttgagatttaaacattaacataaaactacctttcacgatctttataatgcagctctttcytggcatagcctgaaaccaattttctttcttggctagagattcacagagtctctcaaacatgttctcaggatgtgtcttgtctgcaattttgtatttatttttccattaaaagacttctccatgtttcttcttaccagtaggtagctactttccacacctattttctatccatgtactacagtctttctgctgttgtaacattcacctttgatctcaaaagacttaaaggtgtcatttcaaagcatactaccatttgattcagcactttctatcatggaagacagaaaggcctccataagccaaaaataaagatataggtgccagtatttt

SEQ ID NO: 415186 - DNA, 552 bp, Homo sapiens
aactcagttttacataattcatgacaaaaataccaggcagaccagtaagtaytctcctagaattgaacttatcgtgaaaaagcatacccaattatttaatttcaacactggaaaatgttgaaaaaataatgaacttatcaataataatttgacattgaaatttcagagaattctactcttctgtaatagaatatcgaactttgaacatcttaacatatttcttgaatgcacaaattgtgatgtagatcatttctcttttagattaacacaataagactaacaattagagagaacatttgaaataaaataacagtcatcagaaccacatctttcaatgccttggcataattgccatgctctttgaaatggtcaagaagcaaagacaagattttggctttgcccaattattaagtacttgaccttttaaaatctaatatcctggctaaaaaattaggagggaatattttttaggtggctgcctacagtgtcaaaggcaatatgagaagaattttgatagttaggcaggaaaatgcatattacatacccacacta

SEQ ID NO: 415187 - DNA, 588 bp, Homo sapiens
cattgaaacagtgaagaagggtgatataaatggaatgaagtacaattgttaataaaaagtagcatgacccatagttaacccggaccacacacagactactcaccagttgtcagggagtcaaacacgtgtatctgtggaccaaaccgatgacacttctccacacctaccaaagggaattgggttcccacatgcacttaggaaaaaagaaagaccacgtgggcaccagatattgggtgaaattcacccccgatatttcacgtgggtccttttctactttcccctaagtgtcggctggtctgagaaataaagggaaagagtacaaagagagaaattttaaagctgggtgttggggggagacatcacatgtcggcaggttccatgatgccccccaagccacaaaaccagcaagtttttattagtgattttcaaaaggggaggaagtgtacgaatagggtgtggatcacagagatcacatgcttcacaaggtaataaaatatcacaaggcawatggaggcagggtgagatcacaggaccacaggaccgggcgaaattaaaattgctgatgaagtttcaggcacgcattgtcat

SEQ ID NO: 415188 - DNA, 552 bp, Homo sapiens
tcatatcttaggtaacatgcatctgagtcttccaggcagctgtcctcaccttggctgaagtaaattctttaaaattttatttttttgcccctgcttcttcctttggattgatatttctggtgctgtgagcaggattcagagggacacccccaaccatccaacatccctcttgaactcagaaactagtcaatgagaaccccttgtattcttccagctcccagtacattgttgagtgtaaggggtgagtcctcctgaattcagatctccctactatttcatgaggtcaagactttgcttgagctgttcttttcaaccctcactttctagaaaaaatatttccatttttggctaaagtcaggagattttaatttcaatatttttaactgctttctctgctactgtctcaagacagaaaatctgggtcataatactggcagtctagccctggtggttttacttcttttgttctaaaattaggtaacrtgctttaaaaaacacagctgttttctattgcttctaatttgaacttgactttttgggaccttcaaagca

SEQ ID NO: 415189 - DNA, 608 bp, Homo sapiens
catttcctctgtcttttcccaggtagcattcccaaagctaagccctgggattctgtttgaaatcatgctaaatagaacagacgcggaatcttactacactcactgtgggaaatataaaaggtaaatgagaattttcaaccaatggaatataaactatttttttctaaaatctacctcttttcttttagaaaattttttttttaatctttcaagctctaatgataaaatccattatacaattaatgaaaaactgaagttgaaataactgaacatatatattgaaggtgacaaacacagggagaagtagtgctgactggaacacaaatgttttagactcatgtgtcaatcacttgagagattctcccacccccattctgctcactaaagtacttgatcatcactctcccaaaagatactgcacttgccccctgtgtggcagatgtgtattttgctttgcaaatttatacactccctcactagagtggatctttcctgtactttgggacagttattctccttcacaagcctgagagaaaccagagggcaagatgcatttgtgccttttcccctcaataycagcacctgattggttgaccaccaatgtgtct

SEQ ID NO: 415190 - DNA, 586 bp, Homo sapiens
ctgttggtgtttttattgaaaattaataagcatgtgatacattttttatcattcttcctcatgatttctttactatatgattcttctcatatgtggtacttaagagtagttaaagtcatagaaaacaccaagtaggagagtgtttcccaggggctacagggagaataaggagttgtttaatgggtacagtttcagtttcaaaaaatggaatatgctttttatatatggaaatgatggtagcaaaataatgagtgtacttaattcatctcaatggaaacctttaaaatggttaaaatagttaattttatgtgtattttaacataatgtataaaattattttaaatttttatattattttttaagagacagagtcttgctctgttacccagaygggagtgcaggagtgcaatcattgcttcctgtagccttgaacttatgggctcaactgatctttctgcctcagtcttctgagtagctggaatagcagacacatgccaccgtgcctggctaatttttaatttttttgtagagagagggtctcactctattgcccaggctggtctaaaattcccagccacaagtgatc

SEQ ID NO: 415191 - DNA, 477 bp, Homo sapiens
aagcatgattaatgccagaataagcagtgaccacttggaaagcaaaagggagcatttttctttctcctgtgggtagtccctgacttctgtcattactttctggattcaggaatgatttttaagttcatcctgcctctggaggaaccgtaggccctgagtggtaaacaccttcacttaatcctgcaacaaagctttctcttgacaatyatgacctctgtgatcatgagcttctaagcaatctggacaatacacaacctgaaaacctatggaagggagatgagtaggtctgagggaaacaatttcccactttttcccttggcaagttgaaaaaattatgatggcagacaaatgtgcagaagaggacagcatactataattcctcatcatgtgagtttgcaactaagagtttttaatcctagctgtgagagctccgaatgaaaaccagaagttacgtcactgcatctatcagtgattaga

SEQ ID NO: 415192 - DNA, 564 bp, Homo sapiens
tttgcctagctcctgagtgatttaataatcctgcctaagtgtarcccacaaatgagatttggaaaattacctcagctgagcatcttggtgatttgactctcctgtgttaacaatatcctcaggaagaattgtaacatgtctctggacttaaccatctaggttacctgactctcctctcctgcctggaccctgcttgcactagggattgtagcatttctaagcactgcgtccaaataatatgattctcttgcctggtcctttcaacaggagacattgtgacatatctctgggcctatcatttaggtgatatgagtctcctttctggacactgcccacaaggggcattgtgccatacatctggaggtaacccccaagttatgcaacttttctgccaggaacaggcctatatggagaatattggaaaatttcaggctcagcatttatgttatttagctgtcgtgcctgtttcattactgtagagtaaattgtgacatacacctaggcacagttcacaggcatgataatgactctcatatgtggatcccacaaataggattaattttg

SEQ ID NO: 415193 - DNA, 610 bp, Homo sapiens
actgtttgagtgcacacatttgttaaaagtctcacacccactcyagtatttctttgatcttctaaggcattctgatggtcatagtgattttgaaggtcaggttcctccttcctctgaattgggtcagtcagtgaaccttcttgctgtccccatgaagggtccctgttaggtctcacggcagcccggatctggaacagccctgttctattcttgaaacaaacacccagtcgctgtggtgttggtgggagcagcagttgattctaatgagggtttgagccacccctctatcctcttcccagtagcaccgagcatctcacttctcagagctccttcatccttcttgactctctttcttctctcttttccagtgtcccgtctctcagtggcttacttcgttcttgtttctcacaagccagccctgtgtctcctttttcttatgtacacggattccattttccccatctccagagtagaccttttgcacttctgatgatttggctaaggctttgctgtcactgcctgtaaggatctaccagattaaatccttaaatcaagaccaccctactcccaagcatttgtcttgcaattgggaatgaaggtgaaggtggtt

SEQ ID NO: 415194 - DNA, 610 bp, Homo sapiens
actgtttgagtgcacacatttgttaaaagtctcacacccactccagtatttctttgatcttctaaggcattctgatggtcatagtgattttgaaggtcaggttcctccttcctctgaattgggtcagtcagtgaaccttcttgctgtccccatgaagggtccctgttaggtctcacggcagcccggatctggaacagccctgttctattcttgaaacaaacacccagtcgctgtggtgttggtgggagcagcagttgattctaatgagggtttgagccacccctctatcctcttcccagtagcaccgagcatctcacttctcagagctccttcatccttcttgactctctttcttctctcttttccagtgtcccgtctctcagtggcttacttcgttcttgtttctcacaagccagccctgtgtctcctttttcttatgtacacrgattccattttccccatctccagagtagaccttttgcacttctgatgatttggctaaggctttgctgtcactgcctgtaaggatctaccagattaaatccttaaatcaagaccaccctactcccaagcatttgtcttgcaattgggaatgaaggtgaaggtggtt

SEQ ID NO: 415195 - DNA, 678 bp, Homo sapiens
ttttttccacatgtggaattgtgtcctattgctaggtccagcacgaaattaatgttaccctccttcctagggcctgcctagagagggcattgtaacatgttgcttggcacagcacctaaaggatattacycccctgcctagttttttgcccacaaatgggattatgacatataccgcgcttccattctcagacttgacaattaagcttatactgagattcaaacaataagagatatttgcctctcatagctaggcttagggcaataggtaaggttctgagttgcatatttgtacaaagctcacatagtttaaaacatgaatgtgtattgtatgaacttttggggtggtacagagagtttcataacagggcccagctaaacgttaagattgtgactttcaccacctcttatgatggcgcttgtctttcatgtgcatctgattcacatctttaacaattgtgttcagagcccctgcttcctttcagacagagggtacagaaagtgcatttctcccaggagcccaggctttactcacctcctctgtgaagctaaagacaaaagtgctacagagctcagaggctgctttatacagaggttttatatgcacaaaactgagtcttggtgtgtggattggtctaaattacattttgaatttattttctctcccaatacctgtaaa

SEQ ID NO: 415196 - DNA, 635 bp, Homo sapiens
catctttaacaattgtgttcagagcccctgcttcctttcagacagagggtacagaaagtgcatttctcccaggagcccaggctttactcacctcctctgtgaagctaaagacaaaagtgctacagagctcagaggctgctttatacagaggttttatatgcacaaaactgagtcttggtgtgtggattggtctaaattacattttgaatttattttctctcccaatacytgtaaatctggtgtttgtaaaataatatctgtgccttttttggtgctggccattcattccagaaagtttgtattgctttccatatggattttcaagttgctactgattgctttgggtgcaatgctctaacatatgaaggtgaacttttgtgattggtgacctggtattgtgtttttaactaacttcaattctcacagtattaatcataattccaagaagactattttatgataatatttatggactttgaaaatctgacataaagtcccctgtttcagcagcaagtaaacattaatttttaaaggttagtgtttttagaaacttctgctaaacaacaatctgattattgttgttggaatataacccaggtattattacagcagctgcccactgtcagttttgtgat

SEQ ID NO: 415197 - DNA, 634 bp, Homo sapiens
cccacaaatgggattatgacatataccgcgcttccattctcagacttgacaattaagcttatactgagattcaaacaataagagatatttgcctctcatagctaggcttagggcaataggtaaggttctgagttgcatatttgtacaaagctcacatagtttaaaacatgaatgtgtattgtatgaacttttggggtggtacagagagtttcataacagggcccagctaaacgttaagattgtgactttcaccacctcttatgatggcgcttgtctttcatgtgcatctgattcacatctttaacaattgtgttcagagcccctgcttcctttcagacagagggtacagaaagtgcatttctcccaggagcccaggctttactcacctcctctgtgaagctaaagacaaaagtgctacagagctcagaggctgctttatacagaggttttatatgcacaaaactgagtcttggtgtgtggattggtctaaattacattttgaatttattttctctcccaatacctgtaaatctggtgtttgtaaaataatatctgtgccttttttggtgctggccattcattccagaaagtttgtattgctttccrtatggattttcaagttgctactgattgc

SEQ ID NO: 415198 - DNA, 567 bp, Homo sapiens
taattttttagggggaagaggaggtactggtactggcatcattcaatttaatgcttgggtcacctctggattcattatcacagtcttagcttttggtcatattacattgtatttttctgccatatgaatactctatttaaattaattgtgagatgctgattaataatctttagcaatgaaacgaagcctactagcattttatcttgctgcagaaaagatgggagtctacttctgggttatggtcagggttcctagcacacctggatgccctttagatagtcagccctctatatactcagcaactgaggtcatcagtgcaggctcagcccctacaaaggccagggtatttcctgtccacctctattgctggtgtgtgattcttctgggttccaaccaaagccagtggacttcagtaggggtcaccttcattggcagaccctcaatccacttcttttccayctaatcccatgcatgtgtgcaaaagctgctctgcttctttgcatctcagtagtccctttcagaatccaaagatgaaactcagggaaatgggctccaaatgtgagactg

SEQ ID NO: 415199 - DNA, 563 bp, Homo sapiens
gcagaggaaaatgtaaaattgattatggaaaaaatagacatctacatgtgagttcagaaattgaacaccagcctcttgggaaacttccattggagtgttttgttttcaacttttttacaatgtttagacccagttaacacagaaatagaaacaaatggtcagaagacatatctaaagagagaattcacacaagggagaacaaagtacyttaagatttaacagtgaccaaaacatgtgaagtagcaaaacatctcctgaccccaatgcaggtcaggctgtgaggaatctaggttcataccagcctttctagggattgtgtgagtttttgtcatccttagaaaagcatgttgttgtaggatcagccgcattcttcaaactgactgtgcctgttgagaagcccagctttttctgccctgtgaaatatggcaaagacattaatacaaggagaatggagctttatgataaaagatgacaagtgaaggatgaattagggacataccaagaataggtaagaaaattgtcaactcagaaaccatcaggcattaagtaaagcaggaggaatc

SEQ ID NO: 415200 - DNA, 618 bp, Homo sapiens
cactttttagcatctacgaaaagagtgtttggaacctgtttcatcaaaatgcacgttcaatgctgtgtttaaaaagagcacatcacaaaatgttttcatagagggcttgtttctagtttgtagagctggatattcgtatgttctcataaaaactcaataggcaaggaaatgtcacttttagattctaygtaatttttgcttggaacctgtttcattaaaacacaggttcaattctgtgatataaaacagcacatcacaaagagttttcacagatagcctgtttctaatttttaagacgatatttgtatatttttataagggctcactaggcagggaaacgtcacttcttagattctacaaaaagattatttggaacctgtttcatcaaaatgcaggttgaattcttggatataaaatagcacatcccaaagcattttcacagatgtcttgtttctaatttataaaactggatatttgtatggtcctagaagtgctcattagtcttggaaatgtcactgcttagattccacaaaaagagtgtttgaaacctatttaatcaagatgcagtttcaatttcatgatataaaacagcacatcacaaagtattttcacaagtag

SEQ ID NO: 415201 - DNA, 618 bp, Homo sapiens
cactttttagcatctacgaaaagagtgtttggaacctgtttcatcaaaatgcacgttcaatgctgtgtttaaaaagagcacatcacaaaatgttttcatagagggcttgtttctagtttgtagagctggatattcgtatgttctcataaaaactcaataggcaaggaaatgtcacttttagattctatgtaatttttgcttggaamctgtttcattaaaacacaggttcaattctgtgatataaaacagcacatcacaaagagttttcacagatagcctgtttctaatttttaagacgatatttgtatatttttataagggctcactaggcagggaaacgtcacttcttagattctacaaaaagattatttggaacctgtttcatcaaaatgcaggttgaattcttggatataaaatagcacatcccaaagcattttcacagatgtcttgtttctaatttataaaactggatatttgtatggtcctagaagtgctcattagtcttggaaatgtcactgcttagattccacaaaaagagtgtttgaaacctatttaatcaagatgcagtttcaatttcatgatataaaacagcacatcacaaagtattttcacaagtag

SEQ ID NO: 415202 - DNA, 618 bp, Homo sapiens
cactttttagcatctacgaaaagagtgtttggaacctgtttcatcaaaatgcacgttcaatgctgtgtttaaaaagagcacatcacaaaatgttttcatagagggcttgtttctagtttgtagagctggatattcgtatgttctcataaaaactcaataggcaaggaaatgtcacttttagattctatgtaatttttgcttggaacctgtttcattaaaacacaggttcaattctgtgatataaaacagcacatcacaaagagttttcacagatagcctgtttctaatttttaagacgatatttgtatatttttataagggctcactaggcagggaaacgtcacttcttagattctacaaaaagattatttggaacctgtttcatcaaaatgcaggttgaattcttggatataaaatagcacatcccaaagcattttcacagatgtcttgtttctartttataaaactggatatttgtatggtcctagaagtgctcattagtcttggaaatgtcactgcttagattccacaaaaagagtgtttgaaacctatttaatcaagatgcagtttcaatttcatgatataaaacagcacatcacaaagtattttcacaagtag

SEQ ID NO: 415203 - DNA, 555 bp, Homo sapiens
ggccctgcatatgggtggggatactgacatattgctaggccatgctcacaggtgatggtacttttttgccagggccatgcttcacataggacattgtgacacatctctgggcctatcacctaggtgatgtgactttcttcttgggtcctgaccacatggagcattgtgacatacgggtggaacctgcacctaggtgatgtaaccctcttgcctgggttttgttttaagggagccttatgacatatctcaggacccagcactcagtttatgtggttcttctgcccagtttctgcccacatgttagactgtgacaaatacatagggaagcacctaggtgataagattctttttttctacctcaagcctgcatactggggaaattggaacacatctctgagcccatgacataactgatatgactttcttctcttgcctggatctttacaatgsggggattgtgacatatttctgagcccagcccttaggtaatatgactatcctcatttttctgaatcatgcacacaaggggaaattttgatctattgcagggcccag

SEQ ID NO: 415204 - DNA, 567 bp, Homo sapiens
aatgactagggaagcatttttgtaaaattgtcttttcctgggtacagcattcctagtttcttttgctcacctgtwtggatgttgtgaagagacagtataggagagagacaagtgcacatttaaactactgattataaacattattttctctcatttacttctagatcatgaatttaatatcccccctgtgatgcaaagtagagactcagaggtgtcagattctggaggctaattggaggccttgttttttcacttataaataggccctaccttggatctcttctaaactctcttgtcaagccatgggctggttggttctgactttatctgaatgtgatgtcttcctctgctcccatgttctaagcccttgcaccgagggtggggaaaaggattgacattctccacctaaccccagcccagagtcattactcattcaggatgtgatgaataaatattgcctttgaggaagacatacaaatttgccaaagaaaggaatgcagttctgggacctcctagctacaggattatgtaaatcactcaacacccagtaaagttgagattgtgaaa

SEQ ID NO: 415205 - DNA, 567 bp, Homo sapiens
aatgactagggaagcatttttgtaaaattgtcttttcctgggtacagcattcctagtttcttttgctcacctgtatggatgttgtgaagagacagtataggagagagacaagtgcacatttaaactactgattataaacattattttctctcatttacttctagatcatgaatttaatatcccccctgtgatgcaaagtagagactcagaggtgtcagattctggaggctaattggaggccttgttttttcacttataaataggccctaccttggatctcttctaaactctcttgtcaagccatgggctggttggttctgactttatctgaatgtgatgtcttcctctgctcccatgttctaagcccttgcaccgagggtggggaaaaggattgacattctccacctaaccccagcccagagtcattactcattcargatgtgatgaataaatattgcctttgaggaagacatacaaatttgccaaagaaaggaatgcagttctgggacctcctagctacaggattatgtaaatcactcaacacccagtaaagttgagattgtgaaa

SEQ ID NO: 415206 - DNA, 580 bp, Homo sapiens
agccattatgccaagcctccctatgcacaggacaaaggaaatattccctaggagaaatcagcccrtacctcctgctctatcactcagattcttaagagtataaaagtgatcatagaaaaacagcataaatcacacttgccatctcactgatcaggaatgtcagacagaacaagacaaggatgttgctctcagcactatgtgctgtcttttctagcaaaggcaattaggcaaggaaaagaaataaaaggcattcagattggaagaaagaagtaatactacctccatttggagatgacatgatcttgtatgtagaaaaccctaataaattcaccagcaaactgttagagttaattgacaagttcagcaagatttcaggatacaagatcgaaacacaagaattaactgtattcctatgcactaccaatgaacaaccccaaaatgaaactgacaatgtcattacactgcatcagaaaagataaagcaggaatcaatttaacgagagaagtgcataacttgtaagcagaaaattataaaacatcattgaaaggaatgaaagaagacctaaataaccggaaaagca

SEQ ID NO: 415207 - DNA, 617 bp, Homo sapiens
ccctttcaaattcttgcatgtctaggcatctataatcatttatcatgagaaagaatatatcacagtcaaaatcacagcttgcttcctgacgtaggttttgtctatcatggcagtgaaagcaggagaggtgaagatctatgacctaatccagctgttcctcccagggcctccctaatcggccattttgccagtgctcatatctctcttttcacattaatgtcagaaagttcaaaagacttaaccagatgtttccctgctcagagttacagcagacagatattaagggggagaaaataagcttcaaatatcccatggggagagaataaagtggggtggggaaacctgcaaacatcgaggaagttaggcatttgaatctgtgagagcagcaacatgaacatgtgtaaaaaagaagtgtgggaaaccatrtggaaagtgactccagtacttcactacacaatacctacatagaagacaggattttgcattactcaaacaggaagtcttcactggaataccatacaaccattgggataaatgaactctcactataggcaacaacatgggtgaagcctcatataatgttgacctaaagaagtcagacactaaaaagtacatac

SEQ ID NO: 415208 - DNA, 512 bp, Homo sapiens
tagttggaatttaattaagaaagtttaaaatttataattgacacataattatgcatatttatggggtacgatgygatgtttcaatgcatgtatatatagtgtaaagatcaaattgggataattatcatatccataactttaaacaattatcattcctctgaatggttcaactttttgtgaatatacatccaattgctccagcaccattgctgaaaagtctatccttttctccattgaatggccattgcacatttgtcaagaatcagtcatttgtatatttgttaatatatgtctatttcttgaccctattctgttccatggacccatgtgccacccttgtcttgattactgcagctatgtgataagtcttaaaatcaagtggttgatttggctattctgggtccttttgcattttgatatggattttggaataagaatcagcctgttgctttctacaaaataaaaagctcactgggattttgattgtatggtgtatataatgattaagggag

SEQ ID NO: 415209 - DNA, 470 bp, Homo sapiens
acaaaccatgttcaagaatgcactgcaaggatcgctggagcccaggaggtcaaggctgcaatgagctatgatggctccactgcactccatcctgtgggacagagcaagaccctgtctcaaaaaaaaaaaaaaaatgcactgcagcctgctaagtctgagaaaggctacagagcatgcctgctgaaacacctctgctcatctccaarctttccattaagtattactggagataccaccatcctcacctcattccacagagtctagatccaaatccacactagcatattttcccttctctctcaaaggctctgaaagcaagagaaagaacacatttgctaggcccaaaggttaagttctaaatgactgtaggaaggtcactaattgaaaccagacccttggggtaccaagcatgcccaaggtgggtgtcgagtgcccctcatggaagctccctctgggaagctacaaagatg

SEQ ID NO: 415210 - DNA, 573 bp, Homo sapiens
gtacagctcaaaatctcaaatccaaaggaaaattcctgaatttgatgtttaaagagatggcccatgggcacttagagaaacgtaaaratcatcagaaaccaccatggattgtctcagaatgatggacagtagactactcttacttccttttcgaatactgtgcccagtcttattaatggaaatacttgcaggacatctgacagtttattgtggggtccctttagaccagggcctattcctgccctggctccagcaccaacaggcctttcctccacatatgcatctggaccaatacaaactacatcaaacatctgcttgaatcttggagactagcctccaccaccaatgcgacacatccccactcctttgatcgttgccaaaaatgtaaattcctacctatgcattcccaaacgctcttcctcatccttgttctccctggcaactgtcttcctctgctccctgccctccaaacctttccactgtaccttctgacagccttgttccaggtcaaacagcccttaagcatctatagctcttctcagaatactgtttccaacttctgacttaaactga

SEQ ID NO: 415211 - DNA, 512 bp, Homo sapiens
aaacatattgaagttagcaagaagacaaagggcttgttttttctctctttaaggaggctttgtgtcaggtgcatgtgccacatccacttatactctattagacagaatttagtcacatggtcacactagttgcaaggtggtctgagaaatgtagtcttgctctgggtggccatgtgctcagctaaaaattatgcttatatttttaaggaagagcagatatggaaagtcaactcacaatctctgtctcagatgtgaatatgttactccttgggctacttccagattttacgcctgtcttgttttataaagatcgcctagtcacttccacatactcactgatacctggcctgtggtcttcatgacatcccaagtctaaggcaactctcaccacattcacagagcctactcagcayccctgcataataattattctacatcctcaatgctgagacttccacttcccctccagctcttccatcgtctcccctatccacacattaaaccctgtcttc

SEQ ID NO: 415212 - DNA, 530 bp, Homo sapiens
gatcaaaatgtgtgtgctgrggtgcacatgaggattggtaatacactagagtagtgtccctgctgctgggccatttataataatgatagagttggaaaataaatcttttaaagacatgaattcatactgatttttccaatgtaacatattaccgaaactaacttttttgtagacatgcttttatgcttatattaaatacgtaataagatggagaaaatgtattatcttcacagccggtagcagaattcctccacaggaaaaatcagtctgtcttgggaaaaatgttttaattttttagagttgaaggtgagattctctctcttccccatttccaccatcaaggcctaaaaaaaaaaaaagctgacccccaaagtttcagtgaagaatttagttgttcaagggctaccaggaagaggaaacttgaggacaacagatgacagtaggggaggaaagtcgggttttagatgttactgttgttcatgatgatgcaccaaataaacaaacaaaaaatatcaaattcttgcatgtat

SEQ ID NO: 415213 - DNA, 530 bp, Homo sapiens
gatcaaaatgtgtgtgctgaggtgcacatgaggattggtaatacactagagtagtgtccctgctgctgggccatttataataatgatagagttggaaaataaatcttttaaagacatgaattcatactgatttttccaatgtaacatattaccgaaactaacttttttgtagacatgcttttatgcttatattaaatacgtaataagatggagaaaatgtattatcttcacagccggtagcagaattcctccacaggaaaaatcagtctgtcttgggaaaaatgttttaattttttagagttgaaggtgagattctctctcttccccatttccaccatcaaggcctaaaaaaaaaaaaagytgacccccaaagtttcagtgaagaatttagttgttcaagggctaccaggaagaggaaacttgaggacaacagatgacagtaggggaggaaagtcgggttttagatgttactgttgttcatgatgatgcaccaaataaacaaacaaaaaatatcaaattcttgcatgtat

SEQ ID NO: 415214 - DNA, 369 bp, Homo sapiens
tccctgggccttgtctatgtcaaggagcatggcctgctttcatgaagcaagggtttaatcagcaagaattggtcctgcccatttacattgtgyccgttgtctggcttttggatccctcagatctggtttttctttctagggcctcaacctgaaacctcgagtcaagtttgggacaaaaaggtatttcaggggctgcatgtatctgcttagattacatctctaatgggccctgctgaatttgcagtatcagccagcaggggtcgctcctccttgttttccctatcataagtagagtgatgaggaaaggaaaagaaccttctcacttagaaaagaaaaaggaaacagcttaaagtacaaaaaaggattggg

SEQ ID NO: 415215 - DNA, 546 bp, Homo sapiens
agacgattgctgtctcagcaagatgctgagctattgattcatgcctttataacaacaaggctagattactacaatttattgttggcttccctcccagaatgctcactgctttgacttgactttgtagaggattcagcagtcagggtgttcaacaactaatacagaaatgcctgcacacatcacatcagtaccacaaacattaagctgaaatacagaactggcttgaaaaattgtargttcaggtcctgcttttaaccctatgaaacacagtgaacattttccttccagaaacaaggctttcatataagactctggaattgaactgactgtggctcaaggagtctaagctactttataagaatgccacacttcattagacttaggatctgatcaggaacctgaggaaaacctctctttgggggaactaataggtccacagtcaatatgggcttactatagcacactaactaaattgtatcagaagatattttcacttttaaaaagtgtaatacctacaacacggtaatattctataatctacattaa

SEQ ID NO: 415216 - DNA, 544 bp, Homo sapiens
tgtaatgtttattaaagaatagacttcagggttctaatcctagaatcacaacctccggaactgggacttagaattcacgtttttaacaagcttccaagcatttttaacaagctttaatgtaaactaaaatttgagaaccactgtactagacacagcaagttctaggagtgaatactcctctgcctcattctgcctggctgtggtaagtgctgggtaggcattgtttctatgtatgatgtatgattaaatgaacagttgatgaatctatgtagaattcacaaagtccaaggcagtgtctctcttcttgtgatctgctcagcactcctaacagagayagagaagcaccaggtagacttacgagatttagattaagagaaaaaaaaccattgacacccaggtaaatttgaatttcagataacaacacatactttttagtataagcatgccctgtgcaatattcggccaccctagcccagactacatagtcctatgctgacccattgttttctcttgattggtgttccctcaacacagaaaacagaca

SEQ ID NO: 415217 - DNA, 515 bp, Homo sapiens
ctttgagataggaccattcccagcatgcttgcttgagataaaagagatcagtgtggctggaatggagagaacataaaaggcagtagtagatggtgtcagagaggagccaaatgatgaagagtattgtaagcaattatatgcacttttgcatttacttgactgaaatgggaaaacaaaggagagttttgagcagaggaataacaagaactgtattatcttttagaaggatcacattggttgatgtgtggacaataatggtagtagggcaggtataataaaatgaggagacatattaggagtaattacaataatccagatgaaagacgatgatgttttagactamgatgatggcaatgaagtagataagaagtggttggattctcaatatattttaaaagtgcaagagaaaatggcttataccattcaaaaatctaggcatgcatattagagtaacacaaaacaaatgaaagtatattagaaattttacttaaatatttaaattttgaatcaacaat

SEQ ID NO: 415218 - DNA, 515 bp, Homo sapiens
ctttgagataggaccattcccagcatgcttgcttgagataaaagagatcagtgtggctggaatggagagaacataaaaggcagtagtagatggtgtcagagaggagccaaatgatgaagagtattgtaagcaattatatgcacttttgcatttacttgactgaaatgggaaaacaaaggagagttttgagcagaggaataacaagaactgtattatcttttagaaggatcacattggttgatgtgtggacaataatggtagtagggcaggtataataaaatgaggagacatattaggagtaattacaataatccagatgaaagacgatgatgttttagactacgatgatggcaatgaagtagataagaagtggttggattctcaatatattttaaaagtgcaagagaaaatggcttataccattcaaaaatctaggcatgcatattagagtaacrcaaaacaaatgaaagtatattagaaattttacttaaatatttaaattttgaatcaacaat

SEQ ID NO: 415219 - DNA, 643 bp, Homo sapiens
caacccgtcaccttgcctgagcttaaccctctatcacccagagtgatagtttcaaaagtctctgcaggcaatatcagtatttacaagcaaattcatgtagttattatgaattactattcataagtaataaaatgttacctgacrctctcttggtggctatctcatttacttctgatgcagaattgctttcttaacacaaatctgacaggctttttttatgaatgtgtctgaaaggggattcactgacagtgaaaactcatataaaaaaatgcctccaaaagtgggggaatactttagctaaaaacctatataaaagaatcagatcaaattatcaaagaacactggttcatcttgaataactattcatgttaaaatgaatgaaggagtttcctatagggaaggccaagtcttccagggaaactatcatggaaatagactaagtttctctataaaaattcacttgcgacaaagactattatagctcttgaaaatgtgtataattcatggtatttttctatgttctaacttctaagtacactcctattacagtgtttggagcaagaaatgctgtagcataggcttataacactattagtatgctcatacactcttattcttcagtataataaatattctattgata

SEQ ID NO: 415220 - DNA, 643 bp, Homo sapiens
caacccgtcaccttgcctgagcttaaccctctatcacccagagtgatagtttcaaaagtctctgcaggcaatatcagtatttacaagcaaattcatgtagttattatgaattactattcataagtaataaaatgttacctgacgctctctkggtggctatctcatttacttctgatgcagaattgctttcttaacacaaatctgacaggctttttttatgaatgtgtctgaaaggggattcactgacagtgaaaactcatataaaaaaatgcctccaaaagtgggggaatactttagctaaaaacctatataaaagaatcagatcaaattatcaaagaacactggttcatcttgaataactattcatgttaaaatgaatgaaggagtttcctatagggaaggccaagtcttccagggaaactatcatggaaatagactaagtttctctataaaaattcacttgcgacaaagactattatagctcttgaaaatgtgtataattcatggtatttttctatgttctaacttctaagtacactcctattacagtgtttggagcaagaaatgctgtagcataggcttataacactattagtatgctcatacactcttattcttcagtataataaatattctattgata

SEQ ID NO: 415221 - DNA, 534 bp, Homo sapiens
atttatattaatatgtgaaaagtttaagtctgcccatttaaaatgggagagtttaggcaaactttcattagcttttttggctgacaaatgaaatgatgcaagactgtaaaagacacatcatttttctataaattaatagagattggaaatcatcttatggtaaatcacctcttttatcagcagaaatatctctgaactggaacaaaaacgagaatatttcattaacttaaaaatcttattcttgtcatttttaaasctatttacattattgtctatcccatgaattaacattaggagaaaatacatttgtggacagttgtgaaatttggagataaaagtgaagatatttgtatccttaaaaatatgcatttatttttagtgttttattctcccttatattatcagtttttaaacgataatactatatatataatatatatttttactataatatgtaatagtacacattacatagttaacaaagtatacttataattttaaactcttcaattcaatctcccttaattttattat

SEQ ID NO: 415222 - DNA, 407 bp, Homo sapiens
ggtcctttcttttgtcttaagatctattgggaaaatttaccagaattgcttatttcaatgtgctttctggttgaatcccggtatcctccaccaaaaatattctgcaattctcagtgttcagagatcctgtgcaagtgaggggttctgaaggcttagctttaatactttcacaagaaatctacctttgccaagaaaagtgctcacagtgtgtgtaargttgtccactataacatggcttataccagtaaaaaacaggggaaaaaatcaatacctgctaaccgacagcacagcatgatggtcaaaagagtaaactctgagggctccactatttgttgctgtttgactttaggcaagatacttaacctctctgtttctatgtttcattatctgtaaaacgggataataag

SEQ ID NO: 415223 - DNA, 407 bp, Homo sapiens
ggtcctttcttttgtcttaagatctattgggaaaatttaccagaattgcttatttcaatgtgctttctggttgaatcccggtatcctccaccaaaaatattctgcaattctcagtgttcagagatcctgtgcaagtgaggggttctgaaggcttagctttaatactttcacaagaaatctacctttgccaagaaaagtgctcacagtgtgtgtaaggttgtccactataacatggcttataccagtaaaaaacaggggaaaaaatcaatacctgctaaccgacagcacagcatgatggtcaaaagagtaaactctgagggctccactatttgttgctgtttgactttargcaagatacttaacctctctgtttctatgtttcattatctgtaaaacgggataataag

SEQ ID NO: 415224 - DNA, 578 bp, Homo sapiens
caataactgagaactaatggaagtgcatggatctaacagaagtgcacagaactaatgcaatggaactaatggaagtgtcactacaatctggcaggattgggcaacaattgcctgaaatcattggaaagctggaggaaaccttagccagaggcatgacgtgactctgggagattaaatgagcatagaaaatcaattgcttatgtatgacctatgaatcaatgtacctccatatggatgaygcccacatttttttgtgttgattcactcagaactcccccttctaggaaccttagctcactgtccaatgatgtgtgtgtgtgtgtgtgtgtgtatatatattttctcacatgccctttaatatgcatcaaaaatgcatggaagcatgtgtaagaaactcttaataatagttaataatggctccttccggagagctgggaagcaggatttgggaagcagatggtctgtgggaagggtagggaaacattactttttaatttttttttacaagaagaacgtattgcttatatagtttaaatgaaaaaatatcaattttaaataagtgattctaattagaagca

SEQ ID NO: 415225 - DNA, 578 bp, Homo sapiens
caataactgagaactaatggaagtgcatggatctaacagaagtgcacagaactaatgcaatggaactaatggaagtgtcactacaatctggcaggattgggcaacaattgcctgaaatcattggaaagctggaggaaaccttagccagaggcatgacgtgactctgggagattaaatgagcatagaaaatcaattgcttatgtatgacctatgaatcaatgtacctccatatggatgacgcccacatttttttgtgttgattcactcagaactcccccttctaggaaccttagctcactgtccaatgatgtgtgtgtgtgtgtgtgtgtgtrtatatattttctcacatgccctttaatatgcatcaaaaatgcatggaagcatgtgtaagaaactcttaataatagttaataatggctccttccggagagctgggaagcaggatttgggaagcagatggtctgtgggaagggtagggaaacattactttttaatttttttttacaagaagaacgtattgcttatatagtttaaatgaaaaaatatcaattttaaataagtgattctaattagaagca

SEQ ID NO: 415226 - DNA, 578 bp, Homo sapiens
caataactgagaactaatggaagtgcatggatctaacagaagtgcacagaactaatgcaatggaactaatggaagtgtcactacaatctggcaggattgggcaacaattgcctgaaatcattggaaagctggaggaaaccttagccagaggcatgacgtgactctgggagattaaatgagcatagaaaatcaattgcttatgtatgacctatgaatcaatgtacctccatatggatgacgcccacatttttttgtgttgattcactcagaactcccccttctaggaaccttagctcactgtccaatgatgtgtgtgtgtgtgtgtgtgtgtatatatattttctcacatgccctttaatatgcatcaaaaatgcatggaagcatgtgtaagaaactcttaataatagttaataatggctccttccggagagctgggaagcaggatttgggaagcagatggtctgtgggaagggtagggaaacattactttttaatttttttttacaagaagaacgtattrcttatatagtttaaatgaaaaaatatcaattttaaataagtgattctaattagaagca

SEQ ID NO: 415227 - DNA, 596 bp, Homo sapiens
aatggttatgaaatgtcaagccttttcacttctcctttatattatttagctccagagattttcaggttctaaaaataagataaacttctctgctgagtttatgtatcttgaacatgttttaagtatacagtagtcatttgtgaaacgtgtatctaaaggtggacatcaaaactgtatttgtgataatcatttttcttttcatgctatctcagagtaatcccaggaaatgttctttcatgatcaaagcaaatcactgcctggaaaaaaatgcactattttcagttaactctcctactagcaagtgccaaacgcatttgaagacagaacgtttcacagtagagaaagttaagtactgcactaaaaagcagccacgagattactaagacaatctacacaagaaaacatgtgggctgactatacatgtttattcagggcaaaaccaccatcagtgtgcagagcttagctttatatatctcacaacatgccccagagaataacagagactcagaaaagacagaaggaaaatatgaatggcttccaactgtcaaaacaygcagttgggcagctatattaatcgtgatttaaaagccttgtaa

SEQ ID NO: 415228 - DNA, 622 bp, Homo sapiens
taaattgtcttatagacagtgtcaacatcagtcaggctatttggctaatgccttagataaataacaggataatgttaatattgttgctttgttgaaatgaaccagaaataattagaaaatgatttttattttaaatttttaagtgtaagatttttggggttttgttgttattgttgttgttgtggttgttgtttttttgacacagtctcactrtgttgcccaggctggagtgcagtggagcgatctcggctcactgcaacctctgcttcctgggttcaagcaattcttgtgcctcagcctcccaagtagctgggattacaggcgtgcaccaccacggccagctaattttttgtatttttgtagagacagggtttccccatgttggccagactggtctcgaactcctgtcttcaagtgatgtgcctgcctcagcctcccaaaagtgctgaaattacaagtgtgagccactgtgcctggcctttaactgtaattttatttagtgttcatgagtcaatcagtataaaaattagctagtcctgaaattagctctaccacaaatacacatattcatttatttgttttctactctttttctaaggtgccttgtgcagaaaacaaatat

SEQ ID NO: 415229 - DNA, 609 bp, Homo sapiens
tactgctttgtgaaagcccttctatgcacttattgaagagacagtttccttagaatagggcaagtaaaatgcctccacaatgtgctcaatgttgcacgtgcatgatgttagcaaataatctgcttacttaaatgaatttctcatttgttgaagaataaaaaaaaatgagcatctaatagaaaaagcatttttcctttcagatacatctatcatagaacttttgtcttaagatggaaatgaacaactcctaacccaaaaamtcctgcattgtgccttctatcacatccaaaattcctaaaaagacctgttgtcttctaaatattcttttaaatgttatctagaagaataacattaattcatcaatggccatcaatctataaatgaagattgacttaacagacaacagtaatgggataaggaactaatgccttaataggaatgcagcaaagtgaagatttagattcaattgtaggtttgatgctcaggcttggggagacctgcctcagaagaagctatgtggcttcccatagccaggcgaagcatgaagaaactgaagccaacggggtgcaaagatgagaaatgaagacaggcgagaactgttagggataa

SEQ ID NO: 415230 - DNA, 609 bp, Homo sapiens
tactgctttgtgaaagcccttctatgcacttattgaagagacagtttccttagaatagggcaagtaaaatgcctccacaatgtgctcaatgttgcacgtgcatgatgttagcaaataatctgcttacttaaatgaatttctcatttgttgaagaataaaaaaaaatgagcatctaatagaaaaagcatttttcctttcagatacatctatcatagaacttttgtcttaagatggaaatgaacaactcctaacccaaaaactcctkcattgtgccttctatcacatccaaaattcctaaaaagacctgttgtcttctaaatattcttttaaatgttatctagaagaataacattaattcatcaatggccatcaatctataaatgaagattgacttaacagacaacagtaatgggataaggaactaatgccttaataggaatgcagcaaagtgaagatttagattcaattgtaggtttgatgctcaggcttggggagacctgcctcagaagaagctatgtggcttcccatagccaggcgaagcatgaagaaactgaagccaacggggtgcaaagatgagaaatgaagacaggcgagaactgttagggataa

SEQ ID NO: 415231 - DNA, 617 bp, Homo sapiens
ctcacaatgttgcccaggctggtcttgaactcctgggctaagcgatcctcctgcctcggcctcccaaagtgctgggattacaagcattagccaccatatccagccaagataaatattttctagcagagaagagccactaaactatacatatcattctcataccaaactaaaacawcccaacatatgcaaatgggactttccaaaaataagagattctttttcatcacaaaacatttaatgttttttatagaggacccctttagacaaaccttgcctcagagctttacaaatattagacacttggtttgttttgttgaatataaattaaatgactaaatgagatgttcatcaacatccaaattttattttctacatgatttcctaggagtgaggatatttttattatctgacaatgtttattctgtggagtttaagatcatcttcacccactaatctccttaagagaagataaaaacaatttattttggtcaagcttagggagtttacaagccagtcacgtttaaagttagccctgaggatatccaggaatctgctataaattctttccatttatagagtttcagaggatgaatggcattagcccactaaactggcat

SEQ ID NO: 415232 - DNA, 617 bp, Homo sapiens
ctcacaatgttgcccaggctggtcttgaactcctgggctaagcgatcctcctgcctcggcctcccaaagtgctgggattacaagcattagccaccatatccagccaagataaatattttctagcagagaagagccactaaactatacatatcattctcataccaaactaaaacatcccaacatatgcaaatgggactttccaaaaataagagattctttttcatcacaaaacatttaatgttttttatagaggacccctttagacaaaccttgcctcagagctttacaaatattagacacttggtttgttttgttgaatataaattaaatgactaaatgagatgttcatcaacatccaaattttattttctacatgatttcctaggagtraggatatttttattatctgacaatgtttattctgtggagtttaagatcatcttcacccactaatctccttaagagaagataaaaacaatttattttggtcaagcttagggagtttacaagccagtcacgtttaaagttagccctgaggatatccaggaatctgctataaattctttccatttatagagtttcagaggatgaatggcattagcccactaaactggcat

SEQ ID NO: 415233 - DNA, 563 bp, Homo sapiens
cttgtctaaataaataaataaacaaataaataaataaataaaggggtgagtttcaattttatctcagtttagaaaagtgggaatttcattgtgtagctttccctttgctgtgaaacctcctctttcctcagttgctattcactcttcaactgcagcttctaaccttcttactccactgaagctactctcaccatgtgacatcacccatgacatcctaattactcaatagtgttgacattttaacaccttattttaatacctttctgcagcacttggcagggtrgctactccttcctccaatccttctccctaatagatctcatgacctcatgttttaccagttctctttctaccttccacttttgatatttcttcatctcttttgtggaactcttccactgcctactcctaaaacatccgtgttcccagtattgtgttctttctggaaaggattatgttctgtttcatggttttaattatagcttattcattaataaaacccatagtgattgccaggggcttgggggaggggcaaaggaacagttgttgtttaatgggtgtaa

SEQ ID NO: 415234 - DNA, 563 bp, Homo sapiens
cttgtctaaataaataaataaacaaataaataaataaataaaggggtgagtttcaattttatctcagtttagaaaagtgggaatttcattgtgtagctttccctttgctgtgaaacctcctctttcctcagttgctattcactcttcaactgcagcttctaaccttcttactccactgaagctactctcaccatgtgacatcacccatgacatcctaattactcaatagtgttgacattttaacaccttattttaatacctttctgcagcacttggcagggtggctactccttcctccaatccttctccctaatagatctcatgacctcatgttttaccagttctctttctaccttccacttttgatatttcttcatctcttttgtggaactcttccactgcctactcctaaaacatccgtgttcccagtattgtgttctttctggaaaggattatgttctgtttcatggttttaattatagcttattcattaataaaacccatrgtgattgccaggggcttgggggaggggcaaaggaacagttgttgtttaatgggtgtaa

SEQ ID NO: 415235 - DNA, 572 bp, Homo sapiens
ccagatcacatggctgcacagagaaggctgagggaacaaagtcagagctccaccagcaaggaagaatggatatggtacagatgtagtggggtaccagctgtatgtgctacactgatctctcccctaagcaagagacccatggatacaactctttccaaaacatctactccatatcaaatttatatacactgcttttgccatgagaattcttcttatgcttcctattccattttataacactcctgtataataaaaagcctagtcagaaacctgggcagggtcttcaactccttccttttcctatacaagcaatcctgaaatctgatcatggtgactctccatttcatttctatggccagttcctcctaactcaactycctgtctctagcgtggcctttcctcataagtccaacttgctgacctgatgacaacaagggctattaatctgaaacacaaactgaccatgtgattctgtttatggattgtctaaaagaggggctccataaccatgacttccctgaaatgagatgcaaaattttttgaatatgtatgtgaaacattttttgtgaaac

SEQ ID NO: 415236 - DNA, 572 bp, Homo sapiens
ccagatcacatggctgcacagagaaggctgagggaacaaagtcagagctccaccagcaaggaagaatggatatggtacagatgtagtggggtaccagctgtatgtgctacactgatctctcccctaagcaagagacccatggatacaactctttccaaaacatctactccatatcaaatttatatacactgcttttgccatgagaattcttcttatgcttcctattccattttataacactcctgtataataaaaagcctagtcagaaacctgggcagggtcttcaactccttccttttcctatacaagcaatcctgaaatctgatcatggtgactctccatttcatttctatggccagttcctcctaactcaactccctgtctctagcgtggcctttcctcataagtccaacttgctgacctgatgacaacaagggcwattaatctgaaacacaaactgaccatgtgattctgtttatggattgtctaaaagaggggctccataaccatgacttccctgaaatgagatgcaaaattttttgaatatgtatgtgaaacattttttgtgaaac

SEQ ID NO: 415237 - DNA, 572 bp, Homo sapiens
ccagatcacatggctgcacagagaaggctgagggaacaaagtcagagctccaccagcaaggaagaatggatatggtacagatgtagtggggtaccagctgtatgtgctacactgatctctcccctaagcaagagacccatggatacaactctttccaaaacatctactccatatcaaatttatatacactgcttttgccatgagaattcttcttatgcttcctattccattttataacactcctgtataataaaaagcctagtcagaaacctgggcagggtcttcaactccttccttttcctatacaagcaatcctgaaatctgatcatggtgactctccatttcatttctatggccagttcctcctaactcaactccctgtctctagcgtggcctttcctcataagtccaacttgctgacctgatgacaacaagggctattaatctgaaacacaaactgaccatgtgattctgtttatggattgtctaaaagaggggctccatraccatgacttccctgaaatgagatgcaaaattttttgaatatgtatgtgaaacattttttgtgaaac

SEQ ID NO: 415238 - DNA, 589 bp, Homo sapiens
attgtctaaaagaggggctccataaccatgacttccctgaaatgagatgcaaaattttttgaatatgtatgtgaaacattttttgtgaaacaaatttttgaataagtatgtgaaacattctgatagattacttctgaaaagtccttgacccagtaaagcttcaaaaactactgacataatggacacaaatccaagatattttgcatggaacataaggacatttcataatctgcttcttcattatctcttcagactcatctcttacatctctttcccttatatcttatgctccaccaaaagtaaactacttgcagttactcaagcacgactctgtgcctatgcacaaaccagtacatctttctagattactttccctgccataatccaattagtacacgtcaatgcatccttcagaatccagcttgtatatcacttcctctgtaaagtctccatttgtgacctcagaatgtatcaactgcttcwatatacttttattctatagatatttttctatttatgatacatttgtcactataatgtatattttcttatttcctccaccaaactgtgagctgcctgaggagagatt

SEQ ID NO: 415239 - DNA, 519 bp, Homo sapiens
tgcttcctctctcttacgtaggtttgacagcaataattctcaaacttcagtgtgcaccagacttagcagtgaaactttytaaaattacggaaagaagcttcaggccctatcccacacctgcagagccagaatctctagggctggagcctgggtgcctgcttttttaataaaccatccaaatgaatccaataacttctgctctcaagaattgacagaaatcgctttccattccaggacaagaaccaaagacaaattcctatttgtctcctcttcatgatcttaggcagaagggtctgtcactactgaagacaacaaaggataattcactttagtcagtgctgacttgcttggagaagaaatgtaaaagcactcaaaggcagaaaataaaagcagttccagtcctggaagtcatttggacagttccagttgaagagccaaagcagaaaattaacattctagctcctagaaattttattttcgcctttcttctaggcataatttataagtcaaatagaattg

SEQ ID NO: 415240 - DNA, 570 bp, Homo sapiens
tctgaagacttatcctgcttccaccttctttatttttcacaggtgtttcccctcaataagtctcttgcatatctaatccccatcttggcttcttgaaggatccatactgacactgtgtttgctgtgttaaagataattgtaagttctttgcaactactctcattaaaaggtgaaagccctgtaagacaaggcttccaaccatccacaccaatatgccagatatgcaagtgaaaacatctgggaacctccagcccggtccatctgccagctgagtaccactaagtaatctcaatcagcatcatgcagatcacccagccaaactctgcctgaattcctggcccatatgattttgaaaagaaataaaatgcttgttcttttgtggtagtttgcagcaatagtttaccagaataggtatcattttcttttctttttctctcctgttttgttaagttaaaaattaacagcttatttacataatytcccacaaaagaaaaggttttaagagtctatatggaggaacattttacatagtgtttaaggctacaatttttaaagtaatattagattatt

SEQ ID NO: 415241 - DNA, 624 bp, Homo sapiens
ctgaaatcaatctttcagcatggcaaatacattgtaaattataaggcaatgtgtatactaaagcaagtgtcgtagttaattttaacaattttttaaaagcatgtcggggttttgataataccagagagatgaaaatgtcttacacagcatgccagatcagcacagttttcaatttgagattagaggccattgactaacatgtcatcaagttcacatagtatttatggttgatctgctcaagaaattaaaagcattgaatcttggacatgacacagatgtgaaagactaaaacacaacacttgaaaatatttcagttgtgataaatatatacctttaatagatgctttatttttcaagaaaccacacctgctttgaaattacaggtccacggaaatcttatgccctggtgtcagtgtcccttagattcatctataatgtaggccastgcaataattttgcccttaaattaattgatcccacagatgaaaactgtacaatctttgcttttcaccgtatctttagaagccatttttcttttgcctatctcaagaaccctactcttttgaagtatatcatccactcatatatacatacatccacatattccctctgttagaaaaagtg

SEQ ID NO: 415242 - DNA, 622 bp, Homo sapiens
taaattgtcttatagacagtgtcaacatcagtcaggctatttggctaatgccttagataaataacaggataatgttaatattgttgctttgttgaaatgaaccagaaataattagaaaatgatttttattttaaatttttaagtgtaagatttttggggttttgttgttattgttgttgttgtggttgttgtttttttgacacagtctcactgtgttgcccaggctggagtgcagtggagcgatctcggctcactgcaacctctgcttcctgggttcaagcaattcttgtgcctcagcctcccaagtagctgggattacaggcgtgcaccaccacggccagcyaattttttgtatttttgtagagacagggtttccccatgttggccagactggtctcgaactcctgtcttcaagtgatgtgcctgcctcagcctcccaaaagtgctgaaattacaagtgtgagccactgtgcctggcctttaactgtaattttatttagtgttcatgagtcaatcagtataaaaattagctagtcctgaaattagctctaccacaaatacacatattcatttatttgttttctactctttttctaaggtgccttgtgcagaaaacaaatat

SEQ ID NO: 415243 - DNA, 430 bp, Homo sapiens
tatgccataagatatatattcttatggtgttctagaaagatcattctatctttctagaacagcaaaagaatcacatcactccctgatgaagaatctactactttggtttactactagtccgagtttttcgtttttgttttgttttgttttgttttgttttgttttgtttttaattcgagacccctaaaatactctcatatttatatttctttgcttctaatttcaatctctctaatgtgttatagatcaaaagttcaattttggttatattttattttgttccataaagtcttcatgtgacttataacatagcatactgtttgtgtataatgtatratgtaatcaataccagtttcttaagatgttgaattcaaattggcaccagagaggccaccaaagaggacatttagtgtcaggacaacaaaattct

SEQ ID NO: 415244 - DNA, 512 bp, Homo sapiens
gaaactgaaattttgtcatatatgttgttattcttatctctgatttttcacagcaaggatcctgagccctgattctaggagagttcatcctcaccatacctcatccctccaactgacttataaaaggagggtgatgatgtagcttgccaacaatagcctctgctaatttgactgcttttgtcagatgatgatgagaatgatgagacattgatccctaagatatatctgaaactaccctttaggaaagaggattttcccttgctgrgaggcaaggcagacacctgagcagggctgtgctatcaacgtcccagtgctgcatggccttcggtagtcaataaaacgtaccccaaagaagatcagaggtgttacttcatgaaaggcacaactatgggtgactagctgggaaactagacacatttaccttgtaaacagagaagatatgactcaagaggaaagctccaatacctattatagaaggtatgcttgtacttaaaaacaaacaaaatgtaagc

SEQ ID NO: 415245 - DNA, 579 bp, Homo sapiens
tggcatatggtttactaaggagtgtgaacattgtcctaagaacaatattaataagtttcagggcaaggttagggggtcgtatacaatcagacatcaataccaagtgtattagtctattttcacactgctataaagacatacctgagaatgggtaacttatgaataaaagaggtttaactgactcaaagttttgcaggctatacaagaagcatggctkgagaggcctcaggaaacttacaatcatggaggaaggtgaagaggaagcaggcacaatcttcacatggcagaacaggagagaaacagccaaagaggaagtgctacacacatttaaacaaccagatctcatgagaactcactcttacaagaacagcaagggtgaaatctgcccccatgattcagtcacctcccaccaggtccctcccccaaccctgggaattaccattcaacatgaggtttgagtggaaacacagagacaaaccacatcattctgcccctggcccctcccaaatctcatgttctcacattccaaaaataatcatgccctcccaacagtcccccaaagtcttcattcattccagc

SEQ ID NO: 415246 - DNA, 509 bp, Homo sapiens
ggcaaagttcttcacttctctatgtgaacaaccttcactcctcatccatacctctattaacacacttagtacatgatgttgtatttactgaycacatttcatttcctcttaatgatgccctttttcgatatttaccatcactgctacccttcatccttctcaagttgaagctccagtatgggataagaaaacatgggcaaaacaatgaggccaacaggctggactgtggaattcttggggccatatcaaggaagccaaatctcaaagacccagggagggattgtcttctcctagagtggctgactttcttcttgagacgcaatttttgaggttttgataccatgaaagaaaaacctaaacgatgcatttcaagaagagttgctttcccttagctatttttcaactgctcatcctcatgcccttaaacaatactattttttaagttcgcatcaggagagaaaatagctatgcctttgatacagaagccctagccaggaataaaatttatg

SEQ ID NO: 415247 - DNA, 540 bp, Homo sapiens
ttatgacttacagtaaatgctcaatatacaattattaaattaatttttaaaataatctatgtgctttctcaggtaatagaagtatatgtatataaattacattcccattttgaaattgcatctcaatttctccactaatagatagaaatcatgaagtcggtaagaaaaaaaacatgcaaacaaaccccactggactgtgcagctggatctgttcctatttctgagccaaatgaaacttagttttgatcgtaagcccctaccctaaaccttagccttggttcttcacttgttaagaaagaatattggaatagatgttgactgatatccaagtcaatgtggctayggcatctccaaggaagagatgacaggtattcttccctgagtctggcaacgagaaaagcagaggatggaggctagtaacacagcttgatttcctcactctttggggtctaggaagcctgggttgacaactgctcataatcttgctcacaaagactttgaccctgctctgctttgtgatgcatgcaagtctgaaaactt

SEQ ID NO: 415248 - DNA, 593 bp, Homo sapiens
ctatccaaataaggtcacgcttacatgtcccaggggctagaatttcaacatatcaatatgttcaatccataacaatgcaaatagtcttaaaggctgtcactatctaaatgtactcagtgtgattcaagggaccatgtctctgtagaaattctaatgcacaatccctcaagatttggyaagaagtattattctctgttacctacatatggaagaattagggtctgcacagcctgtgttctcattttattacaggctttcttggttcattgtccagaataacttatctatacactttaaaattttggattacctgttttgtttttttaagtcagaaatagcatacctggatatttggaaaactctgcctatttatcttttcctctccagtgtttctcatccaattctgtcttcttattgtagacagatagatactcccaaaacaagtcactcttctccagaggattaggaactcattggcctacttcttgcctggcattcaaggcaagctctacactggcccatgtaaactcagaattctgagacccaatgctgacaacttgcaatttagcttcatctttgttgaactgactaaa

SEQ ID NO: 415249 - DNA, 576 bp, Homo sapiens
atgtttattgctcctaacctccaaagagccaatcaagctaagtctggacttgggttttaactcaaggcacatcatgggcacyacagatgccatcatgccttgcaaggtttcattcctggttcactgtggtcattactagagaagactaattggctatagaaaaagagaacagattgtcgtaattattccctatgtgtaatatttgggttctgaccatgaagtcaatttaaggactgaggtaaaagaattggggacctgactaacagatcttccagttgcttcaataagtggcaatagagattattctgtgcagcatctgagctttttctaggctggaaatgcacctggcatgattgactaatttggggagtttttccagtgttctctgtgtggtgtattttaatcagcattacaatttagcagctgcattaattaattagcacattaatcaggagagcattttagcagctaatctctagcaaactagcagtttgtgataaaatcttagcagtaggagaacaagcagcataccaagttatttttcaatgttatcatcaccatgggcctagcaaagcc

SEQ ID NO: 415250 - DNA, 632 bp, Homo sapiens
tgctacgtaatgacttaaagccccagcccctgtttgaagcagtgtttcttctctttatcagtccattctcacattgctataaagaaatacttgagacttcgcaattataaagataagaggtttaattagctcaccattccacaggytgtacaggaagcagagcagcatctgcttctggggaggcctcggggagcttttactcatggcagaaggcaaagatggatcaggcatcttcgatggcaggagcaggaccaagagagagatggggtaagtgctacacacttttaaacaaccaagtctcatgagaaatctatcacaagaacagcactgggggaaagatgagaaaccacctccataattcagtcacctcctaccaggcctcaccctgcagcattggggattacatttcaacaggagatttgggcagggacacagatctaaaccatatcacttcctgtaattggctgcaggacacctttatctaaaatgacctatcacatactgggttgtggtcaatacaacccagctcacaattgggcttttattttttaccatatccctctatcactctgtactttcattttctctattattttaatttactagatggtagatgcttctatacaaatatt

SEQ ID NO: 415251 - DNA, 585 bp, Homo sapiens
actcagcctatctttccatttatttgtgttttgagagtttttaatcatgaaaggatgttgcattttatcaagtgctttttctgcatttattagaatgatataatttttatccctcattctgttagggtagccacatttattgatttgcatgtgttgaaccatccttgcatctcagagataaatcccatttgattattatgtatgaatctttttaatgtgttgttgaattaggtttaccagtcttttttgagaatttttacatttatatttatcaagaatactggcctgtagttttccttgcttgcagaaaaataaattaaaattaaaatttattttctgtactcacactcctcactgccaccaccactgtcatcatcccatgtattcttttttctccttttcagacagtgacctataatttatcaaaacatgctcagaaaaaatagaatgtcaattgcattccaaacttccttcaaaatktaaccttttggtttgctgttctctctactaaattctacctctgagcctgccatcattttcataatttcccatctacaaatgaaaaagccaaaattgttgccttca

SEQ ID NO: 415252 - DNA, 452 bp, Homo sapiens
gctaaaccacagtagaatagagcaccaggtagattcctaaggtttctgacaccaggccctggttttaagacagcaccagagagaggggtggcaaccatctctgcagtttggtcaactcagccattccagcctgtcagctttggagagtccaaagggtccagatgacaaagggtcctcctgaaaacagcatagctgtttgaccaaaaggcagccagactgcttctttaagcaggtccctgattcccattcctcctgactgggtgagaccaaaaaggtctcaagcacccccctacaggtgcatttgggctggcaacaggtaagtaccttcctgggatggagcttccataggaaggagcaggctgccatakttgttgttttgtagccttcgctggtgataactcaaggtacagaataaagtgagaaaactagggtctggagcagacccccagcta

SEQ ID NO: 415253 - DNA, 580 bp, Homo sapiens
agcagaattgattaagcacaagaaagaataagtgagcttgaatacaggctatttgaaaatacacagtcagagtagacaaaagaaaaaagaataaaaaacaatgaagcatgtctacaagatctagaaaatagcctcaaaatggcaaacctaagagtaattggcattaaagaggggatagagagagatggggtagaaagttgaatcaaatgaatgataacagagaacctcccaaacctagataaagataccaatattcaagtataagaatgttatagaacacagagcagatttaactcaaagaagaatatcctaagacacttaataatcaaactcccaaaggtcaaaaataaagaaaggatccaaaaatcagcaacagaaaagaaacaaataacatataatggaactccagtacatctggctgcaggtttttcaatggaaaacttacaggccaggagagagtggcatgacatatttaaagtgctgaagggaaaaaaagcaaaacaaaacaaaacaaaacaaacaaacrttgtattctagaagaatatattcagcaaaatatccttcaaacatgaaggagaag

SEQ ID NO: 415254 - DNA, 629 bp, Homo sapiens
ccaactcggatggacagagcagtgtacggaggctcacatcatgaattttagctccagaatgactgcaagaactaacaaggaatcctgagaagaccctcagaccctctgaagaaagcagagtgctcctgcaggacccaggagacactccaaatactctrcaggaagacccactaaaggagagtccaaggtcagacacgcctagccctgcccccactttatggtactttccaacccaccctggtagctgaagacaaagggcatatactcttgggggttctaaggccccacccactgccagttcctctccatactaccacagctgatgctctccaaaaagcaccacatgccagcaggaggccaaatcagcacaaaagtaaagcattaaaccaccaaaactaagaacccccacagagtccatttcacccccctgccacctccaccagagcaggtgctagtatccatggctgaaacccacagatggttcacatcacagaactctgtgcttacaacccccagtaccagcccagagctgggtagacttgtcaggtggctagacccaggagagagataacaatcactgcagcttggctcacaggaagccacaaccatgggaataagaggagagtact

SEQ ID NO: 415255 - DNA, 629 bp, Homo sapiens
ccaactcggatggacagagcagtgtacggaggctcacatcatgaattttagctccagaatgactgcaagaactaacaaggaatcctgagaagaccctcagaccctctgaagaaagcagagtgctcctgcaggacccaggagacactccaaatactctgcaggaagacccactaaaggagagtccaaggtcagacacgcctagccctgcccccacyttatggtactttccaacccaccctggtagctgaagacaaagggcatatactcttgggggttctaaggccccacccactgccagttcctctccatactaccacagctgatgctctccaaaaagcaccacatgccagcaggaggccaaatcagcacaaaagtaaagcattaaaccaccaaaactaagaacccccacagagtccatttcacccccctgccacctccaccagagcaggtgctagtatccatggctgaaacccacagatggttcacatcacagaactctgtgcttacaacccccagtaccagcccagagctgggtagacttgtcaggtggctagacccaggagagagataacaatcactgcagcttggctcacaggaagccacaaccatgggaataagaggagagtact

SEQ ID NO: 415256 - DNA, 629 bp, Homo sapiens
ccaactcggatggacagagcagtgtacggaggctcacatcatgaattttagctccagaatgactgcaagaactaacaaggaatcctgagaagaccctcagaccctctgaagaaagcagagtgctcctgcaggacccaggagacactccaaatactctgcaggaagacccactaaaggagagtccaaggtcagacacgcctagccctgcccccacttkatggtactttccaacccaccctggtagctgaagacaaagggcatatactcttgggggttctaaggccccacccactgccagttcctctccatactaccacagctgatgctctccaaaaagcaccacatgccagcaggaggccaaatcagcacaaaagtaaagcattaaaccaccaaaactaagaacccccacagagtccatttcacccccctgccacctccaccagagcaggtgctagtatccatggctgaaacccacagatggttcacatcacagaactctgtgcttacaacccccagtaccagcccagagctgggtagacttgtcaggtggctagacccaggagagagataacaatcactgcagcttggctcacaggaagccacaaccatgggaataagaggagagtact

SEQ ID NO: 415257 - DNA, 569 bp, Homo sapiens
agaaaagaagagataaaatccaaataaccacattaagaaacaaaatagaagatataactgacaccactgaaatacaaaagatccttcaaggctactatgaacatctttatgcacataaactaaaaaacctagaagagatggataaactcctggaaaaatgcaaccctcctagcttaaatcaggamgaattaaataccctgaacaggccaataacaagcagtgagattgaaatggtaattaaaaaattaccaacacaaaaatgtccaagaccagatggattcacagcagaactctaccaaacattcaaagaacaattggtaccaatccttttgacactattccacaagatagagaaagagagaaccctccctaattcattctatgaagccagcatcatcctaatacaaaaaccaggaaaggacataaccaaaaaagaaaactgcagaccaatatccctgatgaacatagatcctaaaatccttaacaaaatacgagctaaccgaatccaccaacatatcaaaaagaaaatgcatgatgatcaagtgggtttcataccagggatgcaggga

SEQ ID NO: 415258 - DNA, 569 bp, Homo sapiens
agaaaagaagagataaaatccaaataaccacattaagaaacaaaatagaagatataactgacaccactgaaatacaaaagatccttcaaggctactatgaacatctttatgcacataaactaaaaaacctagaagagatggataaactcctggaaaaatgcaaccctcctagcttaaatcaggaagaattaaataccctgaacaggccaataacaagcagtgagattgaaatggtaattaaaaaattaccaacacaaaaatgtccaagaccagatggattcacagcagaactctaccaaacattcaaagaacaattggtaccaatccttttgacactattccacaagatagagaaagagagaaccctccctaattcattctatgaagccagcatcatcctaatacaaaaaccaggaaaggacataaccaaaaaagaaaactgcagaccaatatccctgatgaacatagatcctaaaatccttaacaaaatacgagctaaccgaatccaccaacatatcaaaaagaaaatgcaygatgatcaagtgggtttcataccagggatgcaggga

SEQ ID NO: 415259 - DNA, 600 bp, Homo sapiens
aaaaaatctacttggtactcatcaatgcctttgaaaattgaaaaaatatcacctggtacctcacagttcctttctaatagtaaaggtgctaaggcttcacgcagaaacttccattacagacctaaggagacaggaatactcctgtgctgttaattaacagcaaagacccatgatctccccaccactgaaaagctcctaagtagctctaacttgatctcccagcactaataacttaattggaaacataaaagaccatggtaatggaaaattaggaaaaaaatcttattcaagctttattcactaagtatagctgctaatttgctgtatgttctcctgrgcaccaaaatgttaactgtagttttcattgagcggtccccccactttatgtagctattggcagatatttataatctgtcctttgttaaacaagtcctttaactcagacgtttacaaatgttgtggtagtctctgataaagagaagattttgtgtatggcatagggaactcactaaacttgtactttgtattactacatattaaaatggaagtttggccaaggaaaataacataatataatatataataatataacaaatgttg

SEQ ID NO: 415260 - DNA, 600 bp, Homo sapiens
aaaaaatctacttggtactcatcaatgcctttgaaaattgaaaaaatatcacctggtacctcacagttcctttctaatagtaaaggtgctaaggcttcacgcagaaacttccattacagacctaaggagacaggaatactcctgtgctgttaattaacagcaaagacccatgatctccccaccactgaaaagctcctaagtagctctaacttgatctcccagcactaataacttaattggaaacataaaagaccatggtaatggaaaattaggaaaaaaatcttattcaagctttattcactaagtatagctgctaatttgctgtatgttctcctgagcaccaaaatgttaactgtagttttcattgagcggtccccccactttatgtagctattggcagatatttataatctgtcctttgttwaacaagtcctttaactcagacgtttacaaatgttgtggtagtctctgataaagagaagattttgtgtatggcatagggaactcactaaacttgtactttgtattactacatattaaaatggaagtttggccaaggaaaataacataatataatatataataatataacaaatgttg

SEQ ID NO: 415261 - DNA, 572 bp, Homo sapiens
attcttctctaaagaatgtcaacttttgtgagcattattgactatacatttgattaaattccttttaataattttaaattgtaattagtatttgtgtggctgacccttgaatattttaaatattctcagtagcaaataaatatacataaacatgatggttcaatgattccataactaatcaaaactacaaaataatactaatggcataaaaaggaacaaaataaaggcatttgcagcaacctggatggaattggagatcattattctaagtgaagcaactcaggcrtggaaaaccaaacatcatatgttctcacacataagtgggagttaagctatgaggatgcaaaggcataagaatgatacaatggactttggggacttgggggaaaaggtgggaagggagtaagggataaaagactatacattatgtaccctgctcgggtaatgagtgcaccaaaatctcagaaatcactactaaagaaattattcatgtaaccaaacaccacctattcctcaaaaacctatggaaattaaataataaataaatattaaaaataaataaataatagtac

SEQ ID NO: 415262 - DNA, 621 bp, Homo sapiens
ttttaaaatttgctgtgtaaattgtggtagtccctgaagtttctgagataaaattaacatgaaaaaattgtatctgaacatcctgcaactctctcttcaccacattcacacaactcatttgcatgtaagttttcagatccctttaatatgtttaatatgttttactgaaaaggcaatgactgatgaatatagccagaaagaataggattgacaatagggatgaataaactttaatgctttaaaatcttcgattatgggccgggcgcggtggctcacgcctgtaatcccagcactttgggaggccgaggcgggtggatcatgaggtcaggagatcgagaccatcctggctaacaaggtgaaaccccgtctctactaaaaatacaaaaaattagccgggcgcggtggcgggcgcctgtagtcccagctactcgggaggctgaggcaggagaatggcgtgaacccgggaagcggagcttgcagtgagccgagattgcgccactgcagtccgcagtccggcctggrcgacagagcgagactctgtctcaaaaaaaaaaaataaaataaaataaaataaaataaaatcttcgattatgggacacagccaaaaataagtctggaaca

SEQ ID NO: 415263 - DNA, 621 bp, Homo sapiens
ttttaaaatttgctgtgtaaattgtggtagtccctgaagtttctgagataaaattaacatgaaaaaattgtatctgaacatcctgcaactctctcttcaccacattcacacaactcatttgcatgtaagttttcagatccctttaatatgtttaatatgttttactgaaaaggcaatgactgatgaatatagccagaaagaataggattgacaatagggatgaataaactttaatgctttaaaatcttcgattatgggccgggcgcggtggctcacgcctgtaatcccagcactttgggaggccgaggcgggtggatcatgaggtcaggagatcgagaccatcctggctaacaaggtgaaaccccgtctctactaaaaatacaaaaaattagccgggcgcggtggcgggcgcctgtagtcccagctactcgggaggctgaggcaggagaatggcgtgaacccgggaagcggagcttgcagtgagccgagattgcgccactgcagtccgcagtccggcctggacgacagagcragactctgtctcaaaaaaaaaaaataaaataaaataaaataaaataaaatcttcgattatgggacacagccaaaaataagtctggaaca

SEQ ID NO: 415264 - DNA, 501 bp, Homo sapiens
ttcttgtctacatacaatttttacatggctgcaatggagcagatattctccccagaaactagagctatatttataatataaatatatgtatatatatayacacacacacacacacacaaacacacaatgctggaagaggcaggcatgtctataactagtctcaagtagtataataaatgtgttaatagaaatatgaacaaattcttatggaatcctagagggaggagcatctagcggtggcagctgatgagagctggggagagtaaggtcataggaagtgaggcattgaaactgaacctcaggagatagataggaggtcatttctgacagagcaagcagtatttagacaatagtcaaaaagatagtgattgtatactgtatcatagctgaactgtcaataatgtggagagagtgttgaaaaaatagtgtgaaatggtagtttaaactttatcccaatttaaatatatgaaagaaaatgaataattaccattatttgttaca

SEQ ID NO: 415265 - DNA, 395 bp, Homo sapiens
cttgtcttttgctacctatctgtgagtaataaaattgcttcactgaaattgttgtgtaaatattttatcactcttgacttatgcaagtggactgatgtgggtgcatgatattggtaaattttataaaaataaaagttttaatattttcttaccatttccctaattgataatcttccctatctcctgcagtatatagaggacattttggttaaaaaaatttaagctggtgggggacataacttggctgataacactagacatggcccttaattataaaattctgccaatgtccctttkgaattgagagggaatttccatggttggtatcataaaatgccagtgaaattttccatagagttctagagaattgtaggtggctatgaaaaacagtacca

SEQ ID NO: 415266 - DNA, 565 bp, Homo sapiens
gaatacctactaagtacaaggtaatatgaattcctgccacttactggttctgtaggccttggcaagccacttaaactctctgagcttcaatttcctcatctgcagaatagggataatagcatgtggtactctgtgagattattgtgaaaataaaatgagtgtttggataacaaacgctgaagaaacattcttttattaaataagacccacagtaagggaggtagacatatgtaatgagaatatccctatatgtatctttgtttaccaacactaacctgggagagaaaaactagcccttccctcgttttcacacacgaacatgcttattcatggtatgcatgttattcagttagatttgctagacagctrggggtgacagtaagggagtcacactgcagagagggttatctactctcaatctcactggctccttctcagcttccgtgctctgctattcctttcctctagaattaccttcttgatctccaaattgtgcagatcagttcacttctagtcttgtctccaaaagaacataaccaaacccactgagatttttcagaagaaa

SEQ ID NO: 415267 - DNA, 575 bp, Homo sapiens
ctgattaaaaacattacataagaagggaatcatagtaatggcttagggttgcctcttgaagacttttcttggttgaccatttctatgtcataagtgcaccgtgacaaaggacctaacaaaagagtagaggaagatgtaaagcataaattaagaactataaatggcgatctgaactagtgcctaaagaaaaaaaamattgagatatactaagtaagaaccatatatcaagactagggtccagagtttggagaagatatgtcagaaggcctcatgagtgggaaggagagccatgccctctgccctcctccatactttcctccctgggcagagatgcttacacacttacatgcttacacctgcaccatgaggccaggattctggcaatcgtatcttatgttacaaatacaccaactagctgcttacaacattcagtaagtcttcttaaaataaagcagccttggagacaacttctaccattattctataaaaaactggatcttttatcattcttataaattataagaatgtatatataaattacaagaatgtataattataaattataatactgtgta

SEQ ID NO: 415268 - DNA, 593 bp, Homo sapiens
tccttccctttcaccattcttgaatgtcagagctcctctttaacctctttttcctttagaagtacttgcccaataaatcttttgattgtctgattctgtcttaacctctgcttcttagagtacctgaactaacccatgatgaagattcttttctttaccaaattttaatcaggctctgaactttctcctaggcccatctgtttactctcttgtaaaatccagttttagcaaaagaaccctgcgaagtcagtttagccagaactccccgcccttgagarctgatcgttctcagtatctcatcatccttgatacctgaccacgttcctcctgcaccaccccacagatgatgtctgatcactctagcctgtttttggcaagaattctggttaggtggctttggttagaaacccctatactcctggattgtttctttgtagtaattttctatccactgacccaaccctgctttttgctataaattcccgcttgtccttcctatacttggagttgagcccaatctctcttcctcgctgcaaaattatattgcagtggtccctgtatctattgcaatggttctgaataaagccttcctt

SEQ ID NO: 415269 - DNA, 593 bp, Homo sapiens
tccttccctttcaccattcttgaatgtcagagctcctctttaacctctttttcctttagaagtacttgcccaataaatcttttgattgtctgattctgtcttaacctctgcttcttagagtacctgaactaacccatgatgaagattcttttctttaccaaattttaatcaggctctgaactttctcctaggcccatctgtttactctcttgtaaaatccagttttagcaaaagaaccctgcgaagtcagtttagccagaactccccgcccttgagagctgatcgttctcagtatctcatcatccttgatacctgaccacgttcctcctgcaccaccccacagatgatgtctgatcacyctagcctgtttttggcaagaattctggttaggtggctttggttagaaacccctatactcctggattgtttctttgtagtaattttctatccactgacccaaccctgctttttgctataaattcccgcttgtccttcctatacttggagttgagcccaatctctcttcctcgctgcaaaattatattgcagtggtccctgtatctattgcaatggttctgaataaagccttcctt

SEQ ID NO: 415270 - DNA, 593 bp, Homo sapiens
tccttccctttcaccattcttgaatgtcagagctcctctttaacctctttttcctttagaagtacttgcccaataaatcttttgattgtctgattctgtcttaacctctgcttcttagagtacctgaactaacccatgatgaagattcttttctttaccaaattttaatcaggctctgaactttctcctaggcccatctgtttactctcttgtaaaatccagttttagcaaaagaaccctgcgaagtcagtttagccagaactccccgcccttgagagctgatcgttctcagtatctcatcatccttgatacctgaccacgttcctcctgcaccaccccacagatgatgtctgatcactctagcctgtttttggcaagaattctggttaggtggctttggttagaaacccctatactcctggattgtttctttgtagtaattttctatccactgacccaaccctgctttttgctataaattcccgcttgtccttcctatacttggagttgagcccaatctctcttcctcgctgcaaaattrtattgcagtggtccctgtatctattgcaatggttctgaataaagccttcctt

SEQ ID NO: 415271 - DNA, 549 bp, Homo sapiens
gaatgtaatcttccaagagcaagcactttttcccctgatttgttcactacctcaacatgaacaataatgccaggttttcagaaaatatttattaatccaagctctactacttgttagttgcccataatctctttggatataaatgaatgaatgtaggccttagttctataacagacagtatgaatgaaaacatcaaagygaattcaaaaacatttgcaaaagcaggcctagaaaaaagataaaaagatttactatttcagccagtgtagagaaaaatcaaacattaatctaattacagtttgagtttaaggacttatattttgaaggaaataaccatatttaattgatggcatttccttttttgggggggcaggtggggtatggagttttgctctgtcacccaggctggagtgcagtggtgtgatcctgtctcactgcaacctctgcctcctgggttcaagcaattctcatgcctcagcctcccaagtagctgggactacaggcacgtgtgccaccatgcctggctaatttttgtggttttttttagta

SEQ ID NO: 415272 - DNA, 549 bp, Homo sapiens
gaatgtaatcttccaagagcaagcactttttcccctgatttgttcactacctcaacatgaacaataatgccaggttttcagaaaatatttattaatccaagctctactacttgttagttgcccataatctctttggatataaatgaatgaatgtaggccttagttctataacagacagtatgaatgaaaacatcaaagcgaattcaaaaasatttgcaaaagcaggcctagaaaaaagataaaaagatttactatttcagccagtgtagagaaaaatcaaacattaatctaattacagtttgagtttaaggacttatattttgaaggaaataaccatatttaattgatggcatttccttttttgggggggcaggtggggtatggagttttgctctgtcacccaggctggagtgcagtggtgtgatcctgtctcactgcaacctctgcctcctgggttcaagcaattctcatgcctcagcctcccaagtagctgggactacaggcacgtgtgccaccatgcctggctaatttttgtggttttttttagta

SEQ ID NO: 415273 - DNA, 549 bp, Homo sapiens
gaatgtaatcttccaagagcaagcactttttcccctgatttgttcactacctcaacatgaacaataatgccaggttttcagaaaatatttattaatccaagctctactacttgttagttgcccataatctctttggatataaatgaatgaatgtaggccttagttctataacagacagtatgaatgaaaacatcaaagcgaattcaaaaacatttgcaaaagcaggcctagaaaaaagrtaaaaagatttactatttcagccagtgtagagaaaaatcaaacattaatctaattacagtttgagtttaaggacttatattttgaaggaaataaccatatttaattgatggcatttccttttttgggggggcaggtggggtatggagttttgctctgtcacccaggctggagtgcagtggtgtgatcctgtctcactgcaacctctgcctcctgggttcaagcaattctcatgcctcagcctcccaagtagctgggactacaggcacgtgtgccaccatgcctggctaatttttgtggttttttttagta

SEQ ID NO: 415274 - DNA, 603 bp, Homo sapiens
ttggaagcaaccaaagtgtccatcaacagatgaatacagagtatttcattaccccccaattgttcctctgatttcactctttgcactaacagtctaatctccccacaaagtggtattatctttataaatgtataactgagatcacactattccctataacagctttctgttctttttgaactcaygaaaagtactgactaaagtccttttggtgaactaagatgtgtcatgtgaaccatctggaatgcctcgtgtgaattatctgcatggttttgctccctcacatcagatctctgtgcaaatgtcatcttaagagagaggtggtctttcctagctattctaaataacatatcattttcctctctctcccaacattccttcttttctgagctttatttttccttatagtttctcattactaaatttattatatgttcatttactagcatacttactaattttctgtcttctatcacttgattataagctctcttttgtctgttttcttctctactaaaaaaaccctaaagttaaaaccatgtctggtacatagtgggtgtgaatgaataactgaatgaatctgagggagtgatcatgaccagg

SEQ ID NO: 415275 - DNA, 603 bp, Homo sapiens
ttggaagcaaccaaagtgtccatcaacagatgaatacagagtatttcattaccccccaattgttcctctgatttcactctttgcactaacagtctaatctccccacaaagtggtattatctttataaatgtataactgagatcacactattccctataacagctttctgttctttttgaactcacgaaaagtactgactaaartccttttggtgaactaagatgtgtcatgtgaaccatctggaatgcctcgtgtgaattatctgcatggttttgctccctcacatcagatctctgtgcaaatgtcatcttaagagagaggtggtctttcctagctattctaaataacatatcattttcctctctctcccaacattccttcttttctgagctttatttttccttatagtttctcattactaaatttattatatgttcatttactagcatacttactaattttctgtcttctatcacttgattataagctctcttttgtctgttttcttctctactaaaaaaaccctaaagttaaaaccatgtctggtacatagtgggtgtgaatgaataactgaatgaatctgagggagtgatcatgaccagg

SEQ ID NO: 415276 - DNA, 603 bp, Homo sapiens
ttggaagcaaccaaagtgtccatcaacagatgaatacagagtatttcattaccccccaattgttcctctgatttcactctttgcactaacagtctaatctccccacaaagtggtattatctttataaatgtataactgagatcacactattccctataacagctttctgttctttttgaactcacgaaaagtactgactaaagtccttttggtgaactaagatgtgtcatgtgaaccatctggaatgcctcgtgtgaattatctgcatggttttgctccctcacatcagatctctgtgcaaatgtcatcttaagagagaggtggtctttcctagctattctaaataacatatcattttcctctctctcccaacattccttcttttctgagctttatttttccttrtagtttctcattactaaatttattatatgttcatttactagcatacttactaattttctgtcttctatcacttgattataagctctcttttgtctgttttcttctctactaaaaaaaccctaaagttaaaaccatgtctggtacatagtgggtgtgaatgaataactgaatgaatctgagggagtgatcatgaccagg

SEQ ID NO: 415277 - DNA, 534 bp, Homo sapiens
aatgactttttaaattctgtcatattagtattatagatgcaatgcaaaaagtatttttaaaaaggaataataggaatatcaaaaatgaaaataatgacaatttagacaaggttaattcttgaatcaattttctcattttttctaaatgtttataacaaaagcttaaaatgaaaaattgtcagaaatgtaatttaatggcttcctttaaaatagtatgtatgattaattctattctttgaaatatttcaaaattttggttccataataatcataaagaacttgaattttagtggctttcattaaaatagagcctttttatacctgtgtttactgggtaacacgagtgagataattgtttttaagttagagaggttatccagtcactcaggggcwcagaaattcccaagttcaggaaatcatcatgatcagaatcctgacaaggaaaagacatcttaaaatattacatccaggtacaatcctttatgatttgaatagaaacaattattcttaaattgctttataaattgcataata

SEQ ID NO: 415278 - DNA, 609 bp, Homo sapiens
aaatcttcaattcaacaataatcttttttgagtgtcaactgcccttttggtagtttttcttactcctagtggcaaaacttgtgtggaaaaatgccataggtgagtacgttaaaacagtatttatgtgagtgaagtaacacatattaggatataaatgtatgttaccaagtctttttgtggattataaactaaatgtgataggcatttgattaatggttaaaaataaaaatattttaaaatgtaatatttttatcctagcataaattttaaaaatattgatttgttattaatatggtttcatgggttggcatcatgtgcataagtcaggtatgtgtgcttgtatatgtgtatgcacacatatgtgatattcattacatgctacgtaagacaggagagccrtgtgatatactaaaatagagttgggttagaatttgggcagcatgtactgtaatattatgtgaagaagttgctttctctctctgtcctccaaatttttatcactaaaatgaacgcttcattccagctgaattacaagattccttttcatgctaactacttaaaaaaaagactagaatacattcatgtgccatagagaggaatagaaagacc

SEQ ID NO: 415279 - DNA, 538 bp, Homo sapiens
ttacataaaatagatattacatatatatgaaatatataaaatacgtaatatataattacacatataaatatataatatacatatattacatatatatttatatatgtgtaggtattacatgtttatacataaaatatatatgtatagatataaaaatatatataaaatagatataaatatatatgtataaaatatatattacatatataaaatatatattacatatataaaatgatgaaatactatgtagccataaaaaaggattaaataatgtattttgcaacatggattgagctggaggccattatcctaagacaaataactcagaaatagaaaatcaaatacttcatgttcttacttataagtgagagttcaacaatagacacacatgaacatatagatggaaattayagataccggggactccaaagtggggtgggtcagagcgggtgaaggttgaaaaattactgttggatacaatgatcactattcgggtgatgggtgccctagtagcccaaatttcaccattacataaata

SEQ ID NO: 415280 - DNA, 360 bp, Homo sapiens
gctttattcttctcattgaatctcatcaggtggccccccagtatcaattggtcctgttactcatggtgataacattgatcacttgattataaaggtatctgcctggtttctccaatgtaaagtgactgctctcccctttgaaattaataaacatatatatttttaawattggggtacttggtgtatatatttatgaggtacataagaggttttgatacaagcattcaataatggggattggggtatccatctcaaacatttatcctgtgagttacaaacaatccaattacattgtttgttattttaaaatatacgattattattgactgtatttaccctattgtgctatcatatagtagg

SEQ ID NO: 415281 - DNA, 360 bp, Homo sapiens
gctttattcttctcattgaatctcatcaggtggccccccagtatcaattggtcctgttactcatggtgataacattgatcacttgattataaaggtatctgcctggtttctccaatgtaaagtgactgctctcccctttgaaattaataaacatatatatttttaaaattggggtacttggtgtatatatttatgaggtacataagaggttttgatacaagcattcaataatggggattggggtatccatctcaaacatttatcctgtgagttacaaacaatccaattacattgtttgttattttaaaatatacgattattattgaytgtatttaccctattgtgctatcatatagtagg

SEQ ID NO: 415282 - DNA, 360 bp, Homo sapiens
gctttattcttctcattgaatctcatcaggtggccccccagtatcaattggtcctgttactcatggtgataacattgatcacttgattataaaggtatctgcctggtttctccaatgtaaagtgactgctctcccctttgaaattaataaacatatatatttttaaaattggggtacttggtgtatatatttatgaggtacataagaggttttgatacaagcattcaataatggggattggggtatccatctcaaacatttatcctgtgagttacaaacaatccaattacattgtttgttattttaaaatatacgattattattgactrtatttaccctattgtgctatcatatagtagg

SEQ ID NO: 415283 - DNA, 571 bp, Homo sapiens
tgctcaatgggtttttgactaagttattcaggaaggttgagtaaacagtagagattagtagacattttgttattcaggaaggttgagtaaacagtagagactagtagatattttgtgcaatctgccaagatcaaattgaaaggaagacagtaggtggttttaaacatccttaaagcattccaccagcctcccttggacctcccaaccttcccaactttaaaaaaggcagagagaagctttatatgcacttggttttaaacatgtcaatttttcaaccttgttgtcyaccgtttgctttttctgtcccatcagatgaacattataacttacaacaatttaggttgccattttaatgtcaaaacaaatatcagcaagtttttcactgatgtatttctgaattaaaattttaaaaccttgaaaatgcttgtgttttctttgtcagcaagaatagcaatatactgagtggacttcaaatcaagtatgaagtttttatatgcaagtcttgaaacagaaatttcagacatgccagtgaagtaatataattacaatgttcctggaaagaagaaaggtt

SEQ ID NO: 415284 - DNA, 599 bp, Homo sapiens
aataataggttctcctctgtttctaagggagttaaamcagcaggaggttcagtatcagagatccaacatctttagctcattgttgactaagggaactgtcaatattccaccagttacataatgtttcacaggtgtgagtaatcttcaggttctaattattaaaactgatttgagattataatagcaggatgtgtttgttatactttgtattagttatatattgctgcatagtgcattgcctcaaaactcagtggctcaatgtagtaataatttattatctcttacttttctgtaagaggccagtaatttaggagcagcttggctgggcagttctgacttgatatttcttataaggctgcagatacatgtttcctagagccacaatcagctgatgacttgactaggattagaggctccatttcaagatagcagactcacatggctagcaagctgctgctggaacttggtaataggctttagttctcctcctaggtgcctctccatcttactacttgagggtttccatggcttttaggctggcttccctggagtaagggatcaaaagaccaaggtgcagcctctaatgcctttatacttaa

SEQ ID NO: 415285 - DNA, 643 bp, Homo sapiens
caaacttcaaaattaccaagatcaaacagaacattgttataagcgaatgatgaattcttgttttacaaccttaattatacccaatttgtagtaatcggtatttatgcagctgctgtgcttcagagcagcttttattttcacacatacatccattcattttgaaatctttcaaagctagtgtggatatggtgagactcccaattattcaaaaaaaaaaaaaaaacagaaacaaatgacagtcttcttaagagtggtcagtaagttacaactgggtgttttctctctgctaagtttagacattacactctattcaattttatcttgattaaacaattgaaaatcatgtgtgcacgcaactggtataaacagatcatttacctaatatcagcatttttctgaagggactaagtcaatgmgaatgaaaaaaatgtggttgactagaaaatacacatacacacacacacgagccatatattaacattaaagtagagccttacatggattttttttaagtcaagaagttaattcaaatacaatcttatttttatacagtactgtgttaataggaaataatatatacctttgtgattaatccttataggagattcaaatgacagttattggactttaaatattgtaatcc

SEQ ID NO: 415286 - DNA, 579 bp, Homo sapiens
gataaaacacactgtggtgttatatttgttcaacagyctccaatcagagaatctgagccttcaataagtagttttgcaagcaacagcagtgtggcagagaaactctgacagttgatttttagtttacagcagaaatgtgccttctctttctgtctcaatcatgacttggcctcagcatgtgccttccaaaacccgcttctgaaagaaaaggaatattacaaaagtgtcagtgtgcaagatgggtatttatgaagcagaatatttagagtaactggttcagcttacaaaatacacctattaaaatatgacaaaaatcaaatctttattggttttgcaaacctggggagaaatttttaataaaaactttaattgtattctcacacagtgggaagatgcaacttttctgtgaaatattatgattatactgcatacactaccttaatatacttctagatagggcctgtcattccactatgaacaagtttcattttgagatgctttgtctgtaaacaaattatatatgatttgaagttaacctagtgaatttatatgattttctaagatatattgaagtctttt

SEQ ID NO: 415287 - DNA, 579 bp, Homo sapiens
gataaaacacactgtggtgttatatttgttcaacagtctccaatcagagaatctgagccttcaataagtagttttgcaagcaacagcagtgtggcagagaaactctgacagttgatttttagtttacagcagaaatgtgccttctctttctgtctcaatcatgacttggcctcagcatgtgccttccaaaacccgcttctgaaagaaaaggaatattacaaaagtgtcagtgtgcragatgggtatttatgaagcagaatatttagagtaactggttcagcttacaaaatacacctattaaaatatgacaaaaatcaaatctttattggttttgcaaacctggggagaaatttttaataaaaactttaattgtattctcacacagtgggaagatgcaacttttctgtgaaatattatgattatactgcatacactaccttaatatacttctagatagggcctgtcattccactatgaacaagtttcattttgagatgctttgtctgtaaacaaattatatatgatttgaagttaacctagtgaatttatatgattttctaagatatattgaagtctttt

SEQ ID NO: 415288 - DNA, 529 bp, Homo sapiens
  misc_feature (1)...(529): n = A,T,C or G
ttagcaggttttgatgactatgttacaatcagaaagatggaggtcagagtttgaatgatagacaaggatataatttcaagtggtattaggtgagttccaatacangagatgactttccagatgtcactactaactggtgagcatttgatctcagtttggttccacttgcagtaaaactttgctcaagacacagcctcaaagaaaagagaagagagttcacaaaactttgaatgaggaagagcccatacagcgaccttccatttcactaaaataccaatccgaattatgacattayattttccctcatgaaaaaatggtcaatggcttatgtacaaattttacagtacaaagtgttttttcatgaaatatttcttgtaagcctactatgaacatgtctttcacttagactataatatcatttgtgttcccataaaacttcaatagtggtaggtgagagaagactttcttaaaactagactaaatactaaataaagaattcttaccagcttaagagattttgggctaagac

SEQ ID NO: 415289 - DNA, 564 bp, Homo sapiens
tcactaaaataccaatccgaattatgacattatattttccctcatgaaaaaatgrtcaatggcttatgtacaaattttacagtacaaagtgttttttcatgaaatatttcttgtaagcctactatgaacatgtctttcacttagactataatatcatttgtgttcccataaaacttcaatagtggtaggtgagagaagactttcttaaaactagactaaatactaaataaagaattcttaccagcttaagagattttgggctaagacaatggggttttctaaatgtataatcatgtcatctgcaaacacagacaatctgacttcctcccttactggaacacctgctatttctttctcttgcctgattgccctggccagaacttccaacactatgttgaataggagtggtgagagaggccatccctgtcttgtgccagttttcaaaggggatgcttccagtttttgcccattcaatatgatattggctgtgggtttgtcataaataggtattattttgagataccttccatcaatacctactttattgagagttttcagcatgaa

SEQ ID NO: 415290 - DNA, 564 bp, Homo sapiens
tcactaaaataccaatccgaattatgacattatattttccctcatgaaaaaatggtcaatggcttatgtacaaattttacagtacaaagtgttttttcatgaaatatttcttgtaagcctactatgaacatgtctttcacttagactataatatcatttgtgttcccataaaacttcaatagtggtaggtgagagaagactttcttaaaactagactaaatactaaataaagaattcttaycagcttaagagattttgggctaagacaatggggttttctaaatgtataatcatgtcatctgcaaacacagacaatctgacttcctcccttactggaacacctgctatttctttctcttgcctgattgccctggccagaacttccaacactatgttgaataggagtggtgagagaggccatccctgtcttgtgccagttttcaaaggggatgcttccagtttttgcccattcaatatgatattggctgtgggtttgtcataaataggtattattttgagataccttccatcaatacctactttattgagagttttcagcatgaa

SEQ ID NO: 415291 - DNA, 532 bp, Homo sapiens
tcttaagctatgttggaatttaataagtatttttgaaaaaaaataaggataatccctaaaatactagatatgacatacatacatttcaaagcaattgtaggggaaatcgatattttaaaaatatttgatcaaccaaaagkggggggagaagaaggaataaaggaaaatcaaaaagaaaaagcaaaataagatggtagaaatatattaagaaatactatactgaaaagacagaactattgattttttcttaaatctagcaaaatactatttctgagaagcatgtctaacacacaggaactaagaaaatttgaaagtaaaagaattgagaaaggtaactaaggcaaatacaacttttttaagaaaaagaaaattagtatggttacaatcatataccaatcttagtgctatagtataaacgtattgagatcatttgtaatatacagtagtgttactgtgtggagaggttcaggcttcaaggtgctggtgtctgaatttgatcctatttattgccccagttgtgttattaagttat

SEQ ID NO: 415292 - DNA, 534 bp, Homo sapiens
  misc_feature (1)...(534): n = A,T,C or G
aagctgtaggttatttgtgcacctacctaaaattcataggtaatggcagtttaaaaaatttaagactacatcaacttctggttaaaaaaatctagtaagacagacattttttgataatatgaatcaccgaaaccacgtcagccaccttgaaactggccattttgaatgctgtaaaaatggcattctangattacaaacaccatcatgggttaaaacgggaaattctttaccttttctcagtgaggcccctctaaatagagagagcctgttgatattactttcaggctatttgactattcctcatgaaattacaaatgctaattgccctttgaawgttaattttaacaataacgggttagaatagagtcaagtcttcgagggacacgatgtgtccctggacggtacgatcagttagattttaataatgtgatggaatatattaacaaatataggaaagaatgtgaacaggggcttggtcagcaaagaaagcataaaaagaaaggggagacagagaggaagtgaggatatggccca

SEQ ID NO: 415293 - DNA, 523 bp, Homo sapiens
gaagagtgcttgtttattaatgaatttaaacgagaactgttactgtaacatggaatgacagcctgagccctatgctttctctaagcaggcagggaaaatattcgaaatgttttagcctactgtcactgtgttgtggggaatacttgttttggagagatgcaccctctctctcacagccctttgtggtggctaccgtacttgtcatctactggaaactctactgtgaaacaagatttagggacagtgtttacatcaccttgttcatttctgaayattacaacataccattgtccatttcctccatatgtatttatgtatatacacatctataataatatatatgactatattttattaaaatgcataacaaaatgcacacactctcatacatacacataggacatgtatacatagtgcatgtacacataagtgagcacccctggagaggctgtcagagggaacaaatgagccctctatttcttacaacatcgaatgagcctcactcaggtttagtggtgaatgt

SEQ ID NO: 415294 - DNA, 523 bp, Homo sapiens
gaagagtgcttgtttattaatgaatttaaacgagaactgttactgtaacatggaatgacagcctgagccctatgctttctctaagcaggcagggaaaatattcgaaatgttttagcctactgtcactgtgttgtggggaatacttgttttggagagatgcaccctctctctcacagccctttgtggtggctaccgtacttgtcatctactggaaactctactgtgaaacaagatttagggacagtgtttacatcaccttgttcatttctgaacattacaacataccattgtccatttcctccatatgtatttatgtatatacacatctataataatatatatgactatattttattaaaatgcataacaaaatgcacacactctcatacatacacataggacatgtatacatagtgcatgtacacataagtgagcamccctggagaggctgtcagagggaacaaatgagccctctatttcttacaacatcgaatgagcctcactcaggtttagtggtgaatgt

SEQ ID NO: 415295 - DNA, 588 bp, Homo sapiens
tgatttcttttcatacagacagtatgaattcgatttgttatttatgcaggtaaatacaaaggcgagattgtagagcagaattaaarcctggaagaccaattagagatatgctgcaatattaatccaggtgaaagttgaggagggcctcaatcaggcatgggcaaactatgacccttaagccaagtgcaatctgttgttagaaataataactttgaggaacaggagtatgttccctcatttacatattgtctacgactgcttctgtgctacaatggcagaggtgagtaattttgacagagaccatatggcctccaaaactgagaatatttattaggccctttatggaaaaacagactgctgattcttgacttagagtaagggagcgagaaagaaaagtcagaaacgattttgagaaatgatttactatagaattcatcgtacatgctggtggatgtgtgtagtaggagaggaagagggaagtctcatgaacaaaccttagtttctatttggtgactgtgttcatggtcatgtcagtaacttgcaccaaaaacaaatgagacacgtttagcttgggggagacagagaatg

SEQ ID NO: 415296 - DNA, 588 bp, Homo sapiens
tgatttcttttcatacagacagtatgaattcgatttgttatttatgcaggtaaatacaaaggcgagattgtagagcagaattaaagcctgraagaccaattagagatatgctgcaatattaatccaggtgaaagttgaggagggcctcaatcaggcatgggcaaactatgacccttaagccaagtgcaatctgttgttagaaataataactttgaggaacaggagtatgttccctcatttacatattgtctacgactgcttctgtgctacaatggcagaggtgagtaattttgacagagaccatatggcctccaaaactgagaatatttattaggccctttatggaaaaacagactgctgattcttgacttagagtaagggagcgagaaagaaaagtcagaaacgattttgagaaatgatttactatagaattcatcgtacatgctggtggatgtgtgtagtaggagaggaagagggaagtctcatgaacaaaccttagtttctatttggtgactgtgttcatggtcatgtcagtaacttgcaccaaaaacaaatgagacacgtttagcttgggggagacagagaatg

SEQ ID NO: 415297 - DNA, 588 bp, Homo sapiens
tgatttcttttcatacagacagtatgaattcgatttgttatttatgcaggtaaatacaaaggcgagattgtagagcagaattaaagcctggaagaccaattagagatatgctgcaatattaatccaggtgaaagttgaggagggcctcaatcaggcatgggcaaactatgacccttaagccaagtgcaatctgttgttagaaataataactttgaggaacagragtatgttccctcatttacatattgtctacgactgcttctgtgctacaatggcagaggtgagtaattttgacagagaccatatggcctccaaaactgagaatatttattaggccctttatggaaaaacagactgctgattcttgacttagagtaagggagcgagaaagaaaagtcagaaacgattttgagaaatgatttactatagaattcatcgtacatgctggtggatgtgtgtagtaggagaggaagagggaagtctcatgaacaaaccttagtttctatttggtgactgtgttcatggtcatgtcagtaacttgcaccaaaaacaaatgagacacgtttagcttgggggagacagagaatg

SEQ ID NO: 415298 - DNA, 577 bp, Homo sapiens
tccaaaagtccttaaactcagcaagttactacttgtgacctaatttcagcaaagcatccctcctttctgctacttctctgccttccacaagttttgcattttaatgtattgatttacatttcaataactgtatctctactgtgggtccccaaggaaaggaactatgatctattcatgttggcatcttatacatagtaggtatctattaattgtttttaattacactgaatgagttgtgagaaataccaactctgttttagctgggtgcttcagcaataagaggaackcttttgtatttagaaagatgtgattggcaaaagcaactgcgagataatcacataagtcaaacaatgcccttgatacatgcatgcccttattttaatgaagacttccatgttaaaaaggttaagtgatttgcccaaaggttgcagtagccagagctgctcctgctctcagactgacccttccagctctgaccgggccgtgggcagaggaaaaggacaggaaccaagcagtgggagtgtttcattatctctctgtaacatctacagaacaaggctgccatcattgaaatgcc

SEQ ID NO: 415299 - DNA, 440 bp, Homo sapiens
taatcatcatcaaatggaatcaaaaataaccatcatcaattggtattgaatggaattgtcatcaaatggaattcaaaggaatcatcatcaaatggaaccgaatggaatcctcattgaatggaaatgaaaggggtcatcatctaatggaatcgcatggaatcatcatcaaatggaatcgaatggaatcatcatcaaatggaatctaatggaatcattgaacagaattgaatggaatcgtcatcgaatgaattgaatgcaatcatcgamtggtctcgaatggaatcatcttctaatggaaaggaatggaatcatcgcatagaatcgaatggaattatcatcgaatggaatcgaatggtatcaacaccaaacggaaaaaaacggaattatcgaatggaatcgaagagaatcttcgaacggacccgaatggaatcatctaatgg

SEQ ID NO: 415300 - DNA, 570 bp, Homo sapiens
aaagaataacagatcaacagatacctctcaatgtgtttgctaattaataaaaatcagtttcttacaactaatgtttgtaagaaaatgttcattttaagtgctaaatagtgaagaaaatttatcacctaaaatacacccatcaatataaggcaagaaaaaatcttaacatgcagccattcgcttttgccatgccctgtcctgtttacttcttaagaggtttatttttgtacttttgcagaataaactttagtaatctagaactggaaggtactatatatgtatgtgtgtgtatatatatatataaaagaaaaacatatatatatttcaattacttgaaatgtaaaaacttaccgaatacaaatggaaaaagtgatgtgtattatatcatattgctttttgtccatctttgtgatttatttactcacttcatgtttttcatttacaaaattgtcaagytagccaaaataattcttgttttcttaattgggagagaagagacctgacagattatctatactcttcatatgttaaaagaccatttcctgtaaaactgacctagtgcacaaactg

SEQ ID NO: 415301 - DNA, 608 bp, Homo sapiens
ccaacggatgagagtttctgttgctccttgttaatttagtttacactgaaattacccagccttttaattactcactatttgtataagattcgttctaaataaaccttaattcttttctgaaatattagaaaggctaatttgtgtgacttgcagagatatccagaaatacacatttaaagaatgcaagtccctttgctcagatgccaaactcagcaccctgactytctattggcagcttggtacttccatagacaaacacactcagaaaggtgctttctacaaagaaagagcattggttcccacagcaagaaggttgctccttaaccatgaattggcatgtagatgtgtgaatcagatcctgtaaactttgttactgtgagtcactcacccagagctggttagttgtaaatcaacttcaactttgatttcctgaacttcaacacctgaagtccagagtcaagacagatggtcattttccagcatggggagtgagctggaccaaatatttctgttttaccaattgtcacagataaagcctgtgttatgattctcatacgtgatataagagcaggtatttagaataatttggaatatgtataatcaactga

SEQ ID NO: 415302 - DNA, 594 bp, Homo sapiens
cagttccttgaattgtaacttaatacccagctttctcatgtccttaggcaaatattaaaaattcaattgctcacagctctcagtaatgcatttctccacaggcggaaaggagatgaaagaagagggaaagctggcctttgyagtgaaagcaggttcaaatttgttcaaattagccagccagccaatcatcaaagagagttttagtccatggagttgcagtaccactagcagccttctgaagggaatgaaaacccgtaatagcgtttccggtctgcccttatcttatatacttgcattaaggtattatttgtgaaaatgagagatggaataaaattcataaacaaatagaaaactcaccgcaagtaggataccttttaaagttatccagtattcttcctgagtctgccagtctccagggcctcagcctgtggacttttgcatggctgtggttgctagggcaatatgcatgattcccaccagagtgcaaatcaggcgagagccttccagccttggttttttcaaagaatacatttcatatcaatataaggactaaagatacaattactgcagggaaatcattgccttaaagagatg

SEQ ID NO: 415303 - DNA, 568 bp, Homo sapiens
tatatttctaggagatttaaatatgggtcacatgattatgagtcctgaaattctgaggctgggccccacttttttcatctctttcttcaaagaactgagtctaattaatttttttacatcagttttatcagctgtagttttcacagaataaaatgcacttatttaaaatgttcagcttgatgagttttgacaaatgtatgtactcatataagcactgcctcagtcaaggtacagaacagtcccatcatccctaaacatttctcaagccctttacggtccatgtctgccccaacccaagctccagaaaccaaactckgctttctgttaaaattgataaggtttgagaggaaactgatcaattttctggaatttcatgtaaatggaattacacagtaaaagaaagaaagcaaaataaagaaacccttaatggttgccatagggtttacaatataaaatacacattaacttaccagagtatcctccctatttctataaacttaatccagtgtgttatagaaacttcaccctacatagctccaatcaccacactcattttgttatacagttg

SEQ ID NO: 415304 - DNA, 580 bp, Homo sapiens
aggtacacaatggaccctttcactaggtgtcagcttgcatttacaagtcttttatttcatgaaaattttcttggactatagttttaaatgcttgttttttccatcactttcatgttcttcattggggaagccaattatctgtatgttaaatgtcccttgccagtcttctatagcagagatagacagatattttctgaaagtattttaggttttgcaggccatatattatttcttctttttcttctgtttctccttatcttccccttcttcttcattttttctttttttaatttttctttttcctcttcctttttcaaacaactctttaaatatgtacaaaattattttatgattagtaattatacaaacacaggatacaaactagaattgactcatgatctgtagttttctgacatctatacttactaartttctctgaaagattttaaaaaattctctttctttatttctgatacttttgtctctggctttttaaaaaaaattatctactttttgtaccatgttttccatggtgtcttagccaccttggactgtgataacaaattgcagtaggatgtgc

SEQ ID NO: 415305 - DNA, 616 bp, Homo sapiens
atcacaatcctaaatatatatgcacctaacattggagctgctaaatttataaaacaattactattagacctaagaaatgagatagcaacacaataatagtggggaacttctatacttcactgacagcactagacaggtcataaagacagaaagacctatagccttgaacaaatgtatgtaacaggtatttacagaagattctacccaacaactgtagaatatacattctattcatcagcacatggaatattctccaagacagaccatatgatcggccacaagatatgtctcaacaaatttaagaaaatcaaaattatatcaagcactctttcagaccactgtggaataaaattggaaattaacttcaaaaggaaccctcaaaaccatgcaaattcatggaaattaaataacctacycccgaatgatcattgggtcaacaatgaaatcaagatggaaatttaaaaattctttgaactgaatgatcttagtgacacaatctatcaaaacctctgagatacagcaaaggcggtgctgagaggaaagtttatagcactaaatggctacatcaaaaagtctgaaacagcacaaatagacaatctaaggtcacacctcaagg

SEQ ID NO: 415306 - DNA, 553 bp, Homo sapiens
tttttcctgttttatcccacctgggatatgaatcattcccttgtcgagcatatccaccatgtatacacacccacctgttagttactggcatcatctgctctgttggatgtcagacactgacatccaaccattgacattgtcatggcttggtgatctaagatcacccaaacaaatcatcctccttctgacgtattgtcaaaaggccaatagtagcccaatgctacatcacaatgtctrcttaatttacctcacctcatctcatcacataggcattttatcatctcacaacatcacaagtagaagaaggatgcatacagtacaataagctatattgagtgaaagagtgagagaaagaccatattcacataacttattacaggaaatttttataattgttctattttattattagttattgttgttaatattttgctgtgcccaatctataagtcaaattttagcataggtatcgatgtataggaaaaaaatagtatgttatatgcagtttcaggcatcccctggggaccttggaatgtatctcctgcagataagg

SEQ ID NO: 415307 - DNA, 552 bp, Homo sapiens
gaaacatctcatatttctagaaagtaaagttcttacctcacccacagaacaaacctacggtgatgagggcacgtccaagggacacagatgccaactgaaagagcgtacaatggtcaaaaccgaaggaatttgaccacgaaataaataaagcagcattggattataacccaaagtataaaataaatatccatgagttcatactaatataaataaaggattaaataaataaacaaatgtaggggagaagaaaaatctcttatgcagaagaaacaaacattatttatgtagatgcctaccaaactgttaaaacattactccccactccctaagtgtggggtgtgtagagtgaaatttcaaaagagtacagtgtggaaaagagagagagaaaaaaaagagtaactttaaatccactttgtttgtgaactccctagtgagtaaacggtcttttctctccctaaaaatttttttaaaaagtaacttcagagcaaygaaatctaacaaaacctacctcagccaggtaatacgggtcaatatcaagagttacagttaatg

SEQ ID NO: 415308 - DNA, 579 bp, Homo sapiens
caagatatcagctcaacctctggggagtggaggaaaattggagactgaattcaatcacattccatctatcatgccaagataaggaaactcaatgaaaactctgcacgccgaagctgtggggagcttccctctttggtgatacacattagtgtgcacagaggatgccttgtcctaaggacacgggagtttcacatttggaaccttcacaaaggcctttctatatgtctttccattggtcctgatttgatacctttataataaaactgtaatagtaaatatagcatttctagtgaattattgaatttgaggggttaataagaaccccaagtttgtagccagatgatcagaagtgagggyggcttggagattcccaagttttaggatggtgtttgaagtgggtggtgtttatcgaggattgtacccttaacctatgaagtttaactaattattgtatacccttaatatgatggaaggaaaatggcacattacttctttgatttttcttccaaaaccaatatccccaatttaactgtgagaaaaatgaaataaatccaaatagggaaatattccaccaaagac

SEQ ID NO: 415309 - DNA, 579 bp, Homo sapiens
caagatatcagctcaacctctggggagtggaggaaaattggagactgaattcaatcacattccatctatcatgccaagataaggaaactcaatgaaaactctgcacgccgaagctgtggggagcttccctctttggtgatacacattagtgtgcacagaggatgccttgtcctaaggacacgggagtttcacatttggaaccttcacaaaggcctttctatatgtctttccattggtcctgatttgatacctttataataaaactgtaatagtaaatatagcatttctagtgaattattgaatttgaggggttaataagaaccccaagtttgtagccagatgatcagaagtgagggtggcttggagattcccaagttttaggatggtgtttgaagtgggtggtgtttatcgaggattgtacccttaacctatgaagtttaactaattattgtatacccttaatatgatggaaggaaaatggcacattacttctttgatttttcttccaaaaccartatccccaatttaactgtgagaaaaatgaaataaatccaaatagggaaatattccaccaaagac

SEQ ID NO: 415310 - DNA, 568 bp, Homo sapiens
tgctagtcctatgtgttgattagtccccagatgcatatacttgtgttggttggttttccaacctttctagtacattaatttgctgtcatcagccactcgctgctgaaggagcctccatgacatctccccagctctttttattcatcttgataagccaaatctctgccctccattttcaggaaacacctctaaaattctttcaaaatctgttatcctaacagagcactaagtttaatatttatagatcatctatattttgccagacactgcagtagctgatgggttttaatgatgaaataaacacagcacatgtgctcttgggacctttaaaccagtgaggaaacaatggttgtgcacatcagtaagtattataggaacacaggacatgagcagaagacagagaaggaacacgtggctcatgtgtgaaagacaaaaagaaatagcccaagtgtgtggtgtaaagaaatctattctatwtgaaaaaacgcatgtccacagactggagacccagaaaacaatgcagttccatgatggaatacacagatatttgatgtgacccatgtgtagt

SEQ ID NO: 415311 - DNA, 586 bp, Homo sapiens
ttttttttgaggtataattgatatacaaaaattgcacatatttcatgcatacattttgatgagtttagacatctgcatacacccatgatacygtcacctcaatcaaggtactacatttccttgtacttttttcttttttcaataagaaaacaacatgagatctaccatcttaacatattttaaagtacacaatacagtattattaactataggcattatgttgtagactagatatctagaacttattcatttttcctcattttttacccctgagtgaccatgtgatctagcaatcccacttctgcatataaatccaaaagaattgaaatgaggatcttgaagagatatctgtacttctatgtttattgcagcattagtcacaatagtcaagatatggaaacaacccaaatatccaacgacagatgaatgaataaagaaaatgtggcacatacatgcaattgaatattattcagtcttaaaaagaaagaaatcctgacatttgagataacatggatgagtctggaggacattgtgctaagctattcaagttcactaccattaaaatcacgtcatgaaataagggcat

SEQ ID NO: 415312 - DNA, 561 bp, Homo sapiens
tgccactgccctccagcctggcgacagagtgagactccatctaaaaaaaaaaaaaacagataactgagtcatggtgctgtacagccaacataatcaaaatgtgggccttcagcactgaatccatttggccttactcaagcctcagctttcaaccccttgtcttcaccacatgtttcccacataccaattcactctcaaaacttacttcaccaggcatgactgacctctttgggacttagcatctcaacagtgtattccatttcctctctgtgatttctgtcatcattcaggcttgagtgacttctcattacaaaatctactgtaggccatggccttcactcctgcgtggatgtctctctsttagatgaccagggtcttaagcagatgacccacactgacttagggagcctgtgattctaaaatcagctgcatgattaactcccgtgctttgacttagatgcaggagacttttctttccaagagaaagagcaattgctctagggagagtgggaagcctacctcttccacgggctagctgagtgacattggtaacttacttga

SEQ ID NO: 415313 - DNA, 620 bp, Homo sapiens
ggggagatgatgtttccattttggaacttttcagtgcggacgtgtaggtatctggtggccacccagaggcaatcggcaggtgtttggacgtgtctgtctgaaggtcagagccagtccccgctgaaaaatcggatggggaaggagtctgcatgcagctttgcccctggaygggtgggctccagaacatatgggcaggaggagctgctgctcctgcaggacttggccatatggggcttctctccatgtcctctgcctttactgcagctctgctgtgaaatgttgggaagctggaaaagttattgttggtgtttattgtccttgtttagcataaatccggtcagaaaatgtctgttaaaactaaagggagaacattgaggaaacttgggaaaatgtgctggaataaggagaacatccctcaaaatgcttattcctcacttaggacaaactgggcacatgctgttttggactaactttcaagataaaattattaacgttgccactgaggaaattcagatgggaggaaactaaagggaactgcaaaggtggtctggtacagtagcacgtgcaaggtccaatccagagtcagcttgtaccacattctggcagccagaggtgctgta

SEQ ID NO: 415314 - DNA, 647 bp, Homo sapiens
tgtccccacccaaatctcacctagaattatagttcccataatccccacatgttgtgggagggacccagtgggacataattgaatcatgggggtaattacagcatgctcttttgatagtgagagagttctcatgaaatctgatggttttataaggggctttccctgctttgctcagcacttcttcttccagctgccatgtgaagaaagacatgtttgtttcccctyctgccatgattataagtttcctgagacctccccagccccgcagaattgtgagtcaattaaacctctttcctttataaattatccagttttgggcagttctttacagcagtgtgaaaacggactgatacagaaggctttccatattaagatccctaaccaagaattcccagagtatcccttccaaactctcctcctattgtcctcctaagaaatctccccaaaatcttcctgattgaggagaagtcttctgaaccaagactcttcctactaattagggagggccaactgagacccctgaaggagctgaaccaagacagacactctgcaatgaggctacagacagacactccaccatggtgctacagaatcaatcaggagaaggaaggaggcattggcaatgcctacgatactcactgaaacag

SEQ ID NO: 415315 - DNA, 647 bp, Homo sapiens
tgtccccacccaaatctcacctagaattatagttcccataatccccacatgttgtgggagggacccagtgggacataattgaatcatgggggtaattacagcatgctcttttgatagtgagagagttctcatgaaatctgatggttttataaggggctttccctgctttgctcagcacttcttcttccagctgccatgtgaagaaagacatgtttgtttcccctcctgccatgattataagtttcctgagacckccccagccccgcagaattgtgagtcaattaaacctctttcctttataaattatccagttttgggcagttctttacagcagtgtgaaaacggactgatacagaaggctttccatattaagatccctaaccaagaattcccagagtatcccttccaaactctcctcctattgtcctcctaagaaatctccccaaaatcttcctgattgaggagaagtcttctgaaccaagactcttcctactaattagggagggccaactgagacccctgaaggagctgaaccaagacagacactctgcaatgaggctacagacagacactccaccatggtgctacagaatcaatcaggagaaggaaggaggcattggcaatgcctacgatactcactgaaacag

SEQ ID NO: 415316 - DNA, 647 bp, Homo sapiens
tgtccccacccaaatctcacctagaattatagttcccataatccccacatgttgtgggagggacccagtgggacataattgaatcatgggggtaattacagcatgctcttttgatagtgagagagttctcatgaaatctgatggttttataaggggctttccctgctttgctcagcacttcttcttccagctgccatgtgaagaaagacatgtttgtttcccctcctgccatgattataagtttcctgagacctccccagccccgcagaattgtgagtcaattaaacctctttcctttataaattatccagttttgggcagttctttacagcagtgtgaaaacggactgatacagaaggctttccatattaagatccctaaccaagaattcccagagtatcccttccaaactctcctcctattgtcctcctaagaaatctccccaaaatcttcctgattgaggagaagtctkctgaaccaagactcttcctactaattagggagggccaactgagacccctgaaggagctgaaccaagacagacactctgcaatgaggctacagacagacactccaccatggtgctacagaatcaatcaggagaaggaaggaggcattggcaatgcctacgatactcactgaaacag

SEQ ID NO: 415317 - DNA, 582 bp, Homo sapiens
atttcatgactgggctacagacagacaccctgggatagggctacaattatgggacatctccccagaacaatttctctattggaattaaatccatgcacagggtgagcagcaccccatcagtagatacagtaccagagtcagcccccagtccaagaaaactaagcagcctcttgggctggcctctgaatccactactggagggaagctaccaaagcacgggcaggcagccacaagggcaatcttggatgagctccccaaatttgtaaccacccagtgggttcaccttgtctgctgcttagacagagccaatttatagaarcaggaaaattgcaatagagaaataataattcacacagagctggttgtgcacaagaccagagttttattgttactcgtatcagtctcctcacttgtactttctaaactttcttcctataaaggtttcagaggcttttctctagtgttgtagtcacgttttattcaagagcaagtcataagagggcagtgaaactagctttaaaagaaagggacattattccaagcccttctgagagcctcagttggtctgtgttgatatgagga

SEQ ID NO: 415318 - DNA, 549 bp, Homo sapiens
gggttcaaatttgtttcatgtctcatctatctcctgctaaactttgcacctacctacctagtctcctaacacagatttttacttgggatcaaatggtatctttttaactccaagaaatggcttaagtttctgtcttatttttgaaatgtattccactggcaaagagagttttggcctttcttgccattttactttcagacaggtcatcttcaagccttgctgttacttgactcggggtttgaggaagactacaaatcaacayacgctgatgacaacgctgaacttcagctgagcccttgtgctcctggaaatccccctagcctgcccccacatattgccaaataagagccatctctgtccttccttatggctctcataaggctacatttagctctcttgtttggctgccttaaaacgccaggcaggaccctcctttttttttattaataaatattctccctttcacaattgcctgaatacagtcctctcctaaatgtctggtttcctgccatattcccaaatgcagcagtactgtttggcccataacac

SEQ ID NO: 415319 - DNA, 561 bp, Homo sapiens
gagcaacgagctctgcagcctcaggatagaggaggggtggaaccagcactcccttagctgccctgactggtgtctcagtacatcatgtacccctccccgccccagtccactagctctgaactgagttcagcactagaacttgcctaggagttgcagaccttgtggcctagatgcctttcaagtttacttagtgccccagagcactccagcccaaggtggctatgcttgcaggaactcaagttcygactgacaggatgggtgattcccctctggctagggctggttgaaaggctttctctgtaggtgggcatcagctgagtttggtccaattttgctttctgctataacagagcagcactgaattaaatgcaatgtctcacacttgctgcactctccctctcccaagtggacatattctctctccatgctgcaaagccactgccaaaggatgagggaggggaggcatagatgattcaagactgtttttcctacctcttcagtgcctctttcagtgatatgaagttaaaaccagatactgtgagtgctcacctgattgttggt

SEQ ID NO: 415320 - DNA, 618 bp, Homo sapiens
caagtgtggaccaatcaaaaattcgacttttggaagagttatatttttcttttcttttttattgggtttttaatgttgtgtgtaactaaataaaatacagaaggactaaaggagttttgttcattattaatctattgagaaaaatacatgatatgtaaaaaagatttaatgtgtatctttgatacttcttccaaatccatgtatttataggaaccaatgaaccaagaaggcaggcagacttgcaaggccytcattactctttgctatgagaaggcttcaagtgggcagcctatattttctgatacaattattctttttttaatctcttaaaacacatacatcacagacacacaagaacacacacccacacacacactcctcaaaagtaatgtgaacattcgttaacacaactttctgtcttccagtttgtctacacctagagcataatcctccctcaatatatttgtctctctgtcatcatcctcagatggacttaatggtggaggagttagtaccaaaagcctcatgctgcattctggaagtttcaccattagcccaaaagggaaaaaagagtaacctctatgtctatcctagaggcttcctcattgcagaccagac

SEQ ID NO: 415321 - DNA, 596 bp, Homo sapiens
tgtttgccttctgagaactgggtacagtttacacatcaatttcatccagtttgccttggtggctttgtagtaagacaggtctgattttaaatcacctaaattgctatcgtgagccacaaaaaaagtagaaggaggataatactactttcttctcaaattcattgtcagacttaaataggatattgaatacatgtaaatttcctagtggggtacccattacaaagtaaatttccaaaaatgttagttattcttcttaccactctacatttctgggcaagactgatgtaatcctagatgcttctgtagctcatagaaaatggtgtttcctactgtgtgccctgtggracgctgctacaaggtattagaagatgttctactaaaaaaaaagaaaaaaaatgtcccatggaaattatgtgataaacaaattccaccagggttccatatacagtgtgcaatgtgagcctctaagaaggtgatataattaaacagcgttatcccaggatgtagctccaggattatgctttctccccactccagaggatatgagaacatggcatgcagaattacacagaagacagtctgggacacaatgacag

SEQ ID NO: 415322 - DNA, 609 bp, Homo sapiens
ctccctgtgaggatatctcattttgagatatggctgaaaaaaaatctgattttcagatgttcaagctagtaaatacccagagatggctgtccagagtcacctccctatgcagacctggctttcctgcagcttgcttttctctatccatcaggcaccattccaggctgctcatcctcccgacgttttctgatctcatggctgacctgctgtccaggtttctagctttccagggtgatgcagacctcaacacctctctatttttactatagctgaataaagcccaggatttttttctgaataaggtttctattgctgtaaaatattcagcctgtggacaagagcaaacaaatgagtgatgctagaaatgtgagacatgagtctggmcctctagagttctcacaggcagtgagttcttgccagtggctggctgctctcttaggcagtgcctggaagtccctctatccctcccttttctccatgattcctgagggcagagctggaaaacatctccagtctgctcaccctaaaccacctccctcctcttcctcaacctcaaggccaggagacacagctgaaagagaacaagggctggagacaccaggagagctc

SEQ ID NO: 415323 - DNA, 516 bp, Homo sapiens
aatactagaagataagcatttggcacttggcttgagctcccttccttcccttccttcctgttccatcacatgacaaactgagcacatgactttgcttcctctctcccatcccactgtgtatgtacatgtgagtgtgaaggaacatatgtgtgtgtgtttatgtaaacacagccaagcccctgtgcagaactttattttgggctgaagttttaggatactatccttgaggatactatattgagataaatytcttatgaagttattggctaagtttttacatattacatatatttatatgtgtgtgtatatatatacatatacatatatacatatgcacacacatacatatatataaatatttatataaattttaaaatcagagcaactggataaaaatccagtaaaaatcagagcaactggatacatttgaattgagaaatatataatagggtttatgtcaaatgaaaaatacattaatcatctggaagggaataagttacttgaaccttaacttgt

SEQ ID NO: 415324 - DNA, 570 bp, Homo sapiens
cctgcagtcccccacagctctgagatgcgctggatgatgctattattagcaagcctgagctcaaggccaactggcttgtctgttggctcacactgtcatgaataggcttaattgctcacaccctttcagtgggttttttgaatagacatttttattaacttagcattcttcccagctgtcttgaagcaagaagtgagggtgaagagcagtgggaggggtaccctcaacctcctctctcctcagacagataaaagagcaaggtgggcatggggagggagagcctcttactggccacgcttaatagggatgtttggccatctctagggtgagaagcccttttgagcccacagcccagtaaacctgacttgtctgaacagaggggacattgtacctgaggtcaccgtggccaracagcacgatgagaggaggcactaggcagcttccttcctggcaaccttgatttcagggccacatggagtctcacactctaactctcactctgtgtcttactcttcctctagccaattgctagaggaaaggaggattacatgttcttgggaaatttagcac

SEQ ID NO: 415325 - DNA, 604 bp, Homo sapiens
attttttttttaacttttagtttcagagttacatgggcaggtttgttacgtaggttaattgcatgtcatgggggtttggtgtatagaatattttgttacccaggtaataagcatagtactcaatagatagtttttgaatcctcctcctcctccccacccttcaccctcaagtaggcccctgtgtctattccctttgtgttcacacttattcaaagtttagctcccacttataagtgagaacatgtatttagcttttttgttcatgtgatagtttgcttaggataatgaccttcagctccatccatgtttctgaaaaagacatgatctcatatacacaatggaatactatgcagccataaaaaagagtcatgaatatttttgagaggaggaaygcacaggcagttgcatttttaccctttcacagacagcttccatgtacaaaaaatgctaaatcagagggtggaatttttggccctctgacatcaaaaggtgaagcagaacatgcaaaaaccctcactgtgcattctctgtagtctggtcagaaccactccatggctggtggtgtcaaatcaggtaaaagagtaggggaagcatcaggagactg

SEQ ID NO: 415326 - DNA, 531 bp, Homo sapiens
ttaccctttcacagacagcttccatgtacaaaaaatgctaaatcagagggtggaatttttggccctctgacawcaaaaggtgaagcagaacatgcaaaaaccctcactgtgcattctctgtagtctggtcagaaccactccatggctggtggtgtcaaatcaggtaaaagagtaggggaagcatcaggagactggatgatgtcagcggtggaatcttcttaaagggctggtgtctgtttagcccttaaggaagaaaagctaatggtggttagcgagggaggaggcatgaggaggcctgtctgagctcagttcatggaggagaactcagttttcaaggttactctggggtcccactggccaaaagatggtccgttcagttggttaggaggtttcgaattaattttacttctcaagttttatcctcaggctacttgaagaggttcactatgccccaagcccaccatggcatttacagggggtcctggtgcgctgctttgcccagcttttcacctctaccagcgtcctgctggc

SEQ ID NO: 415327 - DNA, 605 bp, Homo sapiens
caatttataatggtaagtgccctgaggtaaatatcctgcctgctggtgggcttggcatctggcaaaagtgatgatgaaattgggaataatgggtagctgtgaattggaaggcactgttatgcatttggaaataaggagacgccaaacccaaggaactttctgcagaatggygaggaacactccagggagaacaagaataaatgttctggattgtgttggagtggtttgcagggtgtgggatggaaatgaaccacaggaaactatgcaatgaaaaaaaatcaaaactggaagaggaagggaaataacaacaataaccacatgagtagaacttgaaattagttccaatacccattcaaaaagaaatgatgcacatccagttttcccggggaaaaacaaagacaacaaaataacacaggagtattgtttaccaagctgctaagggatatggagtagggaagcaatgtataaaaattcacaatccgagaaaaattaaactagagctaacctaggctccttgaaaaaatctgtctgccatagtgctgaggggtgtcacctacaaaggacagaaggcatgacaataataaatcagaacttgccagaaatac

SEQ ID NO: 415328 - DNA, 605 bp, Homo sapiens
caatttataatggtaagtgccctgaggtaaatatcctgcctgctggtgggcttggcatctggcaaaagtgatgatgaaattgggaataatgggtagctgtgaattggaaggcactgttatgcatttggaaataaggagacgccaaacccaaggaactttctgcagaatggcgaggaacactccagggagaacaagaataaatgttctggattgtgttggagtggtttgcagggtgtgggatggaaatgaaccacaggaaactatgcaatgaaaaaaaatcaaaactggaagaggaagggaaataacaacaataaccacatgagtagaacttgaaattagttccaatacccattcaaaaagaaatgatgcacatccagttttcccggggaaaaacaaagacaacaaaataacacaggagtattgtttaccaagctgctaagggatatggagtagggaagcaatgtataaaaattcacaatcmgagaaaaattaaactagagctaacctaggctccttgaaaaaatctgtctgccatagtgctgaggggtgtcacctacaaaggacagaaggcatgacaataataaatcagaacttgccagaaatac

SEQ ID NO: 415329 - DNA, 534 bp, Homo sapiens
aatctggggtgacacacaaatacagagaaacataactgacaccagcttaccaggagcagaagcccacagagccataaacacataagtggtaattttgtaaaacagctggagactgagkgtggacaaacctgagtgtgagaaactgctgagggccacagacagggagccctccctttttttttttttttttttttttttttttgtgggttttatctccaggagccatcaggttctcatggagaaagatccaagaaaaatcaccttgtgtctttggcagaggctagggaaaagtaactcatttggaatatgcccagcgccttctccatcacaaaggcctaaagactttaccataaccttatctgacataggaggaaggaaaattactcaattctagtagcatcaattctttccgtcccacttaagaagtggggctggagaagggcagtgaatgtaggaaacatttatgaaaatccctctccaggaacacaggaccactaagagcctgagatttattcacaggattatacagtgtgt

SEQ ID NO: 415330 - DNA, 554 bp, Homo sapiens
aaggttttctttgttcttgtactttaaaaatagtactgtgtataagtctttaatccatctggcatttagttttgtgtgaggatccacatcayattccttccctcctcctttttttttttttttttacttcaatggcaaacagtttccccacagccaattgttaaatcacacttttctttagtcttggaatgtacttaaaattaccagccaataaacaatttttaagtgctttttaaatgtacacaactatgctaaccacttaagacataaagattgatgatgcttttgtgcttaggaagaccatagctgacaaacggagacacaaacaatttgtaacaatataggtggtttacattacagagcaacacaacacaatattgtggagtgtttcttagaggataactgggaatttgccaataagagatagtgggagcctttcacaagaagcagcatacccatcagcatggggtattcaacccaagagaaccaagggacaggatatagtatcccaaaagtccaagtatttgtagagtttctgtcctaagctggaaagg

SEQ ID NO: 415331 - DNA, 554 bp, Homo sapiens
aaggttttctttgttcttgtactttaaaaatagtactgtgtataagtctttaatccatctggcatttagttttgtgtgaggatccacatcatatyccttccctcctcctttttttttttttttttacttcaatggcaaacagtttccccacagccaattgttaaatcacacttttctttagtcttggaatgtacttaaaattaccagccaataaacaatttttaagtgctttttaaatgtacacaactatgctaaccacttaagacataaagattgatgatgcttttgtgcttaggaagaccatagctgacaaacggagacacaaacaatttgtaacaatataggtggtttacattacagagcaacacaacacaatattgtggagtgtttcttagaggataactgggaatttgccaataagagatagtgggagcctttcacaagaagcagcatacccatcagcatggggtattcaacccaagagaaccaagggacaggatatagtatcccaaaagtccaagtatttgtagagtttctgtcctaagctggaaagg

SEQ ID NO: 415332 - DNA, 617 bp, Homo sapiens
aatgtgcagaacgtgcaggtttgttacataggtatacatgtgccatggtggtttgccgccgatatccttatggccccagaaggcaagacacatctgaaaataagccatggctacctgttgaggaatctcactctggccagtgggcacatgatgagctgtactgaggagaggcctgagacagggcagtggtccaggagtcagccaagaggggaagatgcctgggtttgtgaagacccagggaggagcgagccctgggtggagggtgaggaggatcatgagtttaggtgtgagtgtgctgagtttgagaataacactatgtgcataayagaaacactaaaatgctaggtcttcttgtgcgttgatcaggaagagaaaacatcaccctggaacatgcaacctatcttatctgctaccttccatgcccttctctgcagtcattgcaccacggacatcattgctgccatatgttccttcctcctgttgtaattatttaaactcactacatgcctagggcctctctaaacagcaaacaccttgggcactagagaatgaaacactgctttatgcatacagtgtctggcccaccaaagcctgacatagactagggaattcataga

SEQ ID NO: 415333 - DNA, 600 bp, Homo sapiens
tatgtttaaattattttcttagaggtagctctggcataacaatatgaatcctaacatcttataattgacctccaattaatactaacctaattctgatagaataaagaaactttaatacagttccagttttttatcttccattgtggtattactacatatatttgtgatattatgcagaatatatctggcctttgtccctggttcctgacacagatcaccaaaagcccttgggrattcccaagtcacagaagtgtctttgttatgctaatgaagtgacttagccctgaaaagcttcaggatgtggctgcacaccagaaaaatcaaccacatcattagaggactggaattttgagccaccccaatttccatggacaagaatgagactggagtttgagttgaattatgtgaccagtgatttaaacaatcatggctacctagtgaaaccccagtaaaatatctggacactgaggcttggaggagcttcctggttggtgaatacattgatatgctgggagggtgatgcacctggactccatgaggagagggcaaacaagttctgtacactgttctctgtccccctaagcccttgcccagtgaatt

SEQ ID NO: 415334 - DNA, 548 bp, Homo sapiens
atgttatttggtaataattacaaaattaaacatcatttaatttcatcattagggcagaaaataatgccagacatccatggttgttggcatcagagaaatgttcccaggttcctagaaagcaaaagtgaatgacggccatcaccgcagcagccctgggaaggcagtatctcccatggcagaaagactggctttaaacacactctgcattataattttacacacataaacacatatttttcatcaatattttttagccttaccaatatattccaagatttatttgcttgctagctgtttttgcattctgctttttcactttagggctaatttccatctaactgaagtacatcatcttgtaacttcctatcaacaatgttacacttgctcagttctttttttwaaaaaaaagaaagtatttatttgtagttatcctggaacgattatttagttgtcaccagctgttttctcccagcactttgaaacaagtgttttgtcgtcttctgaaatttatttttacttaaagagaaatctgctgtcatcctgatcat

SEQ ID NO: 415335 - DNA, 552 bp, Homo sapiens
cttttaacctgatcttatgaggaaagcaactggtgtctcaccattaagtatgatgttagttgtaagtttttatgaatgttctttatgaagttgaggcaatttacctctatttctaccttactgagtttttatcatgaattaatattggattttgtcaaatgctttttttgcattatttttataatgaatatacaatctttattayttagtatgttgatttattgattaaactgattgattacctaatgttcaaagggcttttcatacctgggatagattccactttgttatggtgtataaactgttgcattcaatttgctaatattttgttatctatgttctgtctatttacaggtttttatatttacgttcgtgagagatattggcctatagctttccttttctgtaatgtctctgcttgattttgttttcagactaatgcagtcttcatagaattaattactaagcaaattactctcttgtattttttaaaagagattgaataatatttgtataatttattggtgagtatttcacatgagattgagaaaa

SEQ ID NO: 415336 - DNA, 552 bp, Homo sapiens
cttttaacctgatcttatgaggaaagcaactggtgtctcaccattaagtatgatgttagttgtaagtttttatgaatgttctttatgaagttgaggcaatttacctctatttctaccttactgagtttttatcatgaattaatattggattttgtcaaatgctttttttgcattatttttataatgaatatacaatctttattatttagtatgttgatttattgattaaactgattgattacctaatgttcaaagggcttttcatacctgggatagattccactttgttatggtgtataaactgttgcattcaatttgctaatattttgttatctatgttctgtctatttacaggtttttatatttacgttcrtgagagatattggcctatagctttccttttctgtaatgtctctgcttgattttgttttcagactaatgcagtcttcatagaattaattactaagcaaattactctcttgtattttttaaaagagattgaataatatttgtataatttattggtgagtatttcacatgagattgagaaaa

SEQ ID NO: 415337 - DNA, 599 bp, Homo sapiens
ggttaatgatgatctaatgaatccattaaggctagattttcctctgtcgctggaacaaagaacagattcttcagtcaagcaccaaatagagtgggtggctatgtttatgggctatggcatatgaaaaaaaatacatgcatgttaatgcaaaagtcagtcttagtatattaatacagtattagtatattcatatactaactccatgagagacacagggagctacgatgaagacaaaagtaaacttagaatttccatcatagtctcactaatatttgaagtgtatatactcactgagtagatcatgaacacatttatttttctctaatatgtttctctctctctctctctgtctcacacacacacacacacacacacacacacacacacacaccattckggtcaacagaaacaacataagaaaagtttcagaaagcataaattaagtgacatcaatggagcaaggaatatatgcaattagtaatagaaaatagtaacaaagtatagctgaaaattcatatagaagaccatgaatattaagcaaaatttggactatattcagtagtttatgtaaagccactgaagatttttgaaacagatag

SEQ ID NO: 415338 - DNA, 588 bp, Homo sapiens
ttttcaatcctccctgattttatcttctctgttatcacctggattcccagattgacatggagaaagctatgatayggctccctcctatttcctagtggaaggcaaagggtgcctgaatcacaaagttatgttaaccttaaaattgaacatagaattgtctacataaattcaaaaggttgaatgtaggaaaaaaaatggtgagtcaatataatcttggtttatctctgtaatataccattaaaactcactgagaaagatcactagttaaacatattgtaaattctggaaacaaaagctgctgagttctgctgaaatagcccaagagtaaatcacaacacctacaagatgttttatgactaagttaatttttttaaaaatcagaagtcatcatatctctgcttggtgctaactaaaaagccagaagttttggtcagaacaaatgtagttcacaaacactaaggttttggttgttcaaaataaatcacaacaccagaaacttagaaataataaatataaacatagagccctcttttgtggcttttctaaacaacttatttctgataacttcataatgctgctgaagctggt

SEQ ID NO: 415339 - DNA, 622 bp, Homo sapiens
attctggaaacctggatcttgagctagaattttaaaaataatggagatggttagcctacagttcggtttctgcttgggaactctttttcaaaaattctctggaaattattaaggcaccaactacttgctctgaaaattgataattaaaggggaaaaaactaaatatttattctgactttaaagggagttatatttttcagtaatcaaaataatcacttgatgatgaatagccttttttatggaaatattgcagttcattaatgtgtaagaataaarctcaccattttgcaatgttaataaaataactgatcaaagcaacgttcatcagtgattaaatcctttggataaaatattaaaaagaactagacaatagagggactaggttttcattataactagaatttggaaccctagaacttattttttctcttaagataatgtaacataaagcagactgcaccatctatgaagcatttctgtcaaaagttgaacctaaatctaattgagcctttatcacttacttccagccaccaggaaatagagagggaaggaagcagttaaatgacaccacaatgaaacaaacagagaaatccagaatgaaggacattttataggactactg

SEQ ID NO: 415340 - DNA, 486 bp, Homo sapiens
agttaccaactgtctattaaatatgaaaaaaaatcatttcttctttcttcttcccccatccacacttaagcttttcatttcactgctacattttattatttaagtccaaatgacaggacttttttttaagacatggtcttgctctattgtcaagtctagagtgcagtagcacagtcatgctcactgctgtcctgaaccccaggctcaagtgatttccccacctcagcctcccagttatctgggrctagaggtgtgcaccaccacactcagctaatttttgtatcttattttgcagatatggggttttgccatgttacccaggctggtcgtgagctcctgggctcaagcagtaccctgcctcagcctcctaaaatgctgggattgctggtgtgagcacattattgaataatatcagaaatactaaccaaaataattagaaaaagtaaataaataaataaataccttagaggaaaaaatcaacaacaa

SEQ ID NO: 415341 - DNA, 617 bp, Homo sapiens
atgtctaaaggagcaactgaatttttcagacagatttgtagacccaattttgtaaatatcactttcatggaaaagtggggagaggtgacacaaagtcaaatcaaatattaattctgtttgaagcgattccaaaatagtcattgtataccacatggttagaatcattaattaatggcttaaattattcattatttttagctgtttttgtattctgtagttatagcctagagctgtactttaacaaaaagcaacaatatttacctatgtgaagtagttatgagtatgaggaggyaattttttaaggtgcttagaaaacaggtttgtaaaatagcagacttttaacaagcaaagaaaatcagtgctgagaaagctagttagtaacatctcattagtaagacttttttcattttataataattaattaggcagccacattaggcaataatgagagctagtaatcacttttttattatggaaattagactggactcattttaaaacaacacttaatgcatatgctgtaatgaatatggaaaagtataagttgcttaagcaaaatgtataagattttgtactcctcccacaaaaataagtgactaaagatgggttgaaaagca

SEQ ID NO: 415342 - DNA, 534 bp, Homo sapiens
tttctgcttctttacttttgcctttaaggatcacttgttatttacattgttcaagcaatggtaagaagtgtcactttccctggctgcctcccacacttgaggcgcatagcaagcctgtcctcttcagttctgatgacctgcccattctaaccactgcgcctgtttcctgaacccttctccatacaccaaccacattaccaacctccccttcccatcgagagaagacgatttgcttcttaattcccagatcactctaattagaacactgcaaaaactgacaactaaagcaagtggccacctactagttctcacacactggactctctaacagtaatgaatttctgtgattatttccttgctactaataaaatactagctggaaaagtggtcaagtgaggagccaccagaattttatttcttcttcaagcatttaatagccaactrtagggccctgggcatttactgaaaggcaatttcagttatgttagtaaattgctgtttaggacaacagatcaataaaataaattattaggt

SEQ ID NO: 415343 - DNA, 582 bp, Homo sapiens
aattctaatgttctttcataaatgatctattcaaagtgtgatcatctattcactgtttttgttcttctctgtgtaagagacacgtagcagatgcctctagtcagccaccttgcaacccctctgccatgcagttaatacatgattttttctacttttggatggaattagataaggcccaagctaagaactccatacagcccattttgtaatatgatccagacacagagatgcactgttcagatcctcgttcaaaaaaygacccaccgcatagctgagagggatgtggtcagctgatgcctccagctgttagatccttcaggatctgtctcagttttcaaaccaaggttacgctcttctctcagtgatctccaggcaatggccgagcagaatgatggtacaagggccaggtcatcaacatcccctacaggacttctccatcaggttatctttactccagaactcccctttgagctggtaaagaattttagatctgcactgagatctgtcagcttcctatgcccaatcccgcatcttacttttttctttaattggttttacttccaataaaactcttgcaatcct

SEQ ID NO: 415344 - DNA, 582 bp, Homo sapiens
aattctaatgttctttcataaatgatctattcaaagtgtgatcatctattcactgtttttgttcttctctgtgtaagagacacgtagcagatgcctctagtcagccaccttgcaacccctctgccatgcagttaatacatgattttttctacttttggatggaattagataaggcccaagctaagaactccatacagcccattttgtaatatgatccagacacagagatgcactgttcagatcctcgttcaaaaaacgacccaccgcatagctgagagggatgtggtcagctgatgcctccagctgttagatccttcaggatctgtctcagttttcaaaccaaggttacgctcttctctcagtgatctccaggcaatgrccgagcagaatgatggtacaagggccaggtcatcaacatcccctacaggacttctccatcaggttatctttactccagaactcccctttgagctggtaaagaattttagatctgcactgagatctgtcagcttcctatgcccaatcccgcatcttacttttttctttaattggttttacttccaataaaactcttgcaatcct

SEQ ID NO: 415345 - DNA, 629 bp, Homo sapiens
atctatgaaaaactctgttaacagggagttcttaggaagaaaataaggaataatgggcataaagagatgctaatattttgtgattgtcttgcagcaaaatgttattaaaagggatagttaaagaggttattatttcacctttgcaaatactaatgggtgctcttgcctccttcattgaacttttagctctccaaaggaattgcagtggtcagtttgttgcagaagctgggtacctaagyactgccaaatgccccacccacagatctctactccaactgcaaacaagcccaggaaggaatgttttttctctctctctcacattcgatacaactgctcaatctacttctctctggtagacatagctccaaaaaccaatgactgattgaacaaattaaagggaatcctgccactagaataaaaattattctaatctggctggtatttttattaattatattcttacataacaatctggcagaatttgagtgaatctgccagcttctgtacacagacctcattgtctctaaatgattcacctaactgccagtggtcataaatacaataataacaacagcaaccaccggagcaaattaaaatgttttacactggtaaacagcgtaactgtttgg

SEQ ID NO: 415346 - DNA, 576 bp, Homo sapiens
cacttcacctcattcagtcttcgctactcaggacttccttttaattgacacacaataattatacatatttatggggtacaatgtgatgtttcagtacacatatgcattgcctaacgatcaagtcagggtatttagcaaacccgtgacctcaaatatttattatttctttgtggtaaacacttttagaatcctctcttttaggaattctttgtatagtttcaaggcttctgccacctccacagaatgctttttggttctctctgtgatctgcacagtgyattttttctcatttcatctactgcttgtcctacactttcatttcttcatagcactcctgatgtatttcaaaatctttaaaagcattactggtaatcatcataataataataatgaggctataacattttccataccacagtcttagaaatcatctagtttattacgttcaaaaaatttcccaaaagaaggcctaccaaacatgtaataaacctaaaaatgtatcaggcactagttcagaggctgcatacaccaatctgatgctcataaactcattctagctatttgtacaatacaggc

SEQ ID NO: 415347 - DNA, 576 bp, Homo sapiens
cacttcacctcattcagtcttcgctactcaggacttccttttaattgacacacaataattatacatatttatggggtacaatgtgatgtttcagtacacatatgcattgcctaacgatcaagtcagggtatttagcaaacccgtgacctcaaatatttattatttctttgtggtaaacacttttagaatcctctcttttaggaattctttgtatagtttcaaggcttctgccacctccacagaatgctttttggttctctctgtgatctgcacagtgtattttttctcatttcatctactgcttgtcctacactttcatttcttcatagcactcctgatgtatttcaaaatctttaaaagcattactggtaatcatcataataataataatgaggctataacattttccataccacagtcttagaaatcatctagtttattacgttcaaaaaatttcccaaaagaaggcctaccaaacatgtaataarcctaaaaatgtatcaggcactagttcagaggctgcatacaccaatctgatgctcataaactcattctagctatttgtacaatacaggc

SEQ ID NO: 415348 - DNA, 626 bp, Homo sapiens
acattaattatgtgcagtttttagtataccaattagacctcaataaagctggaaaaatgacaaaagaagacagatagcatcctgagtgcctccccaacctacctgaaccccagtagattggtgtgtaggtaggaactggacctttcatctctgtcttcccaatgtccagtacactgggcacttagtaggtattacataaatgtgtgttactggtcggtttaaatcaacaacctgatacctttctgagagtagaatatgagasctagtttaggtaccaggtaaagagattctaacctgctttctctacgtaagactaacctcaccctggccatgttaattccaatccttaatcttttaatctaatgagttaactatcagttgtataatttttatctgattattccaattcatcacatttaattatcttactgtttctgccttccattagtgaggaggagaaaacatttgctaataattttattatgtagtagggactgtagtaagtactttatatatcccatcatattttatttaacagcattctcaaaaacactgaggtagaaattatgacacttattttacaggtgaggaagcagctcgtagcattttagtaacatgtccagatt

SEQ ID NO: 415349 - DNA, 626 bp, Homo sapiens
acattaattatgtgcagtttttagtataccaattagacctcaataaagctggaaaaatgacaaaagaagacagatagcatcctgagtgcctccccaacctacctgaaccccagtagattggtgtgtaggtaggaactggacctttcatctctgtcttcccaatgtccagtacactgggcacttagtaggtattacataaatgtgtgttactggtcggtttaaatcaacaacctgatacctttctgagagtagaatatgagacctagtttaggtaccaggtaaagagattctaacctgctttctctaygtaagactaacctcaccctggccatgttaattccaatccttaatcttttaatctaatgagttaactatcagttgtataatttttatctgattattccaattcatcacatttaattatcttactgtttctgccttccattagtgaggaggagaaaacatttgctaataattttattatgtagtagggactgtagtaagtactttatatatcccatcatattttatttaacagcattctcaaaaacactgaggtagaaattatgacacttattttacaggtgaggaagcagctcgtagcattttagtaacatgtccagatt

SEQ ID NO: 415350 - DNA, 601 bp, Homo sapiens
taaacaacagagtttcaatctagatgaaacatctttctattggaagaagatgccatctaggacttctatagctagaaagaaaaagtggatgtctggcttcaggacttcaaaggacagaccttgttaggttacttgaagttgaagccaatattcacttactgttctgaaaatcctgagactcttaagagttctactatctctactctgcctgtsccctagaaatggaataacaaagcccggaagacagcacatctgtttatgcatggcttactaaatattttaagcccactattgagacatacatagaaaaaaaaaagatttctttcaaactgttagtgttcattgaccttgcacctcatcacccaagagctctgatggagatatacaagaagattaatgttgttttcatgcatgctaacacaacgtctattctgaagcctgtgaatcaaggagtaatcctgactttcaaatcttattatttaagaaatacaattcatagggctagagctgccaaacagagtgatttctctagtaggtctgggcaaaataaattttgaaactactggaaaggacccaccattttagatgtcattaagagcat

SEQ ID NO: 415351 - DNA, 601 bp, Homo sapiens
taaacaacagagtttcaatctagatgaaacatctttctattggaagaagatgccatctaggacttctatagctagaaagaaaaagtggatgtctggcttcaggacttcaaaggacagaccttgttaggttacttgaagttgaagccaatattcacttactgttctgaaaatcctgagactcttaagagttctactatctctactctgcctgtcccctagaaatggaataacaaagcccggaagacagcacatctgtttatgcatggcttactaaatattttaagcccactattgagacatacatagaaaaaaaaaagatttctttcaaactgttagtgttcattgaccttgcacctcatcacccaagagctctgatggagatatacaagaagattaatgttgttttcatgcatgctaacacaacgtctattctgmagcctgtgaatcaaggagtaatcctgactttcaaatcttattatttaagaaatacaattcatagggctagagctgccaaacagagtgatttctctagtaggtctgggcaaaataaattttgaaactactggaaaggacccaccattttagatgtcattaagagcat

SEQ ID NO: 415352 - DNA, 704 bp, Homo sapiens
cacattaagatgtgatgaatgaaaagtgtgctgcatagcatatgagagttgaaargtaagtccaagacaccccctttgattggaccctttattggtacacttaatgataagtgacagaaccgcaactcaaacttgcttaaagaaaaaggaaattttaggtttcataaaattaagaagtctttagactggcactagtttcaggcacgagtatatccaaggattcacaagatgccattaggagcatgtttttctccctgcacctcaggtctacctgtctttcttgtctttatgctacattcttgtgcaaacatgttaccagcatgcctcccttgaactcagggctcctgaacctaaatttctctacatccaaagggctctgatgggcccatcttgggtcccatgccacttcctggactaaatagtgtgtctacaagatggaatattctgtgtgatggcaggcaggctcacctgatgagaagttctactagaattagggggaatagggaaaggtgctaggcagactgaaacaaaaaggaaggggaccagaggaaacatttcctacagatctgcatgtagggatctgaacaagacataagtcatctacgtggtttataggactgacaatgagtgagaattaagtggaaccttttaggttctgagatctctgtcaacgattggacaaagatgaaatatgaagtaggttt

SEQ ID NO: 415353 - DNA, 704 bp, Homo sapiens
cacattaagatgtgatgaatgaaaagtgtgctgcatagcatatgagagttgaaaggtaagtccaagacaccccctttgattggaccctttattggtacacttaatgataagtgacagaaccgcaactcaaacttgcttaaagaaaaaggaaattttaggtttcataaaattragaagtctttagactggcactagtttcaggcacgagtatatccaaggattcacaagatgccattaggagcatgtttttctccctgcacctcaggtctacctgtctttcttgtctttatgctacattcttgtgcaaacatgttaccagcatgcctcccttgaactcagggctcctgaacctaaatttctctacatccaaagggctctgatgggcccatcttgggtcccatgccacttcctggactaaatagtgtgtctacaagatggaatattctgtgtgatggcaggcaggctcacctgatgagaagttctactagaattagggggaatagggaaaggtgctaggcagactgaaacaaaaaggaaggggaccagaggaaacatttcctacagatctgcatgtagggatctgaacaagacataagtcatctacgtggtttataggactgacaatgagtgagaattaagtggaaccttttaggttctgagatctctgtcaacgattggacaaagatgaaatatgaagtaggttt

SEQ ID NO: 415354 - DNA, 704 bp, Homo sapiens
cacattaagatgtgatgaatgaaaagtgtgctgcatagcatatgagagttgaaaggtaagtccaagacaccccctttgattggaccctttattggtacacttaatgataagtgacagaaccgcaactcaaacttgcttaaagaaaaaggaaattttaggtttcataaaattaagaagtctttagactggcactagtttcaggcacragtatatccaaggattcacaagatgccattaggagcatgtttttctccctgcacctcaggtctacctgtctttcttgtctttatgctacattcttgtgcaaacatgttaccagcatgcctcccttgaactcagggctcctgaacctaaatttctctacatccaaagggctctgatgggcccatcttgggtcccatgccacttcctggactaaatagtgtgtctacaagatggaatattctgtgtgatggcaggcaggctcacctgatgagaagttctactagaattagggggaatagggaaaggtgctaggcagactgaaacaaaaaggaaggggaccagaggaaacatttcctacagatctgcatgtagggatctgaacaagacataagtcatctacgtggtttataggactgacaatgagtgagaattaagtggaaccttttaggttctgagatctctgtcaacgattggacaaagatgaaatatgaagtaggttt

SEQ ID NO: 415355 - DNA, 704 bp, Homo sapiens
cacattaagatgtgatgaatgaaaagtgtgctgcatagcatatgagagttgaaaggtaagtccaagacaccccctttgattggaccctttattggtacacttaatgataagtgacagaaccgcaactcaaacttgcttaaagaaaaaggaaattttaggtttcataaaattaagaagtctttagactggcactagtttcaggcacgagtatatccaaggattcacaagatgccattaggagcatgtttttctccctgcacctcaggtctacctgtctttcttgtctttatgctacattcttgtgcaaacatgttaccagcatgcctcccttgaactcagggctcctgaacctaaatttctctacatccaaagggctctgatgggcccatcttgggtcccatgccacttcctggactaaatagtgtgtctacaagatggaatattctgtgtgatggcaggcaggctcacctgatgagaagttctactagaattagggggaatagggaaaggtrctaggcagactgaaacaaaaaggaaggggaccagaggaaacatttcctacagatctgcatgtagggatctgaacaagacataagtcatctacgtggtttataggactgacaatgagtgagaattaagtggaaccttttaggttctgagatctctgtcaacgattggacaaagatgaaatatgaagtaggttt

SEQ ID NO: 415356 - DNA, 571 bp, Homo sapiens
cccactctcttccagtctaaacttcctaatagcttcccattacactcagagtaataaacaaaaaattttttttaataatcaaccagaacctaaatgacttgattctcactacctcttaaacttcatctcctactaccttaactttcatttactgtgttccaatcatattgacctctttgctgttccctgaaaaatcacccacttccctacctcagcctctttgatttttgttgttttctctgcttggtatgttctcttctcagatatacacacaaccacttccttacttccttttgccatctaaaatttcractcctcctgccacagtagttaataatgcccttttctgctttattttggtctcttggcacttaatgctatctggcagggtatagattttactcttacgcattgtctgcctcaccaatggagagtaagctccatgtggaaatgaatttttgtcatttttgtttattaatgatttcctgaaacctaggacagaacttaaggaatagcagggaattgattatgaagtcaataatgagcaaataagaaattccatggagaagaa

SEQ ID NO: 415357 - DNA, 571 bp, Homo sapiens
cccactctcttccagtctaaacttcctaatagcttcccattacactcagagtaataaacaaaaaattttttttaataatcaaccagaacctaaatgacttgattctcactacctcttaaacttcatctcctactaccttaactttcatttactgtgttccaatcatattgacctctttgctgttccctgaaaaatcacccacttccctacctcagcctctttgatttttgttgttttctctgcttggtatgttctcttctcagatatacacacaaccacttccttacttccttttgccatctaaaatttcgactcctcctgccacagtagttaataatgcccttttctgctttattttggtctcttggcacttaatgctatctggcagggyatagattttactcttacgcattgtctgcctcaccaatggagagtaagctccatgtggaaatgaatttttgtcatttttgtttattaatgatttcctgaaacctaggacagaacttaaggaatagcagggaattgattatgaagtcaataatgagcaaataagaaattccatggagaagaa

SEQ ID NO: 415358 - DNA, 571 bp, Homo sapiens
cccactctcttccagtctaaacttcctaatagcttcccattacactcagagtaataaacaaaaaattttttttaataatcaaccagaacctaaatgacttgattctcactacctcttaaacttcatctcctactaccttaactttcatttactgtgttccaatcatattgacctctttgctgttccctgaaaaatcacccacttccctacctcagcctctttgatttttgttgttttctctgcttggtatgttctcttctcagatatacacacaaccacttccttacttccttttgccatctaaaatttcgactcctcctgccacagtagttaataatgcccttttctgctttattttggtctcttggcacttaatgctatctggcagggtatagattttactcttacgcattgtctgcctcaccaatggagagtaagctccatgtggaaatgaatttttgtcatttttgtttattaatgatttcctgaaacctaggacagwacttaaggaatagcagggaattgattatgaagtcaataatgagcaaataagaaattccatggagaagaa

SEQ ID NO: 415359 - DNA, 621 bp, Homo sapiens
gcagttgggtcttagtctataatggcattccttatcatgatcagccaccttattcagctgactttgatacaaataactttgggagggatccccaaatcaaatcttccctcaacgatgaagatttttatccagcacacagcatataataaatatgtgatgacagaatgattgaatctgacacttgggagtatagacaaaatttggcactactggctcaaaaaatggagtttaaaaattgccacaagcaatggcactattgcctcattgtcttatattattatcttattyaattttgacacatactatatatttattgtgtgaagaatttgtatcttctatttcttttgtactcatccacaaatgcccatgacagaggcctgttaagtatttcccttactgcatatatcatactgtgtataatttccactgaaagatttaacggcaaagatcaggaaggagagaggaaaatagtattctgcctcaactataatattgagtggtgtgaaaaaaacttgataacttgacccaatcttcctttcaggctgattttctgccttagcaatgtgtctcactctagacaccatatttgaaccatagaggtttacccatagcttctggaag

SEQ ID NO: 415360 - DNA, 621 bp, Homo sapiens
gcagttgggtcttagtctataatggcattccttatcatgatcagccaccttattcagctgactttgatacaaataactttgggagggatccccaaatcaaatcttccctcaacgatgaagatttttatccagcacacagcatataataaatatgtgatgacagaatgattgaatctgacacttgggagtatagacaaaatttggcactactggctcaaaaaatggagtttaaaaattgccacaagcaatggcactattgcctcattgtcttatattattatcttatttaattttgacacatactatatatttattgtgtgaagaatttgtatcttctatttcttttgtactcatccacaaatgcccatgacagaggcctgttaagtatttcccttactgcatatatcatactgtgtataatttccactgaaagatttaacggcaaagatcaggaaggagagaggaaaatagtattctgcctcaactataatattgagtggtgtgaaaaaaacttgataacttgacycaatcttcctttcaggctgattttctgccttagcaatgtgtctcactctagacaccatatttgaaccatagaggtttacccatagcttctggaag

SEQ ID NO: 415361 - DNA, 643 bp, Homo sapiens
ttttttttaaaaaaaaactacccataaagaaaagtacaagcttcactggtgatttctgcaaaacaaactcgtaacatagaaaaggaggtatccctattcattctatgaggctattattaccctcatgctgaaacgagaaaaagacwtcaccagaaaaaaatcatactgaaatctcttatgaattgtggtataaaaaacttcaatgaaatgctagcaaatcaaacccaggaatatatgaaaaggatcatatctcatgaataaaatgaatgtataagattggtttaacatctgaaaaccggtgactctaatataccatattcatggaatagaactaaaaccatatgaacatctcaataaatacagaaaaagcatttgactaaattcaacaccctttaatgatagaaacactcaacaagttagaaatagaaggaaatgtcttcatcctggtgaaggacacctagaaaataaccacagctaatatcatacttaatggtgaaagactgaataccttccccctaaaatcaggaacaagacaaggatgtatgtgcttatcacttcaatttaaaattttataggaggttctagtcatggcaattaggcaagaaaaataaattaaatacatccagattataaaagaagaatt

SEQ ID NO: 415362 - DNA, 617 bp, Homo sapiens
tggacatcatttatgtccattttgagtctgtatctatgttatatcacactttgcctaataataatgctgctgtcaatttaatgagggttttagcttacataaataacaaacattcagttcagtggggtttatcttaaactgtacagaggtgcttgttttattataattcaactgaatcagaaactttctttctctccasttgctcacactggcttctaaccaactcacgtttctttaatgacaagtgctaaataaacttcacctggggactgatctgccaataaggataaaaaaaagaattgccccggctaccaaagtatcattgtttcatctccaatgaaacattcccctgtaaaaccatttctctctatgcaaggacttggagtaggaatccagccacagaggtcagggaaggccccaccaccaccatccccactgactcagaaaaggattaaaatattttaaagaaggaggaccagaggacaaaacgtcagcatggtcaagaaaaagtgagcagagccatgaatcgagtgatgaagttgtagattcatagaaaacatgtaaaggctatcatatatgtagaggtaaagtgtcactcctcgttttaagggtgaaga

SEQ ID NO: 415363 - DNA, 583 bp, Homo sapiens
ctcaaaaacaaaacaaaacaaaaacaaactcataagcaaccattttagaacagcaaggtttatttaagttggattatgctggggaactgggaaaggmacttctttttgcttgaatattgctgagcaggggcctcaatccttctggacaacacaacttctttactgcatcttcagaagctatgacactcttcaatcatcttaagggggttttaagccacaaacttggtggcttaaaacaaaacaaatatattctcttagaattctggaggtcagaagtctggaatcagatttactgggctaaggtaaagatatggtgaggtaggttccttctagagggtataaagggagaacatccattgccttaccttttccagcttctagtggccactagcattccttggtctgtggctccttcttccatcatcaaagcgcataaatctcatgtctgctttcatcatcatcccatcattttcttctcttctgtagtaaaatctccctctgcctccctttataaggacatttgtgattacacttaaggctcacttggataacccaggataatttcctcatctcaaggtgctta

SEQ ID NO: 415364 - DNA, 621 bp, Homo sapiens
tggagtggggtacattgggatggcattcttgcctttgtataaagattgaaatgttgattaacatattaaattgtatatttaattacagaactgaaaatgttctttagtgacttaaaaaaataccgtagcattgtgtattacttaacgagtgcccccaaagcataggttctgccagagtttctatttagtggccagagaaagcccatcaaatacattttaaagtggcaatgggaagtgaaaaatgaagtattttgattacatttaatgagcagtattgttcaacatcctggatacaggtggtggtaagttcttcaccactggcatgtgcaagcagttggtgatagcttgtcggggtgtcatagaagagatttaagcatctgaattgtagttccactaagtgactctaagatcactccttgttctgatggtttctggctctatgctacttaacttgctaagaaaggctttctgaagaaaagttttgatagtgagaaygagaagcaagcagaagggcaaggcattcctgcagtgggtagagagatggtattaaaacagagaggaacagatgcagtaaatgctccaaacaaagagcatatactctttttgagaagaggaaaatgt

SEQ ID NO: 415365 - DNA, 621 bp, Homo sapiens
tggagtggggtacattgggatggcattcttgcctttgtataaagattgaaatgttgattaacatattaaattgtatatttaattacagaactgaaaatgttctttagtgacttaaaaaaataccgtagcattgtgtattacttaacgagtgcccccaaagcataggttctgccagagtttctatttagtggccagagaaagcccatcaaatacattttaaagtggcaatgggaagtgaaaaatgaagtattttgattacatttaatgagcagtattgttcaacatcctggatacaggtggtggtaagttcttcaccactggcatgtgcaagcagttggtgatagcttgtcggggtgtcatagaagagatttaagcatctgaattgtagttccactaagtgactctaagatcactccttgttctgatggtttctggctctatgctacttaacttgctaagaaaggctttctgaagaaaagttttgatagtgagaatgagaagcaagcagaagggcaaggcattcctgcagtgggtagagagatggtattaaaacagrgaggaacagatgcagtaaatgctccaaacaaagagcatatactctttttgagaagaggaaaatgt

SEQ ID NO: 415366 - DNA, 589 bp, Homo sapiens
tttcgccatgttggcaaggctggcctcgaactcctgagctcaagtgatctgcttgccctggcctccaaagtgctaggattacaggcgtgacagctgtgcccagcaatggagcaagttttttwaaaaaaaaaaaaaaaaaaaaggtatatatttataccaacaggtgattgaacaaagcatatgacactgttttacttttttgtttacataatgcctgataggatgtttgtcccctccaaatctcaggttgaaatgtgttcccagtgttggaggtggggacttgtagaaagtattcgggtcatggggacagatccctcatgagtgcccccttgcatggaaatgagtgagtcattgatctattcgttcacctgagagctggttgtttaaaagagcctgaatctctctctctctacttctgtcatcatgtgatatgccctgctcccctttccccttctgccatgattgtaagctttctgaggccctcaccagaagcagaagctggcattatgccttggtacagactgcagaagtgtgagccaaataaacctcctttctttataaattacccagcctcaggaatttctttata

SEQ ID NO: 415367 - DNA, 520 bp, Homo sapiens
acgcctgtagtcccagcactttgggaggccgaggcaggcggatcatggggtcaggagattgagaccatcatggccaacgtggtgaaaccccrtctctactaaaaatacaaaaattagctgggcatggtggtacgtgcctgtaatcccagctactcgggaggctgaggtatgagaatcacttgaacctggaggcagaggttgcagtgagccaagatcgcaccattgcactttagcctgggcgacaaaagcaaaactctgtctcaaaaaaaaataaaaataaaaataaaaataaattcagactctttaaaatggcttacaaggttataaatgatcctcagttcatcccgtgagcctcatctctagccactagccaactctagctctacactgtagctgtattctattttctctcaacttgtggtctttctcaatattatttcttctgtcccaaattcttttctttcttctttactggttaactcctattcttccaccagcaagccttcccaaatacacaaag

SEQ ID NO: 415368 - DNA, 520 bp, Homo sapiens
acgcctgtagtcccagcactttgggaggccgaggcaggcggatcatggggtcaggagattgagaccatcatggccaacgtggtgaaaccccatctctactaaaaatacaaaaattagctgggcatggtggtacgtgcctgtaatcccagctactcgggaggctgaggtatgagaatcacttgaacctggaggcagaggttgcagtgagccragatcgcaccattgcactttagcctgggcgacaaaagcaaaactctgtctcaaaaaaaaataaaaataaaaataaaaataaattcagactctttaaaatggcttacaaggttataaatgatcctcagttcatcccgtgagcctcatctctagccactagccaactctagctctacactgtagctgtattctattttctctcaacttgtggtctttctcaatattatttcttctgtcccaaattcttttctttcttctttactggttaactcctattcttccaccagcaagccttcccaaatacacaaag

SEQ ID NO: 415369 - DNA, 589 bp, Homo sapiens
acatcatcactaacacttgtcattttgttttattttaagcatagccattctaatgggtgagaagatggcagatatttccttgtagtttggttkgcatatccctcatgattcatgatattgagcatcttttttttgtgctttttggccattgtgtgctttttgaccatcttctttggagaaatgtcaattcaagtcctttgcccattttaaaaatcaggttgtttttgtcattgttgagttttatgatttatttgtatattatggatattaacccccccctttttttttttttttttttttttttgagatggagtttcacttttgttgcccaggctggagtgcaatggtgtgatcttggctgactgcaaccgctacctcctgggttcaagcgattctcctgcctcagcctcccgagtagctaggattataggcatgtgccaccacaccaggctaattatttttgcatttttagtaaagacggggtttctccatgttggtcaggtgggtctcgaacacctgacctcaggtgatcttcctgtctcagcctcccaaagtactgtacaggcataagccaccatgcgatcaaaaa

SEQ ID NO: 415370 - DNA, 543 bp, Homo sapiens
ctacagctgcttcctgaccatatccagataccaaatgatattatacctacatctgtatctctcacaaaattgaatatttttttcttgttgtttcatgtggaaatattgcagttcagagacagaaaatattcctcacagatgccaactgtagaggctgcctggaccctgtgatgacctggtttctgtgtctgcatttaggttccctggaaaagaatgccgtgatcaactattaatttctgccataagtaggagaatacaggcacatatgccagtatttgtcatttcccttagaagaaaaaatttgatttcagtatggccggtagagcttgactccaaaactccatcttctattttcatacataagggttctatgtacataagtagaagwggggaaaggtaaatatcacagatgagctgcttcctatggtaccaaaggaattatgtcctagtaaaaaaagtccttcacaaaataaatataagagaatttctacaacctactaaatgacatcacgttggtggtgaaagatatactcctaaggtcag

SEQ ID NO: 415371 - DNA, 474 bp, Homo sapiens
ccttattagtcttctactcttacttcattacatagaagctcatgactcrgtgtagagattaagaaagtcagtaatatccctggaattcaattttctcaattgtaggaagcagttgccttcaaccatgatgaaagatccctttcatcatctctaatctatggtaaataagccacattcaagaaaacagggtaagtcctaaaccctgacacttaaatcttgataataaaaaaaaattcggaatttttttgaataaagtggggtggcagcataatttaatatttaggttctgtgacttcgcctcttgtaccatgagctgctatggattcttttattgatttctcagtttgtgaggtgtctatgggagattatgtccaagcccaggccaaataagtcccagaatgataaggagaattggagagaccaatggcccctgggtcacttgagatttttccttagatcttatacaattagtgt

SEQ ID NO: 415372 - DNA, 607 bp, Homo sapiens
gtgctttttctggccacttccccataaccttgccttccctacattcttctttgtttcagcagaggatgttatttaagcctgaactcaaagccacctgtttgagatttactcatttctctgggtatctcccaggtatatgaagctatcttcacaggkttaacaagatttctggactgaaatattgttataatgaagcattactcaggctacatttgacccacagccttgtaactgaaagtcacatagtactagatactgaccatttgcatccccattattctatagataggatttatgacattagaatcataagacttttgtttaagaattccttaagtagatcctgagttggggtggaacaactgatgccaagcagtttaaagacctccacagaggaactgaatcagcatgaatacaatttcttcagctccctgtcccgtgacttctccttgcactctttgacctatgaacgatctccacacgtcagcccactccaaaatccttaaaactgtagccccagactcctcaggaaaatggatttgaggtgtcctcccatctgctcattcaccagccctacaattaaatgtctttctttgctgcaacgcat

SEQ ID NO: 415373 - DNA, 499 bp, Homo sapiens
gccataccaccctgaacgcgcccgatctcgtctgatctcggaagctaagcagggtcgggcctggttagtacttggaagggagacagtgattrctcgctctcacactcctattcaatgtagggctggaagtccttgatggagcagtcaggcaagccaaagaaataaaagcatccaaataggaaaaaaagccaaactctgtctcttcatggacaatatgattctatacctaggtaactataaagactctgccaaaaggctcctggaactgaaaaacaacttcagtaaggtttcaggatacaaaatccatgtgcaaaaatcggtagcattaatatataccaataatgtcctgagagccaaatcaataacacaatcacatttatgatatctgcaaacaagcaaactagaaatacctctaaccaagaaggtgaaagatctctacagggagaactacaaaacattactgaacaatatcatagatggcacaaagaaatgaaaaagc

SEQ ID NO: 415374 - DNA, 499 bp, Homo sapiens
gccataccaccctgaacgcgcccgatctcgtctgatctcggaagctaagcagggtcgggcctggttagtacttggaagggagacagtgattactcgctctcacactcctattcaatgtagggctggaagtccttgatggagcagtcaggcaagccaaagaaataaaagcatccaaataggaaaaaaagccaaactctgtctcttcatggacaatakgattctatacctaggtaactataaagactctgccaaaaggctcctggaactgaaaaacaacttcagtaaggtttcaggatacaaaatccatgtgcaaaaatcggtagcattaatatataccaataatgtcctgagagccaaatcaataacacaatcacatttatgatatctgcaaacaagcaaactagaaatacctctaaccaagaaggtgaaagatctctacagggagaactacaaaacattactgaacaatatcatagatggcacaaagaaatgaaaaagc

SEQ ID NO: 415375 - DNA, 572 bp, Homo sapiens
cattggccttgggaagaattttggcctaggtcctcaaaagtaattgcaacaaaaacgaaaattgacaaatgggacccagttaaattaaagagcttctgcacagcaaaagaaactatcaggctgagcttggtggctcactcctgtaatcccagcactttgggaggccaaggcaggagtatggcttgagcccaggagttcaagacaactcaaggcaacatagggagtcctcatctcttaaaaaaaaaaaaagggggggggagtaaacagacaacctacagaatggaagaaaatattcgcaaaatccaacaaagatttaatatccagactctataaggaacttgaacaattgaacaggcaaaaaataaataactacccattaaaaaatgggcaaaagacttgaacagacacttctcaaaagaagacatacaagtggccaataaacatatgaaaaaatgctccatctcactaatcatcagagaagcaaatcgaaccacagtgagaaaccaaaaagcaccagatgcagaggctgcagagaagagggaatactcacawactgttggtaggactgcaaa

SEQ ID NO: 415376 - DNA, 401 bp, Homo sapiens
ataatggttaaccaaatatgtccagaggtcaaaagcaaatcagttggagatagaggctttaaagtggtaactaaagtaaaattagttacctaatgagcctccaggcctcttagttaatccatgatcacaagaaatttaatagactcactgtgactcacatccacagacccaagttaaaacccactgagtggaaagttgtctactcacctcacaatcagctatatctgagacatatctatggcaggtaattgtttttccttacggtctcaacttcttcccctttcttcccttcttsctttcttccttcatttcttccagaaaaatctatttatccaatgctatgtacaggaaatagtgttaggtactaggaatacagcagtgactcacacacattggcccag

SEQ ID NO: 415377 - DNA, 597 bp, Homo sapiens
gagtttagcatggaaattacctagtcaatttggggaacttgataactttaggaccttgggcataaataatacattgtccagcaaaacattagccaaaacttttattggcaagttcacaaatttcaaaagctttaccatggcaatttctaaaaaggtaatccttaagctaccatgtttgtgtgtatattattgtctgttttaaactgagaaaatacattttttatcttaagtaggaagggaactcatgtttaatgcttactatgtgctaggtacttaacgtgaacgatctcatttaattcaaacaacaaattcatgaggtcagtattattatcytggctttagataaaaggaagcaaaagcgcagagaaaaatagaagtgaaggcttacataatattatgtttcaggcaatgttttaaatacttcttgcatacattgacatttagttcttcataacagtctttaaaaggtgggtactactatctccatgttgcagatgagaaaagtgaagcacggagagatcagagatttgttcaaggtaagtggcagaagccggaactgagatacaggaagttgagtctgtactctgtaaccactaa

SEQ ID NO: 415378 - DNA, 582 bp, Homo sapiens
ggaatacatgaaaactatgcttttagactaacaactaccttaaaaattattgtcattgctcactaaaccatacatttctggattcttaaaatacctctagctaayaggaccattcacaaaaatgtcattttggttcattgaaatgaattgctttcctgtccaagaattaaacagtcatttaaaaacaacacattatttccttgcaaaataaagcgctaagcttaagaaataaaatacagaaaagtcaaatgagaaagtgttttgtaaggggctacctgctgctgcaacagggcacttgcttctctctcctacattctgcagtgactctggggtccccagagtttgggcataaataatccaaactatacccacagtgcagggagcccagtcagctttccttctctcccgctggcactggaaggtaactgacatgccctctggctgccttctaaccgttttagttaagcctaggtttcaattaagttcagtgctccagccctattcactccctagaactagctggaaggaagctgctaccagtcaatgagtagatccattacttccctaagtgctcagccccag

SEQ ID NO: 415379 - DNA, 587 bp, Homo sapiens
tttgaacatgtaaaaataacctctgacctatatatgacttaacttgcttgttctcattcacgcaatgcccatatactgattgaacatttatggcagccccatagcactgatagatgcaggaggmagataatggggggtccccagagaatctccgacccaccccacaagtgtttacatcaaatgtttcatgcagatgagggaacttgcccagggtcttgtctgtgcatgcctgcaatggactggggatctgcttgcacactgggagaatggagttgaaccatggtaagttcatgccttgtgcagggggcagggagcctggctgcctcagctcctgaattggtggtggcctggaattcaatctctgaggtggtagcctgttagcaagaccccctctctctttgctgagagtcttctttttttctctcttttccttttcacccaacaaactctgttcccctcacctttcaatgtgtccacatgcctatttttttctggttatgatacaagagcccagatttagctgaactaaggagcaaaaattctgcatcattttggtggcccgtatagggacatgaggaaaggtgagt

SEQ ID NO: 415380 - DNA, 619 bp, Homo sapiens
atagcagtgtcaactagggaaaaactttstaacacatatcattaaataataaaggcatgttgtagaacaacagatttgatataatctcattatgaaaaaaatgccacatggacatgtatataggaaatgagaaacattcacaatagttacatttggaaacaaaaataatattagagagaaccacaaaaagggattattacttttttgagtttttcaaaattttaataatgaaattatatatttgtatttcaatttttataatgtaactctctacctgtactttaatatcaaaagaaagaacttataatgtttaacaaatatcaaaagaacttacaatatttatataattttagatattgtcatgttcattcagaattatacccagtcattctccctgcttttagcaaccaatattttaataatgtataatattttgtccactgaatgtgccactttacataacaatactcctgatgctggactttcacattgttatcaacttttcactgtcaataatgttgcaatacatatctttttgagagatagggttttaaattttctttattttgaaataagttctaggttagagccccaggatgggattagttggtggaaaatt

SEQ ID NO: 415381 - DNA, 596 bp, Homo sapiens
aataggtgaccttttgtgtctggattctttctcttagaaagaatattttggaggtttagccgtgttttagcatgtrtcagtactttattcttttttatggtgaatggatgactcttaatgatagcatagtagtttatcctgtggatggaatgtaatttaattaaccgcctctcatttatgggcacttaaatgtcatttttgctcacatatttaatgattcattgaataatttttgtgcatatatgcaaagaattttatgggcttgtaagtctagtttgtgttaaacacaggtggcatttatttatgtaattaataagcaacaaacttaattagcattttatcactactatttttatttaattgacaaataaaaattacatatatttatggcatacaacatgattctttttataaagatggagtcttggagtcttgctctgttgcccaggctgaagtgcggtggcaccatcatagctcactgcaacctcgaattcctgggctcaagcagtcctcccacctcagcctcccagtagctggaactacaggcatatgtcaccatgtgaagctcaacttgatgttttgaaatatgtatacat

SEQ ID NO: 415382 - DNA, 596 bp, Homo sapiens
aataggtgaccttttgtgtctggattctttctcttagaaagaatattttggaggtttagccgtgttttagcatgtgtcagtactttattcttttttatggtgaatggatgactcttaatgatagcatagtagtttatcctgtggatggaatgtaatttaattaaccgcctctcatttatgggcacttaaatgtcatttttgctcacatatttaatgattcattgaataatttttgtgcatatatgcaaagaattttatgggcttgtaagtctagtttgtgttaaacacaggtggcatttatttatgtaattaataagcaacaaacttaattagcattttatcactactatttttatttaattgacaaataaaaattacatatatttatggcatacaacatgattctttttataaagatggagtcttggagtcttgctctgttgcccaggctgaagtgcggtggcaccatcatagctcactgcaacctcgaattcctgggctcaagcagtcctcccacctcagcctcccagtagctgsaactacaggcatatgtcaccatgtgaagctcaacttgatgttttgaaatatgtatacat

SEQ ID NO: 415383 - DNA, 510 bp, Homo sapiens
tttagattccgcatataaatgaggtcatgtagtgtttatctttctgtgcctgccttatttcacttaacataatgtctttcaggttaatctgtattgtcacaaatgacaggattttcttctttttaaaggctgaatagtattcatattttatatttatatatacctagctcacattttctttatccattcattcattgatagaacttaacattgaatctatgccctgggtatcggaataatgctgyaataaatgtgagattgtataaatctctttgacataatggatttcatttcccttggatatacaccagtagtaagactgctggatcataaggtagttctatttttaaattttttaggaaactccataccgttttccataatggctgtaataaatttacattttcaccaagagcgtaccagggtttactctcttccacatcctcatcaacacttgttatctttcacctttttgaaaataaccatcctaataacacacatcctaagttg

SEQ ID NO: 415384 - DNA, 510 bp, Homo sapiens
tttagattccgcatataaatgaggtcatgtagtgtttatctttctgtgcctgccttatttcacttaacataatgtctttcaggttaatctgtattgtcacaaatgacaggattttcttctttttaaaggctgaatagtattcatattttatatttatatatacctagctcacattttctttatccattcattcattgatagaacttaacattgaatctatgccctgggtatcggaataatgctgcaataaatgtgagattgtataaatctctttgacataatggatttcatttcccttggatatacaccagtagtaagactgctggatcataaggtagttctatttttaaattttttaggaaactccataccgttttccataatggctgtaataaatttacattttcaccaagagcgtaccagggtttactctcttccacatcctcatcaacacttgttatctttcacctttttgaaaatarccatcctaataacacacatcctaagttg

SEQ ID NO: 415385 - DNA, 358 bp, Homo sapiens
ctttcgcaatcaatacccttgtgatttcctacacctgtctttaatctctgaatcccatcatttttgtaagctgaggaggttgtatgtcccctcaggaccctgtgaagattgcgtaaactgcacaaattgtttgtagagcatgtgtgtttgaacaatatgaaatctgggcaccttgaaaaaagaacaggataacagcratgttcaggaaacaagggagataaccttaaactctggctgcctctgagcctggcagaacagagccatatctctctctttcaaaagcaaataggagaaatattgctgaattcttttttcagcaaggaacatccctgagaaagaggatgcatccctaagggga

SEQ ID NO: 415386 - DNA, 574 bp, Homo sapiens
gtaacacttcctatgagagcttggtggagttcctggaggaaaacctgaaaagggaggaggaagtctcctccccccatgactacagctcccaggagcctcacactgtcatactaggccaataggaaacaaaatttctcgtttcgtgtttctctcagtgtgtatgatatccaggggcttctttgcttctcccccaggyaagcaaataagcaggtcaggagtttccctgcaaggacctgtttctcttcaagatggctgtgtgtcctgtgacctgttctctcatttcagttctctaacgggttcacaaaaagtctttaatgtgatgcctgtccagctttaatcttgtcacaataggagctgattgtgtaacaataggagctgatcattagattctctatatatcccagagatgtactttcaaatataaaaggaaaaaaatcagtcatgcatcacttaataatgtgtattcattttgagaaatgtgtcattaggcaattttgtcattgtttgaacatcacagaatgtacttacacaaacctagatgatctagcctaccatgtaatctacatacctaggt

SEQ ID NO: 415387 - DNA, 596 bp, Homo sapiens
ctgtgacctgttctctcatttcagttctctaacgggttcacaaaaagtctttaatgtgatgcctgtccagctttaatcttgtcacaataggagctgattgtgtaacaataggagctgatcattagattctctatatatcccagagatgtactttcaaatataaaaggaaaaaaatcagtcatgcatcacttaataatgtgtattcattttgagaaatgtgtcattaggcaattttgtcattgtttgaacatcacagaatgtacttacacaaacctagatgatctagcctaccatgtaatctacatacctaggttacatggtacagcctattgctcctaagctacaaacctgtayagcatgtgactgtactgaatactgtagataattgtaacacagtggtaaatatttgtatatctaaacctatctaaacatagaaaaggtaacacgttgcactaggatgttaccacagctatgacagctgtaggcaataggaatttttcagcttcatttcatagtcttatgggaccacggtcgtatatgtgggctgtcattgaccaaaatgtctttttgaggcacatgactgtgtatatatgcat

SEQ ID NO: 415388 - DNA, 608 bp, Homo sapiens
atatctctgaaaataaagttttgtgagaatctgtagcagagaatctctttctacaggcaaattcctaaaatttggtagattaaaagatagtattttattgctgcttcgatctgcatttttgcactgatacggaacttcctttcttaagttcactggtcatttgtattttcctcttgtaccttgcctgttaatgctgttgtccaacttttctcccaggtactcgtctcatttgcattgctaaataagagcagattatatgataagaacctcaaccatgcctgacatatgtttcaacctttcccaatttatattttgtctgttagtactggggtgttttggatttttaatatgttcataataaaacatctaaaatatataayaaaaatttttaaataataaaataaacaccattactttgctttataaaatcttaacattagtctgtatttagttcaaacactttttaagttaaatttcacagattaatgtggggtcgccatgtcccttttccaatcccaagctctttcctactgctccagttagctaaccactatcataagtttgttatattatttctagatatttgctacaaatttagatttctacag

SEQ ID NO: 415389 - DNA, 518 bp, Homo sapiens
ttcctactgctccagttagctaaccactatcataagtttgttatattatttctagatatttgctacaaatttagatttctacagactttcmatgatactgttctccatgatttaaacttatataatacatatacaatgtgtatttggcatacatccctctgcacatacaagaggacttcaaaaagcttgtggaaaatgaattaaaagataaaaatgtaagcccaacactttagcaggccaagtaggaagatcacttgaggccaggagtttaagaccagcctagggcaacatagggagatcccatctctataaaaaataaataaattagccaggcgtggtggctcatgcctgtaatcccagcactttgggaggccgaggtgggtggatcacctgaggtcgggagtttgagaccagcctgaccaacatggagaaacctcgtctctagtaaaaatacaaaattagttggtgtgtggtggcacatgcctgtaatcccagctacactggaggctgaggcagga

SEQ ID NO: 415390 - DNA, 635 bp, Homo sapiens
gcaggccaagtaggaagatcacttgaggccaggagtttaagaccagcctagggcaacatagggagatcccatctctataaaaaataaataaattagccaggcgtggtggctcatgcctgtaatcccagcactttgggaggccgaggtgggtggatcacctgaggtcgggagtttgagaccagcctgaccaacatggagaaacctcgtctctagtaaaaatacaaaattagttggtgtgtggtggcacatgcctgtaatcccagctacactggaggctgaggcaggagaattgattaaacccaggaagaagaggttgcagtgagctgagatcatgccattgcattccagcctgggcaacaagagtaaaactccatctcaaaaacaaataaataaataagccaggtgcggtggcatrcacctgtactcccagctactggggaggctaaggtggaagaatcacttgagcccaggagtttgaagctgcagtgagctatgttcttgccactgcactccattccaggtgacagagaagactcttgactcaaattaagataaaataaaataaaatagtaataaacgcaaaaaaaatacaaactacatttcatcgtaagtttcatcagcttcaagacacttct

SEQ ID NO: 415391 - DNA, 562 bp, Homo sapiens
gtaattgattttttcagtgcgggacctgagctttgtgggatgtattatgtcccaaatgaaaaggaacagtgagataagccatcgcccttgcctctactcccagacaaaaagcyggttcttcctggctgctgccaacccacagggggttttaacagtggggaatttgtcacccgaggccaccctcaaatgctagctctttaacactgaataaggaagagggggcagggaggaaagtcaaccacctacctggccaccaccctttcaggccatagggtgggactgtctgagagtggctgacaggtcaccagcctccgccccaagttggggctccagggggcctcccaggctcactcttccgaaggtggtcattgcagttgttcccattccatctgtgcatgctgggcagtccgctccgtgcacgaagtggggacaggcgtcacaggacaacatctgtaccccaccttccagggatcaggggaaaagagggtaactctggttctttggaatcaagggaccagggccctcttttcacaataaggacgggacagagaaaattcatctg

SEQ ID NO: 415392 - DNA, 562 bp, Homo sapiens
gtaattgattttttcagtgcgggacctgagctttgtgggatgtattatgtcccaaatgaaaaggaacagtgagataagccatcgcccttgcctctactcccagacaaaaagccggttcttcctggctgctgccaacccacagggggttttaacagtggggaatttgtcacccgaggccaccctcaaatgctagctctttaacactgaataaggaagagggggcagggaggaaagtcaaccacctacctggccaccaccctttcaggccatagggtgggactrtctgagagtggctgacaggtcaccagcctccgccccaagttggggctccagggggcctcccaggctcactcttccgaaggtggtcattgcagttgttcccattccatctgtgcatgctgggcagtccgctccgtgcacgaagtggggacaggcgtcacaggacaacatctgtaccccaccttccagggatcaggggaaaagagggtaactctggttctttggaatcaagggaccagggccctcttttcacaataaggacgggacagagaaaattcatctg

SEQ ID NO: 415393 - DNA, 638 bp, Homo sapiens
  misc_feature (1)...(638): n = A,T,C or G
ttctctgctcaatagggccaggaagtctctgctctatccgagtggtctatatggccaggactgattaaggatagtcacgaatcttccctgctcctgcccccaagacagcttggtttttacatctgcgctgagacatccagacaaccagaccagaactttctggtttctttctgctctgtgattctgtgtctaaaaggtaacaccctggactcaattgaacatgcagtattggatttttctttccctgagtgagtgaaagtgcaatggaggtaaaaagtgccattagtcctctcaactagagccttcactccraaaaatgactttgctttttggcaagaggttccaaaaataaagttgttaaaagtgatgtcttcagggacttttaggctagcagagtgactctagaccatgactactctaaacaccattgctcttaaaaaaattacttaccaaaaaaagcaagggctctcagctttttgacatttctttagtctctcaaaaatgcaagcttgccaatggtagggagtggtaatgttgtaaggctctgatgagcttctcaatcaaagacacacagtcagccatttctggtggcccntgactctgtccttactggtttgacccagtacactcaactgaga

SEQ ID NO: 415394 - DNA, 638 bp, Homo sapiens
  misc_feature (1)...(638): n = A,T,C or G
ttctctgctcaatagggccaggaagtctctgctctatccgagtggtctatatggccaggactgattaaggatagtcacgaatcttccctgctcctgcccccaagacagcttggtttttacatctgcgctgagacatccagacaaccagaccagaactttctggtttctttctgctctgtgattctgtgtctaaaaggtaacaccctggactcaattgaacatgcagtattggatttttctttccctgagtgagtgaaagtgcaatggaggtaaaaagtgccattagtcctctcaactagagccttcactccaaaaaatgactttgctttttggcaagaggttccaaaaataaagttgtwaaaagtgatgtcttcagggacttttaggctagcagagtgactctagaccatgactactctaaacaccattgctcttaaaaaaattacttaccaaaaaaagcaagggctctcagctttttgacatttctttagtctctcaaaaatgcaagcttgccaatggtagggagtggtaatgttgtaaggctctgatgagcttctcaatcaaagacacacagtcagccatttctggtggcccntgactctgtccttactggtttgacccagtacactcaactgaga

SEQ ID NO: 415395 - DNA, 589 bp, Homo sapiens
ttataacctttctgcattccaaccctttccaagcttctagccaatgttcattttccctctcttacttccaaggccagtcttagtccccagccccaaacaaggaataaactttggaagaagtttccaaaaacaggcttggaatttccawctgggatatagtatgtcttagggagattccatgggaggtctattcgtgatgggttctgcaaagaggaagaaagaagacctatttgactttgaaaagccttgttccaactgtgagagtctgtagcctcccgattagacagaatgaaggatggagtcctggcatttacccattaaagcaatgacgagtaggtctaatttgtggtatctctaactgatagtttgcattttaaggttaagatattttattgcttccagatggtcagctaacttccagtcagaagagcattactgcagagtttaagaatagctatgatgcagagagagattttaattatcatgtaaaggatctaattaaaaagacacacagtggtcggcttttcacgcgctcaagcctatgaaaatcagtagtttaaaaaattaccttaaggaggaaattggaaaa

SEQ ID NO: 415396 - DNA, 558 bp, Homo sapiens
aaccaaaactcataggaggaaggaaactcaactgagccaaatgagaaattttcatggtttcttcaggaagaatttctttctttttttctctttttctccagaggaatttcccatctatagtggtttacagacagctgtgtttctccaaccacatttgtggtctggctggtgaagactgaaggacagatcgtggttacatggttctatgtaaaatgacattgatcacgttgagaataaaactaagtttcttgtaagtggcagatgataatggaagattaggggtttctggactcagaaaatgccagtgaatatgctttcataagtctatactgagacaggaatgttctaakattggtgatgatattatacatgtgaaggcacagggcagatattttgctgttggcttcatggatccccataaagaaaatcttgctgtgaattctctgctgtatagagcacatgtgggttttctcctcctatgagattcaaatatcacctttattttttgtatatagaaataaaagtctgtacatgcaaccgcagacacaaaccaaattc

SEQ ID NO: 415397 - DNA, 602 bp, Homo sapiens
gaccccactgttaagacagtttccagctgtgctatgccatgctctgatactgcatctaaatgggtcccagggcacccagagaacaaacagctttccaactatttaggttgtgacccaggggcaaagggagtccctgagatgcagactagctctgcctcaacgaggagccccaaagactcgtaaactctgcagctccccaygacttgaggttctttcttcagtctccgagattcatggtttccccaagtttggatctccgaacccatcattcatgtaccccatcacaactccccagccctttcctgcctgaggcagcagaggggccaggaatccctggaatgaggaagcaccctctcccatggtcccaagtccacatcgttgggtagtgcacagcaaaccaccccagatgcaggagtacatcgagtatcgccagcttgttgtcacacggggacacctgtgtaaggagaaaggtgtggagtagaaaccctaaggatgtctggtccctttgctaacccaggactgctctgcagatgtatcctcagtaatgcagaactgtgagtaacagcacatatcctattactgatatgtctcccctaaaccac

SEQ ID NO: 415398 - DNA, 479 bp, Homo sapiens
ccatggcagctgccagctgtccagtctgtcccactcagggtaccaagacttccatactgaatagccttgggcaaatcatttaacccttcttggcctctattgactcagctgtaaagttgggtgaatactgttcatctcaaaaggtgggtgtcttagaccatttgctgggtaatttatcaagaaaagaggyttattttgctcacagttctgcaggctgtgcaagaagcatggtgccagcatctgcttctggtgaggacctcatgaagtttctacttatggtggaaggtgaagggggccggcatatcacatgatgagaaatggagcaagagagataggagggaagtgccagagtccttttaagaatcagttatcatgggaattaagagtgagaactcattcactcctgagaaaatggcaccaaggcattcataagggatccaacttcatgacccgaacacctcccaccagaccttacctcc

SEQ ID NO: 415399 - DNA, 479 bp, Homo sapiens
ccatggcagctgccagctgtccagtctgtcccactcagggtaccaagacttccatactgaatagccttgggcaaatcatttaacccttcttggcctctattgactcagctgtaaagttgggtgaatactgttcatctcaaaaggtgggtgtcttagaccatttgctgggtaatttatcaagaaaagaggcttattttgctcacagttctgcaggctgtgcaagaagcatggtgccagcatctgcttctggtgaggacctcatgaagtttctacttatggtggaaggtgaagggggccggcatatcacatratgagaaatggagcaagagagataggagggaagtgccagagtccttttaagaatcagttatcatgggaattaagagtgagaactcattcactcctgagaaaatggcaccaaggcattcataagggatccaacttcatgacccgaacacctcccaccagaccttacctcc

SEQ ID NO: 415400 - DNA, 591 bp, Homo sapiens
tcattgcaagagcagaaactcactcaagctagcttacctaaatggaaattgatttcaagatgtcatggtttctcacaaagctcatggaaatgaagtaaagccaggtcactcaaaggatttaaactggaaatcagaaagaagtgcccactgggatatgtctcatactctgtccccgcccatcgccttatctctctgcctttctgtgtctctgtccttctcagtctccctcctcagtgtctctttcattctctctccagcagtcaggggcccaaaatggcagccctaaacccatgtccacatgatccttgggattcataaacccacagatcaactccatctcagcaggactgctgtgtatggttgggcaggttggaccctgcatgaggctactgtgccaaggaggtgaatactggctgaaatccagtgtaattccctcactaatatttcattggctagagcataccacccaaatttcaaagggaggtgtgttcctaccatgttccagaaggcgggaaaaccagagtatttggtaacagctctaaagtttactacayggaaaaaaagaaaaagcctttaaactgtacgaagtgg

SEQ ID NO: 415401 - DNA, 529 bp, Homo sapiens
tggtcctcaagctgccgcccttcagttctccttcctgttgccagcaaactcggagaatgaaagattcatccaaacacctctgctccttcaccttcctcaaccctcgtaatcacgatttcaacccaaagcatgaccaaaaagatgcccttggaaagatcatcgcgatatgttgtgaatcaaaaaatgcagatggtaaaacatgatgtgtactgcaattccatttcttgttttaaaaagtgttatatttacatatttttttcattgagaaatgttatataataaaataayagaaggtatatccaaatgatgtgattgtgggtgtttttaattctttttatctattttcagatttttcttaaggaacatgaattatgtgtgaaaaatatagaggcttcagaaaaaatgcagcaaactgcttttcagatgttcagaaataaccttgaaattcaatgacacatcactccttatatatcaaaaggatagataaaaaatttaaaagtaaaaaatgaagcaataaaagagttagaag

SEQ ID NO: 415402 - DNA, 592 bp, Homo sapiens
  misc_feature (1)...(592): n = A,T,C or G
aaaccaaatttagtggtgacatatgaaatctttagcacccaaagatgtgcatcttgacgctctttgtgcttttgaattaccaggtgagttttgaaaaaaaatacaggtgcctgggcctcaacccacaccctgaagtggagccanaagtgtaactggtggtggaggtttttgtatgtgtttttttttttttgagaagtgtctcgttctgcagctccgctcccgggtcatgccattctctgcctcagcctcccgagtagctgggactacaggtgcccaccaccatgcccggctaattttttgtatttttagtgcagacggggtttcaccgtgttagccaggatggtctcgatctcctgaccttgtgatccgcccgccttggcctccctaaatgctggkattacaggcgtgcagtgcacccggccttgtatgtttgttttaagctccctgggtgatttgaatgcacagtctgatcggagaacctccatcggatatctctgcatgactgaatcacactcttcagaactaactcgaattttactcccactgagagacttccttatttcataaacccctggcccataccccacccccg

SEQ ID NO: 415403 - DNA, 576 bp, Homo sapiens
ggattaaaaaaaactttacaaaatgaaaagcacaaaacagtcctctctggagaccataccctttcttgtatagtcctgtcattggtcaaatagttaacttccctttttcagaattgtctagattctgtggtctcttttctaattaaagctcatcttcatctaaaracttgggccaaatttggtgaatgaatgagtgattaggctgggaaatgccatgtaacccctcagagggttaaaaagtatggctttgcagttgactttggggtaccctcccagggacaagcccagagatgctttgcacactctcttagtccatttcatgctgctatgcagaatactacactgggtaatttataaagaacagaaagttatttcatcacagctctggaggttgggaagtccaagatcaaggcatcagcatccggtgagggccttcttgctgtgtcttaacatggcagaggtggaggagtgtgagagagagagaaagagagacaaagagagagatacagacagagagagagagaggagctgaatttatcctcactcccatgataacaaacccattcccaaaataac

SEQ ID NO: 415404 - DNA, 576 bp, Homo sapiens
ggattaaaaaaaactttacaaaatgaaaagcacaaaacagtcctctctggagaccataccctttcttgtatagtcctgtcattggtcaaatagttaacttccctttttcagaattgtctagattctgtggtctcttttctaattaaagctcatcttcatctaaagacttgggccaaatttggtgaatgwatgagtgattaggctgggaaatgccatgtaacccctcagagggttaaaaagtatggctttgcagttgactttggggtaccctcccagggacaagcccagagatgctttgcacactctcttagtccatttcatgctgctatgcagaatactacactgggtaatttataaagaacagaaagttatttcatcacagctctggaggttgggaagtccaagatcaaggcatcagcatccggtgagggccttcttgctgtgtcttaacatggcagaggtggaggagtgtgagagagagagaaagagagacaaagagagagatacagacagagagagagagaggagctgaatttatcctcactcccatgataacaaacccattcccaaaataac

SEQ ID NO: 415405 - DNA, 576 bp, Homo sapiens
ggattaaaaaaaactttacaaaatgaaaagcacaaaacagtcctctctggagaccataccctttcttgtatagtcctgtcattggtcaaatagttaacttccctttttcagaattgtctagattctgtggtctcttttctaattaaagctcatcttcatctaaagacttgggccaaatttggtgaatgaatgagtgattaggctgggaaatgccatgtaacccctcagagggttaaaaagtatggctttgcagttgactttggggtaccctcccagggacaagyccagagatgctttgcacactctcttagtccatttcatgctgctatgcagaatactacactgggtaatttataaagaacagaaagttatttcatcacagctctggaggttgggaagtccaagatcaaggcatcagcatccggtgagggccttcttgctgtgtcttaacatggcagaggtggaggagtgtgagagagagagaaagagagacaaagagagagatacagacagagagagagagaggagctgaatttatcctcactcccatgataacaaacccattcccaaaataac

SEQ ID NO: 415406 - DNA, 578 bp, Homo sapiens
ttggtgaatgaatgagtgattaggctgggaaatgccatgtaacccctcagagggttaaaaagtatggctttgcagttgactttggggtaccctcccagggacaagcccagagatgctttgcacactctcttagtccatttcatgctgctatgcagaatactacactgggtaatttataaagaacagaaagttatttcatcacagctctggaggttgggaagtccaagatcaaggcatcagcatccggtgagggccttcttgctgtgtcttaacatgrcagaggtggaggagtgtgagagagagagaaagagagacaaagagagagatacagacagagagagagagaggagctgaatttatcctcactcccatgataacaaacccattcccaaaataacagcattaatcctaatcacctcttaaagatctcatctcccagtactgttgcattggggattaagtctccagcacataaagtttggggactacattcaaaccatagcagacactgacaacagctaaaaatgcatcaagtgcatactctgtgccaggcactgtcccaagtgctttagacaccc

SEQ ID NO: 415407 - DNA, 599 bp, Homo sapiens
tccttggtacggtttcccttttaacaaaaagcagccccaaatcatttcttttctaatgaagagcagtctgaaaaagcaagctgcaaacgtagataagcaagctggaagcttgcttgggtgaatactagcagcagtgccaatagagcagggctacctgagggccaggcatgtcaatatggtggctccatctccccttttctttgtcaccatgtgtgcagtagaggaacgcccacatgggtggccagcttcgttgtgtgctatgcaaatggcacacctagtcctaaccagtttttcgcgcactatgtaaatggcacacctggtccaamcaatcttttgcaccctatgtaaatcagaccccacctcctcaagctcatctataaaagcttctgcatttcactgcagaagcggaaacccattctctccaggaccccctctctgtgctgagagctcttttctttcttttgcctattacacttctgctcttaacctcactctggagtgtctgcatcctagtttctgtggccgtgagaaaacaaatcttgagtatttaccccagacaatgatgtcgcttcaacatcccttacaataaaccagtaact

SEQ ID NO: 415408 - DNA, 623 bp, Homo sapiens
gcagagttgagtaccactgggctaagataggatccattttacgtttggtcaccagttaaggaagcatcccctttccaggtattggacattaggagcattatttctcctcaacaacggcattggctgatccttatacttaaactgtttctccattgggtcttcttcagtgtgcctgattcccatgggtgaaatcagagaggatgtcatctgctttcacttaagaactgagttatagccaaaactgaattatagacttcactggggggaaaatgtgagataacaaatcctcaggggacttgccagggaaacrgagacttggttgatggctgctacaaataatacacataagccccctcatctttgtcccatctgggatcttaggagtttgctttgtgtgggggaccctgaagggcaagccattctgggttattggcatgctggctttttctgggcctggctctccatggaccccgaagcattgatccagtatgagggagcacagaggaagaaacaatgcccatagggaacacccacagggagttgtgagttcactctgggccctgtggatttcttgatgtttctttatcatcatcatcccgtaatcagaatttaatgctgttcag

SEQ ID NO: 415409 - DNA, 480 bp, Homo sapiens
ttcacataccataaaatcaatactcataaatgtttcattcagcagtttttagtataatcacaaaattgagtaatcatcaycactatctaattccagaacatttttatcaacccagaaagaaactctgtacccatcagcagtcatacctcatcccctcctactctcaacccctggcaacgcctaatctactttctgtctctatggatttgctattttggacatttcgtataaatggaatcacatcctagttagccttttgtttctggcttctttgatttagcacaatgttttcaaggtccctccatgatgtagcatgcatcagtaattcattccggtttttatggctgaatattaatctgttgtatgtatagatcacattttctctatctactcatcaattggtgggcatttggatcatttccacttttgactattaggatcaatcctgttgaattaatcagcttgggctaccataactaa

SEQ ID NO: 415410 - DNA, 606 bp, Homo sapiens
ttcatcattgaatcaagctggagggactctccatggagaaacttgtcctgcagatgggacacgcattccccacaggcacggggcagattgacctttggatatcccatagcagcttgcccatctaagaggarcctcacagttgcctaggtccactccaagtaccaagtctcccccagcccaggacctcaggtacctctagattttggcatattctgcattgtgcagagactggctttgtgtgtttacagggggctgttggaccgatcctaccctgtgtctcctgggaaagagcctcatttgaattcaaacctgccctcacatcctggagcttgcaccacctttatccttgtgtgctgcctggagggtccactttgctcaaggctcaagaccactctgatcttggacactgcacacgtatacacatgtgagatttcctgattctatggcccacctgacatcagtctttcccatctctcaggggcctcttaaagcttcttcttgagaacagagagtgttccttttatcttcctcttcccaacctccagaaggagactgagaatataataactaactcatgcttgttaaataaataaatagatgaatatg

SEQ ID NO: 415411 - DNA, 606 bp, Homo sapiens
ttcatcattgaatcaagctggagggactctccatggagaaacttgtcctgcagatgggacacgcattccccacaggcacggggcagattgacctttggatatcccatagcagcttgcccatctaagaggagcctcacagttgcctaggtccactccaagtaccaagtctcccccagcccaggacctcaggtasctctagattttggcatattctgcattgtgcagagactggctttgtgtgtttacagggggctgttggaccgatcctaccctgtgtctcctgggaaagagcctcatttgaattcaaacctgccctcacatcctggagcttgcaccacctttatccttgtgtgctgcctggagggtccactttgctcaaggctcaagaccactctgatcttggacactgcacacgtatacacatgtgagatttcctgattctatggcccacctgacatcagtctttcccatctctcaggggcctcttaaagcttcttcttgagaacagagagtgttccttttatcttcctcttcccaacctccagaaggagactgagaatataataactaactcatgcttgttaaataaataaatagatgaatatg

SEQ ID NO: 415412 - DNA, 565 bp, Homo sapiens
cactgttttgattactgtaattttgtaatatgtttgaaaaccaggaagtgtgattcctccaaatttgttcctcttttccaaaattattttgggtattcgggatcccctgamattccattggaatgttaagattatttgttttatttctgcaaaaactgccactgggattttgataggaattggatcaaattggtagtttggtttggttagtttggggagtttaatagtaagtcttccaatccatgagcataagatgtcttttcatttatttgtgtcttctttagtttctctcagcaatgtttgtaattttcagtgtataagtctttcatcttcttggttaggtttatttctaggtattttattctttttggtgctattgtaaatggaattgttttcttaatttcttttcagattgtgcattgttagtgtatcgaaatgcaagagatttcaagtttttgactactaattttagcatctattgatggaacttgcctacagcaattattactgtggtgtttgcctaatggcggttttctatttctttcatctttttacatttattaac

SEQ ID NO: 415413 - DNA, 565 bp, Homo sapiens
cactgttttgattactgtaattttgtaatatgtttgaaaaccaggaagtgtgattcctccaaatttgttcctcttttccaaaattattttgggtattcgggatcccctgacattccattggaatgttaagattatttgttttatttctgcaaaaactgccactgggattttgataggaattggatcaaattggtagtttggtttggttagtttggggagtttaatagtaagtcttccaatccatgagcataagatgtcttttcatttatttgtgtcttctttagtttctctcagcaatgtttgtaattttcagtgtataagtctttcatcttcttggtkaggtttatttctaggtattttattctttttggtgctattgtaaatggaattgttttcttaatttcttttcagattgtgcattgttagtgtatcgaaatgcaagagatttcaagtttttgactactaattttagcatctattgatggaacttgcctacagcaattattactgtggtgtttgcctaatggcggttttctatttctttcatctttttacatttattaac

SEQ ID NO: 415414 - DNA, 586 bp, Homo sapiens
gcttgtgtcctggccttatggatttggcctttggtcttggtcactgattttgccgagtgccctctcatccrctctcagacttactccactcttgggagtcacagaatagaatcccaccttcactgtgacccctggccagcatcttagattgagtccctcttagttcttgcaaaaaggaatttggacatttttccaagaagcagtagctcaagttacacactccttgcttcaacttcatgacccctctagtcttcctgcaagagttctatatttaggatgggtaggagagaaagacctaggagaaaatcagtggcccttatggctgattattattggcaatgagggtggccttctacagctccttttaaactctaggaacccaatccctgtaagactgaagagagatccaaagaaaatggctgggatagtcatacatttagctagaattattcatgaatacacaaagaaactagttctcaaaagatgtctgatatgttgattgacagggaagagaaagatgatacacttagggaatctggaaatacctttggagtttttttggtttagggggagtttttagattcag

SEQ ID NO: 415415 - DNA, 586 bp, Homo sapiens
gcttgtgtcctggccttatggatttggcctttggtcttggtcactgattttgccgagtgccctctcatccactctcagacttactccactcttgggagtcacagaatagaatcccwccttcactgtgacccctggccagcatcttagattgagtccctcttagttcttgcaaaaaggaatttggacatttttccaagaagcagtagctcaagttacacactccttgcttcaacttcatgacccctctagtcttcctgcaagagttctatatttaggatgggtaggagagaaagacctaggagaaaatcagtggcccttatggctgattattattggcaatgagggtggccttctacagctccttttaaactctaggaacccaatccctgtaagactgaagagagatccaaagaaaatggctgggatagtcatacatttagctagaattattcatgaatacacaaagaaactagttctcaaaagatgtctgatatgttgattgacagggaagagaaagatgatacacttagggaatctggaaatacctttggagtttttttggtttagggggagtttttagattcag

SEQ ID NO: 415416 - DNA, 586 bp, Homo sapiens
gcttgtgtcctggccttatggatttggcctttggtcttggtcactgattttgccgagtgccctctcatccactctcagacttactccactcttgggagtcacagaatagaatcccaccttcactgtgacccctggccagcatcttagattgagtccctcttagttcttgcaaaaaggaatttggacatttttccaagaagcagtagctcaagttacacactccttgcttcaacttcatgacccctctagtcttcctgcaagagttctatakttaggatgggtaggagagaaagacctaggagaaaatcagtggcccttatggctgattattattggcaatgagggtggccttctacagctccttttaaactctaggaacccaatccctgtaagactgaagagagatccaaagaaaatggctgggatagtcatacatttagctagaattattcatgaatacacaaagaaactagttctcaaaagatgtctgatatgttgattgacagggaagagaaagatgatacacttagggaatctggaaatacctttggagtttttttggtttagggggagtttttagattcag

SEQ ID NO: 415417 - DNA, 586 bp, Homo sapiens
gcttgtgtcctggccttatggatttggcctttggtcttggtcactgattttgccgagtgccctctcatccactctcagacttactccactcttgggagtcacagaatagaatcccaccttcactgtgacccctggccagcatcttagattgagtccctcttagttcttgcaaaaaggaatttggacatttttccaagaagcagtagctcaagttacacactccttgcttcaacttcatgacccctctagtcttcctgcaagagttctatatttaggatgggtaggagagaaagacctaggagaaaatcagtggcccttwtggctgattattattggcaatgagggtggccttctacagctccttttaaactctaggaacccaatccctgtaagactgaagagagatccaaagaaaatggctgggatagtcatacatttagctagaattattcatgaatacacaaagaaactagttctcaaaagatgtctgatatgttgattgacagggaagagaaagatgatacacttagggaatctggaaatacctttggagtttttttggtttagggggagtttttagattcag

SEQ ID NO: 415418 - DNA, 596 bp, Homo sapiens
gcatcattcccatgttagatgctgttatccagaaatatctattttggtgcccgcaatttttttttcctttctctcatttggggaagatgaaagctgcaaggctgtttatctcccctaaattagccatgtgataactctgagatattattaaccactcctcacagcactaatgtttatgtctgagaggggtcaagtggcgatcaccattgagggagagtagccaagataaaaatgcaagcaacgcagcagaaatgcagcccacatcagcccggacaaatgggagaggggaacagagtaacccaaatgccccccagcagccaccactttgcaggggcaagagggctcaccggtgccttcttgccygagggcatcagcacgcagcccctccagcttgaccgagtcaagccctcatggctgatggtaccccaggcaagctcctggagttgttggtcgcagccccgactgtgcctgtttctatctcgctgatcaattcctaccctgcggtccagggatctgacttctcagagctatgactgctactgacactcaggacctaagggatactgtcactctgtcccaagtctccaagatggaac

SEQ ID NO: 415419 - DNA, 587 bp, Homo sapiens
gagttcagttccttatatattttaccaagtctttattcataacttagaacagagatgaggcgggaacctcaggcataacccaaaaggctgggagaaccaagtacaggataaatactcagcatttcatccccagrgatgtctttctgctcaaaccaccttgcttggaagctgggtaggtctcctgtttgggcttgtgtcaaagtccaaaacaacgcagcttgtggatgttgacatcccaatgggaaagaaagcctttgaccagcaagtgatgcaaaagccatcctgcctccctgcatcatttgttcttccattgcttttcacactgccattcctgactacggagcctctgtcttacagaaaaggacaaggaagactggatttggttcaagatgaattctgggtccccaaaagtgtgtgggttgcaaagtaattattctacaggagaatatgtgtattcgagcaaatctcaactttcactccccccattaacctgggcctgaacaataccctactgactcacaccagtgatgctgtcagaggttttacctgtgattttccaagcagcaggttttgggtcagcatagcaa

SEQ ID NO: 415420 - DNA, 638 bp, Homo sapiens
actaatttatctttccactacctcatcaaaatctctggatattcacagtttccctcttcaacttgtctgtattaagcactgaaaatagaaacattgtgcagacaacatggaattataatcgtataaacctgagtttgagctttaaaatttactcaacctctctgagattcagtttactttgctggaaaaaaaatatcaacttcatgaagttgatacagaggattatcacatatataaagcacctagcactcaataaatattggtaccatacttcttcccccacatacactggggattcagtaaggtcagtcccaaagaaaggcacccaaactcaagtgcaaataaacaggagacacctcctgattctaaaggctcaaagccatgcttaaaatctttataaaagaccatgagaaaatcccttttcatgaaaattagatggttgagcagaggaaccagagtgagcggacagtctgtgtgtccataacatcaaatggtggaagggcctcagatgagctcagaatttcaggtggacataaaccaacagctgaagttcagaagacagagtcatgacagtcccatttcaatctacaggacgcaaaccagcttatgttsatccacaaatagggtaaccaattcac

SEQ ID NO: 415421 - DNA, 606 bp, Homo sapiens
ttgcatttatattatagagtagcaaatgcttttattccacttccaaggcagaataagcctcaaacgcagacccataatattgagcagatgattaccaccattagctaaaatcttttatgacacaaagatgaaatgtactagataatgacacaggaaacataaaaatgctcgtttttataagatggggacattttaccttctttaaatatgattcaaggtttttctttcttttgttattaaataatttcattattatctatatttgcactttgacagcttattttttcctctttgctatatttaacttcgttaggggggtatacattcaccagtcttttgaatagtatacagcatacaattaatatacttcctgttaagacagaaaaaatgcactacagctggctttcttgagagaacrttcacacatatatacagtcttttgaaggatacatttcataaagactcttgcattttgtgttacatttattaaggctccttgcataaattttcataatttcacattttattagtaattgccatttctatttttctagtctcatctgaaacatacttaccatttccattagaaaaaaagtctaatttcct

SEQ ID NO: 415422 - DNA, 582 bp, Homo sapiens
aatatacataagtgtaggatcagcctcttattctttacaatgatttgtcagtgataaagaatacctacaatgtttaattgatttaactcttttatttgttcctttattaactaatagttaagacatactatgttttatttcagtttaaacaatgaacatattaatagatgtatgattttataatggttgccataggttaattttccaaaataaacaatcattctggaacctttgaaattattttaatctcaatagttcaaggcttttagaagaatttaccagctatcccttaaatacagttttttctgttaatgcaatagaattttaaaataaagagaagaaagcttcacttccatacagattgcaaaactaatttcctcattacttattgccattaaaaactctcattctcctattccttaaattaacaattttttccaataaaaatacagataatgagcaagactttattacaaagtacaaatatcaggaaaacaacytaatgctgaacgctactcactgctgcatgaatttattcagccctggctaattaacggatggattttctatattcattgtttg

SEQ ID NO: 415423 - DNA, 519 bp, Homo sapiens
ttccatgacatgtgggaattgtgggagctacaatttaagatgagatttgggttgggaaaccaccaaaccatatcacactagataaggggcaaaaaaattatccctgccctagatcaaccacaaacacaatacagagttcagctaccatgagagggaaggggaaggaatgcaagccagctccacctttgaggcctaggagcacagagctttccaaatattgaagatagacagaaaagagagggggcagaggaggaggaaacatgacctaattcttaacatgagactaatcccagtaatacgcaatagcagtctactgctagaggggcgcgagagcagcaaccaagcctttactccttggctcagatgtgaagaaatttctaaagctgagagttgagtaaaaacactgatcaaaacacaaggtaacccctgccaaccacgggagaaatgtgaagcctgtgatgcactgamggtgaattccaatattacaacaccaaaaccaaaactctgctcaattgatga

SEQ ID NO: 415424 - DNA, 507 bp, Homo sapiens
aaatcaacttacctctgacagattaatgaatttaaatgtcataaataactaatattaaaaacataaaagaaaataattacacatgcagtagtgattaaatatgagactaatactatgaaatattttatgtaaaaattgaaattgtaagtcaactttattmttttctagaaaattttaatcaacaaaattgacatgaaaagaaattttaaaaaatgaaaaaacataattgtcatgaactctcaagtatctgagctcttaccctattaacaagctaattagttagcctgccagagtttcataaatgttggcaaaagacatgagactcctgagtcagagacaagggacagttcattgctcatagcaatagtggtagccaaagcatcattattttcttgcaccggtttcttgagtgaccaattcccacagaacatataaagacagtcaaataatacctgtgtatgccgtgaggtataaggaatgaaaccctagcttagggaacctgaaact

SEQ ID NO: 415425 - DNA, 566 bp, Homo sapiens
ttatgagggcggttcccccatgctgttctcatgacagtgagtgagttctcatgagaactgatggttttataagtgtttggatggttgtaagtttcctgaggyctacctagccatgggaaaatgtgagtcaattaaacctcttttgtttacgaattatccagtctcaggtatttctttatagcagtgtgaaaacgaactaatatgatgttcaagatgtacagtgggattatttgatatatttatacattgtgtactgattgccacagtcaaatttattaacatatctatcactacccacagttaccaattgtgtgtgtgtgcatgcgtgtgcagtaaaaacacttaacatatgctttcttatgaaatttcaagggaatgatacattagtattatctatagttaccatgctgtacattagatcctcaaaacaaccttggtcattttcaaggtcattattccctcaataaatatttagtttccaatgaaccaaggttcatagataaatagaaaaatgttaagtagatgattgatagattgacaggtagataaatattgcatttaaggtt

SEQ ID NO: 415426 - DNA, 569 bp, Homo sapiens
catttgaagctttttttcttttctgatgtaggcacttatagatattaacttccctgtagtactgcttttgctgtgtcccctaggttttkgtatgttgtgtttctgttatcacctatttcaataaaattttcaatttatttcttattttttttttgctcagccactggtcattcaggagcacattgtttagattccatgtatttgtatagtttccaaaatttatcgttattaatttctaattttattccactgtggtcagagaagatgcttgatattattttattttttgagtaaaatatggtctatctttgacaatgatccatgtgcaaggaaaagaatgtgtattctgcaactcttggatgaaatgttctgtaaatatcgattagatctatttggtttacagtgcagacataatctgggaggctctttggagctcctcatgggggaaaattttctgtctagccaaacaggcagccctgactggtgtgtggaaacattgctgtcagctttaccactttcagtcacagaagatacacaaagggacagtagtctcaataattgtttaaaca

SEQ ID NO: 415427 - DNA, 634 bp, Homo sapiens
gctttaactattaacagacactggcacccacttccaggaaggaaggaaggaaggaaacwgcagagtgtctagggtacacagtgatgtttcagggattctaagctttagattttggggataattaaattgcatcagggagaatgaacaatgcctcctgtgtaaaggtgtaacgtccacctgagggccaagtgttgtggcttacacctgtaatcccaatgctttgggaggtcgaggcaggaggatagcttcagaccagcagttcaagaccagactgggcaacataaccagaccccatccctacaaaaaattaaaagccttagctgccacatggtgtggtggcatgtgtctttagtcccagctatttgggaggctgaggtgggaggatcacttgagcccaagagtacaagggtgcagtgagctatgcctgctgcactgcactttagcctgggtgacagtgtgagaccctgcctctaaaaaaatccacataaataggtaatattataaaataacttatagatcacaactagagtatcaattaggcacaatggagataatgacattaaggttccctcctgaggactgctttactttcctgttttgactgttcaagttgttttggtcattaagtctacct

SEQ ID NO: 415428 - DNA, 634 bp, Homo sapiens
gctttaactattaacagacactggcacccacttccaggaaggaaggaaggaaggaaactgcagagtgtctagggtacacagtgatgtttcagggattctaagctttagattttggggataattaaattgcatcagggagaatgaacaatgcctcctgtgtaaaggtgtaacgtccacctgagggccaagtgttgtggcttacacctgtaatcccaatgctttgggaggtcgaggcaggaggatagcttcagaccagcagttcaagaccagactgggcaacataaccagaccccatccctacaaaaaaytaaaagccttagctgccacatggtgtggtggcatgtgtctttagtcccagctatttgggaggctgaggtgggaggatcacttgagcccaagagtacaagggtgcagtgagctatgcctgctgcactgcactttagcctgggtgacagtgtgagaccctgcctctaaaaaaatccacataaataggtaatattataaaataacttatagatcacaactagagtatcaattaggcacaatggagataatgacattaaggttccctcctgaggactgctttactttcctgttttgactgttcaagttgttttggtcattaagtctacct

SEQ ID NO: 415429 - DNA, 602 bp, Homo sapiens
tctcttggtgctagaattcctttattggatattaagttttctatacaacggggacatgaagcaaaaattgtagaaggaggtygttgagtatctggagatgttccatcttctattctattacttagttccctgactcatttattctagctaaaagaagaactgcatcatatattgacctggttcaaagaatattcttaatcttacaggcagcactttatattgaaagcatttatttaactggaggtacgagtgaagtatattaggtcattctattattctataaggccagttgtttctgggtgttgggtatcacacaacaagatcagtgattctcatctgcaataacccattatctagcatgggttccttggttagaagcaatgttgtgcaagatactatgaccatttataaggcttccagtaagtccccagatggtggctctagcaaagaaaaaaaaaagaaccacacattatagtagcaagaatgaattctgtcagtgaggcacacacatccattacctaatctaaactctacaaagtctcccaatgaggaccccgagtgctgactgtgaacagtgtggacccaagtgaatctgaatgtca

SEQ ID NO: 415430 - DNA, 593 bp, Homo sapiens
attttgtcctacactcagttcagttgcyactttttcttcaatgggagcatcagcaatatcagctgcaggagtggcagattctctccaattttgctttcaattaatatttttgaaacaacagaaataaactcttgagaataaataagtcattaggctcttgaacaatttgacctgggaagtcccaagaaaataataccaagtgcggtaagaaggattaaaaaatggctcctaagattcctgcctcctgacatacacacagattatccaatcaaacactaatgtagatgctgtggtgaaggtattttgcagatgtaattaaagtcccaaatcaattaatctaaagatagagacactatgcagttgagccatgagcatttgaaagcaattttctctggctaatagcaaaataggaagttggagatgtgaagtatgaccagcatttaatgtgttgttattggcttagggattgaggagactatcttaaaaagactgtggacagacagccagcaaaaacacagggaccccagtcctacaaccacaaggaactgagattttccaataaaaaaattgagcttggaggtgcatatttcccc

SEQ ID NO: 415431 - DNA, 490 bp, Homo sapiens
ggaaagttcccatgatacacacagagttcagcagacagaggctgagttccaacagcaagtacatctataaatcaaaaaaatcccatgagttggtggagtggtaataragaaaccagtgtgaattactgcttaacgggaatattgaatccttaaatgaactgcacactctcattttaatgggggcaagcagtagccaggcataataaaaataattgaaatgagggtttggatccattaatctactgaaaagtgtcttaaaaaattagtgaggcagaaaaacagccaaatgtggatgacaacttcccgatagatgtcatttgtgcctaatggtctccatggccgtcaataaaagagtgaatggtatggataatggcaagtaaaagtttaagacaaattcttccctagaagaaggatgtaatggagactaggaagagtgatggatggagtaaatgtgcctccccattgcttcattggaaaataagaatgaatc

SEQ ID NO: 415432 - DNA, 611 bp, Homo sapiens
ttttgcaaaatataattcaggctccaatcccctcatatagcttcaagaaaataaatctcaatatatgtgaaaagacttgcccagtggagagacaacaggtctcaagttgctcagagcctacccaaaataggttggacttaccaagaggagaatgaaatagagaatygcaagtatgggaacaaccacattgctctttattttgtgaattagatgcaaattttgatttctcagaacacactagtgtgtttgagaatttctgaaaggagaaaacattctttctctcattccctcgattattcttgagtttcttcttcacagaaggcctagaaatggttaggccacttcctgaaggctggtggcattatttaatccaattataaaatcctcactgagggttttattgccaagaactttacacagatgagttatataaattcttgtacagaagacagaacacaaacccactatatcatcacatactataacatatttatatcatcatgcgatatactttacaatataccatgcataataacataaaatattcaaagttagggtttcagtctgtttcagctgctataacaaaataccttatttataaataaaagaaa

SEQ ID NO: 415433 - DNA, 519 bp, Homo sapiens
tctagggttgtgaaggttgtgtaggttgtgaagtccaagctccaggtgcaagcagattcagtttctgatgcgatttcactctctgcttccaagatggtgccttctttctgcattctcayatccaagaagagaggaacactgtgttcttaaatggaagaagggcaaaaagggccaagatgactccctcaagcccttttataagagcactaatcccatttgtgagggcagagccttcatgacctcatcacctctacaggccctgcctcttaatactattgcattgtggattaactttcgacatgaattttggaagacacaaaaacactcaaaccatactaattgaaaaagttgagtccctgctttcaagaaactcaccatctaaaaggagtggatgaaacacgggtcaaagattagtctaaaatggataaaggataaaatatatctatgcaatggttataataggagcccctaaacttctccatcaacttaaaatctttcatggaaggagtcattttattg

SEQ ID NO: 415434 - DNA, 620 bp, Homo sapiens
gaccagcttatcttggttttcctggggctctttagttttagaactgaatgcccacatcctcagaacaccttagacctgagcaactgaagatgactggtcactgtaggcataagaagatggtgtctctcaatctcagaaatgcgttataatgacaaccaagaatagaattgggttccagctctgggattctatagtagcaattatggcaatgtaatgtttgtatggacataaatcaatggctgtggaaacataaagaatggaatcaactcaagagagatcaagacaaacccaacagaaattggaggctaaatcagatgttttgagaggtgagagggaaagagaaatgtcaattatggctcactgtttctggtttgagggaaacagtggacatttactgagtgtgcccagatagagattacagggatatasatctgcttttccccagacagcagcattaaatgcagtggatgtgtacatacaaatccattattaggggttcgaacccagagataggagtaaggagcaagaagagtaagacaaaacatgtgggagaatctatgcactgatggccctgggtgctgctagttggccaacctgcaggaaaacgccactaagatgca

SEQ ID NO: 415435 - DNA, 573 bp, Homo sapiens
accttggctcataggttatcacacagaagctgttcaagtcctttctttggcccatggagggttggaccacgcaaaatctcctgcattcacccttaactatacccatgcctacttgcaaataagaactacccaagcgtgtggaacctacagctgccacagaagtccacttgaaactatctaggtttttagaagttactcattgaattccaagactgaacagttggaaggcatgagtgaccccaagaccattcgagctcatctgtttttttttccactgagttctttgctcctaactcctagtttcaaaataatatctgtactccaaaccaatgagccctccaaagtactgtctatgtgaacayttgaagataactttgtattgtaactgattgaaattggaaggctttacttatgtagcccgggggatgcaattgagttaactttgagctaatccgaccctttgaagagtatccctgccaagaacctcaattatatcttattcaaaacagctgttggcaaaacacaatcataaaaccatctggtttgcaagagtttattatgtaaacttagtgg

SEQ ID NO: 415436 - DNA, 573 bp, Homo sapiens
accttggctcataggttatcacacagaagctgttcaagtcctttctttggcccatggagggttggaccacgcaaaatctcctgcattcacccttaactatacccatgcctacttgcaaataagaactacccaagcgtgtggaacctacagctgccacagaagtccacttgaaactatctaggtttttagaagttactcattgaattccaagactgaacagttggaaggcatgagtgaccccaagaccattcgagctcatctgtttttttttccactgagttctttgctcctaactcctagtttcaaaataatatctgtactccaaaccaatgagccctccaaagtactgtctatgtgaacatttgaagataactttgtattgtaactgattgaaattggaaggctttacttatgtagcccgggggatgcaattgagttaactttgagctaatccgaccctttgaagagtatccctgccaagaacctcaattatatcttattcaaaacagctgttggcaaaacayaatcataaaaccatctggtttgcaagagtttattatgtaaacttagtgg

SEQ ID NO: 415437 - DNA, 549 bp, Homo sapiens
tttttcccatgatagacaaatttagtttatattgggtttgccttgtagccattggtatcttgcctatcatttgctaataggtgagttgaaggtgcttaaaactatcagctgtattaatctgctcttgcttacagaaaatatgcctaaatgaaaagcatggctgcttgagtaaagagtatccttagctagactcctggagtagtttgttgagctgggggtttgccagagccatgctaaattgcaaaaatgtctgaataaactgctgatattcaagagatatgtatattgaagatgtgataaaatagtagtaatcatgacttacatgtaaagcataggcttgtccttctacagaaagtagatcrtttttaacctgccagcctgtgccaagttgcaaggatacaacagtggacaaatcacagtgctctttcaggaaacatcagaacactaggtgagggtatagtcaatgtcaacattttcctccattcccattctttccaaggtgatagaattaatttttcattctagtgcatgttacattcagacatctaa

SEQ ID NO: 415438 - DNA, 558 bp, Homo sapiens
atgtaattgttattattatgatgtgctggctattactcccataccctagccttgaaatattgtttctgggaaggttttaattagagatttatttaatagaattttacaaatcagaatttcttatttttcttattttggttttaaaaagttggtgcttttcaacattttaaaattttatctacattgttcattatgttgacataaaatgttaatgcattcatctggcatattttatgcctagttaatttttactgaatgctggtctttggttaytaattagtatagagctgctttgagctctggctgaggctgtttacattcatagagtatttatttagtaggtagcaagtagttagggtaggataaaatcatttcatccaatcaaatattgagctgaaacaatgttggttgtctacttttttaagaccttgcttatgcaccatctaaccttggttcttgctggcagctctgtatggtcccactggaaagcatgcaatgattacctgtgccctgctcattagtgggacttgaattccctaattgtatgagattgccaag

SEQ ID NO: 415439 - DNA, 486 bp, Homo sapiens
caggttgtctgtcacaatttacttttgagcctttgacaagtagcttaaacttcctaagctcatcacctgaaaaattgcaattactataaataatagctacaatttactttgttacactgtacctgagattattctatgctttcctattcaattctcattgaatttaatccttatttaattctcacaacactttatgaatatttttccctaataagaaaactagcacttagaaagtttaagtaatttcccaaagtcagacaagttaataagattttaggtcaatttccttcagttttgttattaaatgcaataatgtataagagaagcaaaaacttatataaaaatataaaaagtaatttgsaaaattttatgaagttacctatctgcttaaataaaaagggaatcctagtttggtaatatttttatggtaatcatttaatgtatgccattagatattttcattatataactgcttttaaaccaaaa

SEQ ID NO: 415440 - DNA, 578 bp, Homo sapiens
cattagggccattttttttcctctcactctaaattttctccttaacaactttcactcatgtatatgaagtcatgttttgccatataaagataactttcatgtttgtattttcagcctgatttttctgttatattgacctttacatctagcttctcaggtagcattttaaatagaatgcctgaatgacaactcattatcaataagccaccagaaaaattcatatttcttcctaaacatggatcttcacttgtgtttttcaaccctatgaactccacgaccytccctccagccatgtaaggtagagagcaagtagtcacacttgaaaccttctatagtgacatcttccatttccagtctctgacagtttcacccatgattcatatgccttttacattttatctgatataacctttattttaaaatcacattcttgttttcctgtatatatccactagctccttattcatcttactacattaggatatgatcccttgcaatcttttgccacagagcatgcaggttaatttatgtaatttaaaatctaatcattgttacctcagttttaagcatctattggt

SEQ ID NO: 415441 - DNA, 635 bp, Homo sapiens
acaaaaccgtggtggccgaagaataaagagtagctacgatttttgaaaggtgatgcatgcataatggattttaaagaacatatgtatctaatcttggatttttaaaaaataacattttcttacacagtaagagattagcattatgaattcccatatacttagcattaaaaacttatcatagtttgactagacttgctctagttacccgtcttattttatatttgctaaaacattttaatcaactctcaaacattataccatttttgtcctaggtattttaatattcatctctgaatcctatgccaatcttcttacataatattaatgaaattwacagtgtatttgggggagttatctaatcccaatccatagtcaaatgactacactgtcagaaaaaaaaaaaaacatgtcttttcaccgaattttgtaaaaatcgggttcaaaacaatgccaacattgcatgtagtcattagatttcaaatgccatttaatatgcagcagcccttttgcccctttcttatcccattatcttttaaaagaaactggattcatgatataataccctaggatctggattagtctgttgacttctttgaaatgttatttcacttgaatttcttttctagtttcgatat

SEQ ID NO: 415442 - DNA, 583 bp, Homo sapiens
agctgttattacagacgtgtgcctccatgcccagctagtatttttgtgtgtgcgtgtgtatttttagtagagatggagtttcaccatgttagccagggtggtctcaatctcctgamctcgtgatctgcctgcctgggcctctcaaagtgctgggattacaggtgtgagcctaccacacccggcctgtgctttttatttatttttaatgtaatagactattatttatgtttttaataaattatatagtgattcaaattgggttaggataatatagcccaaataacattgttggagataaagagagaaaactattttgaacaaaatatgtatctaatttagagaagggtgtatagaggaacattctatttctaggaatgactaaacacaaaagatacattaacttcattttatgacccaaacacatgctaattttatacatggtaatcaccaaggttccagctgaaactttataaacataggcactatacttgatatactttgaagtcataaggctaaattattaatatgtttttcatgactgtaatttcttcttctcctgacagtcagaaagggtatttcctta

SEQ ID NO: 415443 - DNA, 469 bp, Homo sapiens
atattcttatggtagtaaatttttttatgtacgaactttaaatatcaaggtaattatttaggtcttctttaatgtcctttactacagtgttccaagtgtcaatgcayaggtttcacacaaatttttgttgattgttttgtcaattacttggcagctttgtttatgtttaatatattataaaatttaattccagtgttttcttgattatatatagaaatacaaacagcttatgtatattgatatttttacaaacacgttgctaaactttcaaataaattttattgatttgtcagtaaatttatttagattatctgtggagacagtcatattatgtaccaataattaggtttatgccctccttcccagtccttatgtaacctattcttaatgtttgttaagtagatatctgtgcaactttaaaccttgtctggcaggagtcatatagcatcattgtcaaagtatacgtttt

SEQ ID NO: 415444 - DNA, 235 bp, Homo sapiens
tttagtcctctcacttgaggatagaagttaatttgtttgctcattctgcytacatatgcagtaaatcatcaagctagtagaatagcaaaccattggaaaatagcaattctattctatttactggattaaagaagcaaaagcactgtaaacttaattaaactgctatatgtttcgggagctattaattataaagataataaaaataatgttactggcatcgtatgccttgtgtgta

SEQ ID NO: 415445 - DNA, 561 bp, Homo sapiens
aaataaaattagtatctaaaagatatatttgcacccacatgtttattrcagcattatttacaatagctaagatatagaaacaaagtaagtatccatcaacatataaatagataaagaaattgtggtacatataaacaatagaatattattcagccataaaaaagggaggaatcctaccattcatgacaacatagatggacctggagaacattatactaagtgaaataagtcagacacagaaataacaaaattatgttaaattaaatattttatataaaaatactccagtctatgtttattttactgtaccctggatgtttgggtacagtaaaataaatctcacttatatgtgaaatctaaaaaagttaaatttatgacagtataggttagaatggtggttactaggggctgggagatgggagaaatggggagatactggccaaaagatacaaacctatcccataaaagttgtctgtatttatctcttctttatctttaattaattctacttctccccctttctaagtaaatagatacaacaaacacaagaccattgtatgt

SEQ ID NO: 415446 - DNA, 610 bp, Homo sapiens
atgttacatctattgtaaaataggcaatctggtatatgtcggctactaactatctgaaattccatttgtggtatagttttccttgggtggtgcatgacaccaatgaagatatcctagcaatgatgacaaaacaattacaaaaatatttagtcaaaaatactcctaataatcaaagttattcttatgctttgttttatcattgccaaaaraagttagttttaaaggaagatgttaatgtctaacaaaagtgtttagtaatcttctgagtaaggcctaattaattcatatgctaacttatttatttgtgcattccgggcaaaccagcagtaaaggtaaaactttagcaaaccagcagtaaaggtcaaacttcagcagtttcgtcagatgttttaatgaagtgctgaatttcctgctgcttggactagataaaatccacttgttactgcattttatgtgtgttgtatttagtgaatctagcacctttggttgttgataattattctttttctctacattaaattcacaggtcaattaacagaatatattaactgtctgataacagaaagcattttaaaagatgattttctttgttgatcaaatcagtttcaaa

SEQ ID NO: 415447 - DNA, 610 bp, Homo sapiens
atgttacatctattgtaaaataggcaatctggtatatgtcggctactaactatctgaaattccatttgtggtatagttttccttgggtggtgcatgacaccaatgaagatatcctagcaatgatgacaaaacaattacaaaaatatttagtcaaaaatactcctaataatcaaagttattcttatgctttgttttatcattgccaaaagmagttagttttaaaggaagatgttaatgtctaacaaaagtgtttagtaatcttctgagtaaggcctaattaattcatatgctaacttatttatttgtgcattccgggcaaaccagcagtaaaggtaaaactttagcaaaccagcagtaaaggtcaaacttcagcagtttcgtcagatgttttaatgaagtgctgaatttcctgctgcttggactagataaaatccacttgttactgcattttatgtgtgttgtatttagtgaatctagcacctttggttgttgataattattctttttctctacattaaattcacaggtcaattaacagaatatattaactgtctgataacagaaagcattttaaaagatgattttctttgttgatcaaatcagtttcaaa

SEQ ID NO: 415448 - DNA, 526 bp, Homo sapiens
attccacagttgaagtatttagtcactgatctgttgcaataatatgataggaataaagcgggtactccttgaaggaatggattttgcattatgaatatgtagtcataggacaaataaagaaggcattgagtgaaaatgtcaacatcctagaattaagtatgtattttatattgaagatttagaatgcatttaacrtgcccatcaggccaaatgcctccaggaatagaagaatggcaatataatatgtatttctgagcaaactcagaaaaagaaccagattttagactaggcagatggatccctttaattatggaaaaatgcttttataaaaccattacagcctgataaatttcaggttttctactttgtttttgctactgtcttgctgtcaattgtttcttactactgttcatacagcattttgttttagttttataatgttgatcacttataaccaagcacaagagttttcttgatgtacctaaacacataacctgaacatatatttaaagtggtattatattgc

SEQ ID NO: 415449 - DNA, 526 bp, Homo sapiens
attccacagttgaagtatttagtcactgatctgttgcaataatatgataggaataaagcgggtactccttgaaggaatggattttgcattatgaatatgtagtcataggacaaataaagaaggcattgagtgaaaatgtcaacatcctagaattaagtatgtattttatattgaagatttagaatgcatttaacgtgcccrtcaggccaaatgcctccaggaatagaagaatggcaatataatatgtatttctgagcaaactcagaaaaagaaccagattttagactaggcagatggatccctttaattatggaaaaatgcttttataaaaccattacagcctgataaatttcaggttttctactttgtttttgctactgtcttgctgtcaattgtttcttactactgttcatacagcattttgttttagttttataatgttgatcacttataaccaagcacaagagttttcttgatgtacctaaacacataacctgaacatatatttaaagtggtattatattgc

SEQ ID NO: 415450 - DNA, 641 bp, Homo sapiens
ttagtgattactttgtttctttttggtgtgtcaaggaatcctgctacttaaaagaaaattcaacttccttctctgtattctatactccttttcttctgataaaagcttcattttattcactaaactgcttaattcattcattaagctgctctcattgccaaatgagtaatttcctttctcattcttatctctgtgacatctggccctctccataaccctgtgtttgaaaccgttttcttatccttgacttcaaaattcccatactttctttatctgctgcctctatttctatgacacttccttctcagtgtgtgtgtgcgtgtgtgtgtgttgacatttattctacctggttaaaacctgacatttctggtttttatacctatatcttctttttttccactttcctaagtggtcttacccactgtttgagttaatcygtgtatacacttactaatattataataattctcatctttagcacaacacacatctataaaactctcaagttcattatcaaacttcccacaggtgatttgaatgctggtatggcctaatctgtgtcccccaaaattcattcactgaagctctctcaacatgactgtatttagagacagggcctttaaagaggtaattaaggttaa

SEQ ID NO: 415451 - DNA, 595 bp, Homo sapiens
agagggcagctttgactccctatgattttatctcttacctgaccaatgagaagccccagttcactggcctcatacccaccaaattatccttaaaaactccgatccccggattcacagggagactgatttgagtgataacaaaactctgctctcccacaaagcctgctctrtgtgaattactctttctctattgcacttcccctgtcttgataaatcagttctgcctaggcagtgggggaggtgaacctgttgggtagttacaaaactaaactatattgttaggtaaatggataatgagaaactgtaacctcctagataataaaacaagcaaaatgtattgattcagtgagttaacaatttaagcgaaaataaaaaaacaggtgaaaacacaagtacaagtaatatataagtcatgtataggatagtatatttaaattttctaaggggatttgactcatttacgggggcggggcaagggcaacataactgctacctggaaaagctcttgatatacaaacattaagtacaagttagatgaaaatataaatcttccaggaagacagaatatcagagataaaggctgagagtaaagaag

SEQ ID NO: 415452 - DNA, 595 bp, Homo sapiens
agagggcagctttgactccctatgattttatctcttacctgaccaatgagaagccccagttcactggcctcatacccaccaaattatccttaaaaactccgatccccggattcacagggagactgatttgagtgataacaaaactctgctctcccacaaagcctgctctatgtgaattactctttctctattgcacttcccctgtcttgataaatcagttctgcctaggcagtgggsgaggtgaacctgttgggtagttacaaaactaaactatattgttaggtaaatggataatgagaaactgtaacctcctagataataaaacaagcaaaatgtattgattcagtgagttaacaatttaagcgaaaataaaaaaacaggtgaaaacacaagtacaagtaatatataagtcatgtataggatagtatatttaaattttctaaggggatttgactcatttacgggggcggggcaagggcaacataactgctacctggaaaagctcttgatatacaaacattaagtacaagttagatgaaaatataaatcttccaggaagacagaatatcagagataaaggctgagagtaaagaag

SEQ ID NO: 415453 - DNA, 596 bp, Homo sapiens
gttcattataaattcatgtgtggtaaattagttttcaaaccgaatccaggatcatccaattgataagcatagtaaattaatgcacaatgaagsaggttgccaacaaaaaatagtccctaactaatattttctgcacagatctttgcacatataaacagattgtttacccatttatcactttaactgctaaagcactgtacagtaagtgctatatgtcatttctacactgtgcacattggaagaatttgcttggttacacaattgtgatcatttctctgttttccccctaaagcaaatgtaatacactccctcaaatgccagatggtaaactaattatctctaaaacaaatacagctgtagctaaagtagtattaccttcacaactagtatgtcttagtctggcttggaggggtatacctaaagacaaaaggcaagtataatatttccatgtctagtttatcatctgagactgcaaataagaaagcttattataaagagggaatgacgcatttatccccagtcagtttggaagggaggattgaagttcaaatgttatgtccattgccaagtattatgtttcccacagtagcttttat

SEQ ID NO: 415454 - DNA, 596 bp, Homo sapiens
gttcattataaattcatgtgtggtaaattagttttcaaaccgaatccaggatcatccaattgataagcatagtaaattaatgcacaatgaaggaggttgccaacaaaaaatagtccctaactaatattttctgcacagatctttgcacatataaacagattgtttacccatttatcactytaactgctaaagcactgtacagtaagtgctatatgtcatttctacactgtgcacattggaagaatttgcttggttacacaattgtgatcatttctctgttttccccctaaagcaaatgtaatacactccctcaaatgccagatggtaaactaattatctctaaaacaaatacagctgtagctaaagtagtattaccttcacaactagtatgtcttagtctggcttggaggggtatacctaaagacaaaaggcaagtataatatttccatgtctagtttatcatctgagactgcaaataagaaagcttattataaagagggaatgacgcatttatccccagtcagtttggaagggaggattgaagttcaaatgttatgtccattgccaagtattatgtttcccacagtagcttttat

SEQ ID NO: 415455 - DNA, 476 bp, Homo sapiens
tgattcttttcactcattgtagttaacttatattacggaaaactatctgaagtcatcttagcatgctctgttttgttactgttgtgatttctaaaaaattttttctgacctgtttctcaatattaggctattacttttgacaactatttctcttctctatggacaattctatctttgtattttctccttttctttttgtgtagacttgaggaaaaaagaataacattttttwaaaatcatatctttaagaaaagaattatatgaaattttgaattgtataaaattatataaaagctataaactttctctgtggaaaaagtggaagaacatccatgtatatcctttgttctacattagtcaattataggaaaattttgctttttttccctgcattttacattacatttcaggagactgagtactttaacttattaatcagaatctgtgttggaaattagattataaaacatttaaaa

SEQ ID NO: 415456 - DNA, 523 bp, Homo sapiens
gtactatgttgaataaacatggtgaatgtaggcatccttgtcttgttccaaatcttagtggaaagacattcaatttttctcgtgcaatattatgctaaatatgggtttgtcacgagcaatgatctttaycatttcgagggatgctccctgtgtaaccagtttgttgagagtgtttaacaggaaggaatgttgaattttatcaaattctgttccagtatatattgaaataatttttacatctatgtttattaacaataatggcctatagtttacttttttgtgtgtccttgtctggctttgttatcagagtaatgctggtatcatagaatgagtttggatacattcccttctcctcagttttttttgggaatagtttgaatggaattagtattagttcttcttgtcaatgtttggtagatttcagcagggaagccaataattccagggcttttccttaatggaagaccttttagctattgcttcaatcttattatttgttgttggtctcttgggcttttctatt

SEQ ID NO: 415457 - DNA, 523 bp, Homo sapiens
gtactatgttgaataaacatggtgaatgtaggcatccttgtcttgttccaaatcttagtggaaagacattcaatttttctcgtgcaatattatgctaaatatgggtttgtcacgagcaatgatctttatcatttcgagggatgctccctgtgtaaccagtttgttgagagtgtttaacaggaaggaatgttgaattttatcaaattctgttccagtatatattgaaataatttttacrtctatgtttattaacaataatggcctatagtttacttttttgtgtgtccttgtctggctttgttatcagagtaatgctggtatcatagaatgagtttggatacattcccttctcctcagttttttttgggaatagtttgaatggaattagtattagttcttcttgtcaatgtttggtagatttcagcagggaagccaataattccagggcttttccttaatggaagaccttttagctattgcttcaatcttattatttgttgttggtctcttgggcttttctatt

SEQ ID NO: 415458 - DNA, 610 bp, Homo sapiens
aatgatctttatcatttcgagggatgctccctgtgtaaccagtttgttgagagtgtttaacaggaaggaatgttgaattttatcaaattctgttccagtatatattgaaataatttttacatctatgtttattaacaataatggcctatagtttacttttttgtgtgtccttgtctggctttgttatcagagtaatgctggtatcatagaatgagtttggatacattcccttctcctcagttttttttgggaatagtttgaatggaattagtattagttcttcttgtcaatgtttggtagatttcagcagggaagccaataattccagggcttttccttaatggaagaccttttagctattgcttcaatcttattatttgttgttggtctcttgggcttttctatttctttattctggtaggttgtacgtattcaggaatttacccattatgttggcatatattttataatagtccctaatgatctttcgtatttaagcrgtatcagtggtaatgtctccttacttattgctaattttatttatgtggctcctctcttgttctttgtctagctaaagttttatcacttttggttatcttttcagagaacc

SEQ ID NO: 415459 - DNA, 597 bp, Homo sapiens
ttttgtgtttgatttgttcttgcttttttagttccttgagatgcatcattgggttgtttatttaaagactttttttatttttggtgtttccatttgttaatgtaaactttcttctttgtactgcttttgctatatcccatatgtattggtgggttatgtttcattttcatttgtttcactaatattttaaaaatttcttcttgatttcttcattgactcattggtcattaagaagaatgctatttaattttcatgtatttgtacagtttcaaaagatcctcttgttgttgattgctagttttatttcactttggtcagaaaagatatttgaaatgatttcaacattttttaatttgttgagatgtgttttatggactaatatatgatgtatcctgaagaatattccatgtgctgatgagaagaagatctattctgaaacagttgtatgraattttctaaaaatgtctgttacgtacatttggtctagggtgcggtttatctccaatgttacttggttgattttccagatgttctgggcgttccttaaagtggggtgttgaagttcactaccattattgtattgaagtctatttttcc

SEQ ID NO: 415460 - DNA, 425 bp, Homo sapiens
tatgtggcaaaagggagttttaatgagggattatataaagtatcatagttcatagtaatattaggtcaaagggcaaaataaaatattggcctaatttacttataaaaccatcatttgtattactatgctactttttaaaagatttattatagagctcattcttcctctaaatctctyaaagctattgttccataccaacagataaagttcaattttaagccattttggaggttagcttacctttttcatcttaaatgcagaaatccaatttagaacttaatccttccatatgataatagatgattccattttcatttagtttttaaaacaattatagcaggatttgaataaatcaaactcccttcattgcaatagcccagaactctgatcctttgtgaactctgcttattgccagatgccgattt

SEQ ID NO: 415461 - DNA, 528 bp, Homo sapiens
gaccatgggatgtgattttaaaagttattattattattaaaaataaaaataattgtatraaactatgctatatttaggcttgtgatatctaatcatttagaactgcttagtaataaaaaggaagagcaaaacaaatttcttcttggctttcagatgtgctaatgaagctgttaaccagttattgttagaatatactcagaatagaaaaaaacgattttcaagtttatgtctgcacaattataaatttattattagtgaatttttttgctcaacacaataatattatcatttgttttattatacaacattttaatctaggaaatcactaagaggtcatatgtacatacatattatgttttgtgtttctttaaaaatatttattcattgttttttgatcattgaatttaatagactatttcataacattttaaaaaagaaacttaaaaatttacttcttcaggtactcgccacatttccggtgtttttcatgaatcttttgttggttggggtctaattgctgccactgct

SEQ ID NO: 415462 - DNA, 609 bp, Homo sapiens
agtgccaaacatttaggataccagattagacaacttagattaaataaacaaattcctagaatgacataaattatcaaatatcgaccaagagggcaaagaaaatctgattataacgagtaaatatwataaataggaatattatttaaaatcttcccccatgctgataaaaaaagaagcccgacaactttgtttcttttatttatgaattgaatagtgaattatagcaaacatgtaaataataaataataataatccttcacaacctattttacaaaatagaagaaagaatacctctcctcattctataaaattagtattaccttaatattaaggctagacttagacactgcaagaaaaaagagagctgaaaaacactcatgaacatatatgcaaaaataattttatttaaattttgtttcaaagtgcattgttatatactgtagtcaccatattgtacaatatttatctcttgaacttatttctcctaactcatattttgtatcagttcttgaacatctcttcaactccttctgctcagcccctggtaaccatcattccttgtctacttctgagtttgacttttttgcattccacatataggtgagatta

SEQ ID NO: 415463 - DNA, 606 bp, Homo sapiens
ttgcatttctctgatgattagtgatattgagcatgtacttcctggccattgtatgtcttcttttgagaaatatttattcaggtcctttgtctatttttaatagggttatttgtttttctactattgagttgcttgatttccttagtattttggatattaaccctttgtcagatatataagttgcaaatattttcatgcagtctgtagaggtccctccactctgttaactttttttctctcttggctgagccaaagcttttcctttgrtataattctatttgtctggttttgctattgttgtctgtgttttggggtttatatccaaaaaaaaattattaaccaatgtcatggagcttttttcctaaattttcttctgacagttttagagtttcaggtcttatgtttaaatatttaaactacaagaataaatctcacttgatcaaggggcgtgaacctttttatttgccattgaatttggtttgctagtatttttttgaggatttttgtgtctatgttcatcaggaaaattacttgtaattttctcatcttatagtgtccttgtctgactttagtagcagtgtaataatgctgacctcataaaatgaa

SEQ ID NO: 415464 - DNA, 603 bp, Homo sapiens
ttttttcctaaattttcttctgacagttttagagtttcaggtcttatgtttaaatatttaaactacargaataaatctcacttgatcaaggggcgtgaacctttttatttgccattgaatttggtttgctagtatttttttgaggatttttgtgtctatgttcatcaggaaaattacttgtaattttctcatcttatagtgtccttgtctgactttagtagcagtgtaataatgctgacctcataaaatgaattggaaactattccttcctcttcaattgtttggaaaagttgaaaaggattggtgttaattcttcaggtgtttgatagaattcagcagtgaagccaattggtcctgagcatattgttgtgaggaagctattgtatactgatttgatctctttacacattttactctattggaaaaggaaacaaatatttattaaagagcagtaaattacttattaaaaatgagaacttgtcctattaatgcaccctattggcagtattggcataaatatctttgtacattaggttcatgtgagggtcatttatatcacttcatatttaattagagttttggcctaattatgccaatatatga

SEQ ID NO: 415465 - DNA, 603 bp, Homo sapiens
ttttttcctaaattttcttctgacagttttagagtttcaggtcttatgtttaaatatttaaactacaagaataaatctcacttgatcaaggggcgtgaacctttttatttgccattgaatttggtttgctagtatttttttgaggatttttgtgtctatgttcatcaggaaaattacttgtaattttctcatcttatagtgtccttgtctgactttagtagcagtgtaataatgctgacctcataaaatgaattggaaactattycttcctcttcaattgtttggaaaagttgaaaaggattggtgttaattcttcaggtgtttgatagaattcagcagtgaagccaattggtcctgagcatattgttgtgaggaagctattgtatactgatttgatctctttacacattttactctattggaaaaggaaacaaatatttattaaagagcagtaaattacttattaaaaatgagaacttgtcctattaatgcaccctattggcagtattggcataaatatctttgtacattaggttcatgtgagggtcatttatatcacttcatatttaattagagttttggcctaattatgccaatatatga

SEQ ID NO: 415466 - DNA, 603 bp, Homo sapiens
ttttttcctaaattttcttctgacagttttagagtttcaggtcttatgtttaaatatttaaactacaagaataaatctcacttgatcaaggggcgtgaacctttttatttgccattgaatttggtttgctagtatttttttgaggatttttgtgtctatgttcatcaggaaaattacttgtaattttctcatcttatagtgtccttgtctgactttagtagcagtgtaataatgctgacctcataaaatgaattggaaactattccttcctcttcaattgtttggaaaagttgaaaaggattggtgttaattcttcagrtgtttgatagaattcagcagtgaagccaattggtcctgagcatattgttgtgaggaagctattgtatactgatttgatctctttacacattttactctattggaaaaggaaacaaatatttattaaagagcagtaaattacttattaaaaatgagaacttgtcctattaatgcaccctattggcagtattggcataaatatctttgtacattaggttcatgtgagggtcatttatatcacttcatatttaattagagttttggcctaattatgccaatatatga

SEQ ID NO: 415467 - DNA, 570 bp, Homo sapiens
attaatgcaccctattggcagtattggcataaatatctttgtacattaggttcatgtgagggtcatttatatcacttcatatttaattagagttttggcctaattatgccaatatatgaagcttcacaattaggttttcaggaacgggattttttttttttttttggtgaaaacctttaagtaaaaaaaaaaaatctacaatataattataatgtaatccaaaagtaaatcagatttatgtcaaactattccaggaaacattttattaaatatttttattgtttttggaagtaatatgacagtttctaatactttcagatagcaataaaaaagcttttggtagttttctttagatatcagacagcacctttaataggaatgtgakctcaacaattttgactagttcagcttttgcaatgtatacaattatctaagtccctatttcagaggaaagtattttttaaattaaagataccatgccagccactgaagattgataaattatgccttcattatgaataagtctagaaatatccctttaaaatgatttctatttctcaaccctgacct

SEQ ID NO: 415468 - DNA, 599 bp, Homo sapiens
ggtgatggtacaagaatgtcaatgacgataccaaactcaaaaggcaccagtcatattagtgccatcactaatgacctcattcaaccttagtcatctctttaaagactgtatctccaattgcagyattattctgaggcactgggggtgagggcttcaatgcattcaatgtataaatttttagggcatacaattcagcccataacagcagagaataagtaacaagtacaggagattacgaactatgttcatttgcacaatataacacacaaagatgcaaacaaattgaacaaatttctacctacgccttgtgtgctctgtgatattaagtcaagccttttgggtatttgagtcattagttcattttaattactctgttctactttaattcctcttccagttcaaaagtgttctaaaatgcctgaatgattgccatatgtaagacagcctcttttagcctcgtttttctaataaatgaggcctacatgactagtgttttgtatatttacctaagaaaacaacaaaatttggtaatatgctttatagttccggtataaacagagatttttctacatggctgcttatcatgtagtattcaccat

SEQ ID NO: 415469 - DNA, 588 bp, Homo sapiens
agtgtaccatttttctataggctgcatgctaagaaagggtctaattggaaggtatttttgtgatcagaaaaagagaagttaattaggcagtatcaatggctcatggcaccaagaygattactgatgttttttttttctattcctaagttggatctgaaatggcctcactcaggggactctctgttctacatagtgtcagactgagctgtttttattcatttgttcatttttcaggatgagctatttacactgtggtccaaaacatcttcaatttttagtagcttaaagccacacaggtttatttctcacacataccacatgtccgtgttgagctagtacctgtgctggctcagggtttcagcctgatgagagccttcacatcaggaatctcaccagttattgctccagggaaaaggagggaaggcaaattgtgcactaactcttaactgcttggccttggaaatgaaagacaaagcttcctctcatattccattggctaaagaaagaaagatgatcatgcctgacttcagagcacaggacatttcaaacatatttcacacctttaaaaatgagaattagaatattaca

SEQ ID NO: 415470 - DNA, 562 bp, Homo sapiens
ggagttgtttatatccaagagttgagtggataggtcagtaagtcataaaattatgttctcctcccttcccatatttccttgtagtgttcatcagcttccactttatagatatgtgcagccactaaggctcatacctgaggggtaagatcaatgtagcacaaatttctatcaggacaaggaattgatgcaacaggtacttctcttaagcattcatttccacattgccttctcctgaaaattagagctcacagattaaaacttaaggggtttgtctactgtactggtgcttcttcctcatgctctaaagacagaacctattgttttaatccattcscacagccatgaaaaaaatctgtgactggataatttatattgaatagaaatttatttctcacagttcactcagctgggaagtccaagatcaaggcaccggcaggtccagttggctgatgaaggctgctctttgtttctaagatggtgtttttttgttgcattgtctgaataacacagggtcctcatgtggcagaagaacagaagagagtgaattaaacactgtgtattc

SEQ ID NO: 415471 - DNA, 586 bp, Homo sapiens
tgttgttgttttttacagtgacaacatcaaattgaagctatgatttcaagcaattgaaactcatacactgatggggtagcatgatatatttaaattattacaaccactttggaaaatgttttgacagtgttcactacaacmtaaacttatatttactctatgaactagtagttcaactccaatttatatagccaaagtatgtacatataaatattataaattatttataaagttgtttataacagcattattcaaaatcaacaaaactagaaacaacaataatgtatataaccagttgaatgaatatataaacatatgtatatcatataaaatatatggcaattaagcagaatgtactatatcacatgatataaatgtatgtcaaaagtaatgcaaattcaataaatcagactaaaaaggatttatactgtattattttatatttgagaagtaacaggaaaagtgaaactatcttccagaaattagtatagattttcccttcagggaggaagataaatatattaacaaagaggggacacaagagttctcctggcctgctgatgctttctgtcttaacttgaactgt

SEQ ID NO: 415472 - DNA, 522 bp, Homo sapiens
ttcaaaaaaacatgggaaaactttatttgatgtgttgttctaaatgagtgtgaacaagttcacaaaagccagtttagggagaccagttaaactcagagtcacttaaaaatcgcattttcatccaatcagtttcatctccaactgttcaaagcactgagggtgaatctcttaatagaagttaagattaaggtttccctgtggatatctggattcatcttctttaaagtaatgatattagggaagcggtgaatacaaatgaatatgtttaaaagaattccattctttggcatttagtgtgaagagagaaatatttgttatygctggaaatcatgactcaatccccttgattgtttaaaaaaatacaccaaagataaagtttgtaaatggccatatttatgattatgctactcaaatatagaagaactttctgaagagtgccagtataccttttaattcccttaataatgtcatgctgactttcagaagccttatgatgtgtgaaggatctctctagagttgaac

SEQ ID NO: 415473 - DNA, 522 bp, Homo sapiens
ttcaaaaaaacatgggaaaactttatttgatgtgttgttctaaatgagtgtgaacaagttcacaaaagccagtttagggagaccagttaaactcagagtcacttaaaaatcgcattttcatccaatcagtttcatctccaactgttcaaagcactgagggtgaatctcttaatagaagttaagattaaggtttccctgtggatatctggattcatcttctttaaagtaatgatattagggaagcggtgaatacaaatgaatatgtttaaaagaattccattctttggcatttagtgtgaagagagaaatatttgttattgctggaaatcatgactcaatccccttgatygtttaaaaaaatacaccaaagataaagtttgtaaatggccatatttatgattatgctactcaaatatagaagaactttctgaagagtgccagtataccttttaattcccttaataatgtcatgctgactttcagaagccttatgatgtgtgaaggatctctctagagttgaac

SEQ ID NO: 415474 - DNA, 612 bp, Homo sapiens
gttcagctagccagacagacaatcttatctattctctatgttgttgttccactctgggatgactgggttaaagaaaaatgtaccctgaaatgagtatttccaactctaaatatgcaacatgaaccttgaggccagacagggtttattttagtttctgctcacagtgctgtgtgtgctgcttcatgttgaaagatttctcattcagaaaatatttcaatctttcatggttttgcagtgactacataaaagaagactcaatgcacagagaaataatctcttagatagccaattgaaatgtatttattttcattttgtattgcctgaataatttatgtgttatgttttgctacttatagagatgaggaacttaaaaggcaagtttttagagctagggaagcttttgtttttcttccataaacmtcaaactagtacacagaatgtcctcattaagcaatataataaaataaaaggtgaatatttaatacataaggagaaatagaaaaattcacacttacattattgccatacacctcaatgcataaaagaactacaaagcgtgaaactgaaatgtcagaatgacaaaacctctaaaacggaaatatctccattggc

SEQ ID NO: 415475 - DNA, 615 bp, Homo sapiens
ataaaggtttataaattttactcatccccatgttctttactccccaaaatkcacacaccaaaaaaagtatatatgttgacaatttctcagttctgtgacagagaaaatgtcctctactgcctaacctgttgtttctaactgctgctattaccaattgtgaagatattacagttcgtgtcttttctccaatgtgatcttaaaatgtttgagatcagaaaccatatttttgtttccagcacaatgtttgttacattaataaattttcaggtttaccagtgttggcactttgaaatgcagagttagtgattcagttatgcagagtaacattggagaacttgcattagcataaccactagagagaaaagacgtttttcagtgcagaccctagattgagactttaaaaccctttattttcaaactaaaagaagaggtaaggagcactgaaagtccccatgtgcaaaaacaggactcagagatgatgaccgaggtgaaaattgaacaggtcatccttctaaaacagcccatgagggcatcttgagaacaaaggacaaagcaatcttcattgttataaactcttaattatccaagaggccagcaattgtgttttttttttaa

SEQ ID NO: 415476 - DNA, 630 bp, Homo sapiens
aaaatggcactattgatatctacttctggcagtagctttgaagataaaataaaatagcatatgcagagcacttagcactgtgcctggctggatagtcactgaatgtgaatctcagagtgtttgtcatctgcccttctctccttccattcattcatttgacatttgccaagtacttatccaagggtgcctggtacctagtgctgggcatacagaggaaacaagacagagcctctgcccccagcaaacttccagcccagtggagagtcgatggtaacaatcttccacatttgattcaaaatgctgaaacacagccaggctgtttgaaggaaattggttcccagaagaatggccttggctacaacagatggaaactggtagcgtgtcagttrgcagagtcctgtgtgacatcttttgataaattaatctcatgtgaaagaagtcacccacaaaattctttagccagttgtcttgcccatacctttggttctgagggagaccattatgtaatcacttgactaatcacctggtattgacagtgacacaacttgacgccacaatttctacaaggcttgtgattgagaaaacttcattctttgtcaattatcaacaaacttctcagacattatactc

SEQ ID NO: 415477 - DNA, 589 bp, Homo sapiens
aatttttaaaatcaacttttgaaaaaaacaactttattgaagcataatttacataccgtaaaattcactcattttgtgtataatccccagaattttgaagcttttaccaaattgtacagtcatcactgcaatgtagttttagaacacagatttccatcacctcaataagattccctgtgcccttttacagttaattcctgttcccagcccataaacttgggtacccatgaatctactttctgtctctattgatttccctttttttgtcacatttctctctctgaatacagttttagaaagaaagaaggaaagaaggaaaaagaaagaaagaaagaaagaaagaaagaaagaaagaaagaaagaaagaraaagaaagaaagaaagaaatccaagagtatttcctaccaataggagaatacaatttactgaggaagaacccacctggataaaatagaattcttaaggaagtccaacgatcctggacaccacacacgttggttgaattagagtcagagtggtctttaagatttaattatctctccaattagagataacagacttagagttacaagggaccttgataattaaa

SEQ ID NO: 415478 - DNA, 542 bp, Homo sapiens
gatgtaggttcaaacaaatacacacccacatccatctaccacaagaatagaagtttgcatgaaggtataattactgattagagctttttcccaaatccccagcgaaaagtattatcatcccctgaacctccatagcactactttcagtatttctgttgaaatctttaatactgtgttttgcagatgataaatatgtataagactttctcatctccctgaccccctaagtactctttgaaggctgggctaatgttcatttcatatctgcacccctataataccttgaacaaagtaagtccttataaaattttctggaataaatgacttctctttgagaaacttttcccaacttgctatttaaagagttctaaataacagataaggtttgaatcagacatctaatttgtcttaagctaaaatattgccacaaagatcttggaagtctgatratcacagtaacattttaaatgcaaaatatctaataaaccagcaagtttctgggaaagctttggtcaaaatggttaccacttttcatgagagac

SEQ ID NO: 415479 - DNA, 513 bp, Homo sapiens
ctgggtgctacagcccaatctgtggtcagcttgctttctatgcctctttctatttattacgtctgctagttttcaaatggagtgacctgctgttcaagtcccaaggctgatgaaatgagaaacagtatagtctctgtgtctggctgcctatggtttcctttttctagttgaaatatgcttgacttttttttttttttttttttttttagcggagccaaggaacaatgagcaggaaagcaatttgtttgttctagaaccacagaagaatatttatcaaggtttaatagggtataacatgggggtcctaaagaatatgtaataaatactattgtttataccctcagggcagactgcctgaaagaaaraataggctttgtagtttttgtaatgataacgtctgaatgattaccaaattagtgctaagttaggagacaaggggtttgaagatatcttgtgaagcaatgtcatgtatcctgggtgacagagcaagatgtcatctcaaaaaaaaaaaaa

SEQ ID NO: 415480 - DNA, 575 bp, Homo sapiens
gtcctcacatggttaagagagaaggagcaagctctcttaagattcttatgagggcattaatcctattcataagagctccctcattacatcatctaaaattctaattacctccccaaaactttacttcctaataccattccattagggagtagggttttaacatattaatttggtggaaggaaatgaggggttggggttggggaataggcattcaggtcataggaagtattaatgaaaatatctaacagcaattgagtgtttattatatgtcattcactacgataaatgcattacaagatgcattatctcctttcatctttacaaaatcctaaggggtagttaccattttatagtaaaagaaaaaaaggcttagagagactacatccctgtgccaagttcactcagccagaaaytggtggagcgagtacatgaatcctggtctctttgacttcaaagctcacattcttaaccacacagtaaacatagtgatatattccctcaagaaccttattatctaattggctgatgagtggcggtagaatttctaagtatcttcattaaataaaatgtagaaa

SEQ ID NO: 415481 - DNA, 552 bp, Homo sapiens
tgaggcctctctttccggcttacagatggctgccttctagctatgtccccctcatgacagagagttagatagagaaatcaagctctctggtgtctcttctatatggacactaatcctctcatgagggccccatttttaggagcttatctaaacctaattaactcccaaaggccccatctccaaatacaatgacttcaacatatgaatgttgggggaacacaattcagttcattgcactgtgtataaaaatatttgaatatttaatcatagactcagcatactatagattttaaagagacttagttacacttagccaaattcccccattttttacaatggagaaaacagaaracaggagtggttagatggcctgcccaaggttattacaccaattaacaaataaaatgaaagtagaattagattctctgattttttaactagtattttcagcaaataaatggcaaataaagtgacacatgggcacaaaccacgaaaaatgctcatgcagaatgagagtaaaggaaatagaacagaaagttttagaaaagagta

SEQ ID NO: 415482 - DNA, 504 bp, Homo sapiens
agaatggataaaagacataagacattctactgatggctataagcacatggaaagatgttcaacatgattaccaatcagggaattacggattaaagcacaatgagatatcactacatacctatcagaatggctacaatgaaaaatggtgacactaaatgccagcaagaatatggagaaactgtatcactcacagaaggctattgagaatgttaaatggtagtctctgcagaagcagtttgacagtttcttaaaaagctaaacatgcaactactgtacaacccagcaactgtatccctaggcacttatcccaaagacataaagaccaatgttcatgcaaaaacctgtacatgaatgcttatagcagctttaattcattatagctaaaatctggaaacaatccagctacctttcactgggtgaatggattaaacaaattttggtaagttcatgycatggaatactactctgaaataaaaaaaagactggacattcatacatgccaca

SEQ ID NO: 415483 - DNA, 567 bp, Homo sapiens
ttctgcttgatctagtctattgttgaagctctcccttgtatttttttttcctttcattgaattcttcatttccaggatttctgtttggcttttttttttaatgatatctatctctttgttgaatttctcattcatatcatgaattgtttttctgatttccttgtatggtttatcttttatatctcactgagtttccttaagatcattattttgaatttcttargcatttcatagttttcctttacttaggatctattattacaggactattattttcctttagaaagtcatattcccttgctttttatggtttgtgtgtgtgtgtgtgtgtgtgtgtgtgtctttacattgttatctgcacacctgatataacagtcacttattccaaatttatggattggtttttatagcgaaagacttttttcctgtaaaagtatctatagcgttggttgtgtagtgtgctttggttttgattatgagtggatgcagtagtgtagtctccatatgatttcttcaactgtagtcaacatcagcagtgtctctgagttcctcagtggcttaggctac

SEQ ID NO: 415484 - DNA, 567 bp, Homo sapiens
ttctgcttgatctagtctattgttgaagctctcccttgtatttttttttcctttcattgaattcttcatttccaggatttctgtttggcttttttttttaatgatatctatctctttgttgaatttctcattcatatcatgaattgtttttctgatttccttgtatggtttatcttttatatctcactgagtttccttaagatcattattttgaatttcttaggcatttcatagttttcctttacttaggatctattattacaggactattattttcctttagaaagtcatattcccttgctttttatggtttgtgtgtgtgtgtgtgtgtgtgtgtgtgtctttacattgttatctgcacacctgatataacagtcacttattccaaatttatggattggtttttatagygaaagacttttttcctgtaaaagtatctatagcgttggttgtgtagtgtgctttggttttgattatgagtggatgcagtagtgtagtctccatatgatttcttcaactgtagtcaacatcagcagtgtctctgagttcctcagtggcttaggctac

SEQ ID NO: 415485 - DNA, 570 bp, Homo sapiens
caatgacatcttagaattgctgctggtcagatggcaaaggtgctgtagtggcrttacccttctttttggaacctagaagcactgtcaacaaaatttgcagaaggagtatcaactatttcaaagaaaatgtcagaaaaatatcatggcgctctattgaaaccattttgttttgaaataattgcctactttcagaaaaaaatgatgcaaataatttgcatcaaagataacattttgccacattttgttttaccattctatctgtatctaagtaatatatattggtgtttttttttctgaataatttgagagtaagtttcgggcatgcagacacaatgccctttacacctaaataatactatacttcaatgtgtatattctaaaaataaggtcattttctaacataaccatagtacagacatcaaaattagtccattagcattgatgaaatattcttatctagacattccaattttgtcaattgtcccatggatgccactcccccgccaccccaccctggccttttttgagacagagtctcgctctgtctgttacccaggctggagtgcagtg

SEQ ID NO: 415486 - DNA, 645 bp, Homo sapiens
tagaatgatgccattaaaagaaggaaacaaggacaacaccagctaccaattttttaaaattaatggtgttataaaaatgtcttctgtgaatagacagtagagactcaaaagggtggagtgggatgagtgatgagaaattacttaacaggtacaatgtatactattccggtgatggctacactaaaagccaagacttcaccactatgcactatattcatgtaacaaaactgcacctggactccataaatcttacaaataaaaagaaatgtattctgtggcactctccttctaaaaatagcttgggctgttttggaataatttttaacttattatatgtgattgcaagctccttatgtgccttggaattyagaatttcatgcttccactttcacaactgacttcatttaactttatgaagcttgtgctaaatatataaatgcttaaggatatgtgaaaatcattgaaaatgctaaattaaaatgattttaaactagttttaaattgtatcaactttacaaaataatttttttcagggagttacgctgttttctactcattgcttacttaggtttatcgaaggggcagatgagaggagaaattccctttctgaaacaaatgaaaaggacacacaaaaatattcttcag

SEQ ID NO: 415487 - DNA, 586 bp, Homo sapiens
gctggagctggtgggcatgatagtgctgctctcatttacagaaggggcccctgctgtggaggtttgtctcaaggctgggcctaagcaggcctgcagcagaggcaggcccagggccaggagcagccctaggccagggtttgccatgggctgggtgtctggttggcagcactgaggaaggggcttctagcactgcgcccctcctacttcatatcagtacatgagtacctgagaggcacctggcctgggcgtctttgacctstctcagatttctggtccatgcccctcctcttttataatcttatgggaccactgttttatatgtggtccattgttgaccagaatgtttttatacagtacatgactataattacttggaattttggggtggaggatgaaaccagtgttgttgttttgtaatttttaaaaataaactttcatatcattgattccttaaaagaagacttatactggagaggagaccaagtcgctctgtgcgtcaacccatgctcattgtccttccatgtccaaagacctcttctatgaaagacagctgagtgtttctctgctcctagggcccttatgcttt

SEQ ID NO: 415488 - DNA, 576 bp, Homo sapiens
ttaaggtaatgatactgtgttttggggcatttcatatgaagagtccatcaaactggcatcattgttctccaatcatccaaaaaataaatattatgtacaataaaacataaatttcggccgggcgtggtggcttacgcctgtaatcccagtactttgggagactgaagcgggtggatcacctsaggtcaggagtttgagaccagcctggacaacatggtgaaaccctgtctctgctaaaaatacaaaaattagctgggcatggtggtgggcgcctgtaatcccagctactcgggaggctgatgcaggagaatcacttgaacccaggaggtggaggttgcagcgagctgaaatggcaccattgcactccagcctggatgacaagagcaagactctgtgtttaaaaaaaacattaattcaacattaataaatatttgataagcccattattataatataattggacttttataccaacctgtcataagctaattcaataaatttttctatacctatgtccttcttatgcacagggataaactcagagttctccaattattaagacttagttacaaagct

SEQ ID NO: 415489 - DNA, 576 bp, Homo sapiens
ttaaggtaatgatactgtgttttggggcatttcatatgaagagtccatcaaactggcatcattgttctccaatcatccaaaaaataaatattatgtacaataaaacataaatttcggccgggcgtggtggcttacgcctgtaatcccagtactttgggagactgaagcgggtggatcacctgaggtcaggagtttgagaccagcctggacaacatggtgaaaccctgtctctgctaaaaatacaaaaattagctgggcatggtggtgggcgcctgtaatcccagctactcgggaggctgatgcaggagaatcacttgaacccaggaggtggaggttgcagcgagctgaaatggcaccattgcactccagcctggatgacaagagcaagactctgtgtttaaaaaaaacattaattcaacattaataaatatttgataagcccattattataatataattkgacttttataccaacctgtcataagctaattcaataaatttttctatacctatgtccttcttatgcacagggataaactcagagttctccaattattaagacttagttacaaagct

SEQ ID NO: 415490 - DNA, 579 bp, Homo sapiens
aagaatgaacacatagaaacacaagaagatacaaaatgaatcaggctcaatatcctttcctctctatctgaaaatgtaaggtaagcttcttttctattgttagtaagaaaatatgagagtagaaaataggtttcacattttttgatttgttcttatattaatagatctattatttatcatagctttttcactttctgtgtgactctgagcaatttacttactctttctgtgattcagtttcctcctttccaaagtggagacaataatgttcagtttacttacaygtaggggtggcataaggattaaatgaatgaatacttataagggttagctcttttcgtctttttccttccccttttgtcttcctcatcctatttgtatttcatccttgtagactaggagttactactttctgtgcattctgcttaaatatatgcatcctaagatgatttttgagtgactgtacatggtttgtgccaaggataagaatgtcttctattctgctttcaactcactgcctgcttatcaatactctgatggcctttttgtctattagaaccacattagactgacaacaag

SEQ ID NO: 415491 - DNA, 579 bp, Homo sapiens
aagaatgaacacatagaaacacaagaagatacaaaatgaatcaggctcaatatcctttcctctctatctgaaaatgtaaggtaagcttcttttctattgttagtaagaaaatatgagagtagaaaataggtttcacattttttgatttgttcttatattaatagatctattatttatcatagctttttcactttctgtgtgactctgagcaatttacttactctttctgtgattcagtttcctcctttccaaagtggagacaataatgttcagtttacttacatgtaggggtggcataaggattaaatgaatgaatacttataagggttagctcttttcgtctttttccttccccttttgtcttcctcatcctatttgtatttcatccttgtagactaggagttactactttctgtgcattctgcttaaatatatgcatcctaagatgatttttgagtgactgtacatggtttgtgccaagkataagaatgtcttctattctgctttcaactcactgcctgcttatcaatactctgatggcctttttgtctattagaaccacattagactgacaacaag

SEQ ID NO: 415492 - DNA, 495 bp, Homo sapiens
cttcccccgaaactattttttggtgtcactgatttttcccactgttttctgttttctacttaatttatgttttgatctttattttctttttctgcttgcattggatttcatttgatcttttatttctcaaggtccaagctaaagacattgttttgagtcctttattttttctaaatttaggcatttaatactacaaatttccccctaaattctgtttttatgtcatcccacagatttagatgtgkagtgtgtatcttgacctttcctcctcaaaagtagtctgcaccacaaaccttacttagtattacatcctcctgaccttagcccaaccctcccaagtacttcatggctgccagcccataaatgcaaacttttacttaaaataataacctaggatcatttttcaaagaattcctagactttaacatccatatttattacctatattagattagttctccagagaggcagaaccaatggaatgttgttctctct

SEQ ID NO: 415493 - DNA, 495 bp, Homo sapiens
cttcccccgaaactattttttggtgtcactgatttttcccactgttttctgttttctacttaatttatgttttgatctttattttctttttctgcttgcattggatttcatttgatcttttatttctcaaggtccaagctaaagacattgttttgagtcctttattttttctaaatttaggcatttaatactacaaatttccccctaaattctgtttttatgtcatcccacagatttagatgtgtagtgtgtatcttgacctttcctcctcaaaagtagtctgcaccacaaaccttacttagtattacatcctcctgaccttagcccaaccctcccaagtacttcatggctgccagcccataaatgcaaacttttacttaaaataataacctaggatcatttttcaaagaattcctagactttaacatccatatttatyacctatattagattagttctccagagaggcagaaccaatggaatgttgttctctct

SEQ ID NO: 415494 - DNA, 600 bp, Homo sapiens
tgttttatgtatattttggtagatctgccatactcaacatggaaaccgttctcagatggattctctgtacaggtgtaagatggctaaagcaattcccatcttcataatcagatatcaaaatgtccagtaacagaaagggtgcttccttccttgtgtcattattttaaaattcatttacatgtcatttttaaatgactatattagatttctagggctgccataaccaaataccacaggctgagcttcctaaagaacagaaatttattttctcatagtctgcaggctcgaagttcaacaccaagattcacaggtttgttttttctgaggtcatcctccttggcttrcagctggccacattctctgtgtccccacatagtctttcctctgtttgcttatccctggtgtcttttcaagtgtccatagttcctctcaaaatgacatcagtcagattggattagggacttcccataaaacctcatttaattttagtaacctctttatagacattatctcagctgggttcagtggctcatgcctgtaatcccagcactttgggaggctgaggcgggatcacctgaggtcaggagtttgagaccagct

SEQ ID NO: 415495 - DNA, 516 bp, Homo sapiens
aacatagcacagaaaatacctaaaattcagctatcattatcagttctatatagaggtaattattttaaaaaactattttctcaaaaaattttaaaatatattaaaattgcttttcagtgtaaaacaataatcttaagtacatttgtagcatctcgttttgacttttcttactaagaatatacaggggggctgggcgcagtggctcacacctgtaatcccagcactttgggaggccaaggctggtggatcacaaggtcaaaagttcgagcctggccagcatggagaaaccccatctctactaagaatacaaaatttagccaggcatggtggcacgtgcctgtaatgctagctactcggaaggctaaggcagaagaattgcttgaacctgtgaggtggaggtttcagtgagctgagactgcgccactgcactccagcctgggcgacagagcmatatacaaaagtatcttttcataatggactatcatttagataacaattttaccatctgaagttgtt

SEQ ID NO: 415496 - DNA, 589 bp, Homo sapiens
gacgttctcctggaaaaaaaaaaatgggaagaactattatcttggcaacagctctatgatattgccgagctatgatttgcaaaccataaattgagagatgctgaattagtagtgctagactctacgtagctcaaagtgcttcacttattcttatgagatacatacaagaaatcccctttttttaacaaaagggaagttgagacagagtttaggtcgcctgctaaaccacattgctcatcggtgatagaacagacattgaaaccaaatggacttgacccacatccacggagttccattcgttttctcagtcttcttgtgcacattcaaataagctataaggactgcttcaaattattcaaaaagagcaaatattaaaactcacaggttgggtacatttatcacaacccacartaatacttatccttactatgagcaatgctctctgatcattcaattttattctgtttctttgtatttaagtccactactaatgcattgtaatctgcagtttaagaaacaatgaattaaataacaataatcaatgttaacatttatatagtgtttactattgctaggttctgttctaagc

SEQ ID NO: 415497 - DNA, 557 bp, Homo sapiens
agaaatcaaattccaaaaggaattggtatgggagtgggtttacatgctacatttaaagtttgtttatttggaagatttatatgttaaacttttgaagaaaaaaagtattggggtggagaagagtaacactttaaaaccaaacataaaaaattcttgaaaattacagtagctgaaacagataccaacactgtagatagacaaataggtaaatgaaagaatccaaaatcttatctattgtattgctgaatataacatatgatgatttatgwcttgaaaagaaaaagatggactatttaataaaggtgttggggaaaatatctatacatatggggaaaaaaagctttctggaaattttctcaaatcgtaccccaaatgaattgctagatggattcaaagacataacaatattcagcttggcaacatagtgagatcttgtctctatgcaaaaatttgataaataaaaaagttagatagttgtggtggtacccatctctagttatatctactcagatgtcaggcaggaagattgcctaattccagatgctggtggttagagt

SEQ ID NO: 415498 - DNA, 602 bp, Homo sapiens
caaacttctaacacgtcctgtatagttgagttggcaccttactttgggatgaggggatgttttcacctatcttactattcttggccttggagttatctgcctaaattctcagacaataaaagaatgacagctaacatctgacaccctaatagatattagtrcttatcacatgacaagaacttttctgaacattttgttagctcttttaattttcaaccttactaaaggccgtataatcaccctatttaaatataaccaaactgagatagagacattaagtaatgtatttaagttaattgcagtattgaattaaaacatttccctatgctaaatctaatgataaggaagccaccatataataataaaaaggaaaaagaaaaatggccaactgtatggctcacgattgtaatcccaacactttgagagtccaaaatgggaggatcatttcaggccaggagttcaataccagcctgggctacatatatatatcagccaagagtgatggtgcatgcttgtggccctagctactctgacagctcagtggagaggatcatttgagcccaggaagtcaaggctacagtgaggtataactgtgccactgc

SEQ ID NO: 415499 - DNA, 453 bp, Homo sapiens
atataacaagaaaatagtatcaatactaaacaaattatttcaggaaataaaggaggaaacttgtcccaacttctcttataaagccagaatacctsaggtaccaaagtctagtaaaaaaacatttccactctgggataccagaataggccaccccaaaataagcctctttggcataagtattgttttaagctaaaggcaattaaaaagacacagatgcaggaacgttttctgccctccctttattggcctacaagtaggacatacgtttagaaagacaaaagatatcccttccttcttctctatcagggaggacaaaacttaaccactgaacacaactttagatccttattggtctaaagagacggcaccagaaaaatacacatttaatgagctttatcaactagtttttatctaccatgtatttgccttgccacaatttgctgcccttagaaa

SEQ ID NO: 415500 - DNA, 638 bp, Homo sapiens
atgaacctactatttaaccacaaaaattaaaaattaaaaaagtcatagacaaaatttacaagttcttaagatttattgtggaagaatctttaatttagcatattatttgtgtaactaataatgaatctatggatattggaatagaaatttccatcatataattctgatttttaaattttttttggctagaaaagcaatstttaaaattttaactaacttacaagaatattttgtgctacactcttgggggaagttttatataaacttcatatttaaaaagttattaattgatgaacctgatatgaaaaatataatgccactggcttgtactgtttttatatttgaattttatcataattcatgcaatacaatttatgttactattaatgtaaataatcaaatctattttattagaacagggctaacgtaaggtcatgaccaggctattagtaaatttatttcttaaataaaattactttaaaagagataatcactattgacagaagatgaatgctttttaaaaacctgctttctatgggaaaaatgtggtgtgtgcaattcaaatatttggaaaatacaagcataatttctcttaatagtagaaagacttccatttaatccaacagtctttattgtta

SEQ ID NO: 415501 - DNA, 631 bp, Homo sapiens
agtttcaaagaacttcttgatttctgctgtaatttcattatttatccaaaagtcgttcaggagcagcttattcaatttccatgtaattgtattttctattccttttccttgttccatttttatcactacttggcatattaaatgctttacttatttatctgccttttcccactaaaatgttawtttatgagggcaagaatttttgtcttttcatttcttttttaaaaattttttgtcttatttttctgtctcttgtatctattttaaaatctattatttaaaaatctctattgattggaaatatatgtagtcaatgagtgtatgctaataaatgaaattgtgaggaagggttatgcatgtatgtattgtgagtggggattaatgagaaggtaacttacttagtttgatgctcattttttactaggcacttcgtgtttgcagtcttgttaaattttcacaacgatccactgagatttatatggtctttggcatttgttagatatttatcaaggagatgttccagagttctcatatctagtagagaagttgaactgttaaatcttttttatattacaggactgatttgttgcaagtgaaagcttacttagaacactatgagaaatgttttggt

SEQ ID NO: 415502 - DNA, 631 bp, Homo sapiens
agtttcaaagaacttcttgatttctgctgtaatttcattatttatccaaaagtcgttcaggagcagcttattcaatttccatgtaattgtattttctattccttttccttgttccatttttatcactacttggcatattaaatgctttacttatttatctgccttttcccactaaaatgttaatttatgagggcaagaatttttgtcttttcatttcttttttaaaaattttttgtcttatttttctgtctcttgtatctattttaaaatctattatttaaaaatctctattgattggaaatatatgtagtcaatgagtgtatgctaataaatgaaattgtgaggaagggttatgcatgtatgtattgtgagtggggattaatgagaaggtaacttacttagtttgatgctcattttttactaggcacttcgtgkttgcagtcttgttaaattttcacaacgatccactgagatttatatggtctttggcatttgttagatatttatcaaggagatgttccagagttctcatatctagtagagaagttgaactgttaaatcttttttatattacaggactgatttgttgcaagtgaaagcttacttagaacactatgagaaatgttttggt

SEQ ID NO: 415503 - DNA, 631 bp, Homo sapiens
agtttcaaagaacttcttgatttctgctgtaatttcattatttatccaaaagtcgttcaggagcagcttattcaatttccatgtaattgtattttctattccttttccttgttccatttttatcactacttggcatattaaatgctttacttatttatctgccttttcccactaaaatgttaatttatgagggcaagaatttttgtcttttcatttcttttttaaaaattttttgtcttatttttctgtctcttgtatctattttaaaatctattatttaaaaatctctattgattggaaatatatgtagtcaatgagtgtatgctaataaatgaaattgtgaggaagggttatgcatgtatgtattgtgagtggggattaatgagaaggtaacttacttagtttgatgctcattttttactaggcacttcgtgtttgcagtcttgttaaattttcacaacgatccactgagatttatatggtctttggcatttgttagatatttatcaaggagatgttccagagttctcatatctagtagagaagttgaactgttaaatcttttttatattacaggactgattygttgcaagtgaaagcttacttagaacactatgagaaatgttttggt

SEQ ID NO: 415504 - DNA, 570 bp, Homo sapiens
ctgtggcaaaaaattcagcacagatgtttagatagatggcgacctcatgatatctacagaatgccacctcctctgctttgactcctaatgaaagcttgggcagtttaattcacagaggctgaaaacaagtacaggcagtggcctcaagagatgtcaggaacaataaatgctaaagatctggaaatgtagtatttgttgatggtctgagatagtgtttcagcacagtgagtcccagaaactgacagccagatatcagagtgaaaaagataacttctagatttttatgtaactgaggaataaacagcctttcmacaggaagtacagatgtatacaagcagaacatttcttttttgagaaagtcattttcaaaggctacagagggttatggattttgtgctattaatacacttttataatagattttatatgccagaaaagatgaccctagctgactgttactctgagatcaagagtttataaattttttaagagtctcagtttaacctcattggattatctcatttttctcacaaataaatctctttttttaatgctttcttttaagagcct

SEQ ID NO: 415505 - DNA, 570 bp, Homo sapiens
ctgtggcaaaaaattcagcacagatgtttagatagatggcgacctcatgatatctacagaatgccacctcctctgctttgactcctaatgaaagcttgggcagtttaattcacagaggctgaaaacaagtacaggcagtggcctcaagagatgtcaggaacaataaatgctaaagatctggaaatgtagtatttgttgatggtctgagatagtgtttcagcacagtgagtcccagaaactgacagccagatatcagagtgaaaaagataacttctagatttttatgtaactgaggaataaacagcctttcaacaggaagtacagatgtatayaagcagaacatttcttttttgagaaagtcattttcaaaggctacagagggttatggattttgtgctattaatacacttttataatagattttatatgccagaaaagatgaccctagctgactgttactctgagatcaagagtttataaattttttaagagtctcagtttaacctcattggattatctcatttttctcacaaataaatctctttttttaatgctttcttttaagagcct

SEQ ID NO: 415506 - DNA, 443 bp, Homo sapiens
tttcatttttaataatttattcttatttttataatttattctaagaagtgggttttgggtttttatccctattccattatgtgtgttaaaatatattcaggtatctaaatagttttctctctgtgaaaatagtcacaaggagatggggccagaatgcaagcccagggataaataaaagtgtagaacataattatgagattgggagtaagactatattgaaaattaaaatatatcattttactaaagactttaggcagaaataaagtttgtctctggtgggcagtcctaaagagatatctggcttaatttatgcktgtttcctttggcatttatatatatatatatatatatatatatatatatatatatatatatatatatatatgaagagtggagagagcgagaaagtattaatgggaatttagtatgaggaagacgacggc

SEQ ID NO: 415507 - DNA, 670 bp, Homo sapiens
attttaaccataaagcaatgctggattttgtcaaatgctttctctgcatctattgagaagatcatatggtttttgtttttaattctgtttatttgatgtatcacattcatttacttgtgtttgtttaaccatctctgtttgtagcttacctgatgctttgcctcacagctcttaagattctttccttcatcttgactttagatattttgatgactgatgaatgtctcaggtgttctttgagcttcttgcattgagatgtttagatctctagcaagaacarggaagtttcccttgattattccctgaaatatgttttccaaacttagatgtctcttcttcctctggaacagcaattattcttaggtttggccatttaacataatcccaaatttctctgaggctttatttgttttgattacttttcttttttctttttctgattgggtttattaaaaagctttgtcttcgagctctgcagtcctttcttctacttgttctagtctattgttgaaagtttccagtgcattttgtatttctccaagtgtgtctttcctttccagaatttgtgattgtgttttctttatgatatttatttctctggagcattttataatctatatcctggtttttttttaaatttattttcattgcttttcacctttctctggta

SEQ ID NO: 415508 - DNA, 443 bp, Homo sapiens
ctgtgaaaaaaggaccatgagatccgcagaaagaaaaaaarggagagctttatcttcttaaaaaaaaaaggaagaaaataaaacaactgcagattggggagatgcaacctgtgatgtaaaagaaaagcagacaggtggtggggtgttttgagagttagtgattatagaggcaataataacaggggatgggagtcagggaagtgagaaacagaaacagaatcttgattgaatgactgtgtagccccaaatcacctgtcactcttaactggttggttccaagtggttgatgagttggcaccaggtagtctgttggtagtcagtgggggaatgtccagctgcagtctatttcagtgctgacaagaggagctggtttggcttgatggtaggaaaaaaaaagttctgtgacacttttacaataactttctgagaacacagagaatgct

SEQ ID NO: 415509 - DNA, 443 bp, Homo sapiens
ctgtgaaaaaaggaccatgagatccgcagaaagaaaaaaagggagagctttatcttcttaaaaaaaaaaggaagaaaataaaacaactgcagattggggagatgcaacctgtgatgtaaaagaaragcagacaggtggtggggtgttttgagagttagtgattatagaggcaataataacaggggatgggagtcagggaagtgagaaacagaaacagaatcttgattgaatgactgtgtagccccaaatcacctgtcactcttaactggttggttccaagtggttgatgagttggcaccaggtagtctgttggtagtcagtgggggaatgtccagctgcagtctatttcagtgctgacaagaggagctggtttggcttgatggtaggaaaaaaaaagttctgtgacacttttacaataactttctgagaacacagagaatgct

SEQ ID NO: 415510 - DNA, 668 bp, Homo sapiens
tgtgacttccccaattgctcctatagataacatcactattacaaaacctgagattggtcttttttgagatgtttttcagactcaccaatccagaattgtaactcataactcaattggttctatgggctgcagmggcagacccagtgcaagaggactattttccacacctctaaattttatccgctaccaatcaggagtacccattccttagcaccctgtccaccaaattatttataaaatccctaacctctgagccttcagagagactgatttgaatgataagttcagtaatccaaaatgagccagcctcacattgatttgactctttctctgctgcaatgctgccatctcagtggactaattttgtctgtgcagaaggcaggaagaacctatcaagtgatgatagcccctataacaaaagacggattaacaagagaaaagtatacacatatatttaatataagttttacatgaaaggagagccttcataaagaaatgaagacacccaaagaaacagttaaacccgagtatttttcatatatctcacagtcatgagatatatgataggacaaaaggccttatgtcataaaaggacagatatatcttttcctcccatctcaggttcatggctatggtccctacaacaaaagacaaattaacaagagaaa

SEQ ID NO: 415511 - DNA, 600 bp, Homo sapiens
gaaaagtagtcataatctttccttatgaagataaaattggaatgatttatttctgcttctttttgtggttgtgttaatgctacatrtgaagaatgaaatctctgtaaatgtattacactttaacttacattttcaatttttttccagaatttatatgtgtagaattgaaggtttactgcattaaaacacagtggtgactggtattggatctctgtatgaaataacagttgaaaggaaaggagaaagagatgagaagaatgaggaagaaggagtgatgccagggaaaataaaatgctcattttactcaagggcatgtgaaagggaaaggggtggataaaggatgaaaatatttgatagtatgatgcaacctgaaggaaactgaatgatacaggaaacgtgactttcttctgtttctgttcatcttcattggttatttcccctgtggtttaccttgtcctgtgtttgtaaagagagatcgagccttatcactcagattcattctctcctgtgtcattagaactttgaaaggcaagatttgttgtccttgacagatatactattatctttcttatcagatccttttggtagctttttctaaag

SEQ ID NO: 415512 - DNA, 575 bp, Homo sapiens
ttgtttaatggtaacagaaatggattatcttcttggcagctaatttgcaggaaactccctttggggagggttaataacagctatgttttggggagtttatactttagcagataagggaagttycaataagatttctgctgcatcttctctagttcaaatattttcaatttaaaataaatgttatgccaaatttgggagtcaaagaggatccccacaaatggtagagctagaaaattctaccttaaaaatcttcatgttgttacattttaagtttgtttatgaaatgtctgtactattatcaagctttttaaagaaattgcctctgttgcatggttcttgtttttaaattcaataggttaaggcaatcaaacagtatttagtgagacatggatcataaagcaaagtgtaatttgcttatatttattttaattttaaacatatcaatgcatatatacttagtttcaaatttatactgaaaatagtttagacttttaaactaaaggaaataagttaagaattgggaaatgtttttgagatttctataaaaattagttaagaaatcatcatctgctatg

SEQ ID NO: 415513 - DNA, 575 bp, Homo sapiens
ttgtttaatggtaacagaaatggattatcttcttggcagctaatttgcaggaaactccctttggggagggttaataacagctatgttttggggagtttatactttagcagataagggaagtttcaataagatttctgctgcatcttctctagttcaaatattttcaatttaaaataaatgttatgccaaatttgggagtcaaagaggatccccacaaatggtagagctagaaaattctaccttaaaaatcttcatgttgttacattttaagtttgtttatgaaatgtctgtactattatcaagctttttaaagaaattgcctctgttgcatggttcttgtttttaaattcaataggttaaggcaatcaaacagtatttagtgagacatggatcataaagcaaagtgtaatttgcttatatttattttaattttaaacayatcaatgcatatatacttagtttcaaatttatactgaaaatagtttagacttttaaactaaaggaaataagttaagaattgggaaatgtttttgagatttctataaaaattagttaagaaatcatcatctgctatg

SEQ ID NO: 415514 - DNA, 548 bp, Homo sapiens
ttattatgttaagccactgatattttaatgtgctttgtcactataacataacatatcttacatcaactgctaaaataaccttcttacctagtacctatcatctgcctttgagaaacaattgcactatttgctttcaaagatgtcacaatccctcccagtaccttggccttctttcctgctgaggtcagatggccactagtcttttttgaccacacaatctgtaatctctcaaaagaaaatgtcatggtgttttacagctggacgttatcataggaattayacagttgcagtccatcatttagataagtcacgtaaaatagtatagcctaaataggtctgatagtcactccttatgtgaagtcagaaaagtacttaatctttctcaatttaattttcttaactttcaaaatgtagataatcacaccttcttgtcaggtttctttaaaggactaagttaatttaagtgagctcatcagcacattgtggtcataggacatctacatatccctttgttccttactggttacatcaggttacacaggtaaaga

SEQ ID NO: 415515 - DNA, 559 bp, Homo sapiens
gatgactcagaatagaggttgtacatagcagaaagaccaacaatatgattagaggtttaggagctttgaactaygtgataatagcataacctctgggtagaggagaggggctgaagactgagttcaatctcatagcaaatgattgaatcaatcatgtctacctaacaaaaccccagtaaaaactgtgggcacaaatctcagatgagcttccctgattggcaataatctacatatggtcacatgtagatatgacagaagggtgattcctcctgactccatggggaaaaggcaaaagatccctcttatttaagatccttccataccttgccctacgaatctcttcttttgactggttctgatttgtatctttttgctataataatgctctaatcataagaatagcactttcctttgttctgtgaattattgaacctgaggagtagtagaagccttaaattagtagccagctctgcagtgagggcattcttttggaaatctatgtccttaacctgtgaagtttggcccaactctaagtagtatcagaatttatggcttaaac

SEQ ID NO: 415516 - DNA, 559 bp, Homo sapiens
gatgactcagaatagaggttgtacatagcagaaagaccaacaatatgattagaggtttaggagctttgaactatgtgataatagcataacctctgggtagaggagaggggctgaagactgagttcaatctcatagcaaatgattgaatcaatcatgtctacctaacaaaaccccagtaaaaactgtgggcacaaatctcagatgagcttccctgattggcaataatctacatatggtcacatgtagatatgacagaagggtgattcctcctgactccatggggaaaaggcaaaagatccctcttatttaagatccttccataccttgccctacraatctcttcttttgactggttctgatttgtatctttttgctataataatgctctaatcataagaatagcactttcctttgttctgtgaattattgaacctgaggagtagtagaagccttaaattagtagccagctctgcagtgagggcattcttttggaaatctatgtccttaacctgtgaagtttggcccaactctaagtagtatcagaatttatggcttaaac

SEQ ID NO: 415517 - DNA, 621 bp, Homo sapiens
atctgtctctacccatcctggtagctgaagacaaaaatcataatcataatctcttgggaactctatggccctgcccactgcctaagaaacctgactacttaaccaggtgtgcctagggcaagttcgcatttccttatagggctgcagctgatgcactctcaaaagtgccacctcctggctagaggccaacaaagacaaaagcagcaccctaaataaaaacacgaccaaagtccctcacaaagtccacttcactcccctgctacctccaccagagcaggtgctggtatctatggctgcaagacctgaagatagatcacatcacaaaactccttgaaaacactcctcagtaccagcctggagcccagtagctccactgggtggttagacccagaagagtggaaacaatcactacagtttagctctcaggaagccccattcctaggggaaggagcagaacaccacattaaggaagcaccccgagggacaaaagaatctgaacagcagaccttgaatcccagagcttcccatcgacatagtctacccaaataagaaggaaccagaaaaacaattctgattctttaatacccsctgaaaacaaggttctttaataccccctgaaaa

SEQ ID NO: 415518 - DNA, 612 bp, Homo sapiens
tgcacccactttggtacaatgcttgttgaaaaccaaaagaattcacagatactttgaaagaagtggcaggtcactgaaaattccatgagacaggcaaaaatctcttgtgctctcttgaaagcaccacttcatggctggaggccaaccaactcaggacattacagaaactcatacagaataaccctgttcccaggaaggaggaaacaacagctaattctgctacctgcaacatccyggctaaccagtggtcctgagtctgtccatgtgacaatttcactgctagcataacaagcattcgagaaagccagcacaccaaacatatctacaacagaggactctcacagagtctactttactcccctcccacctccaccagagcaagtgctggtatccatagctgggaaacctgaagacagataacatcacaagccactttgcagacattccccagcaccaggccagaggctggtggccctattgtgtgactatacccagaagagtaataacaatcactgcagtgtggctcacaggaagccccatctttagtggaaggaggcgtgcaccacaacaagagaccgtgggacaaaagaatctgaacagcagcccctaagt

SEQ ID NO: 415519 - DNA, 575 bp, Homo sapiens
gtggtaacttaaaaagcagttcttgttttactaaatttcatttaaagtcagactcctgaattctaaaatctctatcatttctatcatagtaagttatgatgaagttttcacttggatatacaactaaattctggaaagcagatgttcatctgtaaaatggggattataaaatttatttctcaatgttgaagaagataagagaaaatttgaaagcactttgcactattaatattgaggttgtcttgaacaacttgaatgraagtagggaaaaattgagaaggaaactgtgtgagaaaaatatatttaattctagaaagtatgatgactctaaaatatatttgtttcaataatatgaaattggctaatagaaccagtacacctaattatactttcaatttttatcattagctacttatataattaacatgaaaatgtataattgttgatatggttttgctgtgttcccacccaaatttcatattgaactgtagatgtcacgagagggaccccacatgtcatggaagggacccagtgggaggtaattgaatcatggggttggttacctccctgctgtt

SEQ ID NO: 415520 - DNA, 563 bp, Homo sapiens
gcatgttatgtgtttcttgtggatgtataaacacacacaaaaccaatgcaaaatttacataaaattaaaaaatgcaaaaaactgaactgataatgataaagaattcacacactttttttttttttttgccagatgtgtttttttttttcttttgttctgcctcctaratttggaagtttgccctcaacaatgttgatcattgaatctgacaagaacacctgcatctggtgtatttagttagaaaatctccggattatttaataatctagttttatattggattgtcatcacaaatggcataaactttactgtatatcaaaaatattttgtatatttaaattgcaatttactttgtattagtgttgttataataactagcaaatttaatttttttgtcagtttctataactgatataactatattacctaaaacctaatttgggggattaaattttaatataaagcatgaatttacttgtaattgccaaaaaccttttctctcatttccaattgtccatgaaatagactgtaagcatccaataaattacataacaaattatttt

SEQ ID NO: 415521 - DNA, 636 bp, Homo sapiens
atcatatttgagttaaagcatcatcatyaccttgttttgaaacttgaaactatctaggcacgctggacatatgctacctattttttcccttgaaggttatattgctggcttaagcaattccctgggtgaattcaaagctaaacaacaaagaaatctggaaaatcaccaggtttccattcacatatccattgtagcccaaggttgttgtaaattgttccctaggaaatatctgcaaagctcatagttcaccaatttagatttgagacctaaactcaatactgcagggtattgattaaattctgctttcacacatgtatatttcagaataaatatgtgcattctcacatgattttttttattctagagcattttaattttggttaataggtaaatatcatataagtattagttcatttcttaattgaagactagaaaaatcttaagtttctccaggtgattctgttcaattaatgaaattctagaatgtatcctctaatatggtattgatgaagttgtacatatgtttatttggatatatcagaacccataattcaaatttattatacaataatagtagttaataggacatatttttacagttgggattgttttagaatcccacaagtttaaaaaact

SEQ ID NO: 415522 - DNA, 519 bp, Homo sapiens
gtatgcacatatatatgtatatatgtatgtatctatcatctatgtatttgatacagggtctttctctgtcatcctggctgtactgcagtggcacaatcataacttactgtaacctggaactcctgggctcaattaatcctcccacctcagcctcccaagtagcaagggctacagatacgtgtcactacaccaagctaatttttttaaaaagwtctttgtagaaatggagtcttgctatgttgcccaagctggtcttgaactcttggtctcaagcagttctcccaccttggcctcccaaagtgctgggattacatgcatgaactaccacacccatcctctaacaagcttttaatactattaatttccctctaggcactgtattacctgcaatttctgataggttgtattttcagtttccttcagttaaaaatattttctattttcccttatgactttatctttaggcccacaggctgtttagaagtattttgcttaatttccaaatatttgagaaatttt

SEQ ID NO: 415523 - DNA, 427 bp, Homo sapiens
attccattctattcctttccattccattccattccattcgtttactttccatttgagtccattcaactccagtgcctttcatttgagtccattccattgcattccattccattccattccactccattccattccattccaattgattcgattcccttccactcaattccactccattcctttccattgcattccattctattccattccattgcattcctttccattccatttgttacattcgattcaattccawtccattcgaatcatttactttgcaatcgattatatttgagtccgttctaatccaatccattccattctggtacattccttttgattgcattccattcgattccattccatactattgcattcgattcgattccattctattagaataaattgcgttcgagaccgtaccttt

SEQ ID NO: 415524 - DNA, 272 bp, Homo sapiens
aagtttcaactttgtgagatgaatgtccacatcacaaagaggtttctcagaaagcctctctctaatttttatgtgaagatatttcctttttcaccataggcttcaaagcactcacaaatatccctttgcagactctacaagaacagtttccagacagatcagagaaaagaaacgtttacctctgtgagatgaatgcctacatcacaaaactgtttctgagaaaccttgtttrtactttttaagtgaatacatttcctttttccccataggcc

SEQ ID NO: 415525 - DNA, 417 bp, Homo sapiens
atgtaatggtgtgcaatggaatggaatagaatggaatgcaatggaatgcaatggagtggaatcgagtggaatggaatcgaatggaagggaatcgaatggaatggaatcgaattgaatgaactggaatggaatggactcgaatagaatagacgggaacaaattggaatcgaacggaataaagtcaatcagaaaggaatggaatggaacggaatgaaaaggaacggtttctaatggaatggagtcgaatggaatgraatacaatggaatggaattgaatggaatggaattgaatggaatcgaaaggaaaagaatggaaaggagtgaaatggaaagatatcaaccggaaatttatggaatggaatggactcgaatgaaatggactggaatggaatggacttgaatggaatgggatggagt

SEQ ID NO: 415526 - DNA, 522 bp, Homo sapiens
tttccttaaaaacaatttttaagttttctaaaaaaaatcaggaaaaccctgtgattttgttttttacctgtttagaactggccagttccaactactgtgctctaggtgagacattattgtccctgagctctgagcttttgcaagcaagaaagaaaggtttagaaaacaaaggggctatattgggtcctgtgactgaaaagtccagaggtctgytctgtagggaggaagatcccattttgattcattttgatcccatttgattcaccccatcatcagggccttaaaccatttttctgatgttttctgctttccacaggccagctttgttgtaggcgtgcctccctcatgatggaaaatagctgcagcagttcccggcctcacatctgcacatttcaccttccaaagcccccagaaaaatgttgccatgagcctcagtggcctgaatggaatcacttgaccattcttgttttgtttttgtttttgtttttgtttttttgagacggagtcttactctgtcactca

SEQ ID NO: 415527 - DNA, 642 bp, Homo sapiens
taaaaaatttaatgggaacttcacggagtggatacctatgctgtcagaaatgtttgttatagagatttgcaggagaaaaaacaaagcttcatctgttctagaatctatgtgtttctttaacgtcttagcatgagcaactccattttggtttggcttggtttgttggggcctagtgcatgagcttagcccaaaacaatagactcccataattttgtttaaaaaaatttccccttttttgtcatgctctcacttaggtgagagtgtaatcaaaacttagggccttagcaccactctcagttaccaacattttgagtttccggtctcagcacgtcatttataggtgtcctcatggttgcacatttctttcagctcctgttattccagttgaagagagaccatatgacattctagagatggctgcatgcaagcatttaaaacctttgagagaatacagtgcaccaggaagactattattatgactattgggaggataataccaagagtttgggatatgctccttacccaaggtccccataaaytgaacctcctaaaatcaaattgatcaaagaatgagctagataaagtttactcacttaactaagtaatttctttgtctatcccttaccactgaatttctataat

SEQ ID NO: 415528 - DNA, 549 bp, Homo sapiens
tctcagctcactgcaatctccacctcctggctcctgggttcaagtgattctcatgcctcaccctccgtagtagctgggattacatgtgtgtgccaccacacccagctaattttatatttttagtagagayggggttttgccatgttggccaggctaatttcaaactcctggcttcaagtgatccatctgcttcagcctaccaaagtgctgggtttatgggcatgagccacaatgcccagcaaagtatacttttgtgaacaaaaatggaaatatttgcctttctctctacctgattcctccagaattcagaaactatttgcgagtattcttatttcataacaatatgggaatttacataagttcaataaaaatctgttttcttttgtaacaggacatattggagacactggtaattttcccaaggctttgactggaatgacatcttttcagatatgaccagacgggtttgaggaattaaagttgacttaaagaactggcctgataccttgtctacatggttctcttacaaggttcctgaccttgtggtaa

SEQ ID NO: 415529 - DNA, 586 bp, Homo sapiens
tatagaatcacaaacagctatgatttatcaatgtataatcaatcaccgctcaatgttatttttgtaaaccaatgacaattactgacaaataactttttgtaatcaccccttctcctgatttgttcttttttttttctttgaaaccttgaaccactcttttgttctccagagtatgtcccaaggaacttggaagtgtgtcccmggatgtatctctcaacctttgtgtttgaataaatcctctttaaactgtattctgaccttttttttattattttaggttgacatggccttgctcttgagtaaaacttttaaagaatacaagcttctaagacatgtaccccatcctctgcttatacagtttgatgctggaacgaagtaaaagactagacttttttgtggacaaacttcatagtgttagacttgatctattgtttcagccatttcagaatattttgaatttgaattttgtctcaataatttcattgatcagcatgctacagatgtcagcataacagtcactggtgaaactgctgaaaaatttagggctgagggaccaccctctaagttattcctcctaataaatttt

SEQ ID NO: 415530 - DNA, 482 bp, Homo sapiens
catggcatcagttatcaagcttttccattgagccaataagaactagtgcacttcaaaaaaagccaagcttgtcctgcattgtctagccattctctgctacctgcatttggcagtaggactttgcttggtgataatgtgtttcctctagtaaactcctcctgcattctcaggaattttcmtgggtaggcagcacacttagaaactcaagaaaatgaacctgccatgactacgtcacatagaaaactttccaagttgttatggttctgatgtggagaagggaaaggacatacaatagtggtaaacaactcaagtatagagtgagtcagatgtacagtgagtccaccataggtaacggtgcaaatagtgccatttcttaagttttaatttcctcaaatgaaaactggtataagtgtgggacaatgggataatgcatatgttccttactgtaattcaagtgctccttagcacagtagatgttaata

SEQ ID NO: 415531 - DNA, 509 bp, Homo sapiens
gctgtagctgcttctctgcctcagccccgcagttcactgcatttggccagctcgcctgacttgtgctgtggtggcgtgccctcaaagacatacatgggcttgatgccgttctccatcacgcgaatagtgcggtagaacatgcctatcaggtggctggtggtctcaccctcctcgttctgcagcacatccccaccctggcgaacagcaatcaggaactgataagtgctcatagaggcatcaatggccaccttacggccaaagtagctcttgatgtcattctcccgggtggcactgggggccacatcagcaattagtttggccaggccttgaatacccatggcaacacagaggagggatgactggcctttgggacacgaggcctcggcggctaaagcttgrttcagggttgccctgggcaggcggtcctaagcccactttcccccctcagcttagctgcgggtcgcctgacactcagcccttctttttcttcttagtctggctaaaggttt

SEQ ID NO: 415532 - DNA, 541 bp, Homo sapiens
tttgcacgctggctttgtctgggaaattcccttagcagtcatgccatccagagattctggacagactggttagcatggtccatgggtgggcttgctgttggagtccttaggctggcaggcctgcagcctggatccacattgatggacctgttgattgagtctgctgggataggcttagagcctgtgtccccaggggccagcttgaagcccagagacaatggggctggcctgttgctgagggctgtctagggcttggaacctttgggaccaactcagtgttgggatgcacctgaagctcagggccactgggccctgcctgctacagarcacacaggcagatgggtaaataaatgatgaaacaggagggatgcaggaggagtttgttattgttttcattttggaagttgaaagaactttttctatatatttgctgatataaagaagtatagattccttctcccagaatagaaaagccagctacattgatatggagtgcctaggaattgggaggtgtcactgagcaggggggaaagccgaagag

SEQ ID NO: 415533 - DNA, 608 bp, Homo sapiens
cagcaactgaagcatgagctgcacgctctttcctgcacatcacactacctcattgggccctgggggaaaccaggaataattaaggagctctaaactgaccactacttttcctacctctggctgccctgccaaggagataatcacatgcatttstcacacttctgtcctctctgattcatttgtttcctctgtttggtcatcataagacagcccaagccatttctcagagttagattcatgctgtgggatgacagggctgactgtctgcatctgctctcaggaggccctcgacatagggctgcagcactgaccaaggccttcatttgtcactgaggccaatgtctcagacttccctgccagctcagaccccaacatgtggggacagagacttgctggcttcaaacccacccctgagccatctggcagacccgaggatcccaggacacttggccctcattgcccagacacgctcaccagcagagtgtgtaccaagtgctgaggtctgtcattctgaccttgggctggtaatgggggcacgaactgggggcgaggaggcatgcatgccagtagcaatctctctgcttggttgaagaaaaaaaaatcgagtc

SEQ ID NO: 415534 - DNA, 608 bp, Homo sapiens
cagcaactgaagcatgagctgcacgctctttcctgcacatcacactacctcattgggccctgggggaaaccaggaataattaaggagctctaaactgaccactacttttcctacctctggctgccctgccaaggagataatcacatgcatttctcacacttctgtcctctctgattcatttgtttcctctgtttggtcatcataagacagcccaagccatttctcagagttagattcatgctgtgggatgacagggctgactgtctgcatctgctctcaggaggccctcgacatagggctgcagcactgaccraggccttcatttgtcactgaggccaatgtctcagacttccctgccagctcagaccccaacatgtggggacagagacttgctggcttcaaacccacccctgagccatctggcagacccgaggatcccaggacacttggccctcattgcccagacacgctcaccagcagagtgtgtaccaagtgctgaggtctgtcattctgaccttgggctggtaatgggggcacgaactgggggcgaggaggcatgcatgccagtagcaatctctctgcttggttgaagaaaaaaaaatcgagtc

SEQ ID NO: 415535 - DNA, 608 bp, Homo sapiens
cagcaactgaagcatgagctgcacgctctttcctgcacatcacactacctcattgggccctgggggaaaccaggaataattaaggagctctaaactgaccactacttttcctacctctggctgccctgccaaggagataatcacatgcatttctcacacttctgtcctctctgattcatttgtttcctctgtttggtcatcataagacagcccaagccatttctcagagttagattcatgctgtgggatgacagggctgactgtctgcatctgctctcaggaggccctcgacatagggctgcagcactgaccaaggccttcayttgtcactgaggccaatgtctcagacttccctgccagctcagaccccaacatgtggggacagagacttgctggcttcaaacccacccctgagccatctggcagacccgaggatcccaggacacttggccctcattgcccagacacgctcaccagcagagtgtgtaccaagtgctgaggtctgtcattctgaccttgggctggtaatgggggcacgaactgggggcgaggaggcatgcatgccagtagcaatctctctgcttggttgaagaaaaaaaaatcgagtc

SEQ ID NO: 415536 - DNA, 548 bp, Homo sapiens
ccctaattcggcatttacttttcttaaaaaagagaaaaagacaaccgagtcatgtgttctacagttaaaaattaaagcattttgagttcattttctttgcaaggacatggatgaagctggaaaccatcattctcagcaaactaacacaggaacagaaaatcaaacatcgcatgttctcactcatagtgggagttaaataatgagaacacatgaacacagggaggggaacatcacacactggggcctgtcaggggaaaggggagggagagcattaggaagaatatctaatgcagccagggcttaaaacctagatgacgggttgataggtacagcaaatcaccatggcacatgtatacctatgtaacaaacctgcacgttctgcacatgtatcccagaacttaaagtaaatttttttwaaaaaattaaagcattttgctggccaggcatgggagctagtggacagtattaagaacaattcataaaaaaatgctaacaaccctcccatacaatatatctaacatgctagttatgcttctgaaagaagggga

SEQ ID NO: 415537 - DNA, 586 bp, Homo sapiens
gagttgtgtgtggaggccatgggagcatggccagctgtctcctgaggtcatcaccagggtacaaccaacttcaacccactccattgagcctgaagcaagggacccttggaggggtaggaagtgcccagaaaacttatggggtccaatggctaaatgagaccacaccaggcagagggttggatgctttacacagggacaacgatgtgggtgtgtccagggtgaaaagcctatggcactgggctgcttacagaggaggggttcatcactccaatgatcctgctggstacctgctcctcctttccagcacactgacctatgccaaaaccagaagtagaggctcctttctttccatcctgccttccatggtggaggagggagagagggtgccaaacagtgggattcaagtagttgacctccctgccatactgttcacctgtccccaaaccctggcccacagagacctccctccctttttccaccacctgtatcatcagttctcacctcctcttcccgtcatcactgtccttggctagacttacaaaacttctccaactcaagctttagaagagcacagaggtcaatgcat

SEQ ID NO: 415538 - DNA, 552 bp, Homo sapiens
cccaataaatcattaaaggatctgtggacactgtttccaattgtcaccataagtgtatgataagacccagttgcctggagaatcaaaagatacaactatgcttccaagtgccaggccttggggagcacccactagcagctccttcaggtgtactccactgagatacaytgaggattgtcaacaatcaaagaccataggctattaggtgctctggtgtgtggtgaaccacagcccattccaaggtcagcgtcaggagttcccacagcacagctccagaccaaagacttctcagagagttgtgatggaaaagcattaatgtttccctctggcctattccactcctcattttagggccagtgcccaaagtcacattaatctgtatctttgcaatggcagaagcccagcctgaccacaaataaccatccagataactaatttcagacctcaagccaaaagtaagtcatttaaacagcttcattctccaagtgggtattgccccaccctctgcttcagaaactccacaggaaggttgatgccagtgcagaagcttac

SEQ ID NO: 415539 - DNA, 417 bp, Homo sapiens
tattactcaagggccgatgattctccactgggaaactgtcctcagtgatgtacggtcccattagccaactattacccagctggcctcctctgcctgagacctctggcctttctagttctgaatctgaaaaactaagcattaaggagactgaaggttcaaagaatcttagcagatgacttcagtccagagaaagcaacccctgaagtcttagaaaggttaaaattcaaagtagcaaagaagaagagatacaaaaaaataactgccctgaaggagcaggaattctgagttgggttaaccatatgaaaatttcaaatcatatgaaaattgacrtcctctgctcagctgtgaggcctggaggagaattctgcagagctggtttatgacaagcagagatctctcaacaaaacagtgcttagc

SEQ ID NO: 415540 - DNA, 601 bp, Homo sapiens
ctgtctttaaatattcgttcctttgggtttgagatcattgttggaaaagacaaaattctgggaaaggtattaaatagtcaatgacttcgtgtgaattatattatcagataattgttttgtatgaggacagggccctaggacggggtgaaaacatgataggcccacagactgttaccttttgtacagactgagagagtaaatccctgtctcccaaagcttaacaaagctgaaagtattattgctttgacattctcagggatgagtttttgcctcagttttgcacattaaatgaactgacctgcccctaatgagtttcactgtatgagcagcacccaaaagagtgagcccagcatgctatagtccagcacctagttttaaacccatcacctgccctaagcttgctctccataattcccatcataattcctggtactctagaccaggggacagtaagctttttctgtacagggccagaaagcaaatattttagactctctgaggcatatggtctctgtaacagctactcaactctgccattatagcacaaaagcagctatagacaatatgtaagtaaatsagtacagttgcgtgccagtcaaat

SEQ ID NO: 415541 - DNA, 603 bp, Homo sapiens
aagagggatctgagcatagcatgttggtgtgctcagtcccccttgccatgtgataccctgtgccaccttgggactctgcttagggtccccaccagcaagaagacactcaccagatgtacccccttgaccttggacttcccagcttccagaactatgagaaatgaatcctgtttcttataaatagcccagtttcatgtattctgctacaagcaacagataatgaactaaaacaggaacctaaacctagatatctggggaggattattatatttaggagaaggaagataaccttcaagttatcgtgaggaaaacaatcttgggagtaaatatacttagaaatatcctatatcctggtctagctgaaagagcctaaacagccaagagcttcatcagcattggtaacaacatcagtatatctgggaacattgcattgcccagtaagtatygtatcacatgaacattccttagaactcaactgatgggacgggccctcaaacatctaaatgctagatgtgatcaacgcagaacaagggcaacttgctgctgcaacaaccctttgagacaatggaccacataagagaccaggctgtaataaccaatggt

SEQ ID NO: 415542 - DNA, 578 bp, Homo sapiens
gtgcttaaccacaaatttgggtccaacaaaragtgtccaatttaggaaatttaaaaggagcctgagcatgtgcatttctaataacctctcaggtgatgtcaatgctactggtccaaaaaccacacttgaaaaccactggtgtaggagacggacactagatttggaatcgggggaacgattcaaattgccgtgctggtgctaacttgcttagtgactttggcaagccccttcatatcactagacataaatggggataatggtatctattggtgggttcactggttttggtaagggttaaatgagataatgtatatgacatacatagcacaatttgctaagcccacaaaagtggacactattgaactcccttcctatggttaagattagccagatggagaatggctgaattataagaatatcctgggatgtgacttctctataaaagacttcacatcaaaagccagttttctccagggttcaaaataatcatgaaactgcattgggcctctttgtcttgccacctgtgatctacctctgacatacagactgttatgtaatcctaacaggttggtttgtat

SEQ ID NO: 415543 - DNA, 578 bp, Homo sapiens
gtgcttaaccacaaatttgggtccaacaaaaagtgtccaatttaggaaatytaaaaggagcctgagcatgtgcatttctaataacctctcaggtgatgtcaatgctactggtccaaaaaccacacttgaaaaccactggtgtaggagacggacactagatttggaatcgggggaacgattcaaattgccgtgctggtgctaacttgcttagtgactttggcaagccccttcatatcactagacataaatggggataatggtatctattggtgggttcactggttttggtaagggttaaatgagataatgtatatgacatacatagcacaatttgctaagcccacaaaagtggacactattgaactcccttcctatggttaagattagccagatggagaatggctgaattataagaatatcctgggatgtgacttctctataaaagacttcacatcaaaagccagttttctccagggttcaaaataatcatgaaactgcattgggcctctttgtcttgccacctgtgatctacctctgacatacagactgttatgtaatcctaacaggttggtttgtat

SEQ ID NO: 415544 - DNA, 578 bp, Homo sapiens
gtgcttaaccacaaatttgggtccaacaaaaagtgtccaatttaggaaatttaraaggagcctgagcatgtgcatttctaataacctctcaggtgatgtcaatgctactggtccaaaaaccacacttgaaaaccactggtgtaggagacggacactagatttggaatcgggggaacgattcaaattgccgtgctggtgctaacttgcttagtgactttggcaagccccttcatatcactagacataaatggggataatggtatctattggtgggttcactggttttggtaagggttaaatgagataatgtatatgacatacatagcacaatttgctaagcccacaaaagtggacactattgaactcccttcctatggttaagattagccagatggagaatggctgaattataagaatatcctgggatgtgacttctctataaaagacttcacatcaaaagccagttttctccagggttcaaaataatcatgaaactgcattgggcctctttgtcttgccacctgtgatctacctctgacatacagactgttatgtaatcctaacaggttggtttgtat

SEQ ID NO: 415545 - DNA, 578 bp, Homo sapiens
gtgcttaaccacaaatttgggtccaacaaaaagtgtccaatttaggaaatttaaaaggagcctgagcatgtgcatttctaataacctctcaggtgatgtcaatgctactggtccaaraaccacacttgaaaaccactggtgtaggagacggacactagatttggaatcgggggaacgattcaaattgccgtgctggtgctaacttgcttagtgactttggcaagccccttcatatcactagacataaatggggataatggtatctattggtgggttcactggttttggtaagggttaaatgagataatgtatatgacatacatagcacaatttgctaagcccacaaaagtggacactattgaactcccttcctatggttaagattagccagatggagaatggctgaattataagaatatcctgggatgtgacttctctataaaagacttcacatcaaaagccagttttctccagggttcaaaataatcatgaaactgcattgggcctctttgtcttgccacctgtgatctacctctgacatacagactgttatgtaatcctaacaggttggtttgtat

SEQ ID NO: 415546 - DNA, 506 bp, Homo sapiens
ggtatatatgtatatatagttatatatgtacatatagttatatgtatatatatagttatatatatgtgtgtgtatatatatatatatwttttttttaatcctcaaaatagcctgtaatgttgtcaggtatatacagctgactactagctgtgttataggtttgagttgcatttggttataaaacaatttgttgggaaaagtgtggggaagaggacctcttcccacacacacatggagacagatcccaattggtctatgatcctgtttgcaagaaagagattctgctggttgagtgcctaaagagaaaggttggatggccttcagattatatcagcttagctagcattgctaaccaactgttgcaagctctgaaaataaaagatcttgaacccattttatatatatatataaatatatatacatacatacatatatatttatatatttcttatatatatgctaaaaatgtatataaaatgaatatgctaaatatatatacaaatata

SEQ ID NO: 415547 - DNA, 575 bp, Homo sapiens
tttttgcttttgcaaagcaatgtcatactggactctatcagtcttacctttcccttaaatccagccttcrccctgtttcccaagggactttctaggacacagacctgatgcaatgactcctctcaagaaacaaaatctcaactcctgagccctgtactgagcccaacacctttgctcacatggtccctaaccactttccctcctcctctgccaccacatcacaggtgctttcactccacccaaaccaagccttttgcagcttcctgaacacaccttaccttctcacaactctatgctacagcatgtgctatttcctctgcccagaaaaccctccccaacccaccccaccattagtcctcagcaaacctctactgatgtgttgcctctgcttcaatatagcttccttctgagcttcctagacctgccgggcagaatcagtgcctctttcctcttgtgacttgcaatgcttatcactctcctgggaatgactccagaaaagcaaagaccagggacacaaaagacactaaataaaatttgatggatgaatgaatttttttcactccaactagacccat

SEQ ID NO: 415548 - DNA, 575 bp, Homo sapiens
tttttgcttttgcaaagcaatgtcatactggactctatcagtcttacctttcccttaaatccagccttcgccctgtttcccaagggactttctaggacacagacctgatgcaatgactcctctcaagaaacaaaatctcaactcctgagccctgtactgagcccaacacctttgctcacatggtccctaaccactttccctcctcctctgccaccacatcacaggtgctttcactccacccaaaccaagccttttgcagcttcctgaacacaccttaccttctcacaactctatgctacagcatgtgctatttcctctgcccagaaaaccctccccaacccaccccaccattagtcctcagcaaacctctactgatgtgttgmctctgcttcaatatagcttccttctgagcttcctagacctgccgggcagaatcagtgcctctttcctcttgtgacttgcaatgcttatcactctcctgggaatgactccagaaaagcaaagaccagggacacaaaagacactaaataaaatttgatggatgaatgaatttttttcactccaactagacccat

SEQ ID NO: 415549 - DNA, 575 bp, Homo sapiens
tttttgcttttgcaaagcaatgtcatactggactctatcagtcttacctttcccttaaatccagccttcgccctgtttcccaagggactttctaggacacagacctgatgcaatgactcctctcaagaaacaaaatctcaactcctgagccctgtactgagcccaacacctttgctcacatggtccctaaccactttccctcctcctctgccaccacatcacaggtgctttcactccacccaaaccaagccttttgcagcttcctgaacacaccttaccttctcacaactctatgctacagcatgtgctatttcctctgcccagaaaaccctccccaacccaccccaccattagtcctcagcaaacctctactgatgtgttgcctctgcttcaatatagcttccttctgagyttcctagacctgccgggcagaatcagtgcctctttcctcttgtgacttgcaatgcttatcactctcctgggaatgactccagaaaagcaaagaccagggacacaaaagacactaaataaaatttgatggatgaatgaatttttttcactccaactagacccat

SEQ ID NO: 415550 - DNA, 575 bp, Homo sapiens
tttttgcttttgcaaagcaatgtcatactggactctatcagtcttacctttcccttaaatccagccttcgccctgtttcccaagggactttctaggacacagacctgatgcaatgactcctctcaagaaacaaaatctcaactcctgagccctgtactgagcccaacacctttgctcacatggtccctaaccactttccctcctcctctgccaccacatcacaggtgctttcactccacccaaaccaagccttttgcagcttcctgaacacaccttaccttctcacaactctatgctacagcatgtgctatttcctctgcccagaaaaccctccccaacccaccccaccattagtcctcagcaaacctctactgatgtgttgcctctgcttcaatatagcttccttctgagcttcctagacctgccgggcagaatcagtgcctctttcctcttgtgacttgcaatgcttatcactctcctgggaatgactccagaaaagcaaagaccmgggacacaaaagacactaaataaaatttgatggatgaatgaatttttttcactccaactagacccat

SEQ ID NO: 415551 - DNA, 537 bp, Homo sapiens
taagctgaacactgaaagaggaataagattttgataggtggagtggacacacatcagtgggagacccagcataaagatgggaatgataataaatagcagagatgttaacatttacatgatttacacrgctcgtgtcacttgattctcaaatgaaccttataaggcagtgcagcaggcgttggtggttgcctatataacttccatcaatgcacctctttctaccttcctaacagaacttgtattttgttacagtatccctctctgtgtgggcctgtgcttagaggaggctgggccccactctgtctcccctggtttaccctgtcctgacatgatgcacacatggtactctgctgggagctctgagcttctggaagcagttccctccatctgaaaatgtgttgtctactattggtcttctgtacattttactgtctgtctgggtgtgatgccagaacctctgtaaccatcttgtcatccattataaaaaaaaaaaaaatagccagaggacaaagaccaatgctctagaaggcagagcag

SEQ ID NO: 415552 - DNA, 493 bp, Homo sapiens
tttgtcttccaagatgtcactgaaccaaagaattaacaacctggagctacctaccctgagactctatcacatgaactcatatgtttcctatgcttccatttcaggcagagttttctgtatcttgcagagccaaagcatcactgctgatctagggaagtattatgattcctattttatggaaagtagcctgaggtatggaacaattaaaacttgtccaagggggccagcacagtggctcatgtctgtaatcctatcactttktgaggccaacacaggaggattatttgaagccaggagttcaagaccagcctggggaacaaagcaagaccctgtctctattttaaaaataaataaagaaagaaaagaacaaaagaaaaagaaaattaaaaagaatagctgggagtggtaagtgcacctgtagtcccagctactcttgactctgaggtaggaggattgcttgaacccaggaattcaaggctgcagtgagctatga

SEQ ID NO: 415553 - DNA, 493 bp, Homo sapiens
tttgtcttccaagatgtcactgaaccaaagaattaacaacctggagctacctaccctgagactctatcacatgaactcatatgtttcctatgcttccatttcaggcagagttttctgtatcttgcagagccaaagcatcactgctgatctagggaagtattatgattcctattttatggaaagtagcctgaggtatggaacaattaaaacttgtccaagggggccagcacagtggctcatgtctgtaatcctatcactttttgaggccaacacaggaggattatttgaagccaggagttyaagaccagcctggggaacaaagcaagaccctgtctctattttaaaaataaataaagaaagaaaagaacaaaagaaaaagaaaattaaaaagaatagctgggagtggtaagtgcacctgtagtcccagctactcttgactctgaggtaggaggattgcttgaacccaggaattcaaggctgcagtgagctatga

SEQ ID NO: 415554 - DNA, 544 bp, Homo sapiens
ctggtttcaaaacctgacttggccactgcccaactggaaagctttagtctttttgctgcaatgtgtcctctctcaaattaagaataacagtatttaccttatacctttttttttattagaacaatgcacaatgttagcaattactgttctttctggttgatttttttattatttcaatcactctgttaaatgtcccattctgatcgtttatcgttttcttcatttcattgaattatttctctgccattttctggacatttatggaacttccttaaagcagctatttttaattctttgtcaggcaattcatacatgtccatttctttaggatcagtcactgtcctttattttgtccctttaatgaggtgatttcatgtttccctgtttgttcttgatgcttgtggctatattctggtgtctgtgtaactgaaaaaaataggtacttattccagtttttgcacrctggctttgtctgggaaattcccttagcagtcatgccatccagagattctggacagactggttagcatggtccatgggtggg

SEQ ID NO: 415555 - DNA, 566 bp, Homo sapiens
tttgcaagtaatttacttttaagctgaatcaaagccrcaccaaagtcatccttagaatcatcctactcttggtcaattgtattccaacatgttttctggagaaagaaaggaagggggctgttaaagggaggatccatccatgggcatccatgttatggcaagagcagggttgagacctggagggatagatagaaccgcagctgctcttctcccttagaggggagaaaaatattccaggagttcaagagacaaaacctggagggcaggcccagctcgtctcccttgagagcacaggaaagaagcaaggccaatcccactatatgattccagccctgcagcctcgagggctgggtgaagtagcatgctccatctcagcacagggtcaagtctgctcttaggtgagcctggtctgcctggaagatgtgcagctcaggtgaggttaagaaagaaacagtgtggacacctgagaaagcaaagttgtgagtgtctacaagttgaagtctacggcagacaaaggtagggcaaagacctctgtctggttgttagcatgcagtcaagtccccagc

SEQ ID NO: 415556 - DNA, 566 bp, Homo sapiens
tttgcaagtaatttacttttaagctgaatcaaagccgcaccaaagtcatccttagaatcatcctactcttggtcaattgtattccaacatgttttctggagaaagaaaggaagggggctgttaaagggaggatccatccatgggcatccatgttatggcaagagcagggttgagacctggagggatagatagaaccgcagctgctcttctcccttagaggggagaaaaatattccaggagttcaagagacaaaacctggagggcaggcccagytcgtctcccttgagagcacaggaaagaagcaaggccaatcccactatatgattccagccctgcagcctcgagggctgggtgaagtagcatgctccatctcagcacagggtcaagtctgctcttaggtgagcctggtctgcctggaagatgtgcagctcaggtgaggttaagaaagaaacagtgtggacacctgagaaagcaaagttgtgagtgtctacaagttgaagtctacggcagacaaaggtagggcaaagacctctgtctggttgttagcatgcagtcaagtccccagc

SEQ ID NO: 415557 - DNA, 566 bp, Homo sapiens
tttgcaagtaatttacttttaagctgaatcaaagccgcaccaaagtcatccttagaatcatcctactcttggtcaattgtattccaacatgttttctggagaaagaaaggaagggggctgttaaagggaggatccatccatgggcatccatgttatggcaagagcagggttgagacctggagggatagatagaaccgcagctgctcttctcccttagaggggagaaaaatattccaggagttcaagagacaaaacctggagggcaggcccagctcrtctcccttgagagcacaggaaagaagcaaggccaatcccactatatgattccagccctgcagcctcgagggctgggtgaagtagcatgctccatctcagcacagggtcaagtctgctcttaggtgagcctggtctgcctggaagatgtgcagctcaggtgaggttaagaaagaaacagtgtggacacctgagaaagcaaagttgtgagtgtctacaagttgaagtctacggcagacaaaggtagggcaaagacctctgtctggttgttagcatgcagtcaagtccccagc

SEQ ID NO: 415558 - DNA, 584 bp, Homo sapiens
tctgtttggttccaaattccagaatctttctagcatgtgacaccaacaccatgggctgttattgagtgagatggagtggggaggggctgtatggttagtgtcaaagttggaaatgttcttcttctgaaatgccagatggttgtcaccaagaggaaaggccagcagactatcttccaagatgtctcataaactaatatggcttactttggggaattttccatcatcctagatctgctayttggatgctacagaatctgaaaagggatccatctctcaatagagacactttaaccaagcacagaacactggcagataaaaccagaatgccaatgccttcatttactgtgagaaattcctggcacggagacctaaaaactcagattccatagaatgagcccaaagtctccccacagacagactccaaggagaagccaaatcatagactgaaagtttctggtgagcctgaagtcagaaagggggaagttcaataatccagtgcttcaggcatccagctgagatacctcagtgttttcattccgcaaggaggacggtcttgccagtgagaccagagtcgcttaaaatat

SEQ ID NO: 415559 - DNA, 588 bp, Homo sapiens
tgacaatactatcacttaccttttcatgtaataaggyttaaataacatcttgttggcaaatcacttaattgagtctaggaagaagcattacaaattgtcatccaatggtatttacaagttgagtgattgaatcatacttgattaaggagagcttcatatctactttccagtagggattctggtaaaagcaccatgggggggaccaacaaatttggaactggaaactgggtctgtgaatgtgaaatacgaatcggctggacaacccagtagaaaagggggccaagaacaacaagaaatcaaccacaaattaatcaaggaagtgaaaatggatacaatactttgtgtctttcaaattggggaatatctgtagtctcactgctagggggattataaatcagtatggccatttgggaaggtggtttggcagtttatcaaagttcctttcagcattgtgcctctctctccacataggatggttctgccctatacgaagcaccaagagctcagaaacaacctcaggaagagagagggagcccttgctccaatttatttattcttaatttatcaatttctgtcatattacatatg

SEQ ID NO: 415560 - DNA, 546 bp, Homo sapiens
catattggattggggtccactctaatgacctcactttaaaatttagtacctctgtaaagaccctgtctccaaataagatcacattaacagatgggggaggtttgaacttcaaaatatgaattttggtagggaagacacagttcaatctataataattggcttgtcaataacttctctcttctgctagttttgtcctatcttgctctttgtcagtgctctctagtttgagaaatttccaaattctttgtgaggctcagtcacctgctccacacacctttcctttttttagaagtttggctcaatttagtctctgttcttggactgtcgttactttttctgactctttcttgatccattgaggggaaattctgtcactagttggctgttctcgtgctcttgctgcatttgtcttkgtttttgaacaaattccaaaaataatcctttgtaacctgtaatttttatctctacattgtcttttgttttgcttcacattgctggaaccatgacagaaaattctcagagtaatttcgattagcatatattcat

SEQ ID NO: 415561 - DNA, 579 bp, Homo sapiens
gtgctcttggggtatatttaaaatcttcaaagttggctattggggcctgcgtgacctgaccctgcccacctcccctgcctgagctggagtcacactgctcccaggacaatgttttcctgcaacactagtggcctttcggttggtgaaggctttatattttgtcccttttcaagatctaagcatagggttctgccagtgatatgtttgttcgtatcatttgggcaacaacttttcttcctctggccttcataataaaagccacttctccaaaaggggttttgccaggatcccctctctgtatctcagtcaattcctctgtgttactcttttcctgtgcctttccttcatcacacttacaatggtttatrtctacttatttgtgagattagttcttttatgtctattacttccactggattataagatctatggggtaggaaattcacctcttttgctcatcattctatgcccagcatagtgtctgactcaaaatgagatctgttaaaatttccatctttaatcttttacgtctatcctcatgttctctccttacacactgattaaagggtcccagctaga

SEQ ID NO: 415562 - DNA, 590 bp, Homo sapiens
tcctgccttgtgctgtagtctcattctgggatcatctgatttacttgtatggctagagactcacttctgaaaattgttgtatggatgtagcttccagaatgagatcctgtgctgacatttatgttttctttatttctttttgaaaaaaatatgctacattgagataaaggggacaaagttatgtgaaattaaatgaactctttgtaagcattattcctacaatttgagtaggtataaataagcaaatggtagtgcctgtatgggatgacctgggtcccagtcagaaaataggctttatctcatgccaattccagaatgttattggtagctgcctagagtgttacrttgaagattttgtttaaagttctgtcttgccgcacaatgaaaaaaaaatggcatggttgattagcagtatctattttgggaatagggaggagaggcagcacacacacagaccttatcctattgccctaggcctcagagatgggttaactcactagagtaacaaaattggaaactctactctgtattttcagtatatgctgaatgatgggttttccattgttctttttaatgtatacataatttac

SEQ ID NO: 415563 - DNA, 524 bp, Homo sapiens
tggctccaaatctcctgccttgtgctgtagtctcattctgggatcatctgatttacttgtatggctagagactcacttctgaaaattgttgtatggatgtagcttccagaatgagatcctgtgctgacatttatgttttctttatttctttttgaaaaaaatatgctacattgagataaaggggacaaagttatgtgaaattaaatgaactctttgtaagcattattcctacaatttgagtaggtataaataagcaaatggtagtgcctgtatgggatgacctgggtcccagtcagaaaataggctttatctcatgccaattccagaatgttattggtagctgcctagagtgttacattgaagattttgtttaaagttctgtcttgccgcacaatgraaaaaaaatggcatggttgattagcagtatctattttgggaatagggaggagaggcagcacacacacagaccttatcctattgccctaggcctcagagatgggttaactcactagagtaacaaaatt

SEQ ID NO: 415564 - DNA, 522 bp, Homo sapiens
ccggtgtacttgaattacccattcaacacgcttgttsaagtttgccttagcaatggatgcattaaggtcatactacacaaaggtgggtgtgttctagttaagttacctaagcatttcccattgactagaagaaaatgtttgcaaatcatataactcacaaaggattgatacccagaatatataaagaactcttacaactctgtaaaaacagaaaaacccaagcaacattctttaaaaatgagcaaaggatttgaagagacatttctccaaagaagatatataaaagtccagtaagtgcatgaaaagatgtacaacatcactaatcattagggaaatgcaaatcaaaactcaaatgagataccacttcaacccattaaggtggctactacccaaaaagcaggaagtaaagtggtgaggatatgaagaaattaaaacacttttgctctgggaattgtaattgcaattgggtaagtaaaatggtgcaactgccgtggaaaacagtatggtggttcctcaaaaaat

SEQ ID NO: 415565 - DNA, 522 bp, Homo sapiens
ccggtgtacttgaattacccattcaacacgcttgttcaagtttgccttagcaatggatgcattaaggtcatactacacaaaggtgggtgtgttctagttaagttacctaagcatttcccattgactagaagaaaatgtttgcaaatcatataactcacaaaggattgatacccagaatatataaagaactcttacaactctgtaaaaacagaaaaacccaagcaacattctttaaaaatgagcaaasgatttgaagagacatttctccaaagaagatatataaaagtccagtaagtgcatgaaaagatgtacaacatcactaatcattagggaaatgcaaatcaaaactcaaatgagataccacttcaacccattaaggtggctactacccaaaaagcaggaagtaaagtggtgaggatatgaagaaattaaaacacttttgctctgggaattgtaattgcaattgggtaagtaaaatggtgcaactgccgtggaaaacagtatggtggttcctcaaaaaat

SEQ ID NO: 415566 - DNA, 522 bp, Homo sapiens
ccggtgtacttgaattacccattcaacacgcttgttcaagtttgccttagcaatggatgcattaaggtcatactacacaaaggtgggtgtgttctagttaagttacctaagcatttcccattgactagaagaaaatgtttgcaaatcatataactcacaaaggattgatacccagaatatataaagaactcttacaactctgtaaaaacagaaaaacccaagcaacattctttaaaaatgagcaaaggatttgaagagacatttctccaaagaagatatataaaagtccagtaagtgcatgaaaagatgtrcaacatcactaatcattagggaaatgcaaatcaaaactcaaatgagataccacttcaacccattaaggtggctactacccaaaaagcaggaagtaaagtggtgaggatatgaagaaattaaaacacttttgctctgggaattgtaattgcaattgggtaagtaaaatggtgcaactgccgtggaaaacagtatggtggttcctcaaaaaat

SEQ ID NO: 415567 - DNA, 578 bp, Homo sapiens
gtgttgatagatcacagaattcaagaagtctattccatgccatgccctgacctgcagaaaaaaaaaaattctcccaaatattctttctgggcaaagccgctgaatttgaccttgagtacccatccagatgccccaggatgccaggttcgttggacactactcaagtacaaaacatgaggtgatgagggcagagtcactgatcagccttcccttcaaggaaattgaacygctaattaacatgactcactcttgacaggaaagacagagaagctgcccaggccagggtagtaacaggatagtaccagccagcaaatgtcagccccacaaagccctgccagcccatttccacaagatccagcccaaagggtagtctctctgagtcaagaagtgtaacattccatgtagaggagcagagaagacaaagcacagccctcccggagcagaagccaccccgggccatgaatccaagtgcagaacttggctccagggacactagtggagaaaactgctgatgaattccacgtcatcactagggacccaaacaattcaccaggcccaccagcagcaaacactggggg

SEQ ID NO: 415568 - DNA, 448 bp, Homo sapiens
aggattggattgcccaaatatggaggctgagaagtcccaagatctacagttggcaagctggagacctgggagagctgatggtgtagttctaacccaaargccagcaggctaaagaccaaagggagctgatgtttcggtgcagctccaaagcagaaaaagacaagtgtcccagctcaaagcagtcaggacaaaggaattccctcttttctcagcttttctgttctattcaggtcttcaattgattggatgagaccacattagggaaggcaacctgctttactcagtttagcaatttaaatgttcatctcatccagaaacacacagccacacccaggatgatgttgaaccaactgtctgggcactctgtggccagaaaattatgtgacacataaaattaaccatcacatccagctactgcccccaacagggacaccccacagtgccttaa

SEQ ID NO: 415569 - DNA, 568 bp, Homo sapiens
tgaactccaagaatggacagactgcctcctcaagtgggtccctgacccctgtgtagcctgactaggagacacctcccactaggggccgacagacacctcaaacaggcgggcgcccctctgggatgaagcttccagaggaaggatcaggcagcaacatttgctgttctgcagcctccactggtgatacccaggcaaacaagatctggatggacctcaggcaaactccaacagacctgcagctgaggggcttgaytgttggaaggaaaactaacaaacacaaaggaatagcatcaacatcaacaaaaaggaggtccacacaaaaaccccatctgtaggtcaccatcatcaaagaccaaaggtagataaaaccacaaagatggggagaaaccagagcagaaaagcagaaaattccaaaaaccagaccacctcttctcctccaaaggatcgcagctcctcgccagcaagggaacaaaactggatggagaatgagtttgacgacttgacagaagtaggcttcagaaggtcggtaataacaaacttctctgagctaaaggagcatgttctaacc

SEQ ID NO: 415570 - DNA, 588 bp, Homo sapiens
catggagttaatttccttacattacatgatagagaaacaagacatactaagttaatgaatcaaagaatgatggtttaggcaccttgttttaaattatagaggaaatacatagaagaataaaaatataacaaaaattggcaggcagaagttggggagatacatgcctcatctatcatagagaggagtcaatagctactacttcatattgatgaatcaagaaatgcaaatataagcatattatttgagttatgaacaaaaccaccaccaatgctttctcccctcaagaaagtygagtgaagaacaggactagcaatggaggtgaagaggaagacttatgttttatttcatacctttctgtactattttaatgatttttccccaggcgcatgtacttaatattcttttctttcttttaactttaaaagaagtcaggattcagagacagcactccagcactcccacaaagtgaactcatttttctctgtgccccaaaacagcttggctttatcgtttgacttggcctcaccaagtttgtgttttcagctgcactttctcagacctgcattcttggggacgtagaagagacat

SEQ ID NO: 415571 - DNA, 603 bp, Homo sapiens
ttatatatatatatatatatttactggattatagtctacttcaaatactatttctctgatagcatatgaaacttacaacactatattgtctttttccctcccatcctttgtgttatggttatctgttttacattcacatatattgtatatatcaatacattttttttatctttagatggccagttatctttcagagtaattaaaaatagaaaaraaatctttatgccatttaaaatgctttgtatttctttgtgtagattcaaatttctgtctggtattatgttacttcttgaggaactttatcatttcttctagtgcaggtctgaatcttcctggcttttcattatctcaaaaaatctatttctcctctatttttcaaagattttttagtgactacagaattctaggtacatttttttgttttttgttttttttttttgcttttttttcccccagtgttttaaagaaatcatttcattgtcttttgacttgcatagtttctgatattggctgtaatttttatttttatttccccgtatgtaatgtgtcttttttcccattgactacttttataattttttctttatccttggttttcagcag

SEQ ID NO: 415572 - DNA, 603 bp, Homo sapiens
ttatatatatatatatatatttactggattatagtctacttcaaatactatttctctgatagcatatgaaacttacaacactatattgtctttttccctcccatcctttgtgttatggttatctgttttacattcacatatattgtatatatcaatacattttttttatctttagatggccagttatctttcagagtaattaaaaatagaaaagaaatctttatgccatttaaaatgctttgtatttctttgtgtagattcaaatttctgtctggtattatgttacttcttgaggaactttatcatttcttctagtgcaggtctgaatcttcctggcttttcattatctcaaaaaatctatttctcctctatttttcaaagattttttagtgactacagaattctagrtacatttttttgttttttgttttttttttttgcttttttttcccccagtgttttaaagaaatcatttcattgtcttttgacttgcatagtttctgatattggctgtaatttttatttttatttccccgtatgtaatgtgtcttttttcccattgactacttttataattttttctttatccttggttttcagcag

SEQ ID NO: 415573 - DNA, 592 bp, Homo sapiens
ttatgtatcctttctttagatttcaggttagttggttgcccagagacctcagctttcaagaagttgttaatttgcagattatgtggcttctctgttgttacaatggtggaagggatgctctttccagctttccacggcctgagtagaagccagaagccaaagtcatccttttaagaygtaaatcaaatcacgtcactcctttgcccaaaactctctcatctctttcccatcctttcagagaaaaagaaagtcctttaaaaatctaccaggctctagagcagtgattgtcaattctggctgcacattggaatcacctagggagctattaaattatctgtgcctgggtctcacctcccagagattccgatttaattggtctggggcaagactctattatcttcccgccaccccaaaggtcctcagatgcctctgataagcactctgggttgaaatacattgtcctttaccttcgtgctcaagacacagccattagcagtcgtggcatagtataggagcttgttataaagggagaatcttatacctgcattttaatacattactcggatgattcatgtgcacattgcagttggag

SEQ ID NO: 415574 - DNA, 592 bp, Homo sapiens
ttatgtatcctttctttagatttcaggttagttggttgcccagagacctcagctttcaagaagttgttaatttgcagattatgtggcttctctgttgttacaatggtggaagggatgctctttccagctttccacggcctgagtagaagccagaagccaaagtcatccttttaagacgtaaatcaaatcacgtcactcctttgcccaaaactctctcatctctttcccatcctttcagagaaaaagaaagtcctttaaaaatctaccaggctctagagcagtgattgtcaattctggctgcacattggaatcacctagggagctattaaattatctgtgcctgggtctcacctcccagagattccgatttaattggtctggggcaagactctattatcttcccgccaccccaaaggtcctcagatgcctctgataagcactctgggttgaaatacattgtcctttaccttcgtgctcaagacacagccattagcagtcgtggcatagtataggagcytgttataaagggagaatcttatacctgcattttaatacattactcggatgattcatgtgcacattgcagttggag

SEQ ID NO: 415575 - DNA, 628 bp, Homo sapiens
tttttcttgctacatgttccaggagaggattttctttttcttttagaaaacagtgaatctttccccttgaaagacagtamgcttctctgtggtagagaagcacttcattttctgccatcatttcttgacaaaacctgcaaaaatgctgtgattcagagactagataaaagttgatgacttttatggctgttgacaaaacttctcttggggtttttgaagagccagaatacgtttgtgtgaaatgcggtgagtgagaacaacataggtgctcccttttactcaagtagcaaagtcagatgcatagccacgcattgcaacagcactgtctgtgcaaggaaatgaaccttttctgtcgagtcacttttgtttgacacaagcaaaacaaaacaaaaaacctttataccatctgcaaaacatcagcagctttgtagtttccaaaggcactcacaaaaaaaaatctttctttgttgaagtcagcaggcacatcatgaacaaaacaggcaggtgactacctggaaggatacctggagtttcacagagtgacgtgggaggaatggcgaggtggccaattcctccataacttgcttcaagacatgcctactcttcttcatggaagcacctcatctga

SEQ ID NO: 415576 - DNA, 624 bp, Homo sapiens
ctgcagtgctcctgtctccttccctgttgtctttgtgataagactggtccaggccccttcagactgaagcccctctctgctccactgctgataacgatcacaaacaaagacaataaagagctgctctcaatatgcatcacacccacctctctcagaagctgctccctctgcctggaaccccgcttcctctggactctttaccatcctcttgtccaccactgttagcctagaaggcagcattccaacactatctcctgccaggagccttgtctggtgttcccacacagcattaaggggttcctccagtgggttccaatggcgttttgttcccacccattgtgacaatgatcacaccgctgtaactaccaattccaagacacattttcccccacattttcatgttttgataggtcaatgggaccactcctattgtgaaaatgattactctgttcatactgctcaattttaaaacacttttttttcacacttragtgtttctgaaaccagaatgttttgctaatgtggacactgagtgtggtagtgtttctaactttttttcttctgaaaatctgttagtatattgagagtacattctaagatcaaagagctgtgttacttacttgt

SEQ ID NO: 415577 - DNA, 624 bp, Homo sapiens
ctgcagtgctcctgtctccttccctgttgtctttgtgataagactggtccaggccccttcagactgaagcccctctctgctccactgctgataacgatcacaaacaaagacaataaagagctgctctcaatatgcatcacacccacctctctcagaagctgctccctctgcctggaaccccgcttcctctggactctttaccatcctcttgtccaccactgttagcctagaaggcagcattccaacactatctcctgccaggagccttgtctggtgttcccacacagcattaaggggttcctccagtgggttccaatggcgttttgttcccacccattgtgacaatgatcacaccgctgtaactaccaattccaagacacattttcccccacattttcatgttttgataggtcaatgggaccactcctattgtgaaaatgattactctgttcatactgctcaattttaaaacacttttttttcacacttgagtgtttctgaaaccagaatgttttgctaatgtggacaytgagtgtggtagtgtttctaactttttttcttctgaaaatctgttagtatattgagagtacattctaagatcaaagagctgtgttacttacttgt

SEQ ID NO: 415578 - DNA, 671 bp, Homo sapiens
ctggggcagcagctttctataggtcataagccctgggccacctcacagtctccctcttgccatcccagccttccaacatctacacattctatagccagtgttaaattcctctatcagatacaccaagcctggtttgtgttttcctgcctgaatcctgacaaatacaatgaaccgaagagggaaatcaacgcacaagtacagtcctagggactcagccaacacagggaaaggggcagagagctctgaaagaggccctcccacccttcccaactctgtgaggagcaaagacgctccaacagcaacgaagaagccccaccrgtgcagactggtgtgccagatgccaggtgaaggctgacccctctcagtggtggggcagacactgaggagcatgctctgactcaatttggcttggctcctgaaggtctgaaccacaaagacagcccggtgcatccagctgagagatgctggagaagagagacacaggactgattccccgacactctgcatcccaggcctgggggatgatgcagagcattctcagtggcctcccagcatggcatataccaggtgatcatcgaggctgccgtctaatcacagtcatggttattgcctcacaccacatagacttctccttcagtcctgtgaccacagctgagacaatgcacagtcca

SEQ ID NO: 415579 - DNA, 659 bp, Homo sapiens
actcagaagcagagtccccacatgtgcctcatgcattcatactggctgccccagggtaaggggtacaggagctgcaagaagcacaaaggagagaggtgtggacactccaggaactctgagctctgagctcagctctgcccatggccttggatatctcattgaacagcacttgacagacttgctttcctcccctgacagaaagaaaaaaaacaactgccaaggaatccccaagccccagcttattcaatagccgacaccaaatgccacatccattcattaatttagtaaacatggatggagtatcttctgtttgtaggtaatgcacaaggcactaggctacaaagattttttaataaaatatttttaaaataacaaaaagacacagcctcccaaaattcatgcagcattctagccaagctaaaaataagaatatttaaatttttwaagccagtgatttacctggtgtcttctggggtaaagaaataattacaaaacaatgataacaagtgttacttacaagagagtctaaattttagaacgaggctctagcataggcctaggcacatagtcaccgtccagtatccagggggatgggttccaggatcccccacagatgccaaaatccaaggatgcacaagtccctcacataaaatgatgta

SEQ ID NO: 415580 - DNA, 532 bp, Homo sapiens
acctactgggtacaatgatcagtatttgggtgataggtaaactaaaagcttggattttactactgtgcaatatatgcatgttaagaaacaggtacttgtacccctcaaatatacaaaaatttaaaaaagggaaaatattcttaggactaagtgtaagtacttaaaaacttaaagtactgtgaagaaagtataagagtaaatgtttgtgatcttgcattcgaaattacttttagatatgacaccaatcacaagcaacaaacgataaaattatttttagatatgacaccaaaatttcaagcaacagaagaaaaaaacttcatraattggacttcatcaaaataaaaatcttctgtgtttcatctacaaactcggttcagtgtatactgttcaggtgatgggtacaccaaaaacaaacaaacaaaaaaactcacaaatcaccactaaagaactttctcatataaccaaatgtcacctgttccccaaaaacctatggaaataaaacatttaaaaaagtaaaaaggcaaatcaaatg

SEQ ID NO: 415581 - DNA, 587 bp, Homo sapiens
taaaacagttattttgattctttgagagatcacacatctccattactttacggttaggcaccttattttgtctgcttgttgagatcatatttctctcaatgttcttgatgcttgtggaagtatgacaatgtctgtgcattgagagatraggtatgtacttcagtcttctcagtctgttttacctgtcctacttcagagagactttcagagattctaagcagactaattgttgtgttccttgagtctgtgaccactgcagccatctcaccagtaggggaccctctaagcctaggcttgccttaagtctctcaagagctccaagattgccacagatttccaccccagatggatctggggaagatccaaggaggatatgggggctgtgtggggattctggccaagaacctccagaagacagtctagaagactgtcccagtgtcccagctgatcatgcctcccagcagaccgttccatgactcccagcagcagtaactggggttggagtggagacttggtgtctttgggatctgctgtggagagaaggctggtgggcccatcttcttggctcatatgggcatgtgtcaccc

SEQ ID NO: 415582 - DNA, 470 bp, Homo sapiens
aagtgtgtattctgctattggtgggtggagtgttctgtatatgtttgttaggcccacctggtctatggtgttgttcaagtcctctatttccttattgatcttctgtcttattgttccctttccactgttttaagrgtgcaattcactggcatttagtacatttccaatgccatgcaactagcaccactatctagttccagaatgctttttttcatcccaaacagaaactctgtgtctataaagccatctttatcattctccctagaccttggtgactactattctacctctgtctttataaatttgcctattctatgtatataatataagtgaaatcatacttcatctgtccttttgggtctggcttatttcacttagtataatattttaaaggtttacatacactgtagcatatattagaatttcactttttttaaggttacagtattattccattgtatgaatatact

SEQ ID NO: 415583 - DNA, 601 bp, Homo sapiens
aattatcgctgcttcttatgttggtgagctgttgctggagtttttgatttgtgatggaaaatagggaagccataaaatattttggtgacagctctctgattaggcagcattgcagmaaaacaagttgtcacaataaaactgattaatcaagttgtcagagtaaaacaaattaatgccacaaaaacctttgctagaaattacctctgtaccttggggtatttgactgatggattcctgctattagcagaaatttccatctcatgagcaagtcttccaagtctgcacttgggatctgagttgggccagtcaccctgtagcagggaagtaactgtgaacccagaaatatatttgcagagggcagtcgctgacttgatttttagagatattttgttcctgcctaactacttgggagactattagtatctgcaatataatctaggagctataaagctttaatgcaaaataaatacaaaagccattactaaagtcctatcagagggtccagatttaatttattaagatgtttaatcacagtactctggcaggaaaggtactctgcaattcttcctgtacattcctctgtctcaaggaaagaccttga

SEQ ID NO: 415584 - DNA, 434 bp, Homo sapiens
gggatgtggcaacctgtcgctaatttacaaccctcaatcatgaggtaagaattggaaaatcattccatcattccaggatgtccgtccatcattccagggtgtccatttgaccrctgagtaagagcccatctctgccctctggagctcccacgtgatccaggaagagaagtatatgaacaagccacaatggtttgaggtttactgagcagaccataaaaggaggtggaagctccgttccatgaaagaacagataaagaggaattaggctcaaaacaccttcttgtgttggttttttccctttctcaactagattttgggttcttggaggataaatgttgtaccttcttttgtctctcctatgacacttagcatgtctggtatcttggagcatacagcaggtgctcaatagttgcttgtgcttactcatttgaatg

SEQ ID NO: 415585 - DNA, 434 bp, Homo sapiens
gggatgtggcaacctgtcgctaatttacaaccctcaatcatgaggtaagaattggaaaatcattccatcattccaggatgtccgtccatcattccagggtgtccatttgaccaytgagtaagagcccatctctgccctctggagctcccacgtgatccaggaagagaagtatatgaacaagccacaatggtttgaggtttactgagcagaccataaaaggaggtggaagctccgttccatgaaagaacagataaagaggaattaggctcaaaacaccttcttgtgttggttttttccctttctcaactagattttgggttcttggaggataaatgttgtaccttcttttgtctctcctatgacacttagcatgtctggtatcttggagcatacagcaggtgctcaatagttgcttgtgcttactcatttgaatg

SEQ ID NO: 415586 - DNA, 539 bp, Homo sapiens
ttatttaacaagtttttgagtacctactatgtaccaggcaatgttcaaggtgctggaaataccactataaaaaaacaaaaacaaacaaacaaaaaaaaaccctgtcataattgatcatacagcctttggaccctattattgagcattttgtttttgctaccaaatattaaatttccaagagatgtttgtcatccttatgtattccttcttcatagcagactattctggtttggggctgccctatcttctcttatgtctctgggcatttcgatagatttctttgaagttttcttcttatactgttttcacttctcccacaatgactttatttgtcttggtttatgtcttccattttatgtgctttcctcaaatatttgggcatctattcatatttaaaagtggcatgctaaagcatggattggaagctccgtgttgatggctggggcctgtcaaccttggtctttacaatagataaacagtagatctgggtatcctatccttaargaacccctgatattagtttccttagatctttccct

SEQ ID NO: 415587 - DNA, 578 bp, Homo sapiens
tattgagaataccatgaaaccttgcaacttcctccccgccaaaaatgcacaacgacacacttattcagaaatttgcttcctgtttcagaggctccctcatctccttagagctcatgcacagacctcaagttgagaagctcgaggtaataaccaagattcacaaacagctaagtgggacatgtgtccccgagggcttcagtcataaaatgcactgctccctttccttttcaaatgtatggggtgacagcgacaaaggcaggcctgacagtcaccagctgcacccagccactgacaagagactgaacaatatagaaagacctgagagagttcaccaaattataaattccttgagcacagggtctgtgtctgctctatttattgcagtatcccaagtaaaaaacagcaagatggaaagactcaaggaaattatttttttwaaaaaaaaggagagacatagatgaagagaaagagatgggagataagattacaaagagaactagaagaaggtaacaatacagagagagagacaaagaagcagaagagttatgaggagctaggacccaagacagaagtttctt

SEQ ID NO: 415588 - DNA, 477 bp, Homo sapiens
attttaaatatttcaatttgtgaatttctaaagcaagattatgtatttgcagtcatttctagccactatttatgcatctgtgctcaagagagggagataaagagtatgatcatatttaactcagaaaagcaataaaaatcacctctttgttccaacatcacttctttttattttagttattcaaaacatacataaatatatcctagattgctaccatacctgagaataagatctcaacaacttacagaagagtttcaatgaatattgtaccttttcatacataagaacatactagagacatgagggtgcaaaytgaaaatacttttataattaggttccttccttctatcaattcaaaataaagccgttctctcccccgtcaccaaatacacacacatattttgatttaatcattaacattgtagacccttttcgttaaattaaacccatgctaaggttgtcaaatatcccaaattg

SEQ ID NO: 415589 - DNA, 572 bp, Homo sapiens
aggagtgaagctgcagaccttcacggtgagtgttacagctcataaaggcagtgyggacccaaagagtgagcagcagcaagatttattgcaaagagcaaaagaacaaagcttccacagtgtggaaggggaccagagtgtgttgctgctgctggcttgggcagcctgcttttattcccttatctggccccacccacatcctgctgattggtccattttacagagagctgattggtccattttgtcagggtgctgattggtgcgtttacaatccctgagctagacacagaatgctgattggtgtatttacaatcctctagctagacgtaaaagttctccaagtccccactagattaactagacacagagcactgattggtgcgtttacaaacctttagctagacacagagtgctgattggtgcgtttacaatccctgagctagacacagagtgctgattggtgcatttacaatcctccacctagacataaaagttctccaagtccccaccggattagctagatacagagtgctgattggtgcatccacgaaccccgagctagacacagagtgctg

SEQ ID NO: 415590 - DNA, 572 bp, Homo sapiens
aggagtgaagctgcagaccttcacggtgagtgttacagctcataaaggcagtgcggacccaaagagtgagcagcagcaagatttattgcaaagagcaaaagaacaaagcttccacagtgtggaaggggaccagagtgtgttgctgctgctggcttgggcagcctgcttttattcccttatctggccccacccacatcctgctrattggtccattttacagagagctgattggtccattttgtcagggtgctgattggtgcgtttacaatccctgagctagacacagaatgctgattggtgtatttacaatcctctagctagacgtaaaagttctccaagtccccactagattaactagacacagagcactgattggtgcgtttacaaacctttagctagacacagagtgctgattggtgcgtttacaatccctgagctagacacagagtgctgattggtgcatttacaatcctccacctagacataaaagttctccaagtccccaccggattagctagatacagagtgctgattggtgcatccacgaaccccgagctagacacagagtgctg

SEQ ID NO: 415591 - DNA, 547 bp, Homo sapiens
ttcagtgtctggtcagggcttgctctctgctttcaagatgacttctcttgctgcaatcttacataatggaaggagtgaaaaaggtgtaaactctgtggtgtcctcacatggtagaaggatcaaaaagccaggcagctgtctgaagcctctcttgtaatgctgttaatcccattcatgagggtggagctttcatgacttaatggcttcccaaaaggcctcacctctttgaaccaccacaatgaagattaaattttatcatgaattctagagggacacaaatattcaaaccataayattttgcctgtggacctctaaaatttatggctttctcatatacaaaatacattcatttcatcccaatagtacccaaagtcttaaattgtttcattatgaactcacaatttcaaagtccagagtctcatccaaatatcacctaaatcaaatatggatgagattcaatgtatgttttatccagaggcaaactgcttttcacctgtgaccctgtgaaatcaaacaatttatgtgcttccaaaatacaatggcataa

SEQ ID NO: 415592 - DNA, 608 bp, Homo sapiens
gtttacactatacggatgctcttcaacttttgatggggttatgtcccaataagctcatcataagttaaaatagcataaattgaaagtgtgattttgatgtaagatattttcaacttakgatgagtttattcagatataactccatcataagctggggagcgcggtgaatgcatatcactttcacaccatcataaagtagagaaattatatgtcaaaccattgtaaattagggaccatctatacacaataaatcaactcaaaatggattaaatatacataagacctgaaaccataaaattctttggagaaaacataaggaaaaatgtttttaacattggtcttggcaatgattttttgaatatgacaccaaaagcacaagcaacaaaaacaaaaataaataagttgaattacataaaactaaaaagcttctgtgcagcaaaggaaacaatcaacaacaacaaaatacaacctatatattgaaagaaaatatttgcaaaccatataactaataaggagtgaatctaatatataaggaactcatatgactgaatagcaaaaatcaaattgcccaagtgaaaaatgggcaaaccatctgaatagaaatttct

SEQ ID NO: 415593 - DNA, 608 bp, Homo sapiens
gtttacactatacggatgctcttcaacttttgatggggttatgtcccaataagctcatcataagttaaaatagcataaattgaaagtgtgattttgatgtaagatattttcaacttaggatgagtttattcagatataactccatcataagctggggagcgcggtgaatgcatatcactttcacaccatcataaagtagagaaattatatgtcaaaccattgtaaattagggaccatctatacacaataaatcaactcaaaatggattaaatatacataagacctgaaaccataaaattctttggagaaaacataaggaaaaatgtttttaacattggtcttggcaatgattttttgaatatgacaccaaaagcacaagcaacaaaaacaaaaataaataagttgaattacwtaaaactaaaaagcttctgtgcagcaaaggaaacaatcaacaacaacaaaatacaacctatatattgaaagaaaatatttgcaaaccatataactaataaggagtgaatctaatatataaggaactcatatgactgaatagcaaaaatcaaattgcccaagtgaaaaatgggcaaaccatctgaatagaaatttct

SEQ ID NO: 415594 - DNA, 616 bp, Homo sapiens
atgtggtatcttagtcatttcatgttgcaataacaaartaccatagactgggtaattttaaacaacagaagttgtttctcatagttggggatgctagtgcaaaaacctttcatattcttctaacctttgcattttagtggtagaagtgagctgtactatctcctggaacagcactgcccaactgaactctctgtgatgatggaaataaatagcattgtctaaaacagtagccactaggcataggtggctattgagcacttgagctgtggcaagtacaactgagatgtttaattttatttaatttacatcaatttaaatttgtttgtatagtcaagtgaagcttgtggctaacatattggacagcaaagttctgtcatgcctctaagggtaataatattttgcttgtttttaataattatattctgtcacctaaaatatctcatttcttttgtatcatctttttgtttacatttttctttctattttgttctgctgaaatttcctatgtgcctgattatctttcttgttcccattgcaaacagaacagctgaataggtggtaagggtttacttcagttactgtgaagtagagctacttttcctgattggtctttctc

SEQ ID NO: 415595 - DNA, 616 bp, Homo sapiens
atgtggtatcttagtcatttcatgttgcaataacaaagtaccatagactgggtaattttaaacaacagaagttgtttctcatagttggggatgctagtgcaaaaacctttcatattcttctaacctttgcattttagtggtagaagtgagctgtactatctcctggaacagcactgcccaactgaactctctgtgatgatggaaataaatagcattgtctaaaacagtagccactaggcataggtggctattgagcacttgagctgtggcaagtacaactgagatgtttaattttatttaatttacatcaatttaaatttgtttgtatagtcaagtgaagcttgtggctaacatattggacagcaaagttctgtcatgcctctaagggtaataatattttgcttgtttttaataattatattctgtcacctaaaatatctcatttcttttgtatcatctttttgtttacatttttctttctattttgttctgctkaaatttcctatgtgcctgattatctttcttgttcccattgcaaacagaacagctgaataggtggtaagggtttacttcagttactgtgaagtagagctacttttcctgattggtctttctc

SEQ ID NO: 415596 - DNA, 583 bp, Homo sapiens
gtcctctcttcaatcagttgattgtttcattcgatgtaaagaagcttttcagttcaraaatccttttctctgcttgatctagtctattattgacacttttgattgtcttttttatttcatggaatgaattcttcatttcctggatttctgtttcttttctatgatatctgtgtctttgttgcatttctcattcagatcatttttgtccaaatgacaaataggaaatcccaatgaaagttagaaataagaagaaaaatacaattttaaaaagtagtggaaaggaataaaacctccataacatcccaaaaagtgtgggtttgaggagctttcgggcaattgtgtatgtaacagagttccttaacaaatgtcagcaagttggcaaaataaacttctacagcgcttgccccctcaacccagaaacatgaatttgaacaactatttaaccatgaaaatacctatgtaacagctgaggaaatcaggtgattagatcaaatcacctgggtataggacagaactaagaatagatgcgttgaagagtgtagggaggacacttttacattacttaagtcaaccctcccttaac

SEQ ID NO: 415597 - DNA, 595 bp, Homo sapiens
gtacaagacagggatgccctctctcaccacttctattcaacatagtgttggaagttctggccagggcagtcgggcaggagaaagaaataaaggttattcaattaggaaaagaggaagtcaaatcgtccctgtttgcagactgaagctaagcatttaaagcagcataactccaggctgggtctcaaaacaggagcctgaaagcagacctgtcaaacagaggcaacagtggcccaagagagattaccagaggcccrtctcagacagtttcccaggaaagaggctgccagttcatcaaaacaggaggcctctgggattcagtgttcatcctgcctttgatggaacttacacagtgttttacgcaaggccctttggaggcctctttccaggagtcagcactaaattttactggtaatcctttggaaattctttgtgagttagaaggacttcagggatttgaccatctggttatgttaggaggcatctgcgcttgcaaaataaccatcgcctcgccagctatttgaaaataacttattttagaggtgcaagtagaggttttcagctgcattattaaagccactctgaaaagggaaatgta

SEQ ID NO: 415598 - DNA, 555 bp, Homo sapiens
gacaatagaaagatacaattctctcttcatcctaaacatggaaaccttaaggcattgctctaacagttcagcccaaaaaacaactgtgagtaaagaaataaataaattactttgagattcaactttcattagcttacttccctgttgataaacttttaatgagtctaattgtctacactacagaaaaaagcctaatatactgagtttaattcaagtacttttctaaatgccaaaatgcagtggcttgtttaagttgcaccatcaagatccagaggatgagggacacattatggattttatgagctttgggcaggcatttttgacttgatagaccactaatattctatgtgcatgcacacacacacacacacacaatttatacatatgtatacacatatatgtgcatttatacatgtggttttaagactgcattggtataaagacaaatataatccatgttggaycacattctttttgtttcttctgattttaaaaaaacactaaaatgttttcctaggctccgaaaagtgacatgggtacttcttggagcagcag

SEQ ID NO: 415599 - DNA, 500 bp, Homo sapiens
cctagcatttgggttattaagcagattattactacaattttagaactaactattagcatgtatttaggaaacactattatgtttcacaatttgaagcaaaagaaatggattcataattgcaaattaagttatgctttaaggaataagggattttttgaggaattactaaaacatagaatattttacagattttaattgccagtctaatcacttattttaaatacagtccactttagaaatctccaatgacttcgtgcttatcacattccagtggattagtgagaaaccatttaragaaaagtcattgaatggtattccaagatccaaaagtaaattaaagaaataaactcagatgcccttaatttcatcaggaaatattcacctggcatctgtggctgcacagagtttgaatcttggtgccacatgtcacctgtgattggatctgctggggcagggggacgagggcaatctgcatctttcactcagttaagatcccatgg

SEQ ID NO: 415600 - DNA, 582 bp, Homo sapiens
ggactctgaggagattagtgagaaacttcagttggatktttaaaacactggagcaaatatgtcaactgctacctatcacaagagagataaaggtctgagtttgaatcctaccaaattagaagagcttggtaaaccccaggcttatcaatgaatcatttggaccaaaagtgatttcaagtctttacaattccaaagtgctatgccaataatttacatatctgcaaaaagaaaaactgtactctcagtggaagacaacagtctctataacatttccaatgatgaacataggagaaacaattactagacatcaaatacacaggaatatacagcctatgcttaagaaaaagaagtcaacaagaaattatcctaagaggatcccaatgtcacaactagcagaaaaagattttaaagcagctgttataaatataatgaaggattatataaatataatctttatcttacataagataaagataagataaaagatggttataataaatgaaaaagtgaatcttaaaaataaatcaaaactaaaatatctgaaaaatctaaaagtaaaaaatataatgtctaaaatgaaaa

SEQ ID NO: 415601 - DNA, 609 bp, Homo sapiens
aaaggggcatatagacaaatttacaaatatagttagaaattttaacastcctttctcagcgattgatagaacaactaggtaaaaaagtcttaatattataaaagatatgagcaacattacaatcttaacctaattaatatttataaaacagtacacataacaactgaagaatacacatcctttttaagggcacattcaatgttttttgaaatagatcatatattggattatgaaataagtctcaatgaatctcaagatggaaatcttacagaatacactttctgactttaaaggcaatcattagaaatccataagaatatgatgtttatttaaaaatccagatactcaagaattaacaagcttctaaaaaactcatttttcaaaaaagtacccacaagagaaatttaaaaataatttcaaccaactgataattaaaatacagcatttcaagaattataaaattcagctaaagcagtgcttaaggaaatgtatatctttaaatgattattagaacaaagtgaaagattttaagaatctaaatttttaccataataacctaggttaaagaagaaaaaaattatataggtataaaatatagggaatacaaat

SEQ ID NO: 415602 - DNA, 518 bp, Homo sapiens
taggtaaaaaagtcttaatattataaaagatatgagcaacattacaatcttaacctaattaatatttataaaacagtacacataacaactgaagaatacacatcctttttaagggcacattcaatgttttttgaaatagatcatatattggattatgaaataagtctcaatgaatctcaagatggaaatcttacagaatacactttctgaytttaaaggcaatcattagaaatccataagaatatgatgtttatttaaaaatccagatactcaagaattaacaagcttctaaaaaactcatttttcaaaaaagtacccacaagagaaatttaaaaataatttcaaccaactgataattaaaatacagcatttcaagaattataaaattcagctaaagcagtgcttaaggaaatgtatatctttaaatgattattagaacaaagtgaaagattttaagaatctaaatttttaccataataacctaggttaaagaagaaaaaaattatataggtataaaa

SEQ ID NO: 415603 - DNA, 566 bp, Homo sapiens
tgacagcaccatttcagtcatccagctttgaatggtttctgattctttcatattttctccaaatatttgaccagtcacaaatctgcaatggttgcattttagcatattcctcctgttgagtcagtttttccatgctaccctgtgtagcctccttccctcctgcaaggtttagaaaatcctaaaatcggcccccacactccccatcctcaggtgttctgctcgttgttgccactttaacgtttctttataacagttctaattatgttactcctcagctccaagcctttgcagtaggtcgagcatcctgcaaagcaggctctgagattagygtgcaggatgcttattagggatcagcaccatggacaggttggggagggcaggagagagtatggggaggagccaagatgcaacacaggctgacaccagccttggacggcctgcagggagctctgaatctaaaatggcccttcagagttgtctcctattgggctgagaaagccagacatttttatctccaccctggtcagtcactgatattcggtgaggagccctgcagctcaggcaat

SEQ ID NO: 415604 - DNA, 566 bp, Homo sapiens
tgacagcaccatttcagtcatccagctttgaatggtttctgattctttcatattttctccaaatatttgaccagtcacaaatctgcaatggttgcattttagcatattcctcctgttgagtcagtttttccatgctaccctgtgtagcctccttccctcctgcaaggtttagaaaatcctaaaatcggcccccacactccccatcctcaggtgttctgctcgttgttgccactttaacgtttctttataacagttctaattatgttactcctcagctccaagcctttgcagtaggtcgagcatcctgcaaagcaggctctgagattagtgtgcaggakgcttattagggatcagcaccatggacaggttggggagggcaggagagagtatggggaggagccaagatgcaacacaggctgacaccagccttggacggcctgcagggagctctgaatctaaaatggcccttcagagttgtctcctattgggctgagaaagccagacatttttatctccaccctggtcagtcactgatattcggtgaggagccctgcagctcaggcaat

SEQ ID NO: 415605 - DNA, 563 bp, Homo sapiens
cttgtgttcactaccattatcagccttgtcattttgccattgcattgaacagggggctctgtttcccatgctacaatgagtgctgatcaatctctagttccatgagtccttgatgccctrttcctctaacaagtccaaaagctcattgtatttagcctgacataactttgcatgttcagtagtatgcagtccaatgcttggcatagaggaaccaatgaacagtagttttctgaatgactaaatgtttaaataaatattatccaacaatgtgtcacaatatggctttctctcgttatgctattggcttggtagaaaataacccttgatgaattactgagaagctctaagaaggtgtgatggaatgtcacattttaagtttgtaatcttccatagcgttatacacttttattacaggcttcacgaaaacaactgtactttcagaaataaaatttgagcatatctaaatgagttccacctttgtcaggagggagcagatatggtccattataaaggtaagtttttcttgcagctatcctgtgtgccctgagacagtgaggatggaa

SEQ ID NO: 415606 - DNA, 598 bp, Homo sapiens
tttaaaaatcactttatcttgtgttttcaaacagccaaaaatatgagcaatttacaacttcttctcttctttagtggtggagattataaaatagctacaattaatgcgatcattagaaaagaaaaagaaaagaagacttacacagggccaaattatatcccaagcaggttttaagcrgcaagtaattagcacagggagattggtactcttatgtctttaattacagcttcagcaacctggggaagcaaaagcctctcaccgtgttccagggagccacagtggagattgccatcctgtgaattaggaagtgcttaagtgtaatgccagcctaatcccctgcattgtaaagtgggctggcagtgcagttttgctccatcattcaaaattacatgtgaggtaactttaaatgtgattcactgaaaaatctatattggtaaaagactttatgtaatgccagtatttatttgtaaagctgggagcactaacttttactagtccatgtactaagtcaaaaatattaaaacataaatagatgactttaaatagaccaaatactaaaaatcttacagaattgtcttgaaatggggtaacatgagga

SEQ ID NO: 415607 - DNA, 598 bp, Homo sapiens
tttaaaaatcactttatcttgtgttttcaaacagccaaaaatatgagcaatttacaacttcttctcttctttagtggtggagattataaaatagctacaattaatgcgatcattagaaaagaaaaagaaaagaagacttacacagggccaaattatatcccaagcaggttttaagcagcaagtaattagcacagggagattggtactcttatgtctttaattacagcttcagcaacctggggaagcaaaagcctctcaccgtgttccagggagccacagtggagattgccatcctgtgaattaggaagtgcttaagtgtaatgccagcctaatcccctgcattgtaaagtgggctggcagtgcagttttgctccatyattcaaaattacatgtgaggtaactttaaatgtgattcactgaaaaatctatattggtaaaagactttatgtaatgccagtatttatttgtaaagctgggagcactaacttttactagtccatgtactaagtcaaaaatattaaaacataaatagatgactttaaatagaccaaatactaaaaatcttacagaattgtcttgaaatggggtaacatgagga

SEQ ID NO: 415608 - DNA, 577 bp, Homo sapiens
aggttttaagcagcaagtaattagcacagggagattggtactcttatgtctttaattacagcttcagcaacctggggaagcaaaagcctctcaccgtgttccagggagccacagtggagattgccatcctgtgaattaggaagtgcttaagtgtaatgccagcctaatcccctgcattgtaaagtgggctggcagtgcagttttgctccatcattcaaaattacatgtgaggtaactttaaatgtgattcactgaaaaatctatattggtaaaagactttatgtaatgccagtatttatttgtaaagctgggagcactaacttttactagtccatgtactaagtcaaaaatattaaaacataaatagatgactttaaatagaccaaatactaaaaatcttacagaattgtcttgaaatggggtaacatgaggatgtatcaataaggcatatacacatatgcatatgtataamcctatatatatacacatacatatatacatgtatctatataaatgcgtaatagctataaaagatacattaatatgaaatccactttgctctaacctctttgtgctg

SEQ ID NO: 415609 - DNA, 592 bp, Homo sapiens
gacaatggtgggggttgtagttgcaaagatgaaaaataaacagttcccgttttctaaaaagccagaaatgcaacagaacatattttctgtaattctgggaccatgggtgactaacagtgtatttcagaggatgccaaaattatgtatcatttgtttgattgtgtatgagtgaatacagcatcactgaggctctccagtacctgcaatgctacatctcctggaacatgatgcagaggaaatcactgcacagaaggcgtcaaggatggtgatgctgttctaccacgaggaatagacacaaggtatacaatcagtgaaggtgtggaatggaagaagaatcaaaccattggttcagctggagctgtatggttcagcacggtagccactatccccgggtggctctggaatacttgaaatgtgcttagtcccagttgagatgtgctgtaggtataaaatgcataccggatatcaaagacagtaccaaaaaaacctcaaacatacgtcattartcttgttttgtttaaattctttaaattttctataacttcagggttataagtggttttggttacatggatgaattgtatagctatga

SEQ ID NO: 415610 - DNA, 659 bp, Homo sapiens
caattgccaccagagccattcaatgattacttgctctctgggctaccgtttcaggcacaaaaaatcagaggtagattcagtcttctatacacctacactgtattgttattaacccatccctggttaaggcatttaatatgggcatgtcttcattgcagattatactacagtcaactgcagtgcctatattgattaaatcctgggctaggatatttcctttgaatggttgtgtgactttgggcctgccactttacctatttggccttcaattcctaagatctgaaataagaaactatgaakaattgattttaaggcctcacgtccatctctgacattctgtctctaacctttggtcaatgtcttatgcccaagtaatgttctctaacataaagtacagtatcttccttgcatcaagagtcaaagaacaaaataaagactaggggttttatttcaaatcctgagtactcattgcttcttggagcatatttcctaattagtagaatgctgttaatgatatgtaatccatatgcatattgagggtgccaaatgaagtgacagtgtaatgtgcccagcacaacctcttgttcctttgtttaattattagttatcatcaacgtcgtcatcatcaccattgctttattgtaccaatcaacttaata

SEQ ID NO: 415611 - DNA, 583 bp, Homo sapiens
aatgattcttttgtaaagagaaagggatcagagaacacacaatgatttgagacaaagttctgtgctccaggtgtttaattttcagtctctttctctgtaacatgagtttcattttctccagctaatgaagttttagggaaaacaaaggcaattttattcctgtttggtaggtccagtttctagatagataagggaatttcagagaatagctctactctgtgtttgggggagacagaggattgagagatggggtctggggaaggtcagagagaacttgagactgtttctttagttcaacatgtcaaagtgccatattttgagtataatttttttragtcctaacagtggccaagggtgaaagacagataaattccagccagggaagaaaccaaaagatgattcaaggtggctaagaacagacacatacacacagactcaagtagtgtggcatttgcttacagcaagaggagagagcataagcacaagatctagtcccttgcaatgcacaggtcccccatggccagtggagtttgcatcaacacagcagtgtggctgtacacactccactgcatgctgcagtgga

SEQ ID NO: 415612 - DNA, 587 bp, Homo sapiens
aactcacatgtgataagagagcagataccaatattaagagagcacagatattggaattacctagcatgcaatcatgaaaattcttgaaacaaatggaaacacagtcatccgttgaaatccctaagaaattggtgccaggacctccctcaaataacaaaatctgcagatgctcaaatcccttacataatctggtatagtatttgcatataactatgggtatcttcccctatacattaaatcatctttaaattacttaaaatacttaatataatgtaaatgctatgtaagtcactgttatactgtattgtttaggaaataatggcaagaaaaaaatatgtgsctgttcagtagagatgtaatgtttaaaaatgtttttgagccatagttggttgaatctgtggataagcaacccacggacatggagggccaactgtatagaaagtttaagcaaataaatagaagatagaaagaagaaccaaatggaaagattagaacaaaaaaacacaataaccaaaataagtttaagtaaataaattaataattgatagaaaagaaaaaaataagaatgaagatggaggaatcaaact

SEQ ID NO: 415613 - DNA, 508 bp, Homo sapiens
ataagcaacccacggacatggagggccaactgtatagaaagtttaagcaaataaatagaagatagaaagaagaaccaaatggaaagattagaacwaaaaaacacaataaccaaaataagtttaagtaaataaattaataattgatagaaaagaaaaaaataagaatgaagatggaggaatcaaactacctgattttaagacttaccataaagctacaatgatcacactacaatgcagtattggcagaaagatcaaaaattagattactgtaacagaacagctcagaagtagaccacacgaatatgaacaatgatttttgacaaaggtgcacgctcaattggagaaaatatagtctttttttaagaaattgtgctaaacaattgaataggggtatgtacttaaatatatacctcaatgtacactttagcatcttataaaaaatttcactcaaaattaagtatggacctaaaggtaaaattcaaagatacagaatttgtagaagaaaacc

SEQ ID NO: 415614 - DNA, 508 bp, Homo sapiens
ataagcaacccacggacatggagggccaactgtatagaaagtttaagcaaataaatagaagatagaaagaagaaccaaatggaaagattagaacaaaaaaacacaataaccaaaataagtttaagtaaataaattaataattgatagaaaagaaaaaaataagaatgaagatggaggaatcaaactacctgattttaagacttaccataaagctacaatgatcacactacaatgcagtattggcagaaagatcaaaaattagattactgtaacagaacagctcagaagtagaccacacgaatatgaacaatgatttttgacaaaggtgcacgctcaattggagaaaatatagtctttttttaagaaattgygctaaacaattgaataggggtatgtacttaaatatatacctcaatgtacactttagcatcttataaaaaatttcactcaaaattaagtatggacctaaaggtaaaattcaaagatacagaatttgtagaagaaaacc

SEQ ID NO: 415615 - DNA, 580 bp, Homo sapiens
ctggggtggggctcagcatctgtgttttaaggagccctccaggggattctgatgcttgctggagttaaagagcctttggtttagccagaggagttagtatgaatctagaagttcaaaccagatcaagtttagagatctaatgtaccatttaaggactcaagttaataaaattatgctgtattgggaattttgttaaataagtggattttagcctttcttgttaccaaaaaagtaaccatgtgrgatgatagatatgtccatctgcttcactataataacattttcctatctatatgtataaaaataacatcacatggtaaacctcaaatatgcacaataaacgttattttaaaaaacaaaaaggaattaaagaggaaacaatgtttttagaaatcactgttttgcaggctgtcttacccctaatatctgtaaacttgggaagatgcaactgtgctgaaaaggccttgtgacccccttgctctggatggtcaagctagggaagtgaagacagtatcggcaagggaagaagcaaaagcttctgcagctcccgtggagtaagggaatcgagggtccacagact

SEQ ID NO: 415616 - DNA, 580 bp, Homo sapiens
ctggggtggggctcagcatctgtgttttaaggagccctccaggggattctgatgcttgctggagttaaagagcctttggtttagccagaggagttagtatgaatctagaagttcaaaccagatcaagtttagagatctaatgtaccatttaaggactcaagttaataaaattatgctgtattgggaattttgttaaataagtggattttagcctttcttgttaccaaaaaagtaaccatgtgagatgatagatatgtccatctgcttcactataataacattttcctatctatatgtataaaaataacatcacatggtaaacctcaaatatgcacaataaacgttattttaaaaaacaaaaaggaattaaagaggaaacaatgtttttagaaatcactgttttgcaggctgtcttacccctaatatctgtaaacttgggaagatgcaactgtgctgaaaaggccytgtgacccccttgctctggatggtcaagctagggaagtgaagacagtatcggcaagggaagaagcaaaagcttctgcagctcccgtggagtaagggaatcgagggtccacagact

SEQ ID NO: 415617 - DNA, 508 bp, Homo sapiens
ataagcaacccacggacatggagggccaactgtatagaaagtttaagcaaataaatagaagatagaaagaagaaccaaatggaaagattagaacaaaaaaacacaataaccaaaataagtttaagtaaataaattaataattgatagaaaagaaaaaaataagaatgaagatggaggaatcaaactacctgattttaagacttaccataaagctacaatgatcacactacaatgcagtattggcagaaagatcaaaaattagattactgtaacagaacagctcagaagtagaccacacgaatatgaacaatgatttttgacaaaggtgcacgctcaattggagaaaatatagtctttttttaagaaattgtgctaaacaattgaataggggtatgtacttaaatatatacctcaatgtacactttagcatcttataaaaaatttcactcaaaattragtatggacctaaaggtaaaattcaaagatacagaatttgtagaagaaaacc

SEQ ID NO: 415618 - DNA, 579 bp, Homo sapiens
tttcacaaatacttattgagcacttgttatctgtctcactattggaagtttaacaaataatcattattacatttaatcctcaaactaaatttgtaaaaaagcttactattacttgattgtttttcaaaatgcattcagggaggttatgtaactatcctccaatattctatgggagaatgaggcttaaaacccacggctttaaatgttttttttttccccactaccctactttgcttcagggataggaataatggcactaaataaaagtaaaaaaaatattatctggaaaaataataagatttggtcagagctctatttctgttacatccataagtaacaactttagatgaaaaaatggctataatmggtaagttttgaccatacttctataaaccaggcacatcttcatgatattaacacatgaataaatgctgggaattggaggggcctctttgcttaggatggatagcatctttaagtcctagatgaatataaatatgctttgtgttcagtatttagaagacagagacacaatagcatttctcatattaaaaagaaacagataattagaagcactta

SEQ ID NO: 415619 - DNA, 516 bp, Homo sapiens
gtgcacttaaggagaagggggatgattgtcaatagcaaatacttcagccaagtcaaggcagatgaaaagctgagaaaagtcctatgactaagaattactggttatctgcttaaaaatctgaactccattacactttttttctaacatctcccccgtttcccccgctacaagtgcaggctgtctttccacacccatgttgcgtttctgaagctcagtgcgggtcactcaaaggcagtgccctgccaagcctctcagtgaatcaggaaataccacaactctggctcctggtttcccacactcgctgccactaagcattgcaggatacgatggcaacgttgttggtgaaattttaaggcaagttgattgacaattttttgcatartaatttatccacctcaactcattttcaactcccctaacctagttggtgttaaagaaaattcctagctcagtaattcattctgttacaatgttaccttgcaggtcttatcctagattattttggaaatgaaccat

SEQ ID NO: 415620 - DNA, 586 bp, Homo sapiens
ccctgtgcttgcctcgccctttccagctttctcattccctgttgtccttttaggttccattggttttcaaatcagcatattgtcagtctccaccctctgagttgcatgctccatcataataaggacatatatgtatatttttgcccctaataaactccagtatctagaacagtttaggatccaaaagagttgttcaattctttgttgaacaaagrtagtactcttttacacatttatgtttcaaggtttcataggtaaatactgtcagtgctattgtgcaatagatattcttttatgttttcttttataaaagcataaccccaagcctttaaatccatcaacattgctatgcatgaatttaatttgttgctttaaattgtagcatgatgttttgtatcatgtaaacattacaattttctttttgtctattttcttacggatgaacactttggttgcctccaacttgagatactgcaaatattgaagccaaaagttgtcctatgaatgttacattggaggccagtgaatttctctgcatttatcagtttgatcagtgcagattgatatcttggttttctttgaaatt

SEQ ID NO: 415621 - DNA, 570 bp, Homo sapiens
tcttaggagggtccccacactttcatcagttttgctcttctagccctgccaggttctcacagtgagggcgggagaaaaatcccctgatgcttttggcagggtgagatgagaggagctattttgaagtatgcccagagcattctgattttcttaacaaggcctgcatccaactatatcaaaattgctctaaatgtcagtagtctaaatatacaggttaaaagacagagattgttagaatgatttttttaaagttccaactatatgttttctgtgaaattctcactttaaatataaaaacttggatagattaaaaatgaagaattggagaaaggtataccatgttaatactagttaaaagagacctggagaagctatactaactttagacagagcagacttcagagtaagtaaaactgccaggcatataaaggtatatgaaggtatataaaggtatataaaggtaacgactgaggagttgattctatcakaacatatacggatttaacagaacattgaaagacgtgagcaagagcattggtagaagtgcaaggagaaattgatgaatccact

SEQ ID NO: 415622 - DNA, 601 bp, Homo sapiens
tgtgaatgcatgatcttactaaaatttatttaaccattcttctaggacaccaaatagaaagcacttggtgtgacaggagagagagaatggaagcttacattgaatgatccagtggggatataaagaagtgaataatatttgagaaatatagtctttttgtgagcctgagtttcgtcactttcttccaatagtttgcatacatttttaatggtttccagttttgaaatattttattaaatttttaataaggcttattttaaagtagaattaaaccagttattactagtgggaagaaagtttgyagactagttatatttatcttttctagggttttactgatggatattaaaattataaaacaaatatgtatctttgattgtctagaactacaatcaccttaataattaagtcatcatctgtatgttactgactttgctacatatttcaaagcaatattaaataatgttgacaataagtgtccttgtttgtggtttgatttctcttgacattgctctggtattttgtaagaaattgtcacccttgatgctgcatgttaaagttgtaataatatttagaggtaacttttcttcttttgcaaatt

SEQ ID NO: 415623 - DNA, 502 bp, Homo sapiens
tgttgacaataagtgtccttgtttgtggtttgatttctcttgacattgctctggtattttgtaagaaattgtcacccttgatgctgcatgttaaagtygtaataatatttagaggtaacttttcttcttttgcaaattaacatacttatgaagacatacagaaaacacaaagctaggaactaatagtaaggtttgatcaaatatcagaatttagctccttgaaaaactgtccacttttccaaaaacaatttacttcataagactccttttcagatcttaccgggctgtgcacacaaccctatacactgttttgttgtgaactttacccaatctcagtatcccatcttgaaagatcagcatttaaaaccacttgagcaaagaggctaaaatggtctaattatcctttcctagtcacatcacagaagatgacttgagtagccaaatctgtggtgaagtaattttctgctttctttatgaagtaattaaacatatataacaatgg

SEQ ID NO: 415624 - DNA, 574 bp, Homo sapiens
taacatctttgaagaaggcttcaagaatatattagagatcctcctaggaagatgtcttaggaaaacggttttctttggaaaataattttgatcagtcacttttaaaaagatgatgaaaccctgaggtttcactaaacaaaaaaatcaaaaatacataatgtttacatattatctttaacacaaatagaaataatatgtaaacatatgcaagagaacaggggaacaaatattttattatttgaaaggcaataagggggaataagcaagaggaaatgaaaaagagaagatggtggaaaactagaaaaataaagacagaacaagacctggttagawggagaggatgtaaatttcatggaaaataatgtctgagaaacattttacaaacagctagtgtctacacttccatttaaatgtttgcatggatgaatgtaacctagcttccacctttcttctgaaacattccctcaaaatttactcaaatctatttagttaaataattggtgattattaccattttggtacatttgtatctatttttcccatgctgtatttacacaattatacttagggtata

SEQ ID NO: 415625 - DNA, 561 bp, Homo sapiens
tctaagttgaaaatctgattggaaaagatcctcatgggggtgcattcaagcctgtcagtctgcagaccaatcattgctcatctagcctcctggacatgttgtcttctcctgtggaactcctcttcagggtagtaacaggtgtcaggcctccgagcccaagctaagccatcatatcccttgtgacctgcacatatacatccagatggcctgaagcaagtgaasaatcacaaaagaagtgaaaatggccggttcctgacttaattgatgacattaccttgtgaaattccttctcctggctcagaagttcccccactgagcaccttgttacccccacccttgcccaccagagaacaacctcctttcactgtaattttccactacctacccaaatcctataaagaggccccagccctatctccctttgctgactgtgtttttggactcagcccacctgcacccaggtgaaataaacagccttgttgctcacacaaagcctgtttggtggtctcttcacacagatgcgtgtgacaacagggacttccatggtacatggacctggca

SEQ ID NO: 415626 - DNA, 520 bp, Homo sapiens
tacatggacctggcatctgaaatgtgagttgatttattatcctggataaataaactaaaaataagaaaatattttgaagctgataaaagttgaaggagaacgccatcactttacagctaaaaaaggtaaagatactttcattctttttgttttcagagacctggggctgaggaacagaaaacaaacacatttttataatctaacactgaaagaaagaacatagagggagatatttgcttttggagcccatttttcaaaaatttttgtttttccccatcctagaaaagaaagtctctgataaagaaaagctaaaagttcctyggctacaatgacatattggttattaaactgaatatcatcaatatttaattatctctgtaaacacaagaagagaaaatgcaaaactatcagttcatttatttgggtagttttactttttgccaaaacaattcacaaaagttatatttagggtttattaagaatggacaacatttgctaagattctgaggcttagaaaagc

SEQ ID NO: 415627 - DNA, 494 bp, Homo sapiens
ctccacagccatcacttgatagtgtgcaaaagtggagcccgtactgttgcccatctctctccagtaggcaaggggaatgcccaggcaggactggtatgggcagagactccagcatctcagtcataagcccagcatacaccgtagggtagctcgattatgtgggtttctgtcctggctctaccttttattcactgtgttattttaaatcaattattttattcttctttgcctcagcttcctcatctataaaatggggataaaaatagtatctaccttacacgtaaagtactyagaacattacctggccattactgcatactcaaaaaaagttaacttttactattatgatcatttttctttttttgaggtggaatcttgctctgtctccctggctggagtgcagtggcatgatcttggctcactgcaacctctgcctcctgagttcaagcaattcgcctgcctcagcctcctgagtagctgggattacaggcgca

SEQ ID NO: 415628 - DNA, 494 bp, Homo sapiens
ctccacagccatcacttgatagtgtgcaaaagtggagcccgtactgttgcccatctctctccagtaggcaaggggaatgcccaggcaggactggtatgggcagagactccagcatctcagtcataagcccagcatacaccgtagggtagctcgattatgtgggtttctgtcctggctctaccttttattcactgtgttattttaaatcaattattttattcttctttgcctcagcttcctcatctataaaatggggataaaaatagtatctaccttacacgtaaagtactcagaacattacctggccattactgcatactyaaaaaaagttaacttttactattatgatcatttttctttttttgaggtggaatcttgctctgtctccctggctggagtgcagtggcatgatcttggctcactgcaacctctgcctcctgagttcaagcaattcgcctgcctcagcctcctgagtagctgggattacaggcgca

SEQ ID NO: 415629 - DNA, 596 bp, Homo sapiens
gacgttcctttgttaaaataatattttccatgttgcttgtggagaactggtgactatattacagtggatgcctgtctagccaatttgataaatttagcagtagttgtttatttaattgaaaaaaagcttattaaaatacggaatgaaaaagttattagcataacttagacactttatcttaacttgaaaataygagtgggcatttacatgaatatttggtgaagggataagactttgtaaaagttactattacaagtcctattcttgctgtcagcatactcattgtccccaatttttttttttttttttgagatggagtctcactctgtcacccaggctggaatgcagtggtgtgatctcggctcactgaaacctctgcctcccgggttcaagtgattctcctacctcagcctccccagtagctgggactacaggcgcacaccaccatgcccagctaatttttgcgttattagtatagacagggtttcattatattggccaggctggtctcaaactcctgacttcgtgatccacccaccttggcctcccaaagtgctggaattacaggcataagccaccatgcctggcctgtcacc

SEQ ID NO: 415630 - DNA, 407 bp, Homo sapiens
aactttttaacaaatgaaaagcaattgatgaagcttctccgcaaacaaagcaaacataatgccaaatgctgaatccatcacttagaaacagaagaaagtaatagccaatgattatgcatcaatatagctcagctgcttttttcagtagggtccctgggatctaacctgcaaggtgtgtgcttctcgtatgactttgtcttgagaacatggaataaataagtctagatgtgcatttcagggcycacgtaatacaagatattacttcaagttcacatttgctgctgcacaattatgttcaaataggacttcctaggtaagatgttctccaacacagcacacattgaactgaggagagaaaggtaaatatgttggatgcaggccaggaactgtcataaagctgatggctc

SEQ ID NO: 415631 - DNA, 331 bp, Homo sapiens
gtcctctcttcttctgtaactaggctgctcagcatggctggacagaatacttagcaccactatcaggccatggtctctgagctcatctgagctgtcgatactcttatcatatcattttacctgattctgctcatacctatttctttctgctacaatgactaattcaaatccacttttytctctctcaatataaaactaggcttccaaatttgctaagaaaaatcaagactattagtgtaatttcctaatcttctattcctatttctaaaagtgattcatattggcacattttcactttcctgtaatctattgagaaaaagtgtgttgtatt

SEQ ID NO: 415632 - DNA, 570 bp, Homo sapiens
agggaacaaaagaaagagggaaccaaggaaactccttctgacattcccccggatagtgcactggggagaatgctgcaggtttggagggacaacacttgaaccagcgacaaagaaaagcraaagataacaaagttttgctattttatctggcccaaagacccatttgtaaaccctcggttttttggcctaagtgtgactcagaagaggattgggtgggccaagctttaattctctatgtgaatgataaaatcccattctcacaagaagagataggttatgctctctgttggaccagggaattagcccccatatttcccctcaaagaagaagaaaagaaacataatacatagccttgcccaataaaaaggcctgggatctgctaacatgcttcccccttccatacagctcacaaaataaggaacaggaagaaacaggaagaaacaggggaaacagggaggccagagggagagaaatctggaggtcatgaaggaactaaacccactggtcccctaaatccttagccgaacttgaggaaagaattagaaaaatgtagcagggacattgagaatt

SEQ ID NO: 415633 - DNA, 586 bp, Homo sapiens
tgagggtgggaaccaaaggcaatgaaatgacatttttagtcgacagtggagcagcatgctcctttctaatataccaacccaggggcacagaactctctaaggaaaagttaacaatatcaggtatgaagagggagggatttcaggttccgatagtcaataaaatgttaaytaggttgggatcaaaacaaaggaaggagtcactctcatgtgttcccaaagcaggaactaacctcctgggttgaaacctgattgttggactgggtttagaattaggagtaggggagggacaaataaaaataatgatgggcctcctaacagagaaggaagaaagtaaaagtaatccccttgtgtgggttaaggaagacaacagggaaggattaaaaatcacacccttacagattgaactaaaacaaccagaagaaatagtttgcagaaaacaatatcccatacctgttgaagaaagaaaaagtcttcaactggtaacagagggattaactaaagctggaatatcagaaccctgcatgttaccatgcaacaagtccagttctcccagtcaagaaactcaatggatcatatagattagtgc

SEQ ID NO: 415634 - DNA, 552 bp, Homo sapiens
tctctgtcgtctagtcccacttttaaagggtttatgtaactacgtcagcaccccacccccagcccagtaatacgggaagggggcagggaagtgctgggtagagaaggttggggtccctggcgagggctgcaccctagggcctgtgaccaaggacctaagtaagaacaggcactcctgttttttatgcctgaatgttgcattttccaagaccaccctggcccgccactccccccattcctgtgcccatataaacccaagaccttagcaggcacacacacaagtggctgaatgtcacgtggagcagaggaacccagtgacagacagcagccaggaggggcggsggggtatggcagagaaggagggaagaggagtctgaacgttgagaggagttcggccaagaacagctgaactccaggagaagattatctcccccactcccccaccttctggatccccatccatctcactgagagccagcactcaataaaaccttgcactcatcctttgagcctgcatgagatccgattctgggacactgggcaagaggtcagg

SEQ ID NO: 415635 - DNA, 617 bp, Homo sapiens
caccttaattaagccattacacatttttaaacaatagagaatgaaagccaagttaataaaaaatcttaatggccataactattaaccatcttaaaagtaattgtttctatgttctctgtcttcaaattctaactataaagttgaaaactcagaaaatatttatgaaataacaacttttttatcttaaaatgcattaacccaagggctgccagtgttccatttgctactcatggcagatgtttcagatggacccatcaaaattaaagtatacagaatgatggaacacagaacccaggaaaaaccctggatatgaggaccttcaatcagtgaatayaataaatttaatatatgaggagtttattttccaggaaaagtggcaggaaattctatacaaccagaccttgaaatggaaacagaaatttcatcaaactagtttcccagtgatagagttacatatttgtgtaaatatcaacagcaagcattatatccccaaaatttgtttaaatttataaaattgacataaatattaacaatatttaactctttgtgatttaacttgtgttataaaaaatgctatacaatgttttcaagttcattacaaacttagattgccagtt

SEQ ID NO: 415636 - DNA, 234 bp, Homo sapiens
gattataaaatgtccctttgctgtttgaattatcacagactgtcaaaagtcaatgaccacttgccaaaacactccagtaaagaactgccatcagccatttytaagagctcaaagaaacaagtcataggaaaaaaaaaaactgtcagaaagcgtaacttttcagaacaatctattatttaactatgcctctccattttaactatcatactgaactccaataacatagcattaaag

SEQ ID NO: 415637 - DNA, 630 bp, Homo sapiens
tctgttttgtatgttcttgccctgtttaaagttaatattttctagccagatacatgtattttgtgtttgtttgttttaaatattaataagggatatcttctctgtatttcactgaattgaagaaaaataattgaaggaagaaaggaaggaaggacaaaaggaagaaaagaagaaaggaaaaagtttcatgttgataagggaaaacaaacacacaactatatctacaaagtaaattttgaaatctcctgtactaatttcgtaaaggccttgcactttccaaatctccttttcattctctgagtgtgacacaaaatgcccatgatgtcatggaatgtaccctcgggcatctgaagatgctgttacatctggattgattattcacatcataatacagtcagggactatcttagttcatttgggccactttaacaaagtgccatagactgggtggcttataaacaacagaaattcatttatyacagttccggaagcccaaaatcagacgccagcattgttgggttctagtgagggttttcttctaggttgcaacctgccatcttctcgtatcctcacatggcagaaagagagggagagagctccctggagtctcctttataagggcactaatcc

SEQ ID NO: 415638 - DNA, 560 bp, Homo sapiens
ccatgttgctccttccaacctttctcccctttccattttgtgctctgtggtgtcaacagtgagaattatctggaacaattccagccactactgatgaaggacaatggtgtacacacctggatgctctgccagatgaggagctgcaactttttacacatttaycctaacaagttttctatgaaaatagaacgaattgaataattttctgcttaagccatagatacactgagtttctgagaggaggcaaaggttcttgtattgattaaggagggcgttttgggggcattctgaggtcaaggattggagtgggcgggtgaagtatctttccttagcctaaggagtggaatgcctaggagtttcagatagttttattttctatgccagcaagtgacaatggcttgacatttttattggatgaatcaccttttaagtaagtgatagatattggaatgcctcaagtgatagaataaggatatgttttctcaattataaaagtaactcaaattcataaatatgatcgagatatcttcagtttttaaaaactgtttttggcggatgac

SEQ ID NO: 415639 - DNA, 560 bp, Homo sapiens
ccatgttgctccttccaacctttctcccctttccattttgtgctctgtggtgtcaacagtgagaattatctggaacaattccagccactactgatgaaggacaatggtgtacacacctggatgctctgccagatgaggagctgcaactttttacacatttatcctaacaagttttctatgaaaatagaaygaattgaataattttctgcttaagccatagatacactgagtttctgagaggaggcaaaggttcttgtattgattaaggagggcgttttgggggcattctgaggtcaaggattggagtgggcgggtgaagtatctttccttagcctaaggagtggaatgcctaggagtttcagatagttttattttctatgccagcaagtgacaatggcttgacatttttattggatgaatcaccttttaagtaagtgatagatattggaatgcctcaagtgatagaataaggatatgttttctcaattataaaagtaactcaaattcataaatatgatcgagatatcttcagtttttaaaaactgtttttggcggatgac

SEQ ID NO: 415640 - DNA, 547 bp, Homo sapiens
aaacaattttcattaataacatccaagacacaaaaacaattgtgattaagaatataatgttgtgaaataaccaatttcaattttcctatctaccctaccctttttttgttttacaaaaaattgtgtaaaatatattaagtgacyttttattttattgtgtgtattaactactaaccttttaaaataaagccttaccacttaaaaaaattagccaaacaaaagttttttgtgttcctacaactcaatggctctcaaactacttttgaacagtagcatgttaacttcaagtgaaattttatttttaaaaaacccatatatgaaactgaataatatgaaagtgctctagatgaaaagggaacaaggaagtcagagtcttacctactaagtctcttctttgggcagaactcaagacattttgccaagcacagtttgaaaaccactgcttttgctcattataagaaaatttttcttcatttgaagccatgcaagtccaatcagtgtgtacactacactattgatggttgtaatggacagatgcctactaggc

SEQ ID NO: 415641 - DNA, 547 bp, Homo sapiens
aaacaattttcattaataacatccaagacacaaaaacaattgtgattaagaatataatgttgtgaaataaccaatttcaattttcctatctaccctaccctttttttgttttacaaaaaattgtgtaaaatatattaagtgactttttattttattgtgtgtattaactmctaaccttttaaaataaagccttaccacttaaaaaaattagccaaacaaaagttttttgtgttcctacaactcaatggctctcaaactacttttgaacagtagcatgttaacttcaagtgaaattttatttttaaaaaacccatatatgaaactgaataatatgaaagtgctctagatgaaaagggaacaaggaagtcagagtcttacctactaagtctcttctttgggcagaactcaagacattttgccaagcacagtttgaaaaccactgcttttgctcattataagaaaatttttcttcatttgaagccatgcaagtccaatcagtgtgtacactacactattgatggttgtaatggacagatgcctactaggc

SEQ ID NO: 415642 - DNA, 592 bp, Homo sapiens
gaccaacatcaggaatggaaaagctaacagcactatggactcaacagagtgtaaaaagaataattagggaatattatgaagaattttatgcaaataaatttgacaacttagatgacatagatgaattccttgaaagacacagactatgaaagctaatttaagaagaaataaacaacctaaataattctatatcaattaaataawttgaaattgaaattaaaacttttccacaaagaaaattccaggctcagatggcttctttggtaaatctgaccaaatatttaaggaagaaataatactaattttacaaaagtttgcagaggaattactggggaataaatacttcccaactcatagcaggccagcgttatgttgataccaaaaccaaagatgttgtaagaaaagaaatgtacacaccaatatccctcatgaaacttaatgcagaagtgcttaacaaaagtttagcaaattgcatgtgacattacataaataggataatagttcataacaagtgggtttactccaggaatacaaggtagttttaacaatagaaaaccatcaatataattcatattaacagactaaaatgaaa

SEQ ID NO: 415643 - DNA, 592 bp, Homo sapiens
gaccaacatcaggaatggaaaagctaacagcactatggactcaacagagtgtaaaaagaataattagggaatattatgaagaattttatgcaaataaatttgacaacttagatgacatagatgaattccttgaaagacacagactatgaaagctaatttaagaagaaataaacaacctaaataattctatatcaattaaataatttgaaattgaaattaaaacttttccacaaagaaaattccaggctcagatggcttctytggtaaatctgaccaaatatttaaggaagaaataatactaattttacaaaagtttgcagaggaattactggggaataaatacttcccaactcatagcaggccagcgttatgttgataccaaaaccaaagatgttgtaagaaaagaaatgtacacaccaatatccctcatgaaacttaatgcagaagtgcttaacaaaagtttagcaaattgcatgtgacattacataaataggataatagttcataacaagtgggtttactccaggaatacaaggtagttttaacaatagaaaaccatcaatataattcatattaacagactaaaatgaaa

SEQ ID NO: 415644 - DNA, 578 bp, Homo sapiens
ggtttcaatatgagttttagtggggaaaaaccatattcaaacatagcaaataactaaatgtaaaatctaaaactgtaaaagtyttagaagaaaatatgaaaatagcatcaaaacattggatttgtcactgatttcttggataagacatgaaagatgctggctgggtattgtggctcatacatactcccaaagtggctcagcactttgggaggttgaaacattgaagattgcttgagcccaggagttcaaaccagcctgagcaatgagtaagaccctatctctacaaaaatatttgtttaaaaaattagctggacatggtggtgcattcctataatcctagctactcaggaggctgagacaagaggattgtgcttgaggccaagtgttcgaggcttcagtgggctgtgattgcaccactgtactccaacctgggtgacagagagtgatcccatctcaaaaaaaaaaaaaaaaaaaaaaaagaaaaagaaaaagaaaaagaaagaaaagaaaagaaaaacagccaacaacaacaaaataaacaaattggacttcatgaacatttaaaaattttgcaagca

SEQ ID NO: 415645 - DNA, 578 bp, Homo sapiens
ggtttcaatatgagttttagtggggaaaaaccatattcaaacatagcaaataactaaatgtaaaatctaaaactgtaaaagtcttagaagaaaatatgaaaatagcatcaaaacattggatttgtcactgatttyttggataagacatgaaagatgctggctgggtattgtggctcatacatactcccaaagtggctcagcactttgggaggttgaaacattgaagattgcttgagcccaggagttcaaaccagcctgagcaatgagtaagaccctatctctacaaaaatatttgtttaaaaaattagctggacatggtggtgcattcctataatcctagctactcaggaggctgagacaagaggattgtgcttgaggccaagtgttcgaggcttcagtgggctgtgattgcaccactgtactccaacctgggtgacagagagtgatcccatctcaaaaaaaaaaaaaaaaaaaaaaaagaaaaagaaaaagaaaaagaaagaaaagaaaagaaaaacagccaacaacaacaaaataaacaaattggacttcatgaacatttaaaaattttgcaagca

SEQ ID NO: 415646 - DNA, 590 bp, Homo sapiens
attcagcatctgatcctcagcactgtatatctaagaactcattctccttggttcatcaggcatgatcagattaaggattcatacacactgacctaactcacaggagagagttataaatcagaacaccaatttattgccttgttcatggaaatagaaacactacatgtgtcagcttactcagatcagcagctaaacactgttcrgtgttgattgggaaatataaagccagaatgaaggcagctggttcatcttgatagcaaatgttaccaaatctcatagtctggtgccctaatctccatgggattagaacatgtacatcgaccagagaggttctctttctcctgactatgctgggacattctggcaaattctgactcatcactccctttctagaatccttaaagaccatcatcacgctatttcaagaatattccttcagatgtgttacaaagattaaatgttgatttatggtatctctaaagatttggattgtagtctcatcagaaatatttatttataagccatctcttcattcactcgttgattcatccagaaatgctattcagtatttattaagtgccaggcgttgt

SEQ ID NO: 415647 - DNA, 367 bp, Homo sapiens
attggggtgaggatgtcaatgtttcttcctgtagtttaaacacaatgaagcggggataactctggagggaaagcacttaaggtgagtgaagtgtattgtcagctctgggttagagtatttggaagctagatacaaaataccaaatttatgaaagtaattgagtgatgtctaaactgagaaataatagctataaagctgtttccattcgttgagagcacagatttatttctgtaaattgaaaagactggaaatagccaaagggattgttaggctaatggtatcctccactgagttttctggggaagattctcagcrgtgccatttcccttagaatgttaccaagcctaaaggaatgaggacagtggaa

SEQ ID NO: 415648 - DNA, 530 bp, Homo sapiens
aactgaagtaaagcccatgcttgttatacaactgcaaagaatagggccgaattgkgtttatggctgagggctttatggaaggtgacatttaagagcaatgaggccaggcacagtggctcacacctataatcccagtactttgggaggccgaggcaagtggatcacttgaggtcagaagtttgagaccagcctggccaatatggtgaaaccctgtctctactgaaaaaacaaacaaacaaataaacaaaaataagctgggcatggtgacacatgcctgtagtcccagctactcaggaggctgaggcaggagaattgcttgagcccaggaggtggaaattgcagtgagccgagattgcaccactgcactcctgcctgggcaacagagcaagactccatctcaaaaaaaaaaaaaaaaaaaagagcaatgaactaggatatctaaagaaatttctaaacaaaatattgtagaagctataaggctactttaaactgcatacagtaagatgcaagaggaaagaaatgactcagag

SEQ ID NO: 415649 - DNA, 496 bp, Homo sapiens
tttgcaggtatctgggttaggatatcaacatatcttttgggggacacagttcaatccatataaaggccttttgctcctgcctttcatctacctggagatgcagcaacatcttgtgactatgaggctacaaacatgaggaaacaagtttacaactaaagctggtggaaaggaaagctagggaaaaagaaggagtctgacagcattactacacagttgaactactgccagcaaccactcacctcyagacctcttgctaggtaagaaaaataactccaggttacttaacctctgccaggtttctttcacctgtagccaaaaacattccaatgcagacacaaaactttccctagttcataataaaattagaaaaataagtaaggtaataaaattttcatagatctggattcattaaatttaaaggactaatctttgttctgaaattatgttattcccacttttaaaaaattaaaatatcctttcttttatgaaatgacgg

SEQ ID NO: 415650 - DNA, 539 bp, Homo sapiens
ttgaaacatgagatagggccagaatagcaatagtagctgtctacatagagcataataagttcttgaaagcaagaaaatcagttgaaaatctgttgatctcaactttattttaagtttaaagagtataagtgtgattatcatttgcattattacagctcttctgttctctggtcttgggatgattacagagattgtccttttattctcacagtgcacagactagctgaaatctacagaactagaaagatttgcaattcatttatagaattgctagaactaaataatggcagatttttcaaagttatgtaatagactactctggattataaaatactaaagctatcagttgggttctgccttgattctattaaatttcccrgtaatgactgtactaaaactcatggggaactgcaagataactttattgatggccatagaggatgaaaacaatgcataaggtatggaattaattttaagccacacactgaatagacagtgatgtaaagtaaaatgatatttttcaaggaaagacaattatg

SEQ ID NO: 415651 - DNA, 532 bp, Homo sapiens
cagacacagactcctcttctctctccagtgaatgacgtcagtcccattgctacttcaggaaaagtaacttaaggcaagttctttatagttgagaggtcactttaatctattaagkattctattgtgatgggtatcacatgttcattgcagtattttcttaatgtgcaacagggatgtgggcaaataaattcgggtacatccatctggtatgatatacattcttactgaaataatgtggcaggggactatctggtgacaaagcaaaaaaattacaaaatggtatggttccagtttttgtaaaagaaaaaatatatatgtatgttaattatatggtatgcatagataatcaaatgaaaaattatgtacctgtgccataacagtgtttcttttaacatatttcttctttttccttatctgtacatcctattattctagagtcctttgtgagaagaaaaagtacaatgaaaacttaatagtttttaaagtcatgtgcatcaatgtttctgcttaatttggttcctacttcagaatc

SEQ ID NO: 415652 - DNA, 450 bp, Homo sapiens
tggcatgtaaacacagccttctaatctagacctttgctattaaaatggtcataaatagctgcgaattactactgttgtgcaactcktgacttcatcatggcttctggcagtgcagatgggagccacattccaggccctgctgcagtgcgcatctttcccgtaacatttaatgagcacagggtgattggtgctgcacagatgacaaaatggcatcctccttgccctgttctcttccaagataagacatttttaaaaggccataaagccttgaaagtctccccacacagatattgcgtgacctataaatatgcatctgctcaaaatatggcaaaatgcatcactattaataactccaaagagtcatggagattcagacagtccaattcctctgccaaaagttcagaatgtttgcttagtgctttgattttttttttaaaactctgttcttgg

SEQ ID NO: 415653 - DNA, 545 bp, Homo sapiens
ggttctgtgggcagtaggggacatatcaaaggtttttaaggagaggagtgacatgacaaggtttatagaaaaaaaatatatactccaagtccgtgggggatgaattagagggaggaggtggtggggcagaaagacaagttartacaggagccagaagatgaatgcttaaaataaaacaattacatagaaaatgagagaaaagatgatttggaaagtaaagaattagaattgacaggacttgatatgagaacatctctattcttagtttggattctctcagatgctaaccctgagataaggacatgagtggatgaagcacagaaaatgctggaagggaagtgggagaggggcgaggtgggggcaatggggctagtggtgccttgcttcctaatgaccacagcaaaactcaagggaacctgggaagatgtgcagaatatgatcctcagaattctccctcttggggagtgagggaacttcaccttcaagtggagtgacggagaggggaaagttgtgctgatttgaagagtgaatgggaagcccgaaaa

SEQ ID NO: 415654 - DNA, 516 bp, Homo sapiens
ttttgttgtttattaactgtgatgctaatttaattttgcaaatatattttaaatgctttacagttcttatgcacctctctgctttaaaattcttattgtctctttttcaaaaatttaaaactgtggaagttgatatgacttcctgccaaagtttcacagcaattttttaaaaatatctttctgaggattcttctactttacaacttagaagtcttctctttktctaagccttctacaagatgttttcttttccttgtcctgcagtattctgaattcctgtttacgtatatatttatatttatatatttattttctgggggggatggagtctcgctgtgtccccaggctggagtgcagtggtgtgatcttggctcactgcaacctctgcctcctgggttcccggattctcctgcctcagcctcccaagtagctgggactacaggcgcgtgccaccatacctggctaatttttttgtacttttagtagagatggggtttcactgtgttagccaggatg

SEQ ID NO: 415655 - DNA, 516 bp, Homo sapiens
ttttgttgtttattaactgtgatgctaatttaattttgcaaatatattttaaatgctttacagttcttatgcacctctctgctttaaaattcttattgtctctttttcaaaaatttaaaactgtggaagttgatatgacttcctgccaaagtttcacagcaattttttaaaaatatctttctgaggattcttctactttacaacttagaagtcttctctttgtctaagccttctacaagatgttttcttttccttgtcctgcagtattctgaattcctgtttacgtatatatttatatttatatatttattttctkggggggatggagtctcgctgtgtccccaggctggagtgcagtggtgtgatcttggctcactgcaacctctgcctcctgggttcccggattctcctgcctcagcctcccaagtagctgggactacaggcgcgtgccaccatacctggctaatttttttgtacttttagtagagatggggtttcactgtgttagccaggatg

SEQ ID NO: 415656 - DNA, 616 bp, Homo sapiens
attttgttgtgctgcctttctcaaatcacctaataatttctgaacatacactctgtgtgcaactttggagcaattagggctaccttcatcagaaagaaatgagcccatgtctgtgccacagaaacatgaagttggaattatagactaaaatagaactcaattaactttgttttkattattttaaattcccctgactttcagaatcatggaacctgtgggctgataagacctgtgtggtttgtatccttcctataattctccagattatctgtcttctctgcttgaacacctttagcaatgggaactgaggatttcctaaagcagatcattcttttttttaagataatttgcaatttaggaatttctttatggagctggaattacttttattttaaaatcattgaccaattagttgtctgattaggattttgtattgcctctgagatgcataagagatcttttttcttctctggtactaaaatgaggtacaacaaaaagaacatcttgggcttcccctgaggttagaatatataatcaacattatacagcataaataatgctaaatgaggccaacagatttgaccaaacagcttccttcctccaaaatatacaagca

SEQ ID NO: 415657 - DNA, 616 bp, Homo sapiens
aaatagcaaaattcatgatggccaataagtttcagcttcaactgctgaagtggaagaatgcttggtaatgggaatgagaaatccctaacagggggaaaaaatggtaagttggataaagcttggacaaagagataatgtatttgaaatatcttatgtaatagaaatgtaaattgtgagacataataataataaaataaacttatccggagcaaccatccaatcttttttttttttttttgagacaaggtcttgctctgttgcccaggctggagtgcagtggcgtgatcttggctcattgcaacctacgcctcctgggttcaagcgtttctcttgctttagcctcccgagtagctgggattacaggcatgagccaccrcactcagctaattacaaccgcccaatcttagcaagagacttttaccaagtatttctttcagtagatactgcccatgtcttctttacaggaggtctgagctgaattttgtgatcatcattctctttcttctcattataattttaccaagtacaaatgcatcactaagccatgcattattcagtttcacagcttctgaattttaagaactgatttcattgtatatatatgaattttgaaatt

SEQ ID NO: 415658 - DNA, 552 bp, Homo sapiens
caacttaggaactgaatttctatttaactttctttaaaaagcatggattttatgcacttaatataaaaaaaatcaatctatggggtgttgaaattaatttctcttgatgcaaagattgaggggaagagggacaatacatgtcatttagagcttcattatatatttttattactattgtatttgtaatatattaatatttctttattttttcctaatgttgtttttctgctccaagatcccattcaggatcccacgttacattaatcatcatgtttccttaggcacttcctggctgtgacagtttctcagactctccttgtttttgatgactttgaaaattttgagtacttgtcatatattttgcataatgtcacastattgggatttgtctgatgtttttcttatgattagattgaagataagggttttgggtaggaagagaagagtagagtaccattttatcacatcatatcaagagtattatactgtcaacatggcttatcactgttgacattgacctggctgaggtaggtttgtctttgtcaggttttt

SEQ ID NO: 415659 - DNA, 564 bp, Homo sapiens
tttttagatttttgtttagattttttattttagatgttgtgactatttttaattttataccagttacctccaatgtcatttttcaatgtctcatttacctgatgtcatttgctaaatattccaaaaataaaccacatcttgccagcataactgctgaaagaaaaaaaaaagattttttttaagttataagggcagatcttattatgtataggagaggaagttagaacaatagaaaatctcatatatggaaggtaggagtataaattgatacgatgagtttgaagaataatttggcgctatctagcrggtctaaagatgcatataccctgtgaccagcaattttatacttcattcccatgatctgaagaaggtatctatctacctatctgtctgtctgtctatcatctatctattaaatatctattttttcttatctaaaaatatgactatttattactattctttgcaattaaactgaaaccaatagaggtggccattaataggaaaaatgagtaaactgtcacatattcttacaagtgaacattaatggcaattaaagagagt

SEQ ID NO: 415660 - DNA, 576 bp, Homo sapiens
cacctccacagggcaggcggaaagcaggcgatcagagcagtgtgggttgcagagaaagcagaggctcaataggaaacccctgggggcacaggyaggacaggtgaggtgaaggggctgaagagggaattcaggcctgaggcttctgggacacaggtttcgatggaaagcttatgccagcctgagctgcaaggttgcggaggcactgctgtgggcctgtgcctcatagagagctcacagatgttcttgaacctgtactatccattcacacactgcagtcagggacttcaggacagcccctttttgctgcagtctccctctcgacccttttaatgctgtactcacttcgaaggggagaagcttaaagggattccatcatctatcacagagcatatattgaagggtgcatttcaagttgagagcctataatttcataattggcatagagagatcaaattgaaaccattcaagtcaacctttcgatcttgcagcgtgaccttgcataaaggcaggatgtgggtggaagccctgactcccattcaagttacaggtcagcctgaggccggaatttaacaaagt

SEQ ID NO: 415661 - DNA, 632 bp, Homo sapiens
tgctgtgggcctgtgcctcatagagagctcacagatgttcttgaacctgtactatccattcacacactgcagtcagggacttcaggacagcccctttttgctgcagtctccctctcgacccttttaatgctgtactcacttygaaggggagaagcttaaagggattccatcatctatcacagagcatatattgaagggtgcatttcaagttgagagcctataatttcataattggcatagagagatcaaattgaaaccattcaagtcaacctttcgatcttgcagcgtgaccttgcataaaggcaggatgtgggtggaagccctgactcccattcaagttacaggtcagcctgaggccggaatttaacaaagtgtaacagcagaagaaatttgagagagtgaaccaaagatgagagaacatgagggacatgttgttttgttgtttgaatacatctttgtgaaagattttgacaccagactttaatcatagctgataggtccatgacagtactggtgacaatacatttttatggaaaacaagcgtagaagcttagatatgtaaaaagaaaatcgtagtaaagaatcaatatcatctactcaaagacctagaaagggcccagaagtcttggaaa

SEQ ID NO: 415662 - DNA, 456 bp, Homo sapiens
ttgacttcctctttccagttggatgccctttctttctttctcttgcctaattgctcttatgttgagtaagactgatgaaartaggcatccttgtcttgctctagttcttagaggaaaggcttttagcttttcctcattcagtatgatgttagctgtgagtttgtcatatatggtctctattgtgctgagatgtgttccttctatacctactttgttgagagttttggtcatgaagggatgttgaagtttatcaaatgcttttttcttcatcttttgaaatcatcagatggtttttgtccttcatttggttaatgtaatgtatcatacttactgatttgcgtatgttgaaccatccccacattcctaaggtaaatcccacttgattgtggtatattatgtttttgatgtcttatttggtttgctagtattttgttgaggacttttgcatgtatgttt

SEQ ID NO: 415663 - DNA, 456 bp, Homo sapiens
ttgacttcctctttccagttggatgccctttctttctttctcttgcctaattgctcttatgttgagtaagactgatgaaaataggcatccttgtcttgctctagttcttagaggaaaggcttttagcttttcctcattcagtatgatgttagctgtgagtttgtcatatatggtctctattgtgctgagatgtgttccttctatacctactttgttgagagttttggtcatgaaggratgttgaagtttatcaaatgcttttttcttcatcttttgaaatcatcagatggtttttgtccttcatttggttaatgtaatgtatcatacttactgatttgcgtatgttgaaccatccccacattcctaaggtaaatcccacttgattgtggtatattatgtttttgatgtcttatttggtttgctagtattttgttgaggacttttgcatgtatgttt

SEQ ID NO: 415664 - DNA, 541 bp, Homo sapiens
aggattacaagcatctgtggtgggaagatggaccagtggggatctctcatgtacatttttcctgaaatggggagtcttccctggctcttaactgatcctgaccatctggtttgcttctctgtttatggtgcartctcaagttaagtttccatgcctcagagggtcactgttacttctctgctgaatctcagtggttttgcttaggctattggacatgtggttatctacttgctattttggtcttttttttcaggagagaagagtgctgggcacctctagtcagccatcttgaagaccgtcagtattattatttttttgagataaaaagtaatctgtctctgagtatattttttcttaagcaaccactaccaaagtctaataatgaatgaatccgtgttcaaacaaaattgtaacagaattctggaccttaagggcaccatggagatttttgatcttgcccaatagcctcttttacaaattatttggccaattaattaataatccactttgttgtaaaaatactatagctgcgtacaagcca

SEQ ID NO: 415665 - DNA, 618 bp, Homo sapiens
aatgtaatgagtgagcaatgagaggcagaagaaatattatgcaaaactgtacaggatatggaaataagcttcaattttaagggttatagaggctattggaaaggttttttgacaatctgatatggtaaaatatgctgtttatggggtgtagttatacagattttggcaaatgcatgaagtcatcatgttttgaccaccacagttataaaatagaatagttttggtatggtttggctgtgttcccacccagatctcatcttgaattgcagctcccacaatttccatgtgttgtgggaaagacccagtgggaggtaattgaatcatgggggcaggtctttgctatgcagttcycatgatagtgaataactctcatgagatctgatgttttataaaggggagatcccctgcgcaagttctctcttgcctgttgccatgtaagatgtccattgctcttccaccatgattgtgaggcctccctagccatgtggaactgtgagtcagttaaacctctttcttttagaaattacccagtttcaggtatgtctttattagcagtgtgagaacagatgaatacaggtttcctcatcacaaagtctctcagtgctgcccatttgtact

SEQ ID NO: 415666 - DNA, 613 bp, Homo sapiens
ttttggttaaatccaagtctgggtcacttcgcatctccttctaatttaaattagatttaaatttccaaaacacccaatagttacttgaggagattaggtggaagaacatgaatgaattggcacaaatatatcaatattcttcacaaattagggatgctctggtagaatgtgtgtttctatggagatgagaataactctgaggccattgtcatggtcttgaatgactggggttctaataattcagcaacattctgtgcttatgtataaactactattcatagcaactggcccattgacatttttgcaaagccacttttgacactctattaaagcttacatttgtttatgtatagagtgaatattttaggaaattgaggcctgtgtttttttttaaaaaaaagagaaagtaagatttatttattctaygatcagctattttaaaaacaaagggattacaattaacacttgagcctggaagtctcctcacatagcaaattgccaaagaattccttcttaagaagcaacagagttattacagattcctgtctgcagtctgctccctatccataagctcctgatctatggtatatttgctgaattgtcagtgaagttt

SEQ ID NO: 415667 - DNA, 550 bp, Homo sapiens
acaatggcaaggattttatttggttttgtttacaactgtagctctaacgcctttcatagtcagtgtctagcacaggggagataagcagcaaacatgtttgtattgaataaatagcctaacggtcctggaaagcaggcaacatgagactttcgagaatttcacacatttacaagtgactttggatgaaagactgggaaatgaaggtaggagctggaggtaaagggtcatttgacaaataccattttgcaactgacaccagctaacaagaggaatcccagcaggttcatactgaagtgcaatgatgcatggatatacaagttagatatacagtccttaaacttaagcctatgtgtctgatagaaataaaatgcattttttttcagctgccttgcccttaacttttttttttttttttttttgctttgagatttttctgacaggwcagatctacttttcccccaaagaaagatattgagagacagtcacaggtcgtcctcaggtccatgtgaatacagttctgaaacttcttggtaattaaaacattaagtta

SEQ ID NO: 415668 - DNA, 619 bp, Homo sapiens
ttggtatcttaactctactcccttttaattgattaacgagggaggagtgaaggaaacaatgttagagaaagatttcattaggtataaattgcaagacatttgttcgaatgaacataatatctcagctctattttgatgggccttgggggaatgctttaagtattactgtaagtaccaaaccaagcamtgaacaatttaatgatgccattagagtatggccttgtatctggtttttgcttcaaaatgttcctggggaaaacttcactgactggtaatagggaccaaaataatgctttcaagtatgtgttaccaacaaatacatcaaatgggagttatttaagataaacaaacaaaaagtttctttttttaggcttaagtgattctgatataccttttccataaaaaataaaatctggatatctcaaagctatatttatcaagcaaagccagattctccaaccaaatgacttaggacttgtgaaagtattagctagcaaccaagatttcttcagttatttttaactaccaataattctgctgcctgttatgcaaacactaatttttataaagctttaaaacattaaaaaaggataaagaataatatacaatcatctacttt

SEQ ID NO: 415669 - DNA, 572 bp, Homo sapiens
attatttcaaatacttattatttacctccagaaagagatacttattacttcaaatacttattattattttaataattataaaattgcttatttataagtaattataaaattgcttatttataataagtaataactattacttattayttgtttctgaatccccccagattcagaaagtccagggacttggtggagaaatttttagtgataaactggagtgataaacagtttcatatccataagcaataaggtcagtggacccaccatatcgactttcttttcaggagcagagaacctcatttcagggggtgaaatgagcggcctattttcctgaaaatgctgcttcctcgtgggtaggcatgagattcccgagggaggaatactgattcagaagtggagaatgtcttagaaaaaagcctaggttggaaattccactcatctcttcaattatctttaaattcctaatgttatacaatatttagcccccagactctatattaatgtggtaacccaagagcatccctgaatgattgcactagggaaaataaggcccaatacagagaactatgact

SEQ ID NO: 415670 - DNA, 572 bp, Homo sapiens
attatttcaaatacttattatttacctccagaaagagatacttattacttcaaatacttattattattttaataattataaaattgcttatttataagtaattataaaattgcttatttataataagtaataactattacttattatttgtttctgaatccccccagattcagaaagtccagggacttggtggagaaattkttagtgataaactggagtgataaacagtttcatatccataagcaataaggtcagtggacccaccatatcgactttcttttcaggagcagagaacctcatttcagggggtgaaatgagcggcctattttcctgaaaatgctgcttcctcgtgggtaggcatgagattcccgagggaggaatactgattcagaagtggagaatgtcttagaaaaaagcctaggttggaaattccactcatctcttcaattatctttaaattcctaatgttatacaatatttagcccccagactctatattaatgtggtaacccaagagcatccctgaatgattgcactagggaaaataaggcccaatacagagaactatgact

SEQ ID NO: 415671 - DNA, 572 bp, Homo sapiens
attatttcaaatacttattatttacctccagaaagagatacttattacttcaaatacttattattattttaataattataaaattgcttatttataagtaattataaaattgcttatttataataagtaataactattacttattatttgtttctgaatccccccagattcagaaagtccagggacttggtggagaaatttttagtgataaactggagtgataaacagtttcatatccataagcaataaggtcagtggacccaccatatcractttcttttcaggagcagagaacctcatttcagggggtgaaatgagcggcctattttcctgaaaatgctgcttcctcgtgggtaggcatgagattcccgagggaggaatactgattcagaagtggagaatgtcttagaaaaaagcctaggttggaaattccactcatctcttcaattatctttaaattcctaatgttatacaatatttagcccccagactctatattaatgtggtaacccaagagcatccctgaatgattgcactagggaaaataaggcccaatacagagaactatgact

SEQ ID NO: 415672 - DNA, 540 bp, Homo sapiens
tactatgaagatgaccctctttaaatacaattttatccctaagttcatacatgcaatgtgaatctcactccaattttgtgaagatgcatcagaatcttctgatatcattgccaaatcacatatcttaattattctagaaaagctacaccttttctgtggcttcaaatgaaatgtttaatgctctgtactgtacttcaatcttttcaaagcattcaccaactcctgtgtgctttaattatctaagagcgttagagcctgcacattatgcaaaagaaggaccatggcttctaaacaaarccttctcctctaaagatcctatgaaaatttacactctgtatgtctcttttagccaccccatgttacataaatccagagataattcagctttagaggtaattaaatctactcttgcttctacatatagtatgagaagcttcttttagcctgtgacgcaggctcatttttcccagtacatatttctgttctgtggaagaagattgcaaccacccttcaagactgtgggaaaaactatttcatcct

SEQ ID NO: 415673 - DNA, 468 bp, Homo sapiens
ttttttggatttttagtagagacatggttttatcatgttgtccaggctggtctccaactcctgacctctactgatctgcctgcctgggcctcccaaagtgctgggattacaggtgtragccaccatgcctggctgaagtgagttattaaaaaaaaaaaatgattccccactgtgaaaatatccttgttcttattttgaggaaatatgacattctcagaactcaactgccttagagagagggttttgaataaatccctgcttaatgatacatggtaaagacaaatgagagggagctgggctgctgaggagcagtgagaaacattcccctggtcatcatcgggctccttctcaattaccaggttaatatctcatcagccctgggtaccagccctcacagatgccttggttgcattggataccctggtgtgacccaaaagatatgcatgggtaaaaaggaatggggaaatg

SEQ ID NO: 415674 - DNA, 480 bp, Homo sapiens
tggaaataatggagtttgaaagcgatcatttcttaagggtaaaaatgccatgcacctgccattttcctgctagacccatcccccactcctcaagccttagtacccaaayacacaaagagcagaagaaaagaagctgctaataatttcacagcagaaaaaaagggtgtaatagtgtaaactgcctttaatcaaatcatacctgataaatatgtgtcacttcttttctcaaaaattcgaaggctgaaaattatcaggtgaatgtctcgtctggcccaatgtttttaaatcgtcaccccacccatgacatgacttaaagccaataataaaaaacaacaatcaacccccccccaaaacaaaaacaaaaccaaaaaaaactccaacagtttcacaaggaaatgtgcattaggtagaagcttgtcaatagggttagaaagaattagaacatacacatataagccttatcatgaaaacaatgagaaa

SEQ ID NO: 415675 - DNA, 634 bp, Homo sapiens
aacagtttcacaaggaaatgtgcattaggtagaagcttgtcaatagggttagaaagaattagaacatacacatataagccttatcatgaaaacaatgagaaaattctaaaatgcaaatatgagacacaattttcaaaaagttattcttaaataaaagacaaattctaagtttaacaataggatccatataggtagtgttgctggaaacaaagagggccctgtttcttcttgctatttcaatttcacaaactagaaaaggaagcaaacaccatttagctggtcttaatatacttcacaagtctaataatttcctccagaaacagaaattctatgtgagttataattgtgttcatttattcattcagcaaatatttatcaagaatctgattaatatcctgattctggctctcttctgcgctctggggaagggaarggaggagtttgtggatgttaaattagagatacctattttagatattattttggaaataatgagtgggcagttgagtatatagatccagagttcaaggataagatttgagctgaaaatataaatttgggactcctttgcatatctagatgttctttaaaattgtgggataacacggtatcacctagtgaatgactgtagata

SEQ ID NO: 415676 - DNA, 526 bp, Homo sapiens
tttagttttttttgttttgttttgtttcttttgaacttgttttagtttgtgtttctggagaggaacaagaaacatagtgggtattgaaaatgtttatctctgataacaacagattattttgatctcattataagatgcttggggttttaaagttatcagtttgcataatttgactatctcatgatccacaatrgtgaagggggcatgagtttatctgtttatttatatgtttcttttaaacatataaggaggaacatttaaaatcttttaaaaactcaagtgttgtctacaatggaatccacctaacataccacttgcaatagagtagaaattttttatttttattttttactctttgaacacatatatttggtagacattaaacaaagaaaaaaaattcagcggttgccattaaaaactgtccaataaaacatttttattgagttaggtttatttgtacgtttaatgtgaattattaaagaatgagaattgaagtgatttattccttttcttgagctctaacaca

SEQ ID NO: 415677 - DNA, 526 bp, Homo sapiens
tttagttttttttgttttgttttgtttcttttgaacttgttttagtttgtgtttctggagaggaacaagaaacatagtgggtattgaaaatgtttatctctgataacaacagattattttgatctcattataagatgcttggggttttaaagttatcagtttgcataatttgactatctcatgatccacaatagtgaagggggcatgagtttatctgtttatttatatgtttcttttaaacatataaggaggaacatttaaaatcttttaaaaactcaagtgttgtctacaatggaatccacctaacataccacttgcaatagagtagaaattttttatttttattttttactctttgaacacatatatttggtagacattaaacaaagaaaaaaaattcagcggttgccattaaaaactgtccaataaaacatttttattgagttargtttatttgtacgtttaatgtgaattattaaagaatgagaattgaagtgatttattccttttcttgagctctaacaca

SEQ ID NO: 415678 - DNA, 575 bp, Homo sapiens
gtctctgagatcctcattcacaatatatttcttcttattgtatatacagttggattaaatttgaatattttgttaccaagcacctagcagattagaaatcaaatttaagaagaaaggaatgaagtcatagcaaaaggcacwttgactcttgtgagcataacagctgtgactactgtatacgtgagttacaagtaacaagggaagagactgaacaacattttttttaatgatgaaagctttgagtataataatttacacttattcacttgagaaatagatggtccggctcacctcattggccatgaagatatcatattatataatcaagaataacaaacgataataacaaatatatattaagtgcttgctatgtgctaagcactggaggtaggcattttaagtacatttattatctcagttaattcttgaaactgccatgtcatacagatattattattacttttattttacagatgagggaagtatcagatagtttaactaatttactatgtgttagtaaacttcagggggctgaaatgcgattcaaactctgatctttagaattgtaaagccca

SEQ ID NO: 415679 - DNA, 575 bp, Homo sapiens
gtctctgagatcctcattcacaatatatttcttcttattgtatatacagttggattaaatttgaatattttgttaccaagcacctagcagattagaaatcaaatttaagaagaaaggaatgaagtcatagcaaaaggcactttgactcttgtgagcataacagctgtgactactgtatacgtgagttacaagtaacaagggaagagactgaacaacattttttttaatgatgaaagctttgagtataataatttacacttattcacttgagaaatagatggtccggctcacctcattggccatgaagatatcatattatataatcaagaataacaaacgataataacaaatatatattaagtgcttgctatgtgctaagcactggaggtaggcattttaagtacatttattatctcagttaattcttgaaactgccatgycatacagatattattattacttttattttacagatgagggaagtatcagatagtttaactaatttactatgtgttagtaaacttcagggggctgaaatgcgattcaaactctgatctttagaattgtaaagccca

SEQ ID NO: 415680 - DNA, 620 bp, Homo sapiens
gatggtggagtctccatgaccaaattgttgttcttatgtgaagggaaagagactagaaaacactctctgccccacccccccaaccccagtgcatacaaggaagaccatgtgataacagggaagacggccctcacaagaacctgacttaggcacccaaatgtgamtgtctgtgtattcacagacagtcacatgtatgtctgaaaatgtctgaaagcctcttacggaacattataaatcctacagttctatagtgcctcataggattaggtgactagaaggacatttggtggaggagaaaggtaggttggggtgagagaaaaatttatttggaggtagtggccagactttgtcacttcatatattccatcttaatgaaactagcagaataaaaccatgaattacattttattatttgtgtagttttattacaagtagtttgacaacttctgctgttaataacgcattctgttttgttttctctcaggaaatttactagctcgggtgagggagaaatatttgtgtctcccacattccacatcatactggttgttggagggtggtagtgtaaaccagaaggaacttcctactctcaccttaattgcttctgacttactatagtg

SEQ ID NO: 415681 - DNA, 603 bp, Homo sapiens
ctgaagctcaatttcatctataacggtaaattacttaatgcctttaaagttgtaagcaaagtaaaagtgaaagttagtctttcttgatgatgaaatactttcagaattctggaaagaatgaaggaggctatgagattgggattggggtctatgtggtgagagatgggaaacttctggttatgacggaagtaagttttgatacctaaggaaaaataaagcattttctctaactcaatggcaaagcagaaccagatgcaaattgatctttttcagaacttacacatgtcagrgtctgcaactgttttgaggcattttaggtagagctcactagaggctttcttcgaagatctggtttgaagcagttgcttcaacttttggaggctcccatcgtatcaaagtcctaaattatgttgcagatcattgcaatactagtcactgcaacatttcagagtcaaaagtttttcatatatatttacttcttgtgaaaaagacctgcttctggaacccacagaagtggatattttcctggtagcccctcttgtctgagaagcgaatataaaaggttaagatttaaaggcattctttatctggtccctcacaaac

SEQ ID NO: 415682 - DNA, 603 bp, Homo sapiens
ctgaagctcaatttcatctataacggtaaattacttaatgcctttaaagttgtaagcaaagtaaaagtgaaagttagtctttcttgatgatgaaatactttcagaattctggaaagaatgaaggaggctatgagattgggattggggtctatgtggtgagagatgggaaacttctggttatgacggaagtaagttttgatacctaaggaaaaataaagcattttctctaactcaatggcaaagcagaaccagatgcaaattgatctttttcagaacttacacatgtcagagtctgcaactgttttgaggcattttaggtagagctcactagaggctttcttcgaagatctggtttgaagcagttgcttcaacttttggaggctcccatcgtatcaargtcctaaattatgttgcagatcattgcaatactagtcactgcaacatttcagagtcaaaagtttttcatatatatttacttcttgtgaaaaagacctgcttctggaacccacagaagtggatattttcctggtagcccctcttgtctgagaagcgaatataaaaggttaagatttaaaggcattctttatctggtccctcacaaac

SEQ ID NO: 415683 - DNA, 594 bp, Homo sapiens
caaaacaacactgacaatacttgatatggtttggttgtgtccctacccaaatctcacattgaattgyaatccccataatccccacgtgtctagagagatacctggtggaaggtgattggatcatgggggtggttttccccatgctgttcttgtgatagtgagtgagttctcattagatctgatttaatttggatctcattagatctaatgagattttaaattttttttattagggcctctccccgcttttctcttcactcctctctctgctgccaccatgtgaagaaggcccttgcttccccttcaccttttgctatgattgtaagtttcctgaggcctccccagccatgtggaactgtgagtcaattaaagctctttcttttataaatttaaaaaaatgatagtttaagggagatgcttccttttggaacttgataggctgactcaaaaactataatagagaataaaaaaaacaagaataacaaataattttgaacaaaatcagaaattttgctcttttgattagttgttatattaacactataatactggtatagaaatagacaaatagaacaatgaaatatgatagagaac

SEQ ID NO: 415684 - DNA, 602 bp, Homo sapiens
ccctcatgaatggcttactgctgttttttgggagtgagtttattataaaaaggtgagtgtggctccccttttgttctctctctcaccctcttgtcttctgctatgagatgactcaggaagaagaccctcactagatgccaggccctcaatcttggacttcccagacttctgaaccatgagccaataagtttctgttataagttaccaatctcaggtatcctgttatagcagcacaaaattaagttaaaaattaaccaatttcaggtattctgttatagcagcacaaaatggactaagacagtggggcaaatgcaaatactgcatagcatactcttacaaagacattttctacatttattgtatatgaatgaaatacgtgtatttttcatgatgtatcttgaatatataatgttaagagaaatacacaagttggaacaagyatatgaacataaacaaatgacaaatcaatttcaaattatttttatgtagtcatgataatagacacctaaaatttttaattggcaaagttcttattaatcttgtttgactaaatatggaaaaagcaaaaaaggattattagataattttggataacatataac

SEQ ID NO: 415685 - DNA, 586 bp, Homo sapiens
tttcaaattatttttatgtagtcatgataatagacacctaaaatttttaattggcaaagttcttattaatcttgtttgaytaaatatggaaaaagcaaaaaaggattattagataattttggataacatataacaatctttcactaactaaaattagtaaaattttactttttgtggaaacctgcaaaagtatgcaatagattagtttggcaaaaactgataaaatgtagaattaaacttttatttaatgtctacctcatgctatttcttaagtttatgaagattatatcttctgaaaaattatttatcatacaacattttacctgaaggcaatgatgctgtttttccatttctgtatctcttgttctttgctcagtttctagggcagagtaataatttcaaaattgctgaatgaaagaatgagtagtgcatcttagtcactatcacacaaaaggcctaacagctagctgctctgccctgcaatgttcttgaacatagtaacattattccaatattctgaattatttaaggtttttcaccaatcagataagttttaaaaaatattctacagttaaaccttaaacaa

SEQ ID NO: 415686 - DNA, 586 bp, Homo sapiens
tttcaaattatttttatgtagtcatgataatagacacctaaaatttttaattggcaaagttcttattaatcttgtttgactaaatatggaaaargcaaaaaaggattattagataattttggataacatataacaatctttcactaactaaaattagtaaaattttactttttgtggaaacctgcaaaagtatgcaatagattagtttggcaaaaactgataaaatgtagaattaaacttttatttaatgtctacctcatgctatttcttaagtttatgaagattatatcttctgaaaaattatttatcatacaacattttacctgaaggcaatgatgctgtttttccatttctgtatctcttgttctttgctcagtttctagggcagagtaataatttcaaaattgctgaatgaaagaatgagtagtgcatcttagtcactatcacacaaaaggcctaacagctagctgctctgccctgcaatgttcttgaacatagtaacattattccaatattctgaattatttaaggtttttcaccaatcagataagttttaaaaaatattctacagttaaaccttaaacaa

SEQ ID NO: 415687 - DNA, 586 bp, Homo sapiens
tttcaaattatttttatgtagtcatgataatagacacctaaaatttttaattggcaaagttcttattaatcttgtttgactaaatatggaaaaagcaaaaaaggattattagataattttggataacatataacaatctttcactaactaaaattagtaaaattttactttttgtggaaacctgcaaaagtatgcaatagattagtttggcaaaaactgataaaatgtagaattaaacttttatttaatgtctacctcatgctatttcttaagtttatgaagattatatcttctgaaaaattatttatcatacaacattttacctgaaggcaatgatgctgtttttccatttctgtatctcttgttctttgctcagtttctagrgcagagtaataatttcaaaattgctgaatgaaagaatgagtagtgcatcttagtcactatcacacaaaaggcctaacagctagctgctctgccctgcaatgttcttgaacatagtaacattattccaatattctgaattatttaaggtttttcaccaatcagataagttttaaaaaatattctacagttaaaccttaaacaa

SEQ ID NO: 415688 - DNA, 387 bp, Homo sapiens
tttgcaacttatgaatgaacctggaatatattatgctaagtaaaataagccagacacagaaagctaatgactggatgatctcacttatatgtggaatctaaaaatgtattgaattcataactacagtgagtagaacagtggttaccagaagctgggggggtgagggaagtggggagatgtttgtcaaagggcacaaattttcagttgcaaaatgatcaagttctggtgatctagtgyacaacatgggcagtgatggatgtgttaattaatttgatggtggtaataattactcaatgcatatgtatttaaaaccataacattgtacatcttgaatatatataatctttatttgtcaattaaacattaaaaataaaaaattaaagaaat

SEQ ID NO: 415689 - DNA, 587 bp, Homo sapiens
agtcctaaaactaaacacatgtattatatcttgtaattctaatgaggtaggcactattattatgacatcttacagacagtgcaactgggactttaagaattaaattaaatactgggccaaagttatgcaactagaaaatgacaatattcaagccctggtatttttaactccagagcaaggctcttggcatttacwtttgactttcctaatcttatactagacaatactacctagcaaataacttaaatgtaatataatgtcagataatattatataaaaatctttctactctacccttttaagaaatctctcttcatcttacctttccactccctcccccaggctttcacaattccactcaaaccttcaaaacaacttgttcacaacttcgttagaatcaactgatcaatatgcttttcataatcaaatatctttatttcactcctaaagtgaaaatgtggaataaatggtcttcttcagaagaccactgtcaattttgattttctttttccttagagtggctggaatatttattacaatggcgcattttcacgaagaacaagaacccatcagagccttgcttttaa

SEQ ID NO: 415690 - DNA, 553 bp, Homo sapiens
taaattgtattcataaagtatcatgttcaaagttggtttaattcaatataattcagtacagtaacaaactgaaaaagccataagatcatttcaaaagatgcagaaaaagcatttgacaaatactaacattcatttctgataaaaaataatctcagctagctagcaatagaagagagttgcttcaaatttctaaagagtctttatgaaaattttaccggtagcattcacaattaatggtaaaaagtgctttgcyactaaaataaagaaaaaggcatggatgtcttaaggcaagagtaagaaatgaaagaccgaggttggaagggaggaagtatcactggctttattcaaagaaacatcattgtttatgtataaaaatcctatgaacttacaagaaagccactagacctaataagaaagtttagcaagtgtgcaggatacaaaataaatttatgaaaatgtattcctagattctagcaaaaatcagaaactgaagctaaaaaccaatatgatttataatagtatgaaaagtgaaatacaacagcaccaaaaatat

SEQ ID NO: 415691 - DNA, 553 bp, Homo sapiens
taaattgtattcataaagtatcatgttcaaagttggtttaattcaatataattcagtacagtaacaaactgaaaaagccataagatcatttcaaaagatgcagaaaaagcatttgacaaatactaacattcatttctgataaaaaataatctcagctagctagcaatagaagagagttgcttcaaatttctaaagagtctttatgaaaattttaccggtagcattcacaattaatggtaaaaagtgctttgccactaaaataaagaaaaaggcatggatgtcttaaggcaagagtaagaaatgaaagaccgaggttggaagggaggaagtatcactggctttattcaaagaaacatcattgtttatgtataaaaatccwatgaacttacaagaaagccactagacctaataagaaagtttagcaagtgtgcaggatacaaaataaatttatgaaaatgtattcctagattctagcaaaaatcagaaactgaagctaaaaaccaatatgatttataatagtatgaaaagtgaaatacaacagcaccaaaaatat

SEQ ID NO: 415692 - DNA, 591 bp, Homo sapiens
gttcacattatgataaatttattcctaggcacaatagtacatttttwaaaaattgcattttctaatagttcatttccattgtacagaaatgcaattgatttctgtatattgtatgtagaaacatcattaaaataataattttgattatctgtgtagaaaatcacattatataaaaatgatagtttcttgtttccatttcagtaagaagtgtctattattgctttctgtttctctgttttactccattatctagggtttctggttaaatgtttaataaaagtggtgttattgggcattttggttttaatcttcatcaaaaaggaaagttttaactttaaccctaattataattattaatcttatttcagactggatactggattctgaactagatattgaacactattaagtttaatgtctattctaggtctttttctgacactatttttcttaaggaatttattttattttttagttttttaactttcattttaggttcaggggtatatgtgcaggtttctcatataggcaaattgcatgtcataggggtttggtgtacagattattttgccacccagataataagcatag

SEQ ID NO: 415693 - DNA, 591 bp, Homo sapiens
gttcacattatgataaatttattcctaggcacaatagtacatttttaaaaaattgcattttctaatagttcatttccattgtacagaaatgcaattgatttctgtatattgtatgtagaaacatcattaaaataataattttgattatctgtgtagaaaatcacattatataaaaatgatagtttcttgtttccatttcagtaagaaktgtctattattgctttctgtttctctgttttactccattatctagggtttctggttaaatgtttaataaaagtggtgttattgggcattttggttttaatcttcatcaaaaaggaaagttttaactttaaccctaattataattattaatcttatttcagactggatactggattctgaactagatattgaacactattaagtttaatgtctattctaggtctttttctgacactatttttcttaaggaatttattttattttttagttttttaactttcattttaggttcaggggtatatgtgcaggtttctcatataggcaaattgcatgtcataggggtttggtgtacagattattttgccacccagataataagcatag

SEQ ID NO: 415694 - DNA, 622 bp, Homo sapiens
cttggccccctgaaatcttctataatcaaagccaattgactgaacccaccttataccacaatcaaacccccaaggcatcaaagaagataaaagcaaataaacctcacccaaattccagcaacttcaaagattaaaggaacatcagtccacacagatgacaaagaaccagtgcattaactcyggcaactcccaaagccagagtgtcttgttacttccaaagcaccaaattttccctagcagtggttcttaacctggttgaaatgacagacataaaattcagaatatggacaggaatgaagatcattgagattcagcagaaagttgaaacccaatccaagaaatcaaaggaatacaataaaatgttacaggagctgaaaggatgaaatggtcatgttaagaaggaaccaaactgatctgataaagccaaaaaacacactacaagaatgtcataatatgattgtaaatattaacagcagaatagactaaaatgaagacagaatctcagagctccaaaaacagttctttaaatttattcagtcagacaaaaataaaaaagaataacaaaacctctaagaaatatgagattatgtaaagagaccaattctacaactcagtggcatcc

SEQ ID NO: 415695 - DNA, 533 bp, Homo sapiens
aaagcaaataaacctcacccaaattccagcaacttcaaagattaaaggaacatcagtccacacagatgacaaagaaccagtgcattaactctggcaactcccaaagccagagtgtcttgttacttccaaagcaccaaattttccctagcagtggttcttaacctggttgaaatgacagacataaaattcagaatatggacaggaatgaagatcattgagattcagcagaaagttgaaacccaatccaagaaatcaaaggaatacaataaaatgttacaggagctgaaaggatgaaatggtcatgttaagaaggaaccaaactgatctgataaagccaaaaaacacactacaagaatrtcataatatgattgtaaatattaacagcagaatagactaaaatgaagacagaatctcagagctccaaaaacagttctttaaatttattcagtcagacaaaaataaaaaagaataacaaaacctctaagaaatatgagattatgtaaagagaccaattctacaactcagtggcatcc

SEQ ID NO: 415696 - DNA, 542 bp, Homo sapiens
aaactaacaaagatattcaggacctgaagttgacccttgaccaaatggayataacagacatctgcagaactctctaccccaaaacaacagaatatacattcttctcatctgcatatggcacatactctaaaatcaaccttactattggtcataaaacggttctcagcaaattcaaaagaaaagaaaacataccaattacactcttaaaccatagcacaataaaaatggaaataaatattaagaagataatttaaagccatacgttttggaaattaaacaatctgctcctgaatgacttctgggtaaataattacattaaggaagaaatttaaaaaagtttgaaactaatgagaacaaagatacaatataccagaatatctgggacacagctaacacagtgctaaatgaaaggttagagaattaaacacccacatcaaaaagatacaaagacctcaaagtaaaaacctaacatcattctttaagaaactagtaaaacaagagcaaaccaaccccaaacctagcagaaggcaagaaataaccag

SEQ ID NO: 415697 - DNA, 543 bp, Homo sapiens
gtaaaatgaaatgcagcctttgaagaaaaagaaaattagagcaagacattttaattcatttactaacatttctagaaaaatatttgccaatgtcaaaaatagtctttctaattaaatttcatctggtttccaaatatgtactatgattttctagtttgaaaggtatatagtatgaagcttatttttatttcttgaacacggactgcatatgtagtaacagtagatagaggaagtattaaggaaaggcatacattgtggattatcaactaaatagtacaaaaatttctttaaaggcaaaaataagcatgttacttacagtaatggggttaatawcaagagaatctattaaaatttgaaagtatcatttctcttaataaattttgcagagctcttgttcttttaaagccttgtgcatatataacgtggataaaaactaaaactaagctacattttgagatataaaagccaaagaaaaaagattaagaagaaaatacatcaaaatgttgatgatattattcgttgtcttaatggtaggttgcaact

SEQ ID NO: 415698 - DNA, 495 bp, Homo sapiens
aggggagtagaatggcaggcagacaggctgctgatttaaagtggattaaccaactctgaaacacaaagaaatctggrgaaacagtgacttatattaagaaaaacaattttaacttactatttgcaggagcagtggggagcaaatattagatgtgtggtcatatcaaaaaagaatattaaattctatcttataaagctggagcaatcacaacatgtagttgagactttttttaaaaggcacaaaagacaataaaagactgaaaagaaaattaaattgatattatatcttctgagtctgtggacatggccaactgtgcacggtgcagcaggagctggaggggatgggcactgtgtcagcatgaaagaggttggttacagcacacttggatttagagagcttttggaagatgacaacctggtttggttatttttttatttgtcagagtgtattaaatgttgttaatttcataaaataaagaaaaaagtcagacaaaga

SEQ ID NO: 415699 - DNA, 446 bp, Homo sapiens
aataaaagactgaaaagaaaattaaattgatattatatcttctgagtctgtggacatggccaactgtgcacggtgcagcaggagctggaggggatgggcactgtgtcagcatgaaagaggttggttacagcacacttggatttagagagcttttggaagatgacaacctggtttggttatttttttatttgtcagagtgtattaaatgttgttaatttcataaaataaagaaaaaagtcagacaaagaaaactgaatatgatagagcttaagatactaaaagaatatctacaaagactgggagtgggatggggaagttaattaccaacattcattctgattcttctacctatattttatcagagcytttggatctccttttaaacacaacttttcttttccttgtaacgtcactccaaattttccttatttcccttccaacttcta

SEQ ID NO: 415700 - DNA, 615 bp, Homo sapiens
ccttgtcacagaagttttttttttcttatcttttattattaaactcaatgaaaggcatcactatttctcagtcaataaagcaatttttgctttattgggtgttaaacttttaaaccacccttgcatccccggggtaaatcccacttgattatgatgaatgatttttttaatgtgttgttaaattcagtttgctagtattttgttgaggatttttgcatcgttgttcatcagggaggttagtctgtagttttatttttttaatgtggcttcgtctggtggtgttatcmgggtaatactggcctcatagaatgagtttggaagtattccctcttattccattttttggaatgatttgaggattggtattagttctttaaatgtttggtaaaattcagcagtgaaactatcaagtcccaggcttttctttgctgggatacttttttagtatggcttcaattttattacatttattattggtctgttcaggtttggattgttcatggttcaatttttgtaggttgtatgtctaggaatttgtccatttcttctaggttttcaaatttgttagtatagattgttaatgatgccctcaaatatcatttgaatttctatgat

SEQ ID NO: 415701 - DNA, 615 bp, Homo sapiens
ccttgtcacagaagttttttttttcttatcttttattattaaactcaatgaaaggcatcactatttctcagtcaataaagcaatttttgctttattgggtgttaaacttttaaaccacccttgcatccccggggtaaatcccacttgattatgatgaatgatttttttaatgtgttgttaaattcagtttgctagtattttgttgaggatttttgcatcgttgttcatcagggaggttagtctgtagttttatttttttaatgtggcttcgtctggtggtgttatccgggtaatactggcctcatagaatgagtttggaagtattccctcttattccattttttggaatgatttgaggattggtattagttctttaaatgtttggtaaaattcagcagtgaaactatcaagtcccaggcttttctttgctgggatacttttttagtatggcttcaattttattacatttattattggtctgttcaggtttggattgttcatggttcaatttttgtaggttgtatgtctaggaatttgtccatttcttctaggttttcaaatttgttagtatagattgttaatgatrccctcaaatatcatttgaatttctatgat

SEQ ID NO: 415702 - DNA, 566 bp, Homo sapiens
agactgtgtattaggcaataaggtagattaaatgtaataggtgagaaacacatacaaataattacaaaaccacacttgcttttatgaatgctttaatagttcaatagtgcaaagagagaatgggtgtgggtgatatgaaaataatattggcaaaatctggaaaatccccatggagaagcaagaatcatgcagtgctttccacagacattacaggaaaaggaagtttcaagaagatggaaagtaaggacaaagtcccctaagtagaaaagcttttactcccaaagtttcttcactgtatcgatttgaaatttgttcccctgtgatctcaagccactgatatttctcctctctctgggatcacgcgcactaaaactattcattgctttaaargaaaaagccattgtgacatcttgagtgatttactaaacgtttctgttcctcacttttcaatagaatcaggataataatagtatttgcctcataggtttgttttgaggtttggactgttttattcatgttgcatactcaatacagttctcggcacatgtactgagttcatttacatt

SEQ ID NO: 415703 - DNA, 524 bp, Homo sapiens
ccttatgggctagaccagggtgtccagtcttttagcttccctaggccacactggtagaagaaaaattgtcttggacaaaacataaaatacactaacratagttgatgagctgaaaaagaaaaaaaaattgcaaaaaaaaaaaaatctcataatgtttccagagagttcacgaatttgtgtttggccacattcaaagctgtcctgggccacatgcagcccacatgcaggctatgggttggacaggcttggactagactgaaagtggcatataactcttttgcattccatttactagacctcagttatataacaacacttaagggtgagcaatgtctctctgcgagcccaggagcacgagaaaatagatgactgtgaatacacagctatctggcacataggataatctttaagtcatggtgttgtgcaaatccagattaaatctaaaatgcaaacagacaagaaaatgttttaatgtttcttctgtgagggatgcataatataaagtgttaaatggagaacctgaa

SEQ ID NO: 415704 - DNA, 588 bp, Homo sapiens
ggctgtttatgttctgtagtcccaccatctcctcagaactcccagtccttggctgaattctttgacattagaggactgacagaggaagagagagagcagagaagatcatgcagttgcccttatgggctagaccagggtgtccagtcttttagcttccctaggccacactggtagaagaaaaattgtcttggacaaaacataaaatacactaacgatagttgatgagctgaaaaagaaaaaaaaattgcaaaaaaaaaaaaatctcataatgtttccagagagttcacgaatttgtgtttggccacattcaaagctgtcctgggccacatgcagcccacatgcaggctatgggttggacaggcttggactagactgaaagtggcatataactcttttgcattccatttactagacctcagttatataacaacacttaagggygagcaatgtctctctgcgagcccaggagcacgagaaaatagatgactgtgaatacacagctatctggcacataggataatctttaagtcatggtgttgtgcaaatccagattaaatctaaaatgcaaacagacaagaaaatgtttta

SEQ ID NO: 415705 - DNA, 524 bp, Homo sapiens
ccttatgggctagaccagggtgtccagtcttttagcttccctaggccacactggtagaagaaaaattgtcttggacaaaacataaaatacactaacgatagttgatgagctgaaaaagaaaaaaaaattgcaaaaaaaaaaaaatctcataatgtttccagagagttcacgaatttgtgtttggccacattcaaagctgtcctgggccacatgcagcccacatgcaggctatgggttggacaggcttggactagactgaaagtggcatataactcttttgcattccatttactagacctcagttatataacaacacttaagggtgagcaatgtctctctgcgagcccaggagcacgagaaaatagatgactgtgaatacacagctatctggcacataggataatctttaagtcatggtgttgtgcaaatccagatkaaatctaaaatgcaaacagacaagaaaatgttttaatgtttcttctgtgagggatgcataatataaagtgttaaatggagaacctgaa

SEQ ID NO: 415706 - DNA, 535 bp, Homo sapiens
agcagtagcacatcactgtattcttgcagcttccaaacaagaattactcaaaggtttggaaagtgctgtgtaatcagaaaccattcaaattaagtctgtatttgcttgtaaaatgacccactctcttttcctcttcctctttaatgatgcttattattttcatgtatgaggttaaatgtccattcatgcttagccagtttgctcctgacattcatttcaggcttttgccacaatgatgtcgggattttactctggggatcacaaattggttagctgaagttacttattaaaattatgtaatgtctagttcaaaggcaaaaatttgagaaaatataacaagtagcaaggattgctaatgtttaggtagttgactaccttcccatttactatcagagaagtggattataaagggagggwttaaaacaatactacatgctagagctgtaataaggctgacacatccttccccaacattttttctgatcattactgtctcttatttgtttgtgaaaaaaaaaaaaaagaataaaaagca

SEQ ID NO: 415707 - DNA, 621 bp, Homo sapiens
cattcaggtggctaaattatatcatacatagagttcacagccacagattctcttacgttaaagtgagagcattgattggaaaaaagtgaaaaccatgaaaattgccataagggcatctgggcacattccagagaagctagggactgtgaacctccaaattccactgtgacttccttgtcatagaagcatcccattcttgcaatctaaggagattagactcctcttgcctaaataacctgcaatgacctttccaagacagttgccttacacaaaaatcgtaatcttcctcttttccttactcctaacagataattayattaaaatctaaggtattgagcacaaaatatgatctgggagaaggtagcatacatactaattgcaatattttgccaacatacattaactaaaacctagagaatatttatcataacggattctaagagtttcaaatcaggtagaagaaatggccaaattgaatgatacagtggaattaaccagatttaatttaatgtgttaactaaagtagcttggagtggctctgtgggttcaattgcttgactgaaactcagaatcaaaggtggtctatgctgatggaaattgagatatcagagttaccttggt

SEQ ID NO: 415708 - DNA, 291 bp, Homo sapiens
aattcttagcatagtaaacagaaatctaacttaaaccaccatcatagagagttctggtccctcaaccaattcccagacttgagctggtttacagacacaacatcccwtaaatgaaagaaggcctgggttccttgaggagtgacctttctacattgcctaaatttatcttgtaacttttcttcctagccttccccaaagggactatggacatttaccaaagttactatgcattgaggaaaggaaaacaccaaactttgagggaatttttggaccttaactctaaattaaatc

SEQ ID NO: 415709 - DNA, 426 bp, Homo sapiens
cctcaaccaattcccagacttgagctggtttacagacacaacatcccataaatgaaagaaggcctgggttccttgaggagtgacctttctacattgcctaaatttatcttgtaacttttcttcctagccttccccaaagggactatggacatttaccaaagttactatgcattgaggaaaggaaaacaccaaactttgagggaatttttggaccttaactctaaattaaatctaatttgggggagaaaaagcccacttcttcttcacaagtccagacagaagcttatggaagccagatgataaagctttgatgtatgtctgtctgacagtggccccaggaggtcttctaytcaccctgcaataatttcttcagccccagaaagcagatttgaaatagacatatttaacaattggcagactcctcaa

SEQ ID NO: 415710 - DNA, 624 bp, Homo sapiens
aactggtctccagctgaggccacatccttgcgtagcttttttccccttgttttacccagcttacctcattcattttctcctgataacattccctccatacataccttaaataggaatctgcttgggtttgtttccaaagaacataaattaagaaactagctaatctcaacattgtttagtagaaaacaaatagaaaatagcaagaaaaaaaaattatgtaggtactcccctgtcaaggaaggggagcttaactcaccacaccttcactgtggctgtacttagcaactctattctgaagtgcagaatataaaaagggagaagaaaactacagtggagagcsttggcaaatattacctaggccaggtgatcaaagttaaccttatcagtaatatgacatgctgatggaatgtaccattggtacaatgtaatgaggatgacactttgcttctgttgtcttctccctaaaaacccagactaaccatgaaaaaaaaacatcagacaaacccacatcaaaggacattctacaaaatatccaaccagtactcttcaaaactgtccagtttattggaaagcctaaaaacctgtcacaaaccagaggaggctaaaggaagcatactgacctaa

SEQ ID NO: 415711 - DNA, 624 bp, Homo sapiens
aactggtctccagctgaggccacatccttgcgtagcttttttccccttgttttacccagcttacctcattcattttctcctgataacattccctccatacataccttaaataggaatctgcttgggtttgtttccaaagaacataaattaagaaactagctaatctcaacattgtttagtagaaaacaaatagaaaatagcaagaaaaaaaaattatgtaggtactcccctgtcaaggaaggggagcttaactcaccacaccttcactgtggctgtacttagcaactctattctgaagtgcagaatataaaaagggagaagaaaactacagtggagagccttggcaaatattacctaggccaggtgatcaaagttaaccttatcagtaatatgacatgctgatggaatgtaccattggtacaatgtaatgaggatgacactttgcttctgttgtcttctccctaaaaacccagactaaccatgaaaaaaaaacatcagacaaacccacatcaaaggacattctacaaaatatccraccagtactcttcaaaactgtccagtttattggaaagcctaaaaacctgtcacaaaccagaggaggctaaaggaagcatactgacctaa

SEQ ID NO: 415712 - DNA, 624 bp, Homo sapiens
gcaaactaaacaatttttctatttattttttckagaacaattttctaaagaaaattattcaaggacaagagataagccttaaaaacaaattattctagtgcatgttaaattatgtaagcaggaacaaatcaaaatttattcatgaacacatgactgacaaatagtgaaatcattgttccaaacctcttgagagtatgtctcaaactgaatctagtttgagagcctctttgtgacatttacagggctatacttcaatggaaatatatttgttttagatgaaagggagagggtctaatgaggagaactttgccttttgtaggaaagacaaaaaggtactgttgtggttttaatttaggaaaaagggatgaaaatactacatagagctcttcgaactttcctacaaactacctcttaagctttcattcttgactatttggcagtgttaatcaatgttttgttcaagattatctgattacatgaagtgtttaaaatgtgaaatgctaggcctccatgtgcttaccgagattagtatttcaaaaaaatatttcctgggtttcaaaaaaaaaattccagaaggctaaacttttagaaaggatacagagtgatttagataaagttggaaaa

SEQ ID NO: 415713 - DNA, 624 bp, Homo sapiens
gcaaactaaacaatttttctatttattttttcgagaacaattttctaaagaaaattattyaaggacaagagataagccttaaaaacaaattattctagtgcatgttaaattatgtaagcaggaacaaatcaaaatttattcatgaacacatgactgacaaatagtgaaatcattgttccaaacctcttgagagtatgtctcaaactgaatctagtttgagagcctctttgtgacatttacagggctatacttcaatggaaatatatttgttttagatgaaagggagagggtctaatgaggagaactttgccttttgtaggaaagacaaaaaggtactgttgtggttttaatttaggaaaaagggatgaaaatactacatagagctcttcgaactttcctacaaactacctcttaagctttcattcttgactatttggcagtgttaatcaatgttttgttcaagattatctgattacatgaagtgtttaaaatgtgaaatgctaggcctccatgtgcttaccgagattagtatttcaaaaaaatatttcctgggtttcaaaaaaaaaattccagaaggctaaacttttagaaaggatacagagtgatttagataaagttggaaaa

SEQ ID NO: 415714 - DNA, 624 bp, Homo sapiens
gcaaactaaacaatttttctatttattttttcgagaacaattttctaaagaaaattattcaaggacaagagataagccttaaaaacaaattattctagtgcatgttaaattatgtaagcaggaacaaatcaaaatttattcatgaacacatgactgacaaatagtgaaatcattgttccaaacctcttgagagtatgtctcaawctgaatctagtttgagagcctctttgtgacatttacagggctatacttcaatggaaatatatttgttttagatgaaagggagagggtctaatgaggagaactttgccttttgtaggaaagacaaaaaggtactgttgtggttttaatttaggaaaaagggatgaaaatactacatagagctcttcgaactttcctacaaactacctcttaagctttcattcttgactatttggcagtgttaatcaatgttttgttcaagattatctgattacatgaagtgtttaaaatgtgaaatgctaggcctccatgtgcttaccgagattagtatttcaaaaaaatatttcctgggtttcaaaaaaaaaattccagaaggctaaacttttagaaaggatacagagtgatttagataaagttggaaaa

SEQ ID NO: 415715 - DNA, 510 bp, Homo sapiens
cttctttcttcttagttcatctagctaaaggtttgtcaaatttgttgatcttttcaaagaaccaacttctggtttcattgattttcttctttttttttgccattcattattttatttatctctgccgtaatctttattatttccttccttatgttagctttgggtttcgtttgttcygatttttatagtttattaagctgtaaagttaggttgttgatttgatacctttcttgttttctaatataaatattttcaaatttccctcttagaaatgttttctcctattcctagtttgttgagttgagtactttttatcataaaagggtgttgaattttgtcaaatgctcttttcttagcatttgctctgccccatactttttggtttgttgtgttttcattgtcattgatctctaagtatgtttccatttctcttgtgatattttctctgatccctttgctatttaatagtgtgctgttgagtttccaaatatttaggaatttttacttcta

SEQ ID NO: 415716 - DNA, 523 bp, Homo sapiens
atgggtgactaaataatctgtgcaccaaacccttatgacatacaatttacctgtataggaaacctgcacatgtacacctgaaactaaaataaaaatcaaaaaataaactgcacttcataccatctgtctaattggaaccctgtccatgtmtcctaagcacatacgtagggcatgtgtctaccttttcctctatatctacatatgatttcagtgtgttaacccagcaaccacaccccttgttttatgctctttctatgattgatgatcattcttttacacaactcagggtggacataaatatttcctaatgctgaacactgctaactatcctgttaactctctgcttagcccccaagatctataagacctaatgtaattcattgctttttcccaccgttaagcaaagtcttcttccctcatctgatgtgatgatacctgtgaaatttccgggggcaaacaacttatagcagtggtacccaaacctacttgatcttggtagccccgtctccatgagacctagtct

SEQ ID NO: 415717 - DNA, 523 bp, Homo sapiens
atgggtgactaaataatctgtgcaccaaacccttatgacatacaatttacctgtataggaaacctgcacatgtacacctgaaactaaaataaaaatcaaaaaataaactgcacttcataccatctgtctaattggaaccctgtccatgtctcctaagcacatacgtagggcatgtgtctaccttttcctctatatctacatatgatttcagtgtgttaacccagcaaccacaccccttgttttatgctctttctatgattgatgatcattcttttacacaactcagggtggacataaatatttcctaatgctgaacactgctaactatcctgttaactctctgcttagcccccaagatctataagacctaatgtaattcattgctttttcccaccgttaagcaaagtcttcttccctcatctgatgtgatgatacctgtgaaatttccgggggcaaacaacttatagcagtggtacycaaacctacttgatcttggtagccccgtctccatgagacctagtct

SEQ ID NO: 415718 - DNA, 592 bp, Homo sapiens
tttgaaatagagtttcttatactatttcattctggatatctcacataacatttcctaaatctaattatgctatgtggggaaaaataataaaaatataatagactaggaaatgtgaagtatggcttttgtgtgtgttctggaaaacagtgagagcacctgccagagactggggactgccaaatatttcttgacatatgagcgtgcagttcaaccttaggttctctcacatatacacataggaattgcttttagaatccacagtggaaggtgagcctttaaccaaaagagaacagacctcataaggctactacatttcaaaagagattcaagagtatgcattttaaaagaaagggagttagataatcagaagaacaaagaygagattgacattgaaggtctatgaagaggttttgatgaatattcaaggagtaaaccattaaggatattttaaaattgagtttttaacttttagaaagtgtgacaaaagttatattgattactggaagcttaattttctcttccattctttagcacatcagtttccaggttgcattctcatagtagttgtaattcctatttcagactagtttat

SEQ ID NO: 415719 - DNA, 619 bp, Homo sapiens
tgtttattttgtgtctccctgaacttgaatataatatagatgccatgaggagggaccttgtctgttttatrttcctagcatccaaaacagtatctgaatcactgtgagtgtgtagcaaatattccttgaaaaaaattaatgaataaataaatcttttccttaccttgaaaattactcatatttcagatatatatgttagataacattatatatagtgaagtatacatttattgcagtgtatatgtacaacacaaataagtatatgtacatatagtttatatttgagtgtcaggaaggatgtacatgtatgagtttagaactagcatgaaaatgagcctacctcgaaactgtaaaactggtaactatccaaaaaaatcaacacagcaacatcagaattgaattatctctcccttctgtttcacaggtcttgtctccttccaaaggagaatgaaggggtgtttacattttttaatccttatgttgcgctctgacatgaggtgtccttcctcactgaagctcaaacaaaaaggtacttctggatttatttctgagtatctcaaacctgctgatctctgcaaagtgtgagaggacttttgctaaagtgctatcaacaatctta

SEQ ID NO: 415720 - DNA, 541 bp, Homo sapiens
tctcaagaaatatctacctacacattctatctttaggctataagaatgaagcttgtgaaatttatcttgcctctaattttaaacttaaattttaagatctactttcccctgcaaatgcgaatgattattctcagtcattttgactgcactttggctgtgtttgaattactttcatgtagcatattttaaaaataaaagttcattttttggaaatccagcatttagattaaaatttgaagaaaaaaatttatgataagaaatttatcttttattcaaccagtgtagcctgtcactttttataaattttatcccataaatgatttgaaggaamttggcaattgagtttatcctactgtatctttgctataaaaactagcaaaaagccagtttacacttagcatcagttttgtaagttttattaaaaatagaaaaaatggtctcaaataaatgttactttgggagtttgagacatggctaatggattgtaaataagtctcagggattgtattaaaatctctgtgtagaaaggccaaagaagctg

SEQ ID NO: 415721 - DNA, 619 bp, Homo sapiens
tgtttattttgtgtctccctgaacttgaatataatatagatgccatgaggagggaccttgtctgttttatgttcctagcatccaaaacagtatctgaatcactgtgagtgtgtagcaaatattccttgaaaaaaattaatgaataaataaatcttttccttaccttgaaaattactcatatttcagatatatatgttagataacattatatatagtgaagtatacatttattgcagtgtatatgtacaacacaaataagtatatgtacatatagtttatatttgagtgtcaggaaggatgtacatgtatgagtttagaactagcatgaaaatgagcctacctcgaaactgtaaaactggtaactatccaaaaaaatcaacacagcaacatcagaattgaattatmtctcccttctgtttcacaggtcttgtctccttccaaaggagaatgaaggggtgtttacattttttaatccttatgttgcgctctgacatgaggtgtccttcctcactgaagctcaaacaaaaaggtacttctggatttatttctgagtatctcaaacctgctgatctctgcaaagtgtgagaggacttttgctaaagtgctatcaacaatctta

SEQ ID NO: 415722 - DNA, 539 bp, Homo sapiens
aagcaatctcagagaaaatgtagaggcatttcacatcttactgatttttttgtctcctgtaacaaagttattgaataggttgtgctccaaagaaacaaagttttctctggcttctgtgttcaaaaatattcctagaatgaccctttcccaattcttgatggcattatagattccatagctttctaagaattttctcatgtttagactttaaagattctaaatcaaacactaatctcatatccaattaacggcttcttctcttctcctatcttaggcgtggtgtagaggctgsagaacagcagggaagaaagtggggtaaattctttcactcccctatcacgtcctctcccttcttctgtattgtgtgtgtgtgtgtgtgtgtgtgtgtgtgtgtgtgtgagagagagagagaaagttatcaggcaacacactatacttttaataaaaagcattatataggataaagtatttacaaattggacaacacaggtgcattagctccttggtatcttaatttcatatctagctaaaggaagctg

SEQ ID NO: 415723 - DNA, 539 bp, Homo sapiens
aagcaatctcagagaaaatgtagaggcatttcacatcttactgatttttttgtctcctgtaacaaagttattgaataggttgtgctccaaagaaacaaagttttctctggcttctgtgttcaaaaatattcctagaatgaccctttcccaattcttgatggcattatagattccatagctttctaagaattttctcatgtttagactttaaagattctaaatcaaacactaatctcatatccaattaacggcttcttctcttctcctatcttaggcgtggtgtagaggctggagaacagcagggaagaaagtggggtaaattctttcactcccctatcacgtcctctcccttcttctgtattgtgtgtgtgtgtgtgtgtgtgtgtgtgtgtgtgtgwgagagagagagagaaagttatcaggcaacacactatacttttaataaaaagcattatataggataaagtatttacaaattggacaacacaggtgcattagctccttggtatcttaatttcatatctagctaaaggaagctg

SEQ ID NO: 415724 - DNA, 592 bp, Homo sapiens
gttaggactctgctccccagtcattactgcatccaccaggttttgtcccaccttctactgcagtgaaaccattggacctagggagatgcaaggctgacagggtgcttctgtggagtgggacagcatgcttcactcccctctgtgtgcaacagtaggaatgctgctgagatatgccaaatggcacagagtctttggtaaaagtggtctttcagtttttacttatgtttcacaccttcagtttcaaatatgaatttgactcagagacaaatcagagtgataagcccacaagcagatcagaatttccattcctttccaggactaagccattctttcacagtcaagcttgagatacttgcatcctttgccccataggatgatttgctttcaggagktgtttcaatcttctaacggcagagctagaagatcagttcaccagacatgcccaatatatacaaagggtagaaaacatcacattatttacgcttggtaccagaatggtgtaagagatgcaactggctttaagaagaataccttaataagtatctggggtggacagaggctgagacccaaaggcatagtggttggacattac

SEQ ID NO: 415725 - DNA, 592 bp, Homo sapiens
gttaggactctgctccccagtcattactgcatccaccaggttttgtcccaccttctactgcagtgaaaccattggacctagggagatgcaaggctgacagggtgcttctgtggagtgggacagcatgcttcactcccctctgtgtgcaacagtaggaatgctgctgagatatgccaaatggcacagagtctttggtaaaagtggtctttcagtttttacttatgtttcacaccttcagtttcaaatatgaatttgactcagagacaaatcagagtgataagcccacaagcagatcagaatttccattcctttccaggactaagccattctttcacagtcaagcttgagatacttgcatcctttgccccataggatgatttgctttcaggagttgtttcaatcttctaacggcagagctagaagatcrgttcaccagacatgcccaatatatacaaagggtagaaaacatcacattatttacgcttggtaccagaatggtgtaagagatgcaactggctttaagaagaataccttaataagtatctggggtggacagaggctgagacccaaaggcatagtggttggacattac

SEQ ID NO: 415726 - DNA, 570 bp, Homo sapiens
caaccaatttgaagattccttttccttctgatatcctgcttaacaagttttgagccgggcacaccagtaatcgaaaaccatgttcactttccctaatgaaaaaatcatttgcgaattgtctatgtagtttttctcactgtagtaagtcaatacaactcaattattattaaagcttctttgtctgagaaggggacttttcataatttggaggacctaacaaaattcagctgtgrcttcccctaacgatggcatagaccagggctctgggtcagatcacttctcttagtgtcttttgaggcctcttgcatctcttctactggaggctgctggccagaggggtgagtccatgctgggcctctgctctgatttgactgaggtcactaagtactaagctttattgtctcttgagaaaactagatatcacctgtggaagtctatgctctgattgggattgttttcttaaaagtttttggtgaaattgcgtttatctggcctgactttgtcttgctctatatcatcaagaacattgtctaaaagagcactagttagtagagaaaattctcacaaatc

SEQ ID NO: 415727 - DNA, 570 bp, Homo sapiens
caaccaatttgaagattccttttccttctgatatcctgcttaacaagttttgagccgggcacaccagtaatcgaaaaccatgttcactttccctaatgaaaaaatcatttgcgaattgtctatgtagtttttctcactgtagtaagtcaatacaactcaattattattaaagcttctttgtctgagaaggggacttttcataatttggaggacctaacaaaattcagctgtgacttcccctaacgatggcatagaccagggctctgggtcagatcacttctcttagtgtcttttgaggcctcttgcatctcttcyactggaggctgctggccagaggggtgagtccatgctgggcctctgctctgatttgactgaggtcactaagtactaagctttattgtctcttgagaaaactagatatcacctgtggaagtctatgctctgattgggattgttttcttaaaagtttttggtgaaattgcgtttatctggcctgactttgtcttgctctatatcatcaagaacattgtctaaaagagcactagttagtagagaaaattctcacaaatc

SEQ ID NO: 415728 - DNA, 594 bp, Homo sapiens
agcttaacaatgatttctgaactttaatttgcatatattataacatgggtttcaacatttttgaagctctctctgattctatccatgacctaagaccaactgcttacttctggggatgcccttgagctccaggcagaattgttctagttccagcttatgactggtccttggctatatgcagggtgtccatctctacttctgatgatttctatagctttcatctatatttcagttctgacattaaattttatttcataaaacrtacacctggacttgcccatgggctgcatggcttcacatctcacccattaacatggcaatggatttcatctttagttctggtgtccgaagatttttctttcctgtttttggctttaatatttagagaaggccacctataacttctgtgttttgggaatgagtgaaggtactgggtggggtttcttatcttctcagttcatgatcctgtctggaagtctacaatggtgcctttatctgcttcaaatgtttttaataggttgtcttattctattttagctgttataacaaaattacaaagtggtgtgagactgaaattgtgaatactgaaccatt

SEQ ID NO: 415729 - DNA, 444 bp, Homo sapiens
aaaggcaaacatcactaaatgttttgatgtccttttgcccagaaaaagtatagcttgactgggtgggttttctaaatagcattcctaagatgatggattagtaatattctctccactagaaacaaatgaaatttgagyagacatgagaataactaccacatcctacattatatgaaccccaaatttattgcatcagtgacatatacgtcagctgtctttggcaacaaaattgagacttttaggagagttttgttattgttgttttaaagtttatgtcaaacatctagaaccatgtctgcttttgtaggagtatgcatggatgttctaacacccaggttttacagaactgaggcagcatgaggaatcttatattcatcccatgtcattgcccaacattctctaggaccttgctgtgcagcagcagaggcaccatctgggatcttg

SEQ ID NO: 415730 - DNA, 656 bp, Homo sapiens
agtaatattctctccactagaaacaaatgaaatttgagcagacatgagaataactaccacatcctacattatatgaaccccaaatttattgcatcagtgacatatacgtcagctgtctttggcaacaaaattgagacttttaggagagttttgttattgttgttttaaagtttatgtcaaacatctagaaccatgtctgcttttgtaggagtatgcatggatgttctaacacccaggttttacagaactgaggcagcatgaggaatcttatattcatcccatgtcattgcccaacattctctaggaccttgctgtgcagcagcagaggcaccatctgggatcttgttacaaacacttttctaggccctgcctcagcactactgaatcaggatatgcagtttatgaagattcctagtgatttatatgggctttaaaagttgaaaagcctgctctgggagctccatgcctattccccaaattgctccaatgcacaaaktaattctccctcctccaaatatcaaaaaggcattagaagagttaaatgacaacataaatattttttttcaaaataaagtatgggttatcactagaattaacactgtgaaagattccttacatttcagaaaatgagctatcttaattcaatctaatctcca

SEQ ID NO: 415731 - DNA, 593 bp, Homo sapiens
gtaacaaaaattatagcagtcttgctaattgaatagttttccttgatattatattttattggtgattaaacacaactattctgtaaacctgaagtatgctcctgattaactgctgattcaaactgaagcaagtaaagtctagtgacctctttgtcttttgaaataaagtatagaaaatattrtcggtttgagagtgaagtatcccagaaaatttcactccaaaaaaaggcatcctggcttgataagtgttttgagttaaaggtctttggagacaaccaggtgctagaagagactttttccttatctgcatacagactggacacatcaaggagaaaaattggtttccaccttgccctgaaatctaatttactgaggcagaaaagaagactgaggaatgcagctatgcctgggtgaccttttcataagacaatttcaatctccaggatgcattcaacttccaaagacattcatttacaggctaatttctgtctcccaggtccattcattctccctaataatcactctttgctcctcaaaagaattacctacattctccctctccctcctccttcatgaagaaagctacataagca

SEQ ID NO: 415732 - DNA, 489 bp, Homo sapiens
atttactgaggcagaaaagaagactgaggaatgcagctatgcctgggtgaccttttcataagacaatttcaatctccaggatgcattcaacttccaaagacattcatttacaggctaatttctgtctcccaggtccattcattctccctaataatcastctttgctcctcaaaagaattacctacattctccctctccctcctccttcatgaagaaagctacataagcatctggaccccatggagttactgagtcgtcagtctcctaggattccaccatgctaggcatgttaaaataaattttgtatcacttttcttctattaatctgccttttgtcagctgattttcagagaatcttcagtgggcaaagaggaagttttcttttggcctgtacaaggaactcatcttatcaaagagatgtgcctcctaaaaagaaaaatgcattactacatatgtgagtagttcaaaagatgaaagattaaacatgtt

SEQ ID NO: 415733 - DNA, 489 bp, Homo sapiens
atttactgaggcagaaaagaagactgaggaatgcagctatgcctgggtgaccttttcataagacaatttcaatctccaggatgcattcaacttccaaagacattcatttacaggctaatttctgtctcccaggtccattcattctccctaataatcactctttgctcctcaaaagaattacytacattctccctctccctcctccttcatgaagaaagctacataagcatctggaccccatggagttactgagtcgtcagtctcctaggattccaccatgctaggcatgttaaaataaattttgtatcacttttcttctattaatctgccttttgtcagctgattttcagagaatcttcagtgggcaaagaggaagttttcttttggcctgtacaaggaactcatcttatcaaagagatgtgcctcctaaaaagaaaaatgcattactacatatgtgagtagttcaaaagatgaaagattaaacatgtt

SEQ ID NO: 415734 - DNA, 593 bp, Homo sapiens
gtaacaaaaattatagcagtcttgctaattgaatagttttccttgatattatattttattggtgattaaacacaactattctgtaaacctgaagtatgctcctgattaactgctgattcaaactgaagcaagtaaagtctagtgacctctttgtcttttgaaataaagtatagaaaatattatcggtttgagagtgaagtatcccagaaaatttcactccaaaaaaaggcatcctggcttgataagtgttttgagttaaaggtctttggagacaaccaggtgctagaagagactttttccttatctgcatacagactggacacatcaaggagaaaaattggtttccaccttgccctgaaatctaatttactgaggcagaaaagaagactgaggaatgcagctatgcctgggtgaccttttcataagacaatttcaatctccaggatgcattcaacttccaaagacattcatttacaggctaatttctgtctcccaggtccattcattctccctaataatcactctttgctcctcaaaagaattacctacattcyccctctccctcctccttcatgaagaaagctacataagca

SEQ ID NO: 415735 - DNA, 516 bp, Homo sapiens
tcatctccaaacccctcactcctttcatcacattatccttatttggcaaaaccacaacccaagtcaatccaactttctacctactccgtgccttacctactgtgctcacacatctcatcatttctggagaaaagcakgcagccattctgaccactctcaaattaaaattaataccaagaattttaagtgaaccattgttgctgcctggccattatatattttcctaatctggtagttcttacatttctttaggttactttatcatacactctcctttctcctcaaacatccaacacttttatttccatccttactgtcaactactgacctgcttggtattttattgctataattgcagcaatcagaagacagtttccaaaggttagcagcaccaaatctaccaactagcccacagctgtgtattctctgacattcctcattactgtgagtgaaatcttcccaagttattaaggcatctccaccctacccatttatacactacttcccctaccttct

SEQ ID NO: 415736 - DNA, 462 bp, Homo sapiens
tattgtggctcatggttctgcagggtgtacagaaagcatggaaccagcatctgctgggcttctggagaggcattgggaagctctgactcatggcagaagggcartggagctggcatagaaaaggagcaaagggtggggggggggggtggggaggtgcagattatttttaacaaccagatctccaggtaacagagtaagaactctctcactactgtggggagggcatcaatcctttcaggaaggatctgtctctgtgacccaaacatctccctcaaggccccacctccaacactgagggtcatatttcaacatgagatgtggagaggatgagcattgaaactatatcagaggtaaaagaaattatgcaaatgagttgacggtctctttgggatcacgcctctgttactctatactcacctagcaagcatttattgagcaccagctatttggtaggcatcgttc

SEQ ID NO: 415737 - DNA, 571 bp, Homo sapiens
atttttttttcttagatagatctactttttctttaaaaactttactctttaggttggcctgaatccggccagtgatctcatgattctaacattcatgtgaatattctgatatgctttgaggacccttcttttctttcttacaggtattgacaaattagcactgcctgtctcaggtaggggacaccattgcttctttagragaaagcaatatgtgtagtggtgagaacgcaggtattggagacagaattggcttctaattcttgttcttctacttactagttttatggtatcagtcaaattaagtattctcttcaagcctcagtttcctcatctgtaaattggggataattataaaaatggcagctattgtattttcatattattctattttgctttgtctatttacttttatattatttcataatcctacatcacttataacttaaagaatacatcttcctgaggccaggcatggtaactcatgcctgtaatcccagcatttttggaggccgagacaggcagactgcatgagctcaggagttcaagacaagcctgagcaacagggtggaac

SEQ ID NO: 415738 - DNA, 599 bp, Homo sapiens
attagtaagataagtgtctttgcatatgactgtaattgcacccaccccacttacacaccttttctttctttgactgcttcagccatgtcctggtttaaaacttcctaaactgaactatcagtgagttgatcatgtgcataaacttttatcaaattagatgttccacagagatttttaagagttctgtttattatctctcatattaaattaaatgttaactgttttggttaacaatccaacatactaggaaacagagataactctgtaaaagtaacagaaaactggatagaaaaatgttttyagttactaacttacaatttaaactatgataaagtaattgctgcataataattaaactcctgcttctttaacactgtccaatggaataaatataagacactaagatataaaccttctctttgttataagatagagttaagaagacaggaccacattatagttcatgttgctcttctgaaaaatagggggaaaacaatagcctagacacagactagggctactctattgtattgacatcaaccatgttcacttgatattcatgagaacttaagttaatccagatctttaatatggcacct

SEQ ID NO: 415739 - DNA, 599 bp, Homo sapiens
attagtaagataagtgtctttgcatatgactgtaattgcacccaccccacttacacaccttttctttctttgactgcttcagccatgtcctggtttaaaacttcctaaactgaactatcagtgagttgatcatgtgcataaacttttatcaaattagatgttccacagagatttttaagagttctgtttattatctctcatattaaattaaatgttaactgttttggttaacaatccaacatactaggaaacagagataactctgtaaaagtaacagaaaactggatagaaaaatgtttttagttactaacttacaatttaaastatgataaagtaattgctgcataataattaaactcctgcttctttaacactgtccaatggaataaatataagacactaagatataaaccttctctttgttataagatagagttaagaagacaggaccacattatagttcatgttgctcttctgaaaaatagggggaaaacaatagcctagacacagactagggctactctattgtattgacatcaaccatgttcacttgatattcatgagaacttaagttaatccagatctttaatatggcacct

SEQ ID NO: 415740 - DNA, 523 bp, Homo sapiens
ataaattgcttcttttgcttgctactaaaaacactgactgatacatattgaatcataggagttatattgaaaccaatgcagaagaagaaaaggcaagggcaatagttgtaaggaataagcctgattctgaccagctcagactattccaatgcaattctacttgacaacatccttgaatcccagatttagggacagcaatttgggttgttctgggtcagagggtagagaaggtayggtgcagggatgtctgtaaatttctctagacaccaacttagttctctttagtgtgtagtactgttgccaagatttgtgcatctatcttcagggctatttcaatggggtcttgggagatggtttgacactattcatcagctaaaatgtcactacagtgcccagtctctgtaacatcattctgttatttattttttattttcctgtctcccagacgggacagtgatctccttaacaacaaacacagtgtcacgctgctccacattctaggacctggcacagaacagaaatg

SEQ ID NO: 415741 - DNA, 537 bp, Homo sapiens
aaaacgtagacattgtttgttgttactgctgcttgaaatgatgcctgataatatgtaagatgaactgaggtctttcagttaraatttgctggagcatatttgatggtgacggacaaactgatatcttctcttttgacccttcaactgaccttcaagtccatccacttgaacacgactttccatcaaaaatctcttcctcctcccctgcctttccatttgcctttaacatcctctgtttcagcttctggcaccatattgtattggaacaaatcatcaggactctacatcactcccttgttctcacgttttgtcaaggtctttcctgtcttgtctacatacacttcatcaagcttgtcccacctgcatcccagggaccgcatgcaacccaacacacatttataaattttcttaaatattttaagatttttttgccatttttattagctcatcagctatcattagtgttagtgtattttatgtgtgttccaggaccattcttcttcttccaatgtggctcaggggaaccaaaagactgga

SEQ ID NO: 415742 - DNA, 537 bp, Homo sapiens
aaaacgtagacattgtttgttgttactgctgcttgaaatgatgcctgataatatgtaagatgaactgaggtctttcagttagaatttgctggagcatatttgatggtgacggacaaactgatatcttctcttttgacccttcaactgaccttcaagtccatccacttgaacacgactttccatcaaaaatctcttcctcctcccctgcctttccatttgcctttaacatcctctgtttcagcttctggcacyatattgtattggaacaaatcatcaggactctacatcactcccttgttctcacgttttgtcaaggtctttcctgtcttgtctacatacacttcatcaagcttgtcccacctgcatcccagggaccgcatgcaacccaacacacatttataaattttcttaaatattttaagatttttttgccatttttattagctcatcagctatcattagtgttagtgtattttatgtgtgttccaggaccattcttcttcttccaatgtggctcaggggaaccaaaagactgga

SEQ ID NO: 415743 - DNA, 585 bp, Homo sapiens
gcaacaaatattaaaaagttgggagcaacaatgacaaaaattaggcagttaactaacaaacttcaactgagaaaaatagcctttattattctaaaaggcaaatacattttatattattagtgctttattaaaacatttatactttaaataatcagatatttcaataaagtttaagtgtcattgctttcattgataatgagaatctaatcaccttaaacattctcttaatttttgcatttggttactcattttaggttactaagttaaagctactctttcacataaaattgcttaagagacaggttttattaatatatgggataagactcatgttcttcatacgtctaaacagcatgcaaaaagaagaacatgataaagtacacttaaaacataaaaagactggaaattatagtgacttgtaaatcatagtataaaaggaaatctttttattattattattattatactttaagttttagggtacatgtsgacaatgtgcaggttagttacatatgtatacatgtgccatgcaatttttgccctatattcaattttattctatacatgtatctctagcacgatagc

SEQ ID NO: 415744 - DNA, 585 bp, Homo sapiens
gcaacaaatattaaaaagttgggagcaacaatgacaaaaattaggcagttaactaacaaacttcaactgagaaaaatagcctttattattctaaaaggcaaatacattttatattattagtgctttattaaaacatttatactttaaataatcagatatttcaataaagtttaagtgtcattgctttcattgataatgagaatctaatcaccttaaacattctcttaatttttgcatttggttactcattttaggttactaagttaaagctactctttcacataaaattgcttaagagacaggttttattaatatatgggataagactcatgttcttcatacgtctaaacagcatgcaaaaagaagaacatgataaagtacacttaaaacataaaaagactggaaattatagtgacttgtaaatcatagtataaaaggaaatctttttattattattattattatactttaagttttagggtacatgtcsacaatgtgcaggttagttacatatgtatacatgtgccatgcaatttttgccctatattcaattttattctatacatgtatctctagcacgatagc

SEQ ID NO: 415745 - DNA, 485 bp, Homo sapiens
ttcacaaagggttcccactgatttgcttgaggccctcttggttctaatcaaactgcattcaacatttcattctaatattttagttaagatgctgaatacaaggaacagaaacctgtgcaagctaattaaaataaaggaaagtctgttgaaaagacacaakatctttaaatagaactaaataattacatcctatgaaacctggagatgagtcttgggaacctatcaaagattgaagcaatttctcaaagctttttttgcttctcagtagcaaatgcatcaaatatagcttccactgtcccgatttcaggtgatatttctaggatctctaccatcctactgctggaactttgtttcttagttctaagatttaaaaggcagactctgattggcagctgggcaactaatagaatgattccaggtaggctgtatgtccaaagaaggagtcacaagctggccgagcaatcaaaacttgtcaatttgagaac

SEQ ID NO: 415746 - DNA, 656 bp, Homo sapiens
aagtaattttaatccctctctttagtgaatcagtcatttgatcagctattgtgatagttttctcttttaaatcagctccaatctacatttaaagggaccaagagatatggagccctgtgtgtgtgtgtgtgtgtgtgtgtgtgtgtgtgtgtgtaagagagaaagggtgagaaagagagagtgagaaagagttagaaggccaggaatatgaggtcaaactccactaactagttgtggaaactttgtaattacttatgcttggtaatcctccgtaagcctcagttccctcaattataaagtgaagataggagatgagcttaggtgtaatgattgttttgaagactaaatgagattatctttataaagcattaacttcagtgccttgtattttaaatttattcacacatcagacatattcttgtattgtattgtatctttataagtttatatttacatattgtattagcatattstatctttataagtttatatttacatatgacacatttattacaagtaaggcaagaatttccttaaaaattgaaacagtgaagtaatatgtgctggaataaaggtttctgttcaaaacaaaattcactgagtaccttctagtaggttcttactgtatcttccattctggctggggatgagaataa

SEQ ID NO: 415747 - DNA, 504 bp, Homo sapiens
ttagataaatttaacaaggagattgaaataatgaagaatcaagcagaaattctggcatttaaaaatgcaattgacatatgtaagaatggatgagagtctcttaattcagaatttatcaagcagaaagaattagtgagcttgaagacaaactatttgaaaatacagtcagagaacacaaagaaatagaaaagaatgaagcacacctacgagatctaggaaatcgcctcaaaaggacaaatctaagagcaattggtttaaagtggaaatagagaaaaagatarggggagaaatctcattcaaagggataatcacagaggacttcccaaacctgaggaaatatattgatattcaagtagaaaaggttatagaacaccaaacagatttaacccacaaaagactacatcaaagcatttaattatcaaactttcaaagatcaatgaaaaataaatgcttctaaaagtggcaagagaaaagcaaccaatatcatacaatagagctatagta

SEQ ID NO: 415748 - DNA, 595 bp, Homo sapiens
gaaatctcattcaaagggataatcacagaggacttcccaaacctgaggaaatatattgatattcaagtagaaaaggttatagaacaccaaacagatttaacccacaaaagactacatcaaagcatttaattatcaaactttcaaagatcaatgaaaaataaatgcttctaaaagtggcaagagaaaagmaaccaatatcatacaatagagctatagtacgtctggcagcagactttgcagtggaaatcttacaggctaggtgagagtggcatgacatgtttaaagtactgaaggaaaaaacttttaccctagaagagtatatccagtgaaaatatcatttaaacatgaaggagaaataaagactttccagagaaacaaaagctaagaaatttcctcaaccagatctgtcctacgagaaatgctttaaaggaagttcttcagtcacaaagaagaggacattaatgagcaataaatcagctgaagatacaaaactcactggtaatagtaagtacacagaaaaacacagaacattataacactgtaattgtggtgtgtaaactacttttattataagtagaaacactaaaagattaac

SEQ ID NO: 415749 - DNA, 595 bp, Homo sapiens
gaaatctcattcaaagggataatcacagaggacttcccaaacctgaggaaatatattgatattcaagtagaaaaggttatagaacaccaaacagatttaacccacaaaagactacatcaaagcatttaattatcaaactttcaaagatcaatgaaaaataaatgcttctaaaagtggcaagagaaaagcaaccaatatcatacaatagagctatagtacgtctggcagcagactttgcagtggaaatcttacaggctaggtgagagtggcatgacatgtttaaagtactgaaggaaaaaacttttaccctagaagagtmtatccagtgaaaatatcatttaaacatgaaggagaaataaagactttccagagaaacaaaagctaagaaatttcctcaaccagatctgtcctacgagaaatgctttaaaggaagttcttcagtcacaaagaagaggacattaatgagcaataaatcagctgaagatacaaaactcactggtaatagtaagtacacagaaaaacacagaacattataacactgtaattgtggtgtgtaaactacttttattataagtagaaacactaaaagattaac

SEQ ID NO: 415750 - DNA, 595 bp, Homo sapiens
gaaatctcattcaaagggataatcacagaggacttcccaaacctgaggaaatatattgatattcaagtagaaaaggttatagaacaccaaacagatttaacccacaaaagactacatcaaagcatttaattatcaaactttcaaagatcaatgaaaaataaatgcttctaaaagtggcaagagaaaagcaaccaatatcatacaatagagctatagtacgtctggcagcagactttgcagtggaaatcttacaggctaggtgagagtggcatgacatgtttaaagtactgaaggaaaaaacttttaccctagaagagtatatccagtgaaaatatcatttaaacatgaaggagaaataaagactttccagagaaacaaaagctaagaaatttcctcaaccagatctgtcctacgagaaatgctttaaaggaagttcttcagtcacaaagaagaggacattaatgagcaataaatcagctgaagatacaaaactcactggtaatagtaagtacacagaaaaacacagaacattataayactgtaattgtggtgtgtaaactacttttattataagtagaaacactaaaagattaac

SEQ ID NO: 415751 - DNA, 566 bp, Homo sapiens
ttctgctagtctttcgagctctaaattgcacaaatttattgttcagattatctaaggcaaaagtctgtttgctaggtagggactgtgatctatcattaagcaamggctatggagctactgaagtatgtctgcaccaaactgttaaaattcattaaaacattagcataataacctttactatacttgcaagtgggaacagaaaatttatgtttacttcaagacagttgctctgttcctccatagtgtacagttgatacgtatgctagagtttgttggaatagtccgttagcctttgggatgaacagttcaacataacttggtctctgcgacattcatttagctcattttggcattctttcttgaaatcttactcctcatctagggccctgtctggtttattagagtagcgtatatttctcacatattttgcataaaacttttgaactgtaaacaatgaattgtatttgtaatctctatacttaaggactttaactgtgaggcatctcctacatgattcttagataaagaaagataagtagtcttcagtgtttcattcatttatttct

SEQ ID NO: 415752 - DNA, 565 bp, Homo sapiens
ctttcattagttttcatacttttatgaaaagtcatacgtttatgactaaaaataattacactaaaccaaattgtcagtcatataacacaaccaacaataaatgatttttgaatgtacaaagactcaggaaacatcatccctattaacttctagaaaaacctaacagggatcaaattcacccaaccaaaatatgaatagaaaagcctatggcagacagatgggcattaaaaattaaatctcctgaactctaaaataagataaaaatgaggacttccatttctgcctttgacggaatcatagrctaagactggacatgctctcctgccacatacacaaaaataaaactggacaaactgtgagatgacagttttcaatcactggacaacaggaaccacaggactgatccctgagaagagcagcacagaagcacagtgaggtagaagccaagcagaacacagtagtcccactgaacttagaggcacaaattggagtctggactgcagaagtgactgcaatttgggggcagagtcttgagaggaggatccctaagggtggaagtgaaggg

SEQ ID NO: 415753 - DNA, 626 bp, Homo sapiens
ggaatatcagcagaaacttggttaacaattattggcacaagtacttagaattaatgatctgaagaaatatcacagatcctaaagactcataagtaggataaatcatatgaattaataattaaacatcaagcatcaagtggcaacaaacttctgtsagctgatgcttttgacagtgtgacaattaacttgctgcagtgggtgaagtcagtagttttgcagaccaacctgaaaaagttaagacctactctatcatcaattcagcaatggagaactctttccaaagtagtaagaatagcgtgagtgcagtgaccctaaactacctttatggttatcagagggacttacctaactcaatgccttcactgctgactatggtagatgctataatagttagatccccagagctagctaaattcatgaaagaagtaagcatatgagtgcatagctatgcaccagtaggaaaagagaggatataactaacgtgacaaacaacttcactcagtgtcaatgcgggaagaaatcacttaaaaatgactatggaacaaatttctcatgatcaagggggatggcataactggcaagtgaattatattggtcctctactagcaggttcaagtgggctgcaa

SEQ ID NO: 415754 - DNA, 626 bp, Homo sapiens
ggaatatcagcagaaacttggttaacaattattggcacaagtacttagaattaatgatctgaagaaatatcacagatcctaaagactcataagtaggataaatcatatgaattaataattaaacatcaagcatcaagtggcaacaaacttctgtgagctgatgcttttgacagtgtgacaattaacttgctgcagtgggtgaagtcagtagttttgcagaccaacctgaaaaagttaagacctactctatcatcaattcagcaatggagaactctttccaaagtagtaagaatagcrtgagtgcagtgaccctaaactacctttatggttatcagagggacttacctaactcaatgccttcactgctgactatggtagatgctataatagttagatccccagagctagctaaattcatgaaagaagtaagcatatgagtgcatagctatgcaccagtaggaaaagagaggatataactaacgtgacaaacaacttcactcagtgtcaatgcgggaagaaatcacttaaaaatgactatggaacaaatttctcatgatcaagggggatggcataactggcaagtgaattatattggtcctctactagcaggttcaagtgggctgcaa

SEQ ID NO: 415755 - DNA, 542 bp, Homo sapiens
cactaatttttgcttggctttgcgtgttacagtgtgcccaaggaagatgatataaacggtcaagatacaatactaataacataaaatttgacagcaaattttcataaagtaccttacaatgcrttataactttactctcttcaccaaattaagactaattgtgaattcagtttattcccataagtaatatgtaatatttagatcatcagatttaatattggcccaatagtgagtgaaggtgttatagttttctgaaactgtaaagccctatggttaaatattatattaagccaggcaacccaaccattgcagaattagtgcatatcaaatggaaacaggatattgcagcaaacagaagaaacacttgtaagtggatcataattttaaaacacaacagtaccacactatttctatgagaatgtcccagagcaagaaaataatactcttagctatctctcagatccagcaccaactaatggccaagctggaaagaagaagaataccagatctgttttcctcagagaaagtgatctggacttttt

SEQ ID NO: 415756 - DNA, 578 bp, Homo sapiens
tcaaagcaattgcctgtgtgtaattattgtctttcttccaaaatgtctaacctagcacaatgtgaagtttaaatactcagtgtgtgctttttattaaatatgttcmatatcgttgtgcctttctttctgtgtttgatctataaacaaatgaatagaaaatgagcataataaatcattggtggcaggttcaagagcgccctgctgtttcttttggctgaatgctaaccgaatattgtttaaagcataaaagaagtagaagaagaaggggaagaaattgtgcactgaaggaacattacagccataaactgtttgtaacctctgtagttcttttataaattttaatgaaatgccattgctatgtttgtcacaatgagatcagtgtagttaattaaattgccaccagtttatatttctcctttaggtgtttacttgtatgatgcatgagttattattttccaaatacacatctgtgaaagggctctgtttgtcttgcttccttttgataggtaatttatttgtttttacttctgtatgttaatatctctagtgtaattttattggatccattaaaatatatg

SEQ ID NO: 415757 - DNA, 578 bp, Homo sapiens
tcaaagcaattgcctgtgtgtaattattgtctttcttccaaaatgtctaacctagcacaatgtgaagtttaaatactcagtgtgtgctttttattaaatatgttcaatatcgttgtgcctttctttctgtgtttgatctataaamaaatgaatagaaaatgagcataataaatcattggtggcaggttcaagagcgccctgctgtttcttttggctgaatgctaaccgaatattgtttaaagcataaaagaagtagaagaagaaggggaagaaattgtgcactgaaggaacattacagccataaactgtttgtaacctctgtagttcttttataaattttaatgaaatgccattgctatgtttgtcacaatgagatcagtgtagttaattaaattgccaccagtttatatttctcctttaggtgtttacttgtatgatgcatgagttattattttccaaatacacatctgtgaaagggctctgtttgtcttgcttccttttgataggtaatttatttgtttttacttctgtatgttaatatctctagtgtaattttattggatccattaaaatatatg

SEQ ID NO: 415758 - DNA, 537 bp, Homo sapiens
tgctaggtgctcagcactgaatagaaagcctggcgcatggtaagcattcataatacatacaaacttacataaacatatatataattgaaaggcaagtaaacatgaattatatatttgtagactcatatttctactttgaaattaataaaawttcagggatatgttttgtatgaaaaaaacaatttcatagtaagttatggaatacgcccacatttatttcaagggaggttatgattttgtcactgtgttgtcaacgaggttttgttccactctgctagaaagaaaatgattccagtgggtaaataaagactgaatactgatagaaggatcacattacatgtattattaatgcttgctttgataggtctattggtgagagaagaaaggtcaagtatgaacacaatggataccccggaatctaggccttcattagcattttctagctttgggggtcatgtaaggacacttttttaaggatagactaaacaggtggttagcctttgtaatcaaatgtcttcatattttcatcactaatac

SEQ ID NO: 415759 - DNA, 537 bp, Homo sapiens
tgctaggtgctcagcactgaatagaaagcctggcgcatggtaagcattcataatacatacaaacttacataaacatatatataattgaaaggcaagtaaacatgaattatatatttgtagactcatatttctactttgaaattaataaaaattcagggatatgttttgtatgaaaaaaacaatttcatagtaagttatggaatacgcccacatttatttcaagggaggttatgattttgtcactgtgttgtcaacgaggttttgttccactctgctagaaagaaaatgattccagtgggtaaataaagactgaatactgatagaaggatcacattacatgtattattaatgcttgctttgataggtctattggtgagagaagaaaggtcaagtatgaacacaatggataycccggaatctaggccttcattagcattttctagctttgggggtcatgtaaggacacttttttaaggatagactaaacaggtggttagcctttgtaatcaaatgtcttcatattttcatcactaatac

SEQ ID NO: 415760 - DNA, 547 bp, Homo sapiens
ttccaagctatgaatggatgatttctaaatggctcaacattcaggatgtgtgctggcaaataaaatcccataacacaagaggaataatgtggcaggggaagtttaaagccaatgtccacggcaggaaatctctacaagaagttgcatttttcatattcatatttaaatttgtttcctccctgccctccctctttgcttcttccttcctcctttcttttccctctttatttgttctatctggcaactaacttagtcttagaaatgatttatttttgtaaacarcatgcaagaatgatttccactttaaataaatccacatttccaagataagaaccacaaaagaatggactctagacagcctgtgaaaaagaacttacattttatttttcatttagttagtcagctttacttctgttttcttgtacactaaatcttatggccatctataaacaaaattgtaaaataagtaaagtttgctttatttctcccttccttttagctctttttcacaattttttagctcccttctctgatactaagtacctaa

SEQ ID NO: 415761 - DNA, 547 bp, Homo sapiens
ttccaagctatgaatggatgatttctaaatggctcaacattcaggatgtgtgctggcaaataaaatcccataacacaagaggaataatgtggcaggggaagtttaaagccaatgtccacggcaggaaatctctacaagaagttgcatttttcatattcatatttaaatttgtttcctccctgccctccctctttgcttcttccttcctcctttcttttccctctttatttgttctatctggcaactaacttagtcttagaaatgatttatttttgtaaacaayatgcaagaatgatttccactttaaataaatccacatttccaagataagaaccacaaaagaatggactctagacagcctgtgaaaaagaacttacattttatttttcatttagttagtcagctttacttctgttttcttgtacactaaatcttatggccatctataaacaaaattgtaaaataagtaaagtttgctttatttctcccttccttttagctctttttcacaattttttagctcccttctctgatactaagtacctaa

SEQ ID NO: 415762 - DNA, 566 bp, Homo sapiens
gggacactttggccctctgtgagttttcaaacaatatctttgcccctcaaatctaactctactatataaaagcaatgggtgtgtgcagaagatggttgcaactgtgaagttccacttcatggaattagaaacaattttggggtatcggtaggaaagcaaccactctggccattgagaaggcaaaccgtccggcctttgaggtgtagacggggaaggcacattaataatagttagakctgccctggctccttccacaccaagaaaaatatcttggtaaggacaaaacaaactgttgcatctactttaaacaggctgctgggtcagttatgctaaccaaacaactcgaatcacaatttatctaccttttcttctaatgacattaaaagtctatctcaagcaacagggaatgattccaacttttgtacctcccaaagaaaagtcttgtcaacacctctgtaagtccaccatccatgttctcagtcattgcatgaggcaaatgaatagtacccaatgttgacataaacatacaagacagattaaactgtctgccttcagagtctttccaa

SEQ ID NO: 415763 - DNA, 611 bp, Homo sapiens
tgaataagttctttagtgatttctcagattttggtgcaccatagccagagcagtgtacactgtacccaatacgtattttcttatccctcaccccaactctttccctcaagtccccaaagtccattatatcattcttatgcctttgattctcatggcttttcttccacttataagtgagacacatgatattttgtttcccgttcccaagctacttcacttagaataatgatctccaactccatccaagttgaccaaaggccattattttgttcygttttatggccgagtagtatttcatggtgtgtatgtatgtatgtgtgtgtgtgtgtgtgtgtgtgtgtgtgtatatatatatatatatatatatatatatatatatatatatataccatattttctctatccactcatttgttgatgagcatttaggtttgttccatatttttgcaatagttttgctataaacatgtgcatgcatgtgtctttttcacacaatgacttactttcctttgggcacacacccagtagtgggattgctggaatgaatctgtagatctacttttagtcctttaaggaatctccacactgttttccatagcagttgtactagt

SEQ ID NO: 415764 - DNA, 611 bp, Homo sapiens
tgaataagttctttagtgatttctcagattttggtgcaccatagccagagcagtgtacactgtacccaatacgtattttcttatccctcaccccaactctttccctcaagtccccaaagtccattatatcattcttatgcctttgattctcatggcttttcttccacttataagtgagacacatgatattttgtttcccgttcccaagctacttcacttagaataatgatctccaactccatccaagttgaccaaaggccattattttgttccgttttatggccgagtagtatttcatggtgtgtatgtatgtatgtgtgtgtgtgtgtgtgtgtgtgtgtgtgtrtatatatatatatatatatatatatatatatatatatatataccatattttctctatccactcatttgttgatgagcatttaggtttgttccatatttttgcaatagttttgctataaacatgtgcatgcatgtgtctttttcacacaatgacttactttcctttgggcacacacccagtagtgggattgctggaatgaatctgtagatctacttttagtcctttaaggaatctccacactgttttccatagcagttgtactagt

SEQ ID NO: 415765 - DNA, 596 bp, Homo sapiens
aggtctgagatgttttggaagataatccaattggcttagaaggtagtaggttgacacaaaaatgacatcaaattggccatttgctggtagttgctgaagacaggtaatgaatggtacatggaaaagggtgtgttattaggattcttttaatttatgtacaactttggaattttccatgacaatacatttataaattatcttgaaagatgaggatagaataattactattcaggatcagtataatggcctgtaagatctaacggaagaaacagccaagatttcagagcaaaaatacaaagtcactgaaattataaagaaaaagattagagacttaagmaagtgttagataatagaaatttagaagaagaataatcaataaatggagtactataataattgaagaaatgaaaaaggcagttttctctggtttgcagaattattttagtttgttaattgaaagggtttactaagttccaggaaggactgatggaaaaagacacatttaggcaaatcgtcctgaagtttctgattcaaaaaaaaaagagaaaatttttatgagttctcaaacaaaaagttacacacaaagaaaaaaatgt

SEQ ID NO: 415766 - DNA, 379 bp, Homo sapiens
aaaggagagtcagttagacctggggccagttaaacttcaggtaaaagacaaaaacaaatgatgcataagttaaagtaaaattcagagaccaagttagacttagaaaatggcagcttcaaataattataaggtgttaaacaatttttaaaaatatatctttaatggtccawatcctgagtggcttaatttgtatttcttaagcattatgagcccaagtacttactgaatccataaccgttgatttgtgcaatggcgggaccttatcacatgggctgctaatcatcccccagttctggcattttaaaatatttcattgagttctggcttgcagtttctgattggaaatcctttctggctctttcattttgctctaatatat

SEQ ID NO: 415767 - DNA, 571 bp, Homo sapiens
ttctattggcctattgaatatgtggtttgttttcttttaagaattttggggaattttgagcctttacctcttcaaatatttttttctgccgtgtgctgctgtatcttatatttctaggagttaaattacacatctgctagaacacacaacactgagatttctccatggcacctcttttttttttttttttttactatttttttttattactctgtgttttgtcttggatactctctagtgacctatcttaaagttcactgattctttcttcagsccctagtctgctcacaaacttacaagaggaatttttcttgtttaatattgtgttttcttttttggcatttacatttaaatatttttatggttttctttttttctgataaaatttccatagtttatatgtattatctactttttctactggaacctttagcatattaattataagtattttaaagatgctgcctcatagttcccaaatctgggtctgttcagtctggctctattgactagttttcttttaaaaatgggtcatttttttccctttttttttgtgttcccacaatttttt

SEQ ID NO: 415768 - DNA, 603 bp, Homo sapiens
tccaagtcaggggcttatagataaaactcccatctccctgggacagagcacctgagggaagggcacagcttcagcagacttaaacattcctgcctgctggctctgaagagggcagcagatctcccagcacaatactcgagctctcctaagggttagactgcctcctcaaatgggtccctgacccccatgccttctgactgggacacacctcccaacaggcgtcatctgacacctcatacaggagagctccagttggaatcaggcaggtgtgcctctgtgatgaagcttccagaggaaggagcaggcagccatcttcgctgttctgcagcctccactggtgatacccaggcaaacagcacctggaatggacctccagcaaattccagcagacctgcagaagagrggcctgactcttaaaaggaaaactaacaaacagaaagtaataacgtcaacatcaagaaaaaggatgcccacaccaataccccatccaaaggtcatcaacatcaaagaacaaaggtaaataaataaatgaaggtgaggaaaatccaccttcaaaaatccacctgcaaagaggctgaaaattccaacaaccaaaatgcctct

SEQ ID NO: 415769 - DNA, 616 bp, Homo sapiens
gaaaaaggatgcccacaccaataccccatccaaaggtcatcaacatcaaagaacaaaggtaaataaataaatgaaggtgaggaaaatccaccttcaaaaatccacctgcaaagaggctgaaaattccaacaaccaaaatgcctcttctcctccaagtgatcacaactcctctccagtaagggcacaaaactggacagaaaatgagttttacaaattgacagaattaggcttgagaaggtgggtaataacaaactctcccaagctaaaggagcatgttctaattcaacgcaaggaagctaagaaccttgataaaaggttacaggaacttctaactagaataaccagtttagagaaggacataaatgacctgatggagctgaaaaacacagcatgagaactttgtgcagcatacacaagtatcaatagcgaatcaatcaagcagaagaaaggatatcagaaattgaagattaacttcatgaaaacagtggatctctctgcagacgccctacaagccagaaaagagtgggggacaatattcgacattcttaaagaaaagaattttcaacmcagaatttcatatccagccaaactaagcttcataagtgaggagaaataa

SEQ ID NO: 415770 - DNA, 558 bp, Homo sapiens
cagtttatcatgatgttgctaggtgtggtttgttttcttgctatttatctcctatgccatttgttgaaattttttttttttttgagacagagtcttgctctgtcacctaggctggagtgcagtagcatgatctcggctcactgcaacctctgtctcctgggtcaagtgattctcatgccttagcctccctagtatctgggattgcaggcatatgccaccatacctgcctgatttgttgtatttttattagatgccgggtctcgctgtgtttcccagactggtcttgaactcctgacctcaagtgatctgcctgccttggcctcccaaagtgtttgagattataggcatgagccactgtgctcagcctgttcattgaaattttgattgttttcttttcaaataattattttgcccaagttccctctctctttctctggagccctcattgcccacttgttagtctattaaatattgttccrcatatctcagctacttggttttatctattaatattgggatttggttaatttctattcatcctccttcaagttaacaggg

SEQ ID NO: 415771 - DNA, 563 bp, Homo sapiens
agtaaatccaatctgaggttgatttgggtctaggctttattgcagctttacttgcattattttaccattgctctaaataattttattagtgtgatagatttttctctgcagcggggcttgaggtctgcgtatgcrtgagagtcagggtatctttatatagctgatcttctagctctgcaaaccatggaagggttctgtctgctttaaagattgtcaactttttggtcagtcaatttgcttcctagttttctgctttcagatgatgtctattctcctgctactctgctaccagcctttggaaaacacctgttgtatacttggagatgtccttgaaactccagagaaatttttctgtcatcctttcctcagtctttggaagtcctctagtgtggagatagtaagtgcctggaggtcacagagagatttcttagcactcttaacttgtccccagagttggcatctaatgctttgagcttgatcatgatgcagaatttcctacagtaatttttatcagttctcctgccttggatacaatctttagcagaatgctaacttgcacttgg

SEQ ID NO: 415772 - DNA, 564 bp, Homo sapiens
tggccattccttgtactttcttcctctctttgggcctacatattsgctgaggcacaataatattgaaattgtgccagttaataactctacaatggcctctaagtgtttaagtgaaaggaagagtagcagtctcttactttcagttaaaagctacaaatgatgaaatttagtgaggaaggcatgttgaaagccatgaaaggctaaaaactgggcctcctgagccaaacagttagccaagttgtaaatgcaaaggaaaactgcttgaaggaaattaaaagtgctactccaatgaacacgtggatgatacgaacatgaaacagccttactgctgatatgaagagtgtttgggtgatctggatagaagatcacattagccacaacatttccttaagccaaagcttaattcagtgaaaatccctaattctcttcagatctaggaagtttaaaacaggtgaagaagctgcagaagaagttcatgaaatttaaggaaagaaaccatcttcataacataaaactgcaggatgggatttatcccagggatgcaaagatggttcgacatgtgca

SEQ ID NO: 415773 - DNA, 513 bp, Homo sapiens
gatagagagtagaacgatggttaccagaggctgggaagggtaaggacagtggggaggtggggatggttaatggatacagaaaaatagaaagaatgaataaaacctagcatttgatagcacaatggggtgactgtagtcaataacaatttaattgtacattttaagataccaaaatagtataaatggattgtttgtaacataaaagataaatgcttgaggagatgaatatcccatttttcatgaagtgattattactcattgaatgcctgtgtcaaaatatctcatgtaccccatatatatatacctattaagtacccacaaaaattaaaattaagaattttttaaaaagtgcaagatgaagcagcaaatgctggtatagaagctgcaagttatcaagaagatctagcyaagatcattgataaaagtggctacactaaacaatggagtttcaatgtagacaaaagaagccttctactggaataagacaccatctaggactttcctagttagaaa

SEQ ID NO: 415774 - DNA, 538 bp, Homo sapiens
ttagaagaagaggctatctaggactttcatagctagagaggagaagtcaatgcctggcttaaaagcttcaaaggacaacctgactctcttgttaggggctgatgcagttggtgatttaagatgaagccaatgctcatttaccattctgaaagtcctagagctcttaagaattatgctcaatataatctgcctgtactctagaaatggaataacaaagcctagataagagtacatctgtttacagcatgccttattgaatatttaaagcycactgttgacatctactactcagatagattccttttaaaatattaccgctcattgataatgtgtctggtgacccatgagctctgatggagatgaacaagaagatgaatgttattttcatgcctgtgaagaaaacatccattctgcagcccatggatcaagaaataattttgactttgaagttgtattacttaagaaacacattttataaggctgtagctgtgatagataatgtggtccctctgacagatccggacaaagtaaattgaaa

SEQ ID NO: 415775 - DNA, 538 bp, Homo sapiens
ttagaagaagaggctatctaggactttcatagctagagaggagaagtcaatgcctggcttaaaagcttcaaaggacaacctgactctcttgttaggggctgatgcagttggtgatttaagatgaagccaatgctcatttaccattctgaaagtcctagagctcttaagaattatgctcaatataatctgcctgtactctagaaatggaataacaaagcctagataagagtacatctgtttacagcatgccttattgaatatttaaagcccactgttgacatctactactcagatagattccttttaaaatattaccgctcattgataatgtgtctggtgayccatgagctctgatggagatgaacaagaagatgaatgttattttcatgcctgtgaagaaaacatccattctgcagcccatggatcaagaaataattttgactttgaagttgtattacttaagaaacacattttataaggctgtagctgtgatagataatgtggtccctctgacagatccggacaaagtaaattgaaa

SEQ ID NO: 415776 - DNA, 542 bp, Homo sapiens
tgtgagcctcttacagggctgtttgatgtgtccttatgacatgacaactggcttccctgagtttttatccaagagagagcaaggtagagccacagtgtattttatgacttcrtttcagaagtgacacattgtcatttccaccatattctattcattacaagtgtgttactaaactcagtaacactaaacatagtgtcttactaagcacatggaagataattaagcttcacatctccaagggagaaatgttaacatactttaaaactaccaaagtcagctcaaagtagaaggaatataaagttggatcaggctgaatgtatttaaatgggctcactgagctgagattttccagatttagtgtgttagctccacggactgggaatgactctgaaaggatatcttcaaaggggacagctggatttgaaccagagacttctttaatttgcagtcaaatgcagactatatccacattctgctagtgtggctgactgaaaaacaggcccaaaggtagcctacaccaaatgaacttgaaatgccagagc

SEQ ID NO: 415777 - DNA, 572 bp, Homo sapiens
atgctgctggctcagtgtgctgtgcgagcccagagctgcagatgctgcacacgctgcaggagcctccaggcagagtgcaccacaaccaggaatacaaaccctttccttccccagcatccctcttgcaccttctactgacaaagcataacrttgtgccactgattagggagaaatagttacagggtcccactccattatcacagagcagacaatgagggatgcatttggagtcaagagacaatactttgataactggcacaggagacatactaacagaggttttcagccctcatcctagggcagggcaacagttctacctgtcccagggcctcaaaccagcaggttggcccagctggagttgctggggctggacactaagtctaggttccccagaaacaaagcttgaacaaacaagggcttctgtgttgggaccagagacccctcctctgcaggtcaatcccaggccctgaatgggcaactttccctgaggtaggctcacctgcagtgtgtctgcttgctggcccttctgtgtgcctatgctccccacctgaatatccatcaagccaccaaag

SEQ ID NO: 415778 - DNA, 572 bp, Homo sapiens
atgctgctggctcagtgtgctgtgcgagcccagagctgcagatgctgcacacgctgcaggagcctccaggcagagtgcaccacaaccaggaatacaaaccctttccttccccagcatccctcttgcaccttctactgacaaagcataacattgtgccactgaytagggagaaatagttacagggtcccactccattatcacagagcagacaatgagggatgcatttggagtcaagagacaatactttgataactggcacaggagacatactaacagaggttttcagccctcatcctagggcagggcaacagttctacctgtcccagggcctcaaaccagcaggttggcccagctggagttgctggggctggacactaagtctaggttccccagaaacaaagcttgaacaaacaagggcttctgtgttgggaccagagacccctcctctgcaggtcaatcccaggccctgaatgggcaactttccctgaggtaggctcacctgcagtgtgtctgcttgctggcccttctgtgtgcctatgctccccacctgaatatccatcaagccaccaaag

SEQ ID NO: 415779 - DNA, 572 bp, Homo sapiens
atgctgctggctcagtgtgctgtgcgagcccagagctgcagatgctgcacacgctgcaggagcctccaggcagagtgcaccacaaccaggaatacaaaccctttccttccccagcatccctcttgcaccttctactgacaaagcataacattgtgccactgattagggagaaatagttacagggtcccactccattatcacagagcagrcaatgagggatgcatttggagtcaagagacaatactttgataactggcacaggagacatactaacagaggttttcagccctcatcctagggcagggcaacagttctacctgtcccagggcctcaaaccagcaggttggcccagctggagttgctggggctggacactaagtctaggttccccagaaacaaagcttgaacaaacaagggcttctgtgttgggaccagagacccctcctctgcaggtcaatcccaggccctgaatgggcaactttccctgaggtaggctcacctgcagtgtgtctgcttgctggcccttctgtgtgcctatgctccccacctgaatatccatcaagccaccaaag

SEQ ID NO: 415780 - DNA, 572 bp, Homo sapiens
atgctgctggctcagtgtgctgtgcgagcccagagctgcagatgctgcacacgctgcaggagcctccaggcagagtgcaccacaaccaggaatacaaaccctttccttccccagcatccctcttgcaccttctactgacaaagcataacattgtgccactgattagggagaaatagttacagggtcccactccattatcacagagcagacaatgagggatgcatttggagtcaagagacaatactttgataactggcacaggagacatactaacagaggttttcagccctcatcctagggcagggcaacagttctacctgtcccagggcctcaaaccagcaggttggcccagctggagttgctggggctggacactaagtctaggttccccagaaacaaagcttgaacaaacaagggcttctgtgttgggaccagagacccctcctctgcaggtcaatcccaggccctgaatgggcaactttccctgaggtaggctcacctgcagtgtgtctgcttgctggcccttctgtgtgcctatgctccccacctgratatccatcaagccaccaaag

SEQ ID NO: 415781 - DNA, 622 bp, Homo sapiens
agatttacatgcacctgtgtgtgtgtgtttagttctttgcaatgttataactgatgtagacttatgtggccaccaccacagtcaacctatagaacagtttcctcacaagggtccctcatgccacctttttatagccacagctactttccctcctcatccctctctaatcctggcaaccactaatccatttcccacatctataattttatgatttcaagattgttttgtgcatgaagccatacaatatgtaaccttctgagattggctttcactcagcataaatccctagagatctatcgaagtttttgtgtgtatcaatggtctactcctttttattgctgagtagtatttcatcatrcagatgaacaatagtttgctaaacctcattcacatattgaaggatgtttgggttgtttccagcttttggccattatgaataaaacttctatgaacacttgggtacagatttttctgagaaaaaaaatttttgcttcttcgggataatgcacaagagtgcaattattgggtcctacagttagcacatgtttggcttggtcagaacctgccaaactcttttgtagagtgacagtaccattttacgtttctaccagtaatgtatgag

SEQ ID NO: 415782 - DNA, 622 bp, Homo sapiens
agatttacatgcacctgtgtgtgtgtgtttagttctttgcaatgttataactgatgtagacttatgtggccaccaccacagtcaacctatagaacagtttcctcacaagggtccctcatgccacctttttatagccacagctactttccctcctcatccctctctaatcctggcaaccactaatccatttcccacatctataattttatgatttcaagattgttttgtgcatgaagccatacaatatgtaaccttctgagattggctttcactcagcataaatccctagagatctatcgaagtttttgtgtgtatcaatggtctactcctttttattgctgagtagtatttcatcatgcagatgaacaatagtttgctaaacctcattcacatattgaaggatgtttgggttgtttccagcttttggccattatgaataaaacttctatgaacacttgggtacagatttttctgagaaaaaaaawttttgcttcttcgggataatgcacaagagtgcaattattgggtcctacagttagcacatgtttggcttggtcagaacctgccaaactcttttgtagagtgacagtaccattttacgtttctaccagtaatgtatgag

SEQ ID NO: 415783 - DNA, 556 bp, Homo sapiens
cagcatttgataatatcacttttctattttagttatgctgatgggagagtagtgatatcctattgtagctttattagcattttcctaatggccgatgatgttgacatcttttcatgtgcttatttgccaactgaatatcctcttcagcgaaatgtctttaaatattttgctcatttttgaaatagactttttttgttaaattttgacaactttatgtattctggatacaagtcccattttaaaaatacttttatatttatatatgggtatacagaaacaatattccatattttctgtgtatgtttaaacaacccaaatgagataatgctaaacatatagttctgtatcttaaattccttgcacatgacacygttctttttgagagctatctggtcacttttgcagctgttgaacgtggagcactcatgaggtgataataaaagcaactccatttttgctcctcactgccccttttaaactttctcagtgaaatggttttttcttgtcaaagagactttaatgattactcttaggtagcagaaagtcccatagctgc

SEQ ID NO: 415784 - DNA, 556 bp, Homo sapiens
cagcatttgataatatcacttttctattttagttatgctgatgggagagtagtgatatcctattgtagctttattagcattttcctaatggccgatgatgttgacatcttttcatgtgcttatttgccaactgaatatcctcttcagcgaaatgtctttaaatattttgctcatttttgaaatagactttttttgttaaattttgacaactttatgtattctggatacaagtcccattttaaaaatacttttatatttatatatgggtatacagaaacaatattccatattttctgtgtatgtttaaacaacccaaatgagataatgctaaacatatagttctgtatcttaaattccttgcacatgacaccgttctttttgagagctatctggtcacttttgcagctgttgaaygtggagcactcatgaggtgataataaaagcaactccatttttgctcctcactgccccttttaaactttctcagtgaaatggttttttcttgtcaaagagactttaatgattactcttaggtagcagaaagtcccatagctgc

SEQ ID NO: 415785 - DNA, 556 bp, Homo sapiens
cagcatttgataatatcacttttctattttagttatgctgatgggagagtagtgatatcctattgtagctttattagcattttcctaatggccgatgatgttgacatcttttcatgtgcttatttgccaactgaatatcctcttcagcgaaatgtctttaaatattttgctcatttttgaaatagactttttttgttaaattttgacaactttatgtattctggatacaagtcccattttaaaaatacttttatatttatatatgggtatacagaaacaatattccatattttctgtgtatgtttaaacaacccaaatgagataatgctaaacatatagttctgtatcttaaattccttgcacatgacaccgttctttttgagagctatctggtcacttttgcagctgttgaacgtggagcactcatgaggtgataataaaagcaaytccatttttgctcctcactgccccttttaaactttctcagtgaaatggttttttcttgtcaaagagactttaatgattactcttaggtagcagaaagtcccatagctgc

SEQ ID NO: 415786 - DNA, 556 bp, Homo sapiens
cagcatttgataatatcacttttctattttagttatgctgatgggagagtagtgatatcctattgtagctttattagcattttcctaatggccgatgatgttgacatcttttcatgtgcttatttgccaactgaatatcctcttcagcgaaatgtctttaaatattttgctcatttttgaaatagactttttttgttaaattttgacaactttatgtattctggatacaagtcccattttaaaaatacttttatatttatatatgggtatacagaaacaatattccatattttctgtgtatgtttaaacaacccaaatgagataatgctaaacatatagttctgtatcttaaattccttgcacatgacaccgttctttttgagagctatctggtcacttttgcagctgttgaacgtggagcactcatgaggtgataataaaagcaactccatttttgctcctcactgccccttttaaactttctcagtgaaatggttttttcttgtcaaagagrctttaatgattactcttaggtagcagaaagtcccatagctgc

SEQ ID NO: 415787 - DNA, 572 bp, Homo sapiens
gttttttgtttttttgggtttttttttcagatggagtttcactcttgttgamcaggctggagtgcagtggcgcaatcctggatcactgcaaccttctcctcctgggttcaagcaattcttctgcctcggtctcctgagtagctgggattacaggtacccgccaccacacttggctactttttttgtatttttagtagagatggggtttcctcatgttggccaggctagtctcgaattcctgacctcagctgatccacctacctcagcctcccaaagtgctgggattacaggcgtgagccaccatgcctggcctcatctgtatttttttaatggattgaggtagggatcacattgtgattttgtttagaagacaattattccagcaccatttattgtatagtccaccctttccccactgattggtgacaccatcccggtcttatattctgaggccacacttcatctagagcaacactgtccaatagaaatataatgcaagctgcaaatgtgagccctatatgtaatttcatagtttctagtagacacattaatacataaaaacaaatcattga

SEQ ID NO: 415788 - DNA, 572 bp, Homo sapiens
gttttttgtttttttgggtttttttttcagatggagtttcactcttgttgaacaggctggagtgcagtggcgcaatcctggatcactgcaaccttctcctcctgggttcaagcaattcttctgcctcggtctcctgagtagctgggattacaggtacccgccaccacacttggctactttttttgtatttttagtagagatggggtttcctcatgttggccaggctagtctcgaattcctgacctcagctgatccacctacctcagcctcccaaagtgctgggattacaggcgtgagccaccatgcctggcctcatctgtatttttttaatggaktgaggtagggatcacattgtgattttgtttagaagacaattattccagcaccatttattgtatagtccaccctttccccactgattggtgacaccatcccggtcttatattctgaggccacacttcatctagagcaacactgtccaatagaaatataatgcaagctgcaaatgtgagccctatatgtaatttcatagtttctagtagacacattaatacataaaaacaaatcattga

SEQ ID NO: 415789 - DNA, 572 bp, Homo sapiens
gttttttgtttttttgggtttttttttcagatggagtttcactcttgttgaacaggctggagtgcagtggcgcaatcctggatcactgcaaccttctcctcctgggttcaagcaattcttctgcctcggtctcctgagtagctgggattacaggtacccgccaccacacttggctactttttttgtatttttagtagagatggggtttcctcatgttggccaggctagtctcgaattcctgacctcagctgatccacctacctcagcctcccaaagtgctgggattacaggcgtgagccaccatgcctggcctcatctgtatttttttaatggattgaggtagggatcacattgtgattttgtttagaagacaattattcmagcaccatttattgtatagtccaccctttccccactgattggtgacaccatcccggtcttatattctgaggccacacttcatctagagcaacactgtccaatagaaatataatgcaagctgcaaatgtgagccctatatgtaatttcatagtttctagtagacacattaatacataaaaacaaatcattga

SEQ ID NO: 415790 - DNA, 484 bp, Homo sapiens
tggatcactgcaaccttctcctcctgggttcaagcaattcttctgcctcggtctcctgagtagctgggattacaggtacccgccaccacacttggctactttttttgtatttttagtagagatggggtttcctcatgttggccaggctagtctcgaattcctgacctcagctgatccacctacctcagcctcccaaagtgctgggattacaggcgtgagccaccatgcctggcctcatctgtatttttttaatggattgaggtagggatcacattgtgattttgtttagaagacaattattccagcaccatttattgtatagtccaccctttccccactgattggtgacaccatcccggtcttatattctgagrccacacttcatctagagcaacactgtccaatagaaatataatgcaagctgcaaatgtgagccctatatgtaatttcatagtttctagtagacacattaatacataaaaac

SEQ ID NO: 415791 - DNA, 572 bp, Homo sapiens
gttttttgtttttttgggtttttttttcagatggagtttcactcttgttgaacaggctggagtgcagtggcgcaatcctggatcactgcaaccttctcctcctgggttcaagcaattcttctgcctcggtctcctgagtagctgggattacaggtacccgccaccacacttggctactttttttgtatttttagtagagatggggtttcctcatgttggccaggctagtctcgaattcctgacctcagctgatccacctacctcagcctcccaaagtgctgggattacaggcgtgagccaccatgcctggcctcatctgtatttttttaatggattgaggtagggatcacattgtgattttgtttagaagacaattattccagcaccatttattgtatagtccaccctttccccactgattggtgacaccatcccggtcttatattctgaggccacacttcatctagagcaacactgtccaatagaaatataatgcaagctgcaaatgtgagccmtatatgtaatttcatagtttctagtagacacattaatacataaaaacaaatcattga

SEQ ID NO: 415792 - DNA, 552 bp, Homo sapiens
agaaaacttgttctccaggcccctttgagtttatggaatgggcctgggctccagtgatgggatgtacccttttaaggcctgaagagggaagagggaggggcagggtccatttggcttgcaaggatggtgttgttgttttccagttttgagggcttgagtttctggtagagaagtggtatgagttgtggtgtctggaatgtagactgtgtcatctggtgcaaggtggcamctgcatttttgtttcttcagtgggccagttctgcagggtggtttggggcattttttctgaaaggttagactggagactcattttctacaactgtaccttgtgagagagatgcttttaataaacttttactgctcaatctaggttctgttgctggtccctaagggccctgatgaacacagtgagtgaaatcttgaagtgccagctgctccacactaaagagttctcagaaatgaatctccaggaggggtgaattaaagccatgcttttcaatctatctgtggtgaaaacccagctttatttttatttccttaaaatctgtcatg

SEQ ID NO: 415793 - DNA, 552 bp, Homo sapiens
agaaaacttgttctccaggcccctttgagtttatggaatgggcctgggctccagtgatgggatgtacccttttaaggcctgaagagggaagagggaggggcagggtccatttggcttgcaaggatggtgttgttgttttccagttttgagggcttgagtttctggtagagaagtggtatgagttgtggtgtctggaatgtagactgtgtcatctggtgcaaggtggcacctgcatttttgtttcttcagtgggccagttctgcagggtggtttggggcattttttctgaaaggttagactggagactcattttcyacaactgtaccttgtgagagagatgcttttaataaacttttactgctcaatctaggttctgttgctggtccctaagggccctgatgaacacagtgagtgaaatcttgaagtgccagctgctccacactaaagagttctcagaaatgaatctccaggaggggtgaattaaagccatgcttttcaatctatctgtggtgaaaacccagctttatttttatttccttaaaatctgtcatg

SEQ ID NO: 415794 - DNA, 552 bp, Homo sapiens
agaaaacttgttctccaggcccctttgagtttatggaatgggcctgggctccagtgatgggatgtacccttttaaggcctgaagagggaagagggaggggcagggtccatttggcttgcaaggatggtgttgttgttttccagttttgagggcttgagtttctggtagagaagtggtatgagttgtggtgtctggaatgtagactgtgtcatctggtgcaaggtggcacctgcatttttgtttcttcagtgggccagttctgcagggtggtttggggcattttttctgaaaggttagactggagactcattttctacaactstaccttgtgagagagatgcttttaataaacttttactgctcaatctaggttctgttgctggtccctaagggccctgatgaacacagtgagtgaaatcttgaagtgccagctgctccacactaaagagttctcagaaatgaatctccaggaggggtgaattaaagccatgcttttcaatctatctgtggtgaaaacccagctttatttttatttccttaaaatctgtcatg

SEQ ID NO: 415795 - DNA, 443 bp, Homo sapiens
ggtgtattagtctgttcttacactgctataaagacttaccctgagaccgggtaatttatgaagaaaagaggtttaattgactcacagttccacaagttgtatagaaattatggctgagaaggcctcaggaaacttacaatcatggcagaaggtgaaggggaagcaggcacatcttcacatggccagagcaggaggaagagagtgaagarggaagtgctacatgcttgtaaacaaccagatctcatgagaaggtattcactttcatgagaatagcaaggcggaagaccacacgcatgatccaatcacctcccaccaggcccctcttccaacattaaggcttacaatttgacatgagatttgggtggggacacagaatcaaacacatcattccacccctggcccctcccaaatttcatccttctcacatttcaaaacacaggcat

SEQ ID NO: 415796 - DNA, 576 bp, Homo sapiens
tacacagttctgaagtcgcctccacattttcaggtatctttacagcaatgccccacttctctggtaccamtttgctgtattagtctgttttcacactgctataaagacatacctgagactgggtaatttatgaagaaaagaggtttagttggctcacagttccacagactgtacaggaaacgtggctggggaggcttcagaaaacttacaatcatggcagaagttgaaggggaagcaggaacatcttcacactgccggaagaggaggaagagagagggaggaagtgctacacacttttaaacaaccagatctcatgagatctctctcactgtcatgagaacaacagggggaagtctgcccccatgatccagtcacttcccagtaggccccttctccaacattggggattacaatttgacatgagatttgggtggtggcatagagccaaaccatatcaggaggtgagcagaccagagctggcatggtaactcgagggtgtctttagagacacaggctacttttatctctctggtcagccttccttaaaatgtggatcccatcctcaaagttgactca

SEQ ID NO: 415797 - DNA, 576 bp, Homo sapiens
tacacagttctgaagtcgcctccacattttcaggtatctttacagcaatgccccacttctctggtaccactttgctgtattagtctgttttcacactgctataaagacatacctgagactgggtaatttatgaagaaaagaggtttagttggctcacagttccacagactgtacaggaaacgtggctggggaggcttcagaaaacttacaatcatggcagaagttgaaggggaagcaggaacatcttcacactgccggaagaggaggaagagagagggaggaagtgctacacacttttaaacaaccagatctcatgagatctctctcactgtcatgagaacaacagggggaagtctgcccccatgatccagtcacttcccagtaggccccttctccaacattggggattacaatttgacatgagatttgggtggtggcatagakccaaaccatatcaggaggtgagcagaccagagctggcatggtaactcgagggtgtctttagagacacaggctacttttatctctctggtcagccttccttaaaatgtggatcccatcctcaaagttgactca

SEQ ID NO: 415798 - DNA, 576 bp, Homo sapiens
tacacagttctgaagtcgcctccacattttcaggtatctttacagcaatgccccacttctctggtaccactttgctgtattagtctgttttcacactgctataaagacatacctgagactgggtaatttatgaagaaaagaggtttagttggctcacagttccacagactgtacaggaaacgtggctggggaggcttcagaaaacttacaatcatggcagaagttgaaggggaagcaggaacatcttcacactgccggaagaggaggaagagagagggaggaagtgctacacacttttaaacaaccagatctcatgagatctctctcactgtcatgagaacaacagggggaagtctgcccccatgatccagtcacttcccagtaggccccttctccaacattggggattacaatttgacatgagatttgggtggtggcatagagccaaaccatatcaggaggtgagcagaccagagctggcatggtaactcgagggtgtctttagagacacaggctmcttttatctctctggtcagccttccttaaaatgtggatcccatcctcaaagttgactca

SEQ ID NO: 415799 - DNA, 522 bp, Homo sapiens
cagggacctcttgatctgcagtcaaatgctctacccctgagctatacccccaaggtactcatcttctttcaataaagatgtattaataatcacagtcattcacaagctacgctctggccaccctgtctcctgtagctctccaggagctacaggtgtggagttatgtaatgcacaacagagcagctcttctgtacaaccccctccacacctgccagcatccggccaattaagctgcagccttagctttttgggaaaaggagaatggtgggattaaatccagatgtagacatagcttgagggcctgggtttggaccctgggcctgattgttctggagtgcaaagagcccctactagcctcaaactcctggcctcaggtgttcctgcggcctcagcctcccaaagkgctgagccaaactcccaaagtgctaagccagtgtgcccagccacatttggttttatttgttccaaatactagattttgttcttgttttcctgacttcattgggattgcatttttttaat

SEQ ID NO: 415800 - DNA, 574 bp, Homo sapiens
atactagattttgttcttgttttcctgacttcattgggattkcatttttttaatgatctccttttgtctccaccatgagcttattagctattcctctttgttttatattttttagggttcctctagagatcacagtatcatctttaacttatcacattttaccttcagataatgttttgctacttctctgatagtgtaagaatcttacaacagatttccattcccctcattttgtcctttgtgttattattgtcatagattttacttctatgtatattataaacccagtatatttatattatttttgcattacttatctctttttttgttgtttttaattttttaatataaaaaggagacaggatctcattatgtcgcccaggctggtcttgaactcctggcctcaagcgatattcctgcgttgacctcccaaaatcctgggattacaggtgtgagccactgtgcccagatgcattaattatcctttaaagagattttaaaatgaggcaaaattatattaatctacatatgtaccatttctgacactttttattactttgagcaaatccagatt

SEQ ID NO: 415801 - DNA, 574 bp, Homo sapiens
atactagattttgttcttgttttcctgacttcattgggattgcatttttttaatgatctccttttgtctccaccatgagcttattagctattcctctttgttttatattttttagggttcctctagagatcacagtatcatctttaacttatcacattttaccttcagataatgttttgctacttctctgatagtgtaagaatcttacaacagatttccattcccctcattttgtcctttgtgttattattgtcatagattttacttctatgtatattataaacccagtatatttatattatttttgcattacttatctctttttttgttgtttttaattttttaatataaaaaggagacaggatctcattatgtcgcccaggctggtcttgaactcctggcctcaagcgatattcctgcgttgacctcccaaaatcctgggattacaggtgtgagccactgtgcccagawgcattaattatcctttaaagagattttaaaatgaggcaaaattatattaatctacatatgtaccatttctgacactttttattactttgagcaaatccagatt

SEQ ID NO: 415802 - DNA, 595 bp, Homo sapiens
cttcccttgcatatccaacattccattcatyttttctgcctgaataatactctaatatttcctttagggaggttagctgataaatattgtgtttttgatgctcaaaaaaatctttatgtcattctcagagtagggatacaggctattccgagaggtatatcttcaagaaaaaacaaaatcagaagattagctgatgtgttttactgtgttagaggagatttttactgaaaggacaaagaatcggaattcaatgaacagaaaatgtcatcccagttcgggagggatgactgatttcacagacctgaggatgctgaaagctaaatatcttcagtgacagaacccagagaagcaatctgcctcccaaggtgacgctaaccccagaagggctcaggaattggaggcactagagcccagcaggtggacctttgtcatggagctggaaacagaagccccagttgaaattctgtttccaaagcagaaagactccaaatcctttctgccatggagtaatccagatgagagagaggtttaccccttgagaggctgatccagaggaagtccagacttaggagtatctgtgatggttgctcaacga

SEQ ID NO: 415803 - DNA, 511 bp, Homo sapiens
ggactttatgatagcctaatgaaatcaaaactatggaatatagtcagcatcaaactaagaggacaactgggcktacgctgatggcatatggaataacctgaacttttaaagtttattaacatttattgttaggttctgagcagggctttgaagttttaaaaatgactcaaaaaacagctagccttaagtttttttgctgactagtgggggatgcagacactcaagaaaccatttcagtaagatttttaaagtgttaagtattaaaattaccttgtttcttccaaagtctttcccattttagaaaatggtaattccatccttccagttactctggtcatccttaactcctctctttcatattcctacattcaaactgtgggtaaattctgataactccaccccgaaatgcatacagaatccgatcacttctcagtaacttcacctctactcttcagcctaatccaccaccatctagattattagataaaatccagtctgttttccctgcttc

SEQ ID NO: 415804 - DNA, 599 bp, Homo sapiens
gctacttcaagtgtttgcatattttcactggaaatgttaattaaaatttaatataatttcaaaagagattgtaacaatggcttggaaggtagaaaattttgaaggatggaacaagaatggcagaaagtattgagttaattttttagtgaacatattatagcaagactggtcaagataaaaacaaagaaaaagacctattaccaatatcagtaataaagataagatatgatgacgaattctatatgtgtttaaaaaactgtggaatattatrgaacactttagggcaatgagtttggcaccttacataaaatggacaaatccttcaaaaagatggcttaccaaaagtaaaacaagaaaaggaaaatcttagtagctgtatatcaatgaaatgaattgaatttttaatttaaaacattttcagaaagaaaaccccaagcccagatggctttattggcgagtgctgccaaacttttaaagaagaatgaaactaattctacacatgtactctcagaaaataaaagataaatcatttcaaagctttctaagacaccaccaaaaccagagaagcaaaatacattatatatatatatacacacaca

SEQ ID NO: 415805 - DNA, 599 bp, Homo sapiens
gctacttcaagtgtttgcatattttcactggaaatgttaattaaaatttaatataatttcaaaagagattgtaacaatggcttggaaggtagaaaattttgaaggatggaacaagaatggcagaaagtattgagttaattttttagtgaacatattatagcaagactggtcaagataaaaacaaagaaaaagacctattaccaatatcagtaataaagataagatatgatgacgaattctatatgtgtttaaaaaactgtggaatattatagaacactttakggcaatgagtttggcaccttacataaaatggacaaatccttcaaaaagatggcttaccaaaagtaaaacaagaaaaggaaaatcttagtagctgtatatcaatgaaatgaattgaatttttaatttaaaacattttcagaaagaaaaccccaagcccagatggctttattggcgagtgctgccaaacttttaaagaagaatgaaactaattctacacatgtactctcagaaaataaaagataaatcatttcaaagctttctaagacaccaccaaaaccagagaagcaaaatacattatatatatatatacacacaca

SEQ ID NO: 415806 - DNA, 553 bp, Homo sapiens
gctagtattttggagagattacttataagcaaaccaaagtgctccagctgacagcctgacttttgctagaatgtcagttagaccatattagaacaccttcttggaactgacagatcactgcagtgcaggaccgaattcaagaacaactgatcatgtaagcctagttcacactgctaattcagagaatcatgaaagaattaaattgtttttcaaagccactaaatataaaggagatttgatgtgcagccatggataactgagacaaacaaaaagttgtgttaaggagaaaattaaacatgcagcattggctctggacctaacattgtccttaatattacagaagcatctacaacaaatcagttatattatagtcttagtgttgtgataatcatagtaataaaagagagaatatattgagtcctctcagtgtgctgacattgacttatgtactttatcagtagataagtatattattgttctcattttataaatgaagaaactgaarcacagtttaataacttggccagggtcataaaatcataagtgacagagt

SEQ ID NO: 415807 - DNA, 599 bp, Homo sapiens
gaacaccttcttggaactgacagatcactgcagtgcaggaccgaattcaagaacaactgatcatgtaagcctagttcacactgctaattcagagaatcatgaaagaattaaattgtttttcaaagccactaaatataaaggagatttgatgtgcagccatggataactgagacaaacaaaaagttgtgttaaggagaaaattaaacatgcagcattggctctggacctaacattgtccttaatattacagaagcatctacaacaaatcagttatattatagtcttagtgttgtgataatcatagtaataaaagagagaatatattgagtcctctcagtgtgctgacattgacttatgtactttatcagtagataagtatattattgttctcattttataaatgaagaaactgaagcacagtttartaacttggccagggtcataaaatcataagtgacagagttacaatttgaactcagatagtctctttctaaaatctatgtataaatatttgggacgcaatacatgtcttttcacatcaaaacgtattgattcttataatgtcacattacaatcaaataagaaagattatatgaaaa

SEQ ID NO: 415808 - DNA, 599 bp, Homo sapiens
gaacaccttcttggaactgacagatcactgcagtgcaggaccgaattcaagaacaactgatcatgtaagcctagttcacactgctaattcagagaatcatgaaagaattaaattgtttttcaaagccactaaatataaaggagatttgatgtgcagccatggataactgagacaaacaaaaagttgtgttaaggagaaaattaaacatgcagcattggctctggacctaacattgtccttaatattacagaagcatctacaacaaatcagttatattatagtcttagtgttgtgataatcatagtaataaaagagagaatatattgagtcctctcagtgtgctgacattgacttatgtactttatcagtagataagtatattattgttctcattttataaatgaagaaactgaagcacagtttaataacttggccagggtcataaaaycataagtgacagagttacaatttgaactcagatagtctctttctaaaatctatgtataaatatttgggacgcaatacatgtcttttcacatcaaaacgtattgattcttataatgtcacattacaatcaaataagaaagattatatgaaaa

SEQ ID NO: 415809 - DNA, 599 bp, Homo sapiens
gaacaccttcttggaactgacagatcactgcagtgcaggaccgaattcaagaacaactgatcatgtaagcctagttcacactgctaattcagagaatcatgaaagaattaaattgtttttcaaagccactaaatataaaggagatttgatgtgcagccatggataactgagacaaacaaaaagttgtgttaaggagaaaattaaacatgcagcattggctctggacctaacattgtccttaatattacagaagcatctacaacaaatcagttatattatagtcttagtgttgtgataatcatagtaataaaagagagaatatattgagtcctctcagtgtgctgacattgacttatgtactttatcagtagataagtatattattgttctcattttataaatgaagaaactgaagcacagtttaataacttggccagggtcataaaatcataagtgacagagttacaatttgaactcagatrgtctctttctaaaatctatgtataaatatttgggacgcaatacatgtcttttcacatcaaaacgtattgattcttataatgtcacattacaatcaaataagaaagattatatgaaaa

SEQ ID NO: 415810 - DNA, 430 bp, Homo sapiens
ttgcaatagtcttgtagtagcttgactacctcaaggcatattctctacacagtcaacagaatgattgtttccaaataaaattcagatactgtcattgcttactcaaaattttttatatgttgagaatagaatccaaagtccacaaaatagtttggaagagycctatatcatctaatcctttgttttctcacatacaaccagaaacgtttacttgctgttattcaaacatattaaatccactcagtgggcctttatacttccctctttccagaatacaggcttcctagataaccatgtggctcagctttacattcattaagtcattgctcaaatatcaccttgtcacagagaccttccctgactatttaaaatagcaaactccagtctctatctccttacatttttttccttcatagcagttatcactatt

SEQ ID NO: 415811 - DNA, 536 bp, Homo sapiens
agttacctcttcaataaaatggtctcacttagctggcataaatagtgcctacttacgttcttcgtgatgattaaataggacactgaaaggagtggcccagaagtcaacacaagaagaatcttattttaacaccctgttaacattatcattattgccagaaatgtcaatcaaaagctggaatgtcaaatatgttagggaacttccctccataagaggaaggaaggtgaatgtctaaggatactttaactttaaaactcagattcaattatccaggcaacctagctaaaggttcaatactgctactaagtaacaatgtgatctaaggaagattctttaataacttgtatgcttagatttcttatttatatgtaagtttcatagtttttcccrcttcaggacatggaactgatggcagcaggaggcagacaaatcctaggcagacagagccaggtccatggtaaaaccagaccttcaagcccatgacagtttaaagcctagctacaagtctcaggtaaatccttggactggattgagag

SEQ ID NO: 415812 - DNA, 616 bp, Homo sapiens
tttacctgtattctctttctagtgactaacacaatgtctgacatagaaacagtactaaatgaatatttgttggaaaaattagagaactaaaacttgtcatgtacttattggtttgactttttggaagctcagagttcaaaaggactgctcatttcttgcagttgtacgagacactgtgatattgaatgtgcatgcatacacacttccttctatccaagtgaattagtggagaaaaagagtaggggacaaggcttgggtgaaaatatagacttaattactgagtagaagcaatgggaaattaacacactctattataaacaccccacgtttctcatctctaagatgggtataatttcacaatgaggtaatataaaggaattaggtatcacaaatgctcagtattttgggctctcctaacaattgaactatctgggaagtgtaaagttcatctattgattttcttctttacaatagtaaatatacratagtaaaagtgaaggtattttcccttttgagatttgttctctccaccatagttctcttcacagtagactattaaatgcactgaaactttgattgaataattaaatgacccagatgcatatttctttacatg

SEQ ID NO: 415813 - DNA, 614 bp, Homo sapiens
ataattttttataacaaattactaatttggtcctcaataataccaaaaggtaggaagaatagatattattactgttttatgaatggaatacagacactcagagaatttaattatttacttttgtttacaaggagctgagacttttaaatataatcatttgaatactagtcttaaggatttttactgaattatgctgtctttgacaataaaaactaagtaactggtgggaatatcacagtaattataaaaggcatgtaagctaaaatcttacttagttacttatatatctgtattttaatacatttaagaagattagaataatgaaaaggagattttagatctactttatactctgttcatttttatttagaataaataagatatatagtgctgttgagagtgtgttgggggtgaacatatggcctcgttttgtttctaaaacattatttgggagatccagaatgcatataaatgacaatttcatacataagtactttcytatgtaacctatgtgactaatgtataaataaaattcccttatgcttactcaaatttggtaagcatctatgaaaggcctagtttatcttccacactgagttaggtactgtaaatgg

SEQ ID NO: 415814 - DNA, 555 bp, Homo sapiens
cctactgtgcatattcccagaaaacatagttccagtttttgtgctttctctacgatatctctctgacttgcatttgtattctgagacccagaatagctcaartcagataaggctcaaaccctggacttcacaagcccagagccaggaggtcacggtataaaaacgctctctgcccaggtccacgctgggtacaacacatttgcaccaggacccggctgcagccccccaacccggctgcagccccccaaatgcaatccaagtaactccccattccccacaggggtccaatcagtgtagaatcacgttatcagaaaccatccattacatgacagtgaaaaataatgccaacgttggattattttatcttaaaatattaaaggagaaaaaattgtaactaataagaggactttaaaaaaaaatcaataacaaaaaccttcatttttgcttccctgtgtgaaaagaagtctcctattttcctacctgtccgctcaccttcctttcccagacttgcctgggctctcagccatcaggagttcttccgcccatcagcaatgg

SEQ ID NO: 415815 - DNA, 555 bp, Homo sapiens
cctactgtgcatattcccagaaaacatagttccagtttttgtgctttctctacgatatctctctgacttgcatttgtattctgagacccagaatagctcaagtcagataaggctcaaaccctggacttcacaagcccagagccaggaggtcacggtataaaaacgctctctgcccaggtccacgctgggtacaacacatttgcaccaggacccggctgcagccccccaacccggctgcagccccccaaatgcaatccaagtaactccccattccccacaggggtccaatcagtgtagartcacgttatcagaaaccatccattacatgacagtgaaaaataatgccaacgttggattattttatcttaaaatattaaaggagaaaaaattgtaactaataagaggactttaaaaaaaaatcaataacaaaaaccttcatttttgcttccctgtgtgaaaagaagtctcctattttcctacctgtccgctcaccttcctttcccagacttgcctgggctctcagccatcaggagttcttccgcccatcagcaatgg

SEQ ID NO: 415816 - DNA, 600 bp, Homo sapiens
gtccttgccgcgtgctttagtgtccccatagcctgtccctgctatgtggtctgacctcgtctgtcctctcttaactttactgccccatcactccccagaaacctggtcttcttgctgctccttaacaggcctcagtctgcactttcagttcctggtcactggagctccgtccccagatccctgcatggctgcgtggctgtgggctgcagtctgcatggctgcagggctgcggggctctctctccaaatgtcacctctctgtgaaggcttcttccaagtcttcgccgggttgtcattataaggtcattctctttacaatgtttcagtgaactgagcaattgttttctgtgtgttctgcatgttaatatttaagtgcagtgggccacacctgtaatcccagctctttmggaggctgagcagggaggctgacttgaacccaggagtttgagatcagcttgggaaacataacaagaccctgtctctataaaaaaatttttaataaaaaaaagacatttgtactaagtttccagaatgcaaactccatacacaaatctcagtgcatttagtccagctaagtcaaaaagcaaaacacaaaaacaaa

SEQ ID NO: 415817 - DNA, 600 bp, Homo sapiens
gtccttgccgcgtgctttagtgtccccatagcctgtccctgctatgtggtctgacctcgtctgtcctctcttaactttactgccccatcactccccagaaacctggtcttcttgctgctccttaacaggcctcagtctgcactttcagttcctggtcactggagctccgtccccagatccctgcatggctgcgtggctgtgggctgcagtctgcatggctgcagggctgcggggctctctctccaaatgtcacctctctgtgaaggcttcttccaagtcttcgccgggttgtcattataaggtcattctctttacaatgtttcagtgaactgagcaattgttttctgtgtgttctgcatgttaatatttaagtgcagtgggccacacctgtaatcccagctctttaggaggctgagcagggaggctgacttgaacccaggagtttgagatcagcttgggaaacataacaagaccctgtctctataaaaaaatttttaataaaaaaargacatttgtactaagtttccagaatgcaaactccatacacaaatctcagtgcatttagtccagctaagtcaaaaagcaaaacacaaaaacaaa

SEQ ID NO: 415818 - DNA, 596 bp, Homo sapiens
atgtaacattctaaatggaatagttaccactacgttggagcgcctcctaagtaccatattattacattgtagctaggtgaagctatgactaatttctctgcacctcatgtaagtaggctaggtcgtgtattttgagaaaaaacgtgcgacattgatcagtaaaagttacatttttataacctaggttacagaccctctrtgtaactgatcatgatgggaaccgccaggttcaggtcttccaaatgtaactttaatatgccctggagtttcttctttctatgcggtgatgagaatttctgagttgtatgctctgcttattgctgtgtgtttaattgcttgtgactttcccggattcctaaaaagccaagtctttaattctggaaggcaggtggcaacacatgctttctttatgccatccaccaaggagccagctgtgagtggtttggaaggatgacttctgaggctaaagatgtataagcagtcttatgtgtgaagtccgtggtgcctttagctttactgctggactctttacaggcttactgattctggcagtgttcagtagacctcctagattcagcttgcattcctcaggccta

SEQ ID NO: 415819 - DNA, 448 bp, Homo sapiens
tatgactaatttctctgcacctcatgtaagtaggctaggtcgtgtattttgagaaaaaacgtgcgacattgatcagtaaaagttacatttttataacctaggttacagaccctctatgtaactgatcatgatgggaaccgccaggttcaggtcttccaaatgtaactttaatatgccctggagtttcttctttctatgcggtgatgagaatttctgagttgtatgctctgcttattgctgtgtgtttaattgcttgtgactttcccggattcctaaaaagccaagtctttaattctggaaggcaggtggcaacacatgctttctttatgccatccaccaaggagccagctgtgagtggtttggaaggatgacttctgaggctaaakatgtataagcagtcttatgtgtgaagtccgtggtgcctttagctttactgctggactcttta

SEQ ID NO: 415820 - DNA, 619 bp, Homo sapiens
ttttagcaacccaagcaggctaattagaatatatttcagttttagagtaaggagggattttgtatcataaaggtataacctatcatacttaactaagggtgctgatttccacaggtggtagtatttgtgagtccctctctctggtgtgatccttaatttattttgtgtgtttgtgagcctgttttcaaagtgaaggtcagttttgtcttctctctaggtgttaggcgcgatgcaaaaagaatgaaagagattttgatagggtatgaccaagcccttytatacaatggatgtcagtgttgatttttatacacaaaccaccagatggcaacagaaaaagtgttcatataggatataatctgtggtttccacagccaagttttttttttttttccttccatgattcaccactttttagtatgcttaggtaacatgtacaatttctggctaagagcaaggcgagtttataatacccagctatgtgaaatcaaaaccaggtaatagaatagtggcagagtgtcactagaaaaagattttttttttttttttttacatgagtgtataaactgttcccaaagggagcaagtttccagggatgcaactttgatttatattattgtat

SEQ ID NO: 415821 - DNA, 605 bp, Homo sapiens
ttgaagttcattatggaatgaatgggtagggagaaaagagtcaaccggtatgttcttgttctattgaaattctcaaggaaagagaactatggaggcatttgaaatgcatagtgacaaaaatgatcttaaaataccttgggaatattttttccaaatttgaaatctattattgaggctgggaaaaaaaattgtcatttggcagaatggtaagtaattatcacaattctctgaagtgatcatttctgtttcatatgttgcgactcstggaggcttctagcaacattgtcaccaaagctgaatgtggaggactcccttcaccaccctgctataaacacacagaaactgtggacaaaatataacaagaccaaacaagcgtttctgaagtttaaaataccagggaatccctaggtgccagctatgaacagaaaattcagagctagggcgttaatcaggagctcaaggcctgtggtggtttctgatctgaatacacgccccaatggcttagtcctgagggtctcatggaggagtaggaggcatggccttgggtctgcatagacttggaaggtggagtaaaggttctctagcatcaaaccttgaagggcttt

SEQ ID NO: 415822 - DNA, 605 bp, Homo sapiens
ttgaagttcattatggaatgaatgggtagggagaaaagagtcaaccggtatgttcttgttctattgaaattctcaaggaaagagaactatggaggcatttgaaatgcatagtgacaaaaatgatcttaaaataccttgggaatattttttccaaatttgaaatctattattgaggctgggaaaaaaaattgtcatttggcagaatggtaagtaattatcacaattctctgaagtgatcatttctgtttcatatgttgcgactcctggaggcttctagcaacattgtcaccaaagctgaatgtggaggactcccttcaccaccctgctataaacacacagaaactgtggacaaaatataacaagamcaaacaagcgtttctgaagtttaaaataccagggaatccctaggtgccagctatgaacagaaaattcagagctagggcgttaatcaggagctcaaggcctgtggtggtttctgatctgaatacacgccccaatggcttagtcctgagggtctcatggaggagtaggaggcatggccttgggtctgcatagacttggaaggtggagtaaaggttctctagcatcaaaccttgaagggcttt

SEQ ID NO: 415823 - DNA, 564 bp, Homo sapiens
gtcccactatgttgcccaggctggtcttgaactcctggactgaaacaatcctcccgcttgggcctctggaagtgctgggattacaggcatgcgccactgggcccagcctaaagtgtttttcaaacatcaaaagttgcctcctttttccaggactctgtgatgtggtgagctggccttattcaccttctccatacctttcgaggatttggatgcgtctcttgcacctatcttagccgtctttcttccatcctgaagagacatgcatctctgtggtggctcctccctccccaaggtcatcgtggctgacttgggacctttcccagctctgtgtgtctgtcttgaaacacagtttatcttctctccattggtgcatcccataagtaagtattgagtactgactgtgtaggatgcaccccttgcttawgagtagctcactgtgcatgacgcaaacattgaacagatcattttaatgcactttccacaggtctgagcagagttggggtgattcattctgagcagtcatggcccggtgcatggttgtgtgaggtctcctagagaaggggg

SEQ ID NO: 415824 - DNA, 607 bp, Homo sapiens
gtcttgctctgttgcccaggctgcagtacagtggtgcaatcatggctcactgtagccagaacctccctgacttaagcaattctcctgtcttggcctcccaagtagctgggactacaggcacacatcaccgtgcctggctaattgttttatttttggtagagatggggtcttgctatgttgcccaggctgatcttgaactcctgggctcaagcaatcctcccacctcagcctcccaaagcactgggatttcagcgtgagccaccacacccgaccagttccttctttaaaatgaagatcataatgatccctgcactatagttttattacaagtattacataaaaccacacgtgagaatagaactaacccacttcccggcctggagcaggcccttcattcaggcttattgaatctggacctgctttggccccacccaaaccgatatgccccaggtcctgtttatttayggacagccctcaccctatggagctgatccagtgtttgccccacagcatcataatggcataggcaacaggacagtgtcacatttcacagcagcctttcttccctgttctgaaggagggagccacatggacgttttagtggaca

SEQ ID NO: 415825 - DNA, 415 bp, Homo sapiens
aggctctgtgcacttcagaaatccctcttgcaaactgttcattctctgtaagttaaaaaagttacctcttcagttttgaaaaatgaaattattttacttccatagggaagtgtgactgctagtaattgtgaaaggtgtgagaaaattaaatttcttgcagcatttaagctaacaaactagcctgccatacatagtttcgtggacacaagattcctgaatcaaagtcaaagactgtgagactcacaggaagagcaatggtggaatcgcaggcatgatgctcagtgttcatgctggttcctcactccccaagtgtaacacagaggccyggcccggacatgtggtgggcagtatttctggataggaatgctgagctgggagatttaccgcctttacagtgaataaaaacaagcatcat

SEQ ID NO: 415826 - DNA, 521 bp, Homo sapiens
atagcacatctcaattccttaatcagataaaatttttactatctcaaaacaaaaataaaatataataaagctccctggaacaatgatgctgttattcttgaccctgtcaagagaatcttcatgcatctataaagtgagaaggaaattcactgtgtccctgaatcccatgtgacttggcagctgccatcctcttctttaaggcaggggaagagagctctggccatgtctctcccattgacattcttcccactgttgtgaaaatttaacattctttctcttagaatgtttgagcattatggactaaaaatttgtttatcttgaaaatgtaaatgtgaagttcataagctscatataaagttttttaaaagaataaatgtgttagatctattttgaggaagtagttttccatttttacagagggaaacaaaacttacaagttatttaaactgaatcgtttaacagaaagaagagcaaacttttctgaagaagcattaaaattgtcagtgtaacaaaattttctc

SEQ ID NO: 415827 - DNA, 627 bp, Homo sapiens
cgtttatgtctcttctatacagtgcaagtcctttatgaaaaatcccctttttcaatccattgcaggaaccaagggcgggtatatcagaagaaaatcgtgcgatgaaaatgaagatcagaagcgcatactgaacaagcaactgactttgttaatctcttgagtaatagcatcaagggggatgtgtttaaatgtcagaagaatgattgtgcttttcattcattgttgttttcttcctgcaatatctctggaggcatgtgatttaaggattgtgaaatcagtgggcatagagtaatgtgatatttaacacagacagctctggagtaagacagtctaggtttaaatcctggctatgagaatggagagagggcacataaagttctttgcatcatggctggcacacagtctgtgcttaaaaaaatgatattattattaytacaaatagtgtttcacacagatgttgattggatagacagatgcttgtttcaaataaaagaaaacagttcctgcaggcaaacagctcaattggtatagacataagtctcttgttccacctgtttgccattatttatctgcctgagaagactatgaaatgttgaaccagaaaatacccagaaaaacaacagccca

SEQ ID NO: 415828 - DNA, 635 bp, Homo sapiens
atcaaatgaaaaagcttctgcacatcaaaggaaacaatasgcagagggaagtcaacccagacaatatttgcaaatcatatatctattatggggttaatatataaaatacacaagatattcttacaacatagttgcaataataacaataatatgataataataacctgattttaaaatgggtcatggacttgaaaagacagttttccaaaaaatccatgaaaatggccagtagatatacagacaaatatgcaacaccactgatcaacaagcgttggcaaagatgtaagttaattggaacctttgcacactatgtagaagtttaaaatgtttcagctgcaatggaaaacagtatgaatattccctaaaaattaaaaatagatctactttatgatccaccgatcctactatagggtatatgtccataagatatgtccatatctcaaggagataactgcactctcctgtccattgtaagagtattcaagatagccaagttatgacaataacctacatttccatgaggggtgaatacatttttgaaatgcatcatatacatacaatggaataagcatcaccctaaaaaggaatgatatcttgccatttgcaaaaacatggatgaacctggaagatgttac

SEQ ID NO: 415829 - DNA, 635 bp, Homo sapiens
atcaaatgaaaaagcttctgcacatcaaaggaaacaataggcagagggaagtcaacccagacaatatttgcaaatcatatatctattatggggttaatatataaaatacacaagatattcttacaacatagttgcaataataacaataatatgataataataacctgattttaaaatgggtcatggacttgaaaagacagttttccaaaaaatccatgaaaatggccagtagatatacagacaaatatgcaacaccactgatcaacaagcgttggcaaagatgtragttaattggaacctttgcacactatgtagaagtttaaaatgtttcagctgcaatggaaaacagtatgaatattccctaaaaattaaaaatagatctactttatgatccaccgatcctactatagggtatatgtccataagatatgtccatatctcaaggagataactgcactctcctgtccattgtaagagtattcaagatagccaagttatgacaataacctacatttccatgaggggtgaatacatttttgaaatgcatcatatacatacaatggaataagcatcaccctaaaaaggaatgatatcttgccatttgcaaaaacatggatgaacctggaagatgttac

SEQ ID NO: 415830 - DNA, 635 bp, Homo sapiens
atcaaatgaaaaagcttctgcacatcaaaggaaacaataggcagagggaagtcaacccagacaatatttgcaaatcatatatctattatggggttaatatataaaatacacaagatattcttacaacatagttgcaataataacaataatatgataataataacctgattttaaaatgggtcatggacttgaaaagacagttttccaaaaaatccatgaaaatggccagtagatatacagacaaatatgcaacaccactgatcaacaagcgttggcaaagatgtaagttaattggaacctttgcacactatgtagaagtttaaaatgtttcagctgcaatggaaaacagtatgaatattccctaaaaattaaaaatagatctactttatgatccascgatcctactatagggtatatgtccataagatatgtccatatctcaaggagataactgcactctcctgtccattgtaagagtattcaagatagccaagttatgacaataacctacatttccatgaggggtgaatacatttttgaaatgcatcatatacatacaatggaataagcatcaccctaaaaaggaatgatatcttgccatttgcaaaaacatggatgaacctggaagatgttac

SEQ ID NO: 415831 - DNA, 519 bp, Homo sapiens
caaaaaaaaatgtttaaacatcattcattattaagaaactgcaaaataaaactaagtggtcttcaactacacacctactagaatggttagatttaaaagtttggacatagcaagggttgctaagaatatagaacaacttgaactagtctacacaaaatggtagaactactgttgcaaagggtttgatgacttgttaaaaaagttaaacatacatctaccatgtaacctctgcattccactcgtaggagaaatccaagagatacgaaagtgtataagcagggaacaactagtacatgaactcacaacagctacattttyaagagtcaaatactttcaacaaattaaatgttcaataacaggtaaatggataaacaaacagagtataataaggtgtacagtaaataaaaggtaccataagcatcacagtatggtatactggaataaatagcaaattattgatagatgcaaaaaccatatatgagtatgaaaataagataaacagtaagtgaaagaaaggta

SEQ ID NO: 415832 - DNA, 519 bp, Homo sapiens
caaaaaaaaatgtttaaacatcattcattattaagaaactgcaaaataaaactaagtggtcttcaactacacacctactagaatggttagatttaaaagtttggacatagcaagggttgctaagaatatagaacaacttgaactagtctacacaaaatggtagaactactgttgcaaagggtttgatgacttgttaaaaaagttaaacatacatctaccatgtaacctctgcattccactcgtaggagaaatccaagagatacgaaagtgtataagcagggaacaactagtacatgaactcacaacagctacattttcaagagtcaaatactttcaacaaattaaatgttcaataacaggtaaatggataaacaaacagagtataataaggtgtacagtaaataaaaggtaccataagcatcacagtatggtatactggaatamatagcaaattattgatagatgcaaaaaccatatatgagtatgaaaataagataaacagtaagtgaaagaaaggta

SEQ ID NO: 415833 - DNA, 564 bp, Homo sapiens
gcaggatttattttaaattagagaagtactcacatttgatacaatcatgtgaaaatactctaaaagtttaggctaatagttgatgacactaggtagcattttagtttatattatggaaattttctttccccaaatactgaaaacaaaaataatcatccacgtaatatttaatagcagcaaaattattgctcttaaattatagttaaaggtgaactctctacagtcttctctgtgaaagaaatctttggggaatatgctgcagttataatcatgcttgctctaggatggttgtgtgattgaatcctttttagagtactgagctcttgttgttgaggttgactttcttttagttctttggtcagccactgtgctcggctgaagagtgtcctcccagagatattaggctcaaatccctgcaacccatacaaattactttataaggaaataggatctttgcaaatgacactaagttaaaggtcttgagttatggagaytatcttgaattatccaggtaggctttaaatccaatcacgagtgtccttataataaagaggcaaaggagat

SEQ ID NO: 415834 - DNA, 518 bp, Homo sapiens
ctttcttgcgtttgaagcatcctgaaattatgcatccctccagaaggggtaagtggacctgcatggaatccctgatcctgctggaagaggtaaacgatcaatgctaaggctgaaggagaaaagaagtgcccctttgttccaaggctttgtatattcacaggacaccaaagctgaaggaggagctgataagatcattgacatgaacgtgtaggaatttacagtttatatagccaggttacctatctatcacatttaattgtcacagtgaacacrggtggtaaatgtgattgtcctcactttacagatgagaatcctgagctaagataagtgcaatgaacttacccaaggtcagatggctagaatggggcaagccaggattcaactccaactctactcactcccatgtatagatggctgcacacagctgcagggtatatgtaagcagtcccacaagagcgtgaacatgtacacacgtgtgcaaatgcctatttacccccacctttcaaaagtcctcacca

SEQ ID NO: 415835 - DNA, 644 bp, Homo sapiens
ggcaataacagcggttggtatttcagcaattagaggtcacataagtatagctttgcatctagttttcaatttgttaatatacagmatttttttgccattctagtagggcaaaacactttttatttagcagtttatcaactcgattaatctttattttagttacacggtgtgtgagtcttcctgtgtccgtttgctgtggacactggaaatgtgaaagtttgtctgtctgaagaaggccctggtgacacagcagcagcctctcccccaaacactggagctggatttagagctggccagttagggagattaaagtgagcatggtacttcagagtcaagcttgagcagacagaaaatagtggaagtggggtagaaggcccgcaagcttggcattgctggagtgtgatgtggaaggaacagtgcagcagaagacaaaaaaagatgtaagtaggcttgactcagtgcagctaagaacccagatgttatcttgagggtgttaactaacaaggagtttaaatcagaatggcacattctgatttgttttttgtatgttcacatttggcaggcatagatactgtttgaagagaggaaagtcagtagacagaggtaacaaagttagatatgtgccaagtctagaaacaagggac

SEQ ID NO: 415836 - DNA, 644 bp, Homo sapiens
ggcaataacagcggttggtatttcagcaattagaggtcacataagtatagctttgcatctagttttcaatttgttaatatacagcawttttttgccattctagtagggcaaaacactttttatttagcagtttatcaactcgattaatctttattttagttacacggtgtgtgagtcttcctgtgtccgtttgctgtggacactggaaatgtgaaagtttgtctgtctgaagaaggccctggtgacacagcagcagcctctcccccaaacactggagctggatttagagctggccagttagggagattaaagtgagcatggtacttcagagtcaagcttgagcagacagaaaatagtggaagtggggtagaaggcccgcaagcttggcattgctggagtgtgatgtggaaggaacagtgcagcagaagacaaaaaaagatgtaagtaggcttgactcagtgcagctaagaacccagatgttatcttgagggtgttaactaacaaggagtttaaatcagaatggcacattctgatttgttttttgtatgttcacatttggcaggcatagatactgtttgaagagaggaaagtcagtagacagaggtaacaaagttagatatgtgccaagtctagaaacaagggac

SEQ ID NO: 415837 - DNA, 644 bp, Homo sapiens
ggcaataacagcggttggtatttcagcaattagaggtcacataagtatagctttgcatctagttttcaatttgttaatatacagcatttttttgccattctagtagggcaaaacactttttatttagcagtttatcaactcgattaatctttattttagttacacggtgtgtgagtcttcctgtgtccgtttgctgtggacactggaaatgtgaaagtttgtctgtctgaagarggccctggtgacacagcagcagcctctcccccaaacactggagctggatttagagctggccagttagggagattaaagtgagcatggtacttcagagtcaagcttgagcagacagaaaatagtggaagtggggtagaaggcccgcaagcttggcattgctggagtgtgatgtggaaggaacagtgcagcagaagacaaaaaaagatgtaagtaggcttgactcagtgcagctaagaacccagatgttatcttgagggtgttaactaacaaggagtttaaatcagaatggcacattctgatttgttttttgtatgttcacatttggcaggcatagatactgtttgaagagaggaaagtcagtagacagaggtaacaaagttagatatgtgccaagtctagaaacaagggac

SEQ ID NO: 415838 - DNA, 578 bp, Homo sapiens
ctttggagccatggaccagggttccacactgggaacatgggcttctaacacttcaaaactgcctttgctggggcaaaggcaagttaaaaatgtcataaagttttctagttgtctttttgttgagtctgctttcacttggttgttgtaatcttttgaccattttccagagttttggcaaagtttactctgagagtttctcttagttgtttgatgtttctgtggggaaatgaaagattgcagctgtctccattgccattttgctgatgctcctcttttgtcaacttttgcttcgtgttattatgcttttttattagttcatatattagttttctaggkctgccataaccaagtaacacaaactgagtgccttgaacaacataaatttattgtcttatagtcctggaagctaaaagtctgagattgaggtgtcagcagggatggtcccttcaagggctatgagaggaagtctgttctatgccttgtttctagcttctggtggtttagtggcagtctttggcattccttggctaatctctgccctcataatcacatggtactctccctgtgtgtatgtctcc

SEQ ID NO: 415839 - DNA, 593 bp, Homo sapiens
aagcttagtctcattaatcattaggaaaatgcaaattgtaactggaataagataaaactacaattcaaagagaaaggctaaaatttcaaaccaaaaaaaattctgggttttggagagctgggaaggaatagggctcctaatcttacaacaatgaaagaacaaaactaacttcaaagtcatgactttatttttatagcaaccaggttgccaagaactgagtcaaaatgtaagggaaaataagcacctgcaaggagaaagaggacggatgcacttacataagacagatgcaaatagacaccactatgacaagtaaagctggaataatcaataaattcctaaagacaaagtggggctggtcagattgggaaaccactgacagctgcagaagttgggaaagatccaccatcttgaaaactttttccccacaaayccactgggatctctcaagcaattggtaaggactccaagacagtctgtatatgatacagttcagggagagcagaacactggggaggtgaccaggtcatgggggctgagcccttatgaatgggattagtgcctttataaaagaagctcaatggagttctagtgtg

SEQ ID NO: 415840 - DNA, 549 bp, Homo sapiens
atctatttgacaattttctaagccatttttgcacacactattttttggcgtgtatgatcattaaagtctctcttcctttcactcctgtgtatttaatatcttgacagagatttccttgaatgacaagggctgaaaaaaaaaagcagaatacaaaacatcaacaaaaaataaaaaaagaaagaaagaatagaaagaagagaataaccccctctgtcagtctttgcagatcaattctgtgccagggaactttttcactgcttargcctaatctgggcattgggatcagcccaagttgaaagcggaagttcttcttgggactctttgagcacacatcttacctgagtatatgagcaactttctaaaccacaaccccccgccccccatatacacggctgcttttcaataacctaatttcccaatgattttcaccccaacttttccttcagaccttagtttatctattgtcatctccactcatgatctcttgtctcaggtgtctgtaggtttgacttctccttgtagctttttcaagtcgtgcttgccagcttt

SEQ ID NO: 415841 - DNA, 549 bp, Homo sapiens
atctatttgacaattttctaagccatttttgcacacactattttttggcgtgtatgatcattaaagtctctcttcctttcactcctgtgtatttaatatcttgacagagatttccttgaatgacaagggctgaaaaaaaaaagcagaatacaaaacatcaacaaaaaataaaaaaagaaagaaagaatagaaagaagagaataaccccctctgtcagtctttgcagatcaattctgtgccagggaactttttcactgcttaggcctaatctgggcattgggatcagcccaagttgaaagcggaagttcttcttgggactctttgagcacacatcttacctgagtatatgagcaactttctaaaccacaaccccccgccccccatatacacggctgcttttcaataacctaatttcccaatgattttcaccccaacttttccttcagaccttagtttatctattgtcatctccactcatgatctcttgtctcaggtgtctgtargtttgacttctccttgtagctttttcaagtcgtgcttgccagcttt

SEQ ID NO: 415842 - DNA, 564 bp, Homo sapiens
ttagggtatggttgtattgacacacaagaacataattcaagaagtgatgtaaggatgactggatagccattttwaaaaaaaaaacaaaattagatttatatatcataccctgtaacaaaataaattctgagtggatcagcaatgtaaacataaatcataaaaccccaaaccaagaaggaaaacttgggagaacttctttataatctttataatcttctttataatcttttcaatcaccttttttacctatactctaacacaaaactccagaaggcgaaaaagaaaataattacccaattaacatagataatatgtaaaaataacaacaataacaataaaaccactgtgtgtctgaataacaggcaaggtctctaacagaaaattatgtttctttgggaatgagcattgcaatggcagtacacatgccatcatacactgtgtgtccatgcgcatgctcagggaggtaaggggatacaaagatttccaatgaagaaggaaagaggattaaatcattgttttgaaataagtatctttggctacaagaatcaataacaagggtggcac

SEQ ID NO: 415843 - DNA, 575 bp, Homo sapiens
aacttctctctaggtttaacatktgtgtatatattcttgtggttttgtctatttttgctgtatataatttaagacattttattgacatatatcatacatccagaaaagtactatgattaaatatggacaacttgattaatgaaacacatttatttgcttataaccatatatgaaaatagaacattactaaaaatagtgatacttcccctgcccctttccaaacactaaccctcatcctcaatagtaacagattgtttttaatcatagagtaacttggtctattttcaaatttttatgaaataaatcagagtatatactctaaggctatgtttatttcattgttgctattttgcttatagtatttatctgctaatggacatggtagattaaaatggctacatacacattttttaattaatagattttttgagcactttgtggctcacacctaatcccatcactttgggaggctgaggtgcctggatcatgaggtcaggagattgagaccatcctggccaacatggtgaaatcccttctctagtaaaatacaaaaaattagctggtcatggtggcat

SEQ ID NO: 415844 - DNA, 624 bp, Homo sapiens
tgcaaatataagaatttaaaatattcctacactctttaccttttgaaataatctttagttggaaaaagcattaccgtggcgtaaatggattcactgacatgagtatcccactaaaacctaacccttcacccctgagaataaaaatctgagaaaacttttaggatggccctcatcaakatctgctaacagaaaaaggatcttgaggttcatagagaggcacgttttatgctatcattaccaccaggtggggtcctctttctcaggtacagtatagctttactaggatccctacctcattttcctaaagccagcttttcctggctcacatcacttcatgtcaggaataccagcatgctatcagagttttatattttgtcctcacacacagtctgttaacccatgttcacttatctaaatttactgactccaaatattgtatttttactagttagaaccaatgtttccctcatcccacatactaaattcttcttttgattaatactaccaatacaagtgaccttatcttacttaatgcttccctgtagacatttggaaataatatacattctccttagattaaacgaggtcctgagattaaggtacaatttggctaaaaggggcaga

SEQ ID NO: 415845 - DNA, 437 bp, Homo sapiens
gcattaaaataagtggtaaattcaaaagaaactaagccatgcaaaatagtaacatgctccctggctaaaatgagataaaattaatgatcamtaacataaatatctccagagtatttcaattgtttggaaaccaaataacatacttataaataaccaatcagtcaaaggggatttgaaagggaaaattgaaagtattctttaggctgggtgtggtggctcatgcctggaatcctagcactttgggatgccaaggcaggaggatcacctgaggccagaagcttgagattagcctggacaacatagtgaaactccttctccacaaattatttttaatattagcctggcatggtggcatgtgcctgtagttccagctttttgggaggctgaggctggaagactgcttgagcccaggaggttgaggctgccatgagctatga

SEQ ID NO: 415846 - DNA, 554 bp, Homo sapiens
attttatggtattcctggagaatattcatgggtttctagcacaactttgcagctgacaacagtacagtaagggctcattttcacaagtcgacttcccttctttctgcatcactagttcgaacaatcttgtgcaatccttaatgcaactttctctcccaattctgagagtgtccacaaataatttcttccaaggaaggaagttactgtataacataagctacaccccacctctccttaatttcttatatatatatggatatggagatgctttggtaaatgtacttgaaaggttaataataaaggaaacacaaaaataagactaataagatagaatttttaaggtgtggtgttttgtataaggaaaattcattcaggaaaagaacaactgtttcatacctcctttcattcatgaagttcatgtcactgacttatttgccatgtctcatgtttcctctgataagaaactgaaacaaagacatcatgtcacctgtccactgaggrgtcactcctatcatcagtgtatgtttgggtgtagacaaattatttatgtctta

SEQ ID NO: 415847 - DNA, 599 bp, Homo sapiens
tcacgtctaaatgcatggttattgatatggtttggtatgtgtccccacccaaatctcatgtcgaattgtaaccatcaatgttggaggaggggcctggtgggaggtgactgaatcatgggggtggacttacctcttgctgttctctgacagagttatcaggagatctggctgtttgaaagtgcgtatcacctccctgctctctctcttccacctaccagccaggccatgtaagacatgcttgcttccccttcactttccgccatgattgmaagtttcctgaggcctccacagaagcagaagcctatacagcctgcagaaccatgagccaattaaacttcttttctttttaaattattcagtatcgggtatgtcttcacagcagtatgagaatggactaatatagttatctttatcaactactcttcccctccgaatacacttataaaatgcttttgtaatgagctgatttttccctattgctgtttgtgctcatttttccatacagccatgcagaaattaacttgggttagaaatggagttcttgtcctatctggaagtctcccaagaaatttgttacataacatagaaaatgttttaaa

SEQ ID NO: 415848 - DNA, 610 bp, Homo sapiens
ccactcaccatatgggttaaggttgatatgtccaatgagaagctcttatacccactgaggaagatggaggagaagagactcattttacagagacacttgcaagcagatgggacaggcctaaattgtaaagcaacccagctgagtttcttgacaatgctgtgtatgagtgctttggcctgagctggtgaactgtccagggtgctttaaggccagctctgcagagtcacctactttggtgatgacctcccgacctgcagttctgcagcccttccagttgttgtacaaatctctaagtcccttctttaaaatcattcattccttgtacacaaagagcggcctctattttactgttcaaaccctgatgatacaggattgcaaacataatcatactaaaacgcagacattcaatacaaatgtgccttctacattctcttggacgctctatcatttattataacccrgatgtgtttcagggcacatttaaacttttcaaggaatacttcttcagggttttttaaattttattcagaatttctttccatccagacattctgtccataccaattttaacaacctcctaaactgggttaaaatagtctgttatgggtga

SEQ ID NO: 415849 - DNA, 495 bp, Homo sapiens
atttgtctttatgatactaaatcctttttatccaagaatcatatgtgcctttatatttattcyagtctatatttatatcactgagtaaatatataggaatgtagatacatatagctatagttatagatacaaatatagatataacatgttaaatctatatctatcccatataacatatatacatgttatatgtgtgtgtgtatatatatgtatatgtttgtgttattaatgagctcccttaaaatttttcttttatttcctatataattttaggttgagcttgaattttccttgtataaacatgtaaatatttatactagttttaatactgatgtttagacattctatcttattttagcattgaatattttcacaattattataaatattatccaatattaataatgtaactgttaaaaatatttaaaattttacagttgaattattttattgttgaatttaaattcctttaagtatgatagtaaatttgtattt

SEQ ID NO: 415850 - DNA, 495 bp, Homo sapiens
atttgtctttatgatactaaatcctttttatccaagaatcatatgtgcctttatatttattctagtctatatttatatcactgagtaaatatatagraatgtagatacatatagctatagttatagatacaaatatagatataacatgttaaatctatatctatcccatataacatatatacatgttatatgtgtgtgtgtatatatatgtatatgtttgtgttattaatgagctcccttaaaatttttcttttatttcctatataattttaggttgagcttgaattttccttgtataaacatgtaaatatttatactagttttaatactgatgtttagacattctatcttattttagcattgaatattttcacaattattataaatattatccaatattaataatgtaactgttaaaaatatttaaaattttacagttgaattattttattgttgaatttaaattcctttaagtatgatagtaaatttgtattt

SEQ ID NO: 415851 - DNA, 495 bp, Homo sapiens
atttgtctttatgatactaaatcctttttatccaagaatcatatgtgcctttatatttattctagtctatatttatatcactgagtaaatatataggaatgtagatacatayagctatagttatagatacaaatatagatataacatgttaaatctatatctatcccatataacatatatacatgttatatgtgtgtgtgtatatatatgtatatgtttgtgttattaatgagctcccttaaaatttttcttttatttcctatataattttaggttgagcttgaattttccttgtataaacatgtaaatatttatactagttttaatactgatgtttagacattctatcttattttagcattgaatattttcacaattattataaatattatccaatattaataatgtaactgttaaaaatatttaaaattttacagttgaattattttattgttgaatttaaattcctttaagtatgatagtaaatttgtattt

SEQ ID NO: 415852 - DNA, 495 bp, Homo sapiens
atttgtctttatgatactaaatcctttttatccaagaatcatatgtgcctttatatttattctagtctatatttatatcactgagtaaatatataggaatgtagatacatatagctatagttatagatacaaatatagatataacatgttaaatctatatctatcccatataacatatatrcatgttatatgtgtgtgtgtatatatatgtatatgtttgtgttattaatgagctcccttaaaatttttcttttatttcctatataattttaggttgagcttgaattttccttgtataaacatgtaaatatttatactagttttaatactgatgtttagacattctatcttattttagcattgaatattttcacaattattataaatattatccaatattaataatgtaactgttaaaaatatttaaaattttacagttgaattattttattgttgaatttaaattcctttaagtatgatagtaaatttgtattt

SEQ ID NO: 415853 - DNA, 634 bp, Homo sapiens
agaagtttcatttgacctctaaatttcacacacccagcagtcttgacatccccacaataaccctagacattgccaaatgtctcctggggaaaaatctccaccagttgacagccaaagttcttgaaatattggaattgtsagctgagtttttatgttatccaaaacaaatatttttctttgtttttaaacatctacttccatctacttatctacttatctttacttttatttgtaacttaattccatcaaggatagagagtgcattttctgttatgctaaatttttcaagaatgtagtgattttttatgacctgatatatggatgatatgtagatcttacatgtttgtatttccaaatttcagggcaataataagataaatacttctatttatattgtcactgtatattagttattttcttttttcactataggagtttttcagcctatagactagttttcaattctaggttatccagtagattttgaaatgttatgatgaaatatctacttctcaagcattcatctttgcagatgaatcaatcccaagctcttataatgaacatcatataaagggcagattagtgaatatatgattcagaaataatgatgtaatatttataagaaaattaaaaa

SEQ ID NO: 415854 - DNA, 634 bp, Homo sapiens
agaagtttcatttgacctctaaatttcacacacccagcagtcttgacatccccacaataaccctagacattgccaaatgtctcctggggaaaaatctccaccagttgacagccaaagttcttgaaatattggaattgtgagctgagtttttatgttatccaaaacaaatatttttctttgtttttaaacatctacttccatctacttatctacttatctttacttttatttgtaacttaattccatcaaggatagagagtrcattttctgttatgctaaatttttcaagaatgtagtgattttttatgacctgatatatggatgatatgtagatcttacatgtttgtatttccaaatttcagggcaataataagataaatacttctatttatattgtcactgtatattagttattttcttttttcactataggagtttttcagcctatagactagttttcaattctaggttatccagtagattttgaaatgttatgatgaaatatctacttctcaagcattcatctttgcagatgaatcaatcccaagctcttataatgaacatcatataaagggcagattagtgaatatatgattcagaaataatgatgtaatatttataagaaaattaaaaa

SEQ ID NO: 415855 - DNA, 634 bp, Homo sapiens
agaagtttcatttgacctctaaatttcacacacccagcagtcttgacatccccacaataaccctagacattgccaaatgtctcctggggaaaaatctccaccagttgacagccaaagttcttgaaatattggaattgtgagctgagtttttatgttatccaaaacaaatatttttctttgtttttaaacatctacttccatctacttatctacttatctttacttttatttgtaacttaattccatcaaggatagagagtgcattttctgttatgctaaatttttcaagaatgtagtgattttttatgacctgatatatggatgatatgtagatcttacatgtttgtatttccaaatttcagggcaataataarataaatacttctatttatattgtcactgtatattagttattttcttttttcactataggagtttttcagcctatagactagttttcaattctaggttatccagtagattttgaaatgttatgatgaaatatctacttctcaagcattcatctttgcagatgaatcaatcccaagctcttataatgaacatcatataaagggcagattagtgaatatatgattcagaaataatgatgtaatatttataagaaaattaaaaa

SEQ ID NO: 415856 - DNA, 634 bp, Homo sapiens
agaagtttcatttgacctctaaatttcacacacccagcagtcttgacatccccacaataaccctagacattgccaaatgtctcctggggaaaaatctccaccagttgacagccaaagttcttgaaatattggaattgtgagctgagtttttatgttatccaaaacaaatatttttctttgtttttaaacatctacttccatctacttatctacttatctttacttttatttgtaacttaattccatcaaggatagagagtgcattttctgttatgctaaatttttcaagaatgtagtgattttttatgacctgatatatggatgatatgtagatcttacatgtttgtatttccaaatttcagggcaataataagataaatacttctatttatattgtcactgtatattagttattttcttttttcactataggastttttcagcctatagactagttttcaattctaggttatccagtagattttgaaatgttatgatgaaatatctacttctcaagcattcatctttgcagatgaatcaatcccaagctcttataatgaacatcatataaagggcagattagtgaatatatgattcagaaataatgatgtaatatttataagaaaattaaaaa

SEQ ID NO: 415857 - DNA, 523 bp, Homo sapiens
tgatgtaatatttataagaaaattaaaaatttagatccttaactcagataacaataatccaaattaaaatttgacttaattacrtaatttaaaatgacaccagaatactagtaaaaatgtagataagtttatgtaatcctttttatctgtaggactttattagcatgaattcaagtacaggaaccaaagtaagattgagacctatagtaaaaggataaaatgtacacttaatagtggcatgattaaactaatttaaagcataataacatggagaaatattggaaaatatacattttactgtattaattgttaatattcttatttaatcattaagtgagaacaaaagtaaggagtagctacacacacacacacacaagtgttcagctacactagaaatcacacctgttttttctccacagaagagtaaagattaaaaatcacaataatatttattgtacatatggaggtaaagatacttaaaatattaccctaaaatacatttttttttgagatggagttttgc

SEQ ID NO: 415858 - DNA, 523 bp, Homo sapiens
tgatgtaatatttataagaaaattaaaaatttagatccttaactcagataacaataatccaaattaaaatttgacttaattacgtaatttaaaatgacaccagaatactagtaaaaatgtagataagtttatgtaatcctttttatctgtaggactttattagcatgaattcaagtacaggaaccaaagtaagattgagacctatagtaaaaggataaaatgtacacktaatagtggcatgattaaactaatttaaagcataataacatggagaaatattggaaaatatacattttactgtattaattgttaatattcttatttaatcattaagtgagaacaaaagtaaggagtagctacacacacacacacacaagtgttcagctacactagaaatcacacctgttttttctccacagaagagtaaagattaaaaatcacaataatatttattgtacatatggaggtaaagatacttaaaatattaccctaaaatacatttttttttgagatggagttttgc

SEQ ID NO: 415859 - DNA, 555 bp, Homo sapiens
ggtggggcttactgggaggtgttgggtcatggggatggaccttcgttaatggataataccctcccttaggaatctcaagctatcctccctcttyggtgcccttaggaatgagtgtaccattctttattcaactataagtcccccacccatcctttttgagatatcaattacatgtatgttacactgccgcatattgtctcacgtattagtgagtttctggctttcttattttagtttagcctttgtccttcagtttgtaaagcttctatttttttctataaattttctgatgttagggtaatatccattacttattctatctcatggaatttttatttcaaatattcatttttcatctatacatgtcacattttcattttataacttctatttttctcctatgttcaattttcatttaagtaatttgacatatatatgtatttatctatatgtatttataaaatatatattacttcaaggactttgaaaattccttcttctgtgtcatttataaatgacttatctttatcctgttaatatatatcttaataatat

SEQ ID NO: 415860 - DNA, 555 bp, Homo sapiens
ggtggggcttactgggaggtgttgggtcatggggatggaccttcgttaatggataataccctcccttaggaatctcaagctatcctccctctttggtgcccttaggaatgagtgtaccattctttattcaactataagtcccccacccatcctttttgagatatcaattacatgtatgttacactgccgcatrttgtctcacgtattagtgagtttctggctttcttattttagtttagcctttgtccttcagtttgtaaagcttctatttttttctataaattttctgatgttagggtaatatccattacttattctatctcatggaatttttatttcaaatattcatttttcatctatacatgtcacattttcattttataacttctatttttctcctatgttcaattttcatttaagtaatttgacatatatatgtatttatctatatgtatttataaaatatatattacttcaaggactttgaaaattccttcttctgtgtcatttataaatgacttatctttatcctgttaatatatatcttaataatat

SEQ ID NO: 415861 - DNA, 555 bp, Homo sapiens
ggtggggcttactgggaggtgttgggtcatggggatggaccttcgttaatggataataccctcccttaggaatctcaagctatcctccctctttggtgcccttaggaatgagtgtaccattctttattcaactataagtcccccacccatcctttttgagatatcaattacatgtatgttacactgccgcatattgtctcacgtattagtgagtttctggctttcttattttagtttagcctttgtccttcagtttgtaaagcttctatttttttctataaattttctgatgttagggtaatatccattacttattctatctcatggaatttttatttcaaatattcatttttcatctatacatgtcacattttcattttataacttctatttttctcctatgttcaattttcatttaagtaatttgacatatatatgtatttatctatatgtatttataaaatatatattacttcaaggacyttgaaaattccttcttctgtgtcatttataaatgacttatctttatcctgttaatatatatcttaataatat

SEQ ID NO: 415862 - DNA, 591 bp, Homo sapiens
tttatcccttttctttatttctagtcatattgtgttatctcttcttttgcctggatattttccagtggtatgccatctatttattatgaatactttcagatgtaatttgaggcttagattgatgtgatttccctcctgtttgctttttaccagacacaaagcttcggttcattgttcctctccaatgaatcaaggattgagatgattcaaagctaattttttagcccctacaaaaggtgggctatttgctgcttaccctgataacagactagctaattaatacaaagtgaggcttggggtaattaccaatgcttycttctctttggcagggcttttaatcctgtcctcccctgcccatcccctcccctgtttatacttttgtttaaagctcttctcagggtgtctgccatctcaaagcaaacatgtaaaaatgatcccaggaaacatttagtcctcaattctgacctcttctctttgtgattcttttccttgtgacctgggatttgtcattcttcactgccatgtcagcattatgtcttcaaatatatatttttaaaagatccatatatcagattttttgagcaggaggat

SEQ ID NO: 415863 - DNA, 576 bp, Homo sapiens
tgtctcttggcattgaattcatacaaggtgctctttctttaatgctgtctcaaaggacatatttttactcattaaaaaagaagatcggaatctagttgtatgcactgctccaacatattaataattaaaattaggaggtaaatgtggtcaaagccatagaaagacttgagatgtcatctatattgattactgtatagcactctacaaacagaaattgttaaataataatttatgtaaatattttatagcatttcaaatattttagtgactgaaatttctcctcttatatagttcagattatcaatttgaagacttactccactagttaatatgtttttagtctcattcgaatattatataaaaacaattttcagttaaatgtgttctggttacataaaacattacaaatcagtgagtacttaattacattttcgtgttcctgtaatgtctttagaatattttcatattattacctatcaatatatgtatgctttgtcaaagaaaaatcaaacatatatatcattgaaattgaaaattttwaaaagtacttattaattctattgaaaaaccacatcc

SEQ ID NO: 415864 - DNA, 569 bp, Homo sapiens
aagtaaaaattagttaacttctgatgattatttgttaattaagatataattattttgatttgggtgattttaaataaaaatattaaattacatgacaaaaagttctttataaaatgtttatgattttaacattggttttatcactttattccacgatttcattttaagatgacctgccttgtttaaaacactgtattcatcttaattaaatcaaggtgtttccatttgtaaaaaaattaacaaatgatttgctctattatacagtgyggttataaactgtgtcagtatctcaagatttgatccccattatcatcatctgtggctctatttgttttataaatgtattgtctttttccatgcctgtcacatctctattgctcattgatttttctctttttcccttatagggagcattgcctatctctagattgagcaaaagttgcatcttgaaaaaagcacaataacctgctcaatctttctcacacagagaaatgtttgttaagtaattaaagtgtagatgatgatacaaagatcttgattaaattagatgccaaagtacccttgtgatt

SEQ ID NO: 415865 - DNA, 569 bp, Homo sapiens
aagtaaaaattagttaacttctgatgattatttgttaattaagatataattattttgatttgggtgattttaaataaaaatattaaattacatgacaaaaagttctttataaaatgtttatgattttaacattggttttatcactttattccacgatttcattttaagatgacctgccttgtttaaaacactgtattcatcttaattaaatcaaggtgtttccatttgtaaaaaaattaacaaatgatttgctctattatacagtgcggttataaactgtgtcagtatctcaagatttgatccccattatcatcatctgtggctctatttgttttataaatgtattgtctttttccatgcctgtcacatctctattgctcattsatttttctctttttcccttatagggagcattgcctatctctagattgagcaaaagttgcatcttgaaaaaagcacaataacctgctcaatctttctcacacagagaaatgtttgttaagtaattaaagtgtagatgatgatacaaagatcttgattaaattagatgccaaagtacccttgtgatt

SEQ ID NO: 415866 - DNA, 576 bp, Homo sapiens
tattccctgctcttcccttgaaataagtctgtcttccgacataaggctaagctccaagctagttatctgggtgcacttatgtattcataaataaaccaccartttttaaaaagtgtaagcaagcctgcgaggcaaaatccaaagtccatataactcttgggtgcagcatgagcttttagtttggaaacccagaaaagagggttgtgcacagaagacgtacttcacgtttgcttgatgaacagcaaagtgctttacaacaggaatttggaatgaaatttgtccagttgctaagctagtgaagtcataaaaataaagataaacatattttgtttttactcacagaaattctgccagcctcaactgatatattccagccaaagcaaagtggtctcacttttccttcctcctctaacactttgtggcccacaaccacaatatcacagagaagattaaataaacaaaatgggaataaagtcacaggaattcagtgagtgccaaatatgtgcagtatcagccagaatgattgctggtagggataaaacagcacaataaactcccaagccacggagcgtgttt

SEQ ID NO: 415867 - DNA, 590 bp, Homo sapiens
gtaagcttatgtagaaactctctctataccctatagcagttgttccatctctccccatcctctgcaaaccaaattcattcccacacctcttcactcagcaaatcattgaaaacagaaaataacaaagaagtctcaccatacaatcaaatccaattaattataaatctagaagaattaatatstgtataatagcataaggatagacaatgaattgattaagtgtaatgcaaaatccaaaacctagggccaaatacatacaaacataaagataaagcaagtatatatacaaatgtaagtttaaaacagaagtggcatttcacagccgtggagacacagaaaggtgataaggtgcgtgctgtgagaatgcctgaccagccatgagtttccatgccacactcaggcctacaccgacataaacttcccttgtcctggggtcattacaaatactcaattacttgcatttcatggaaaactgctgcctattccatggctccaggttattgaatattacaattcttccacttcaggtcccacatgatcctattgcagagtctaccttactttttatctttcaagtcattttcagcttt

SEQ ID NO: 415868 - DNA, 560 bp, Homo sapiens
aagaaataccgcattaaaagatagagtaagaatatagtaggaaagatgttcttcctaataacatttaattttattatcacaaaaataaagtatgtggagtccatgcaatttgtaaaatctatctaaaatacacatctctaataaggaaactgctttaaggcagaaataatactctcatggcagttaaggttaatttgtgaatttagtgatagagaaggagaattatcctaccttaaagagaaaaatcaaaagataagtcaaattaaaacataaacaccgctagcaacaatgtcgctttaggtaaaaaactttaaaaatgtacatgccttggtacaatctaagtttggtagaracctcgatgggtcagtaagttaaaggtgagtgttcaaatttactcattatctcagacaagggaagcactaaaactccaaagctatcttaccatcctaattagagttttctcacaatgaatatgcttgcatatatgaaaatagtgtgttgttttattggttatattcaaagaagtgttgaggagagtccggaagacatacattacatgc

SEQ ID NO: 415869 - DNA, 524 bp, Homo sapiens
aaaaggaatacttatcccaccaatggtgctcacatttaaaagcccaagaataaatgaattacaagtttaactaagagggtttaaaattctaaaataaaatgaactttgaaaagtcagaaaaataagaaaattaaaaggaactatttttaaattaggaaactgaaatctggtgtaaatgaatgatcaaatcaaagtttaaaaaattgcttaaaaataaataaataaataaataaataaataaataaataggcagagccaaaacactaaatgaaagggaaggaatagaatctttggaaataaacccatttrttgcttgcaaaattacagcttattctttttgtgcttttagattttgattttctgtagtaagttcccataaaaactaataacttctaaatttatctcaaaatattcgaaaaattgaacagacaataaaaaagatagttgcaaaattgtctcttagaaaagtaccagccagatggtcacatgagctagaataacattaaagtttttcatgattagat

SEQ ID NO: 415870 - DNA, 674 bp, Homo sapiens
tagttgtcaaatggtggaggctgagtatatgtatagaaattgaggcgtagaagaatattttgtgagcataaaagctactaaagaaaaaaggtaagaaaagtactatatggagaggatgagaaaagaaagatggatcaaagtgaaaagaaataataggaataatataagtaagattttacatattattgtaattatgtttcttttagatcacccacttgtttgaaatggtgatgaatatcatggcagtgttctcttcataataaaactaatatgcttttaaaaattatgcctattatctttgtattcttcattctccaagtcagaagatgagtgaaatgcaatttttactawttttttcctgccaagagtgttattgttattttccaacctgactccacttatacaatagatcgcatctcctctcaactaatcaacaactctccactttctaaatcttatcatcacttttgctttttccattggatcatgtccatcaacatgcaaatataccattatttctacatctaatcaaaaatcttttaacccaaattcccacaacaatccttccttcaactagctctccatttctctgccctagcttacatccacactgtgcaaagctaccaatgatcattttctacaattcttttccttcttctctctctcaaacccat

SEQ ID NO: 415871 - DNA, 558 bp, Homo sapiens
atgttgttgcccagatatctctgatatggtttgtctgtatccccacccaaatctcatcttgaattcccacgtgttgttgggggggaccagtaggaggtaattgaatcatgggggcaggtctttcccatgctgttcttgtgatagcaaataagtctcatgagatctgatggttttaaaaaggggggttttcctgcacaagctctctgtctgtggctatccacataagatgtgacttgctcctccttgccttctgctgtgattgtgaggyttccccagccatgtggaactgtaagtccaattaaacctctttcttttgtaaattgcccagtcttgggtacgtctttatcagcagtgtgaaaaccgattaatacaatccccatgcctttctccttcaaatacctcaagtcattattcaatgtcatcttttccatggaacttcttctgactcttccatataaaattgaagactgctcccatttctgacatctttatccaccttactttcttgattttctctatagcacttattaccttctaatataatacataatttactta

SEQ ID NO: 415872 - DNA, 511 bp, Homo sapiens
attctcaattttaattaatgagtgaatatcagtcccattaaatcggtttatccttacgatattgtagttatcagaattggttgcatacaaataatcttcaaacacagttataccataaagatgtctracctataaagagggcaaaacataactatgatttttaattatgtagcttgcaatttgaaagaaaagctgattgctatttactagtatggaaaatggccacagcagaagaaccgcaaggatgttatttactttttctcaaggagttcaacatttccctgattaaaacttttttttctggagaagaaaacattatgcagtagtgtttaaaacagttccaaatgtagggacagaattgtattcatatgacattaagagagcatatttagtagttatttttcaaaggcttgtgagagcaagactttcaagcatattcaataatatgcctgtgacactgttatacataatttgagatattttaagggctacttgtttatataataatgga

SEQ ID NO: 415873 - DNA, 511 bp, Homo sapiens
attctcaattttaattaatgagtgaatatcagtcccattaaatcggtttatccttacgatattgtagttatcagaattggttgcatacaaataatcttcaaacacagttataccataaagatgtctaacctataaagagggcaaaacataactatgatttttaattatgtagcttgcaatttgaaagaaaagctgattgctatttactagtatggaaaatggccacagcagaagaaycgcaaggatgttatttactttttctcaaggagttcaacatttccctgattaaaacttttttttctggagaagaaaacattatgcagtagtgtttaaaacagttccaaatgtagggacagaattgtattcatatgacattaagagagcatatttagtagttatttttcaaaggcttgtgagagcaagactttcaagcatattcaataatatgcctgtgacactgttatacataatttgagatattttaagggctacttgtttatataataatgga

SEQ ID NO: 415874 - DNA, 572 bp, Homo sapiens
tttccctgattaaaacttttttttctggagaagaaaacattatgcagtagtgtttaaaacagttccaaatgtagggacagaattgtattcatatgacattaagagagcatatttagtagttatttttcaaaggcttgtgagagcaagactttcaagcatattcaataatatgcctgtgacactgttatacataatttgagatattttaagggctacttgtttatataataatggatatttagaagctgcaaaaacatagctctccctgtgaaaagactaatgagaaagcacctccgaagatttgttttataaattcaaaatccaactttttggtcccaatctatgtttagactaccacttgctccagcacagaaagtaatatataaagaaatcacatatttgmaatcattgtaaataaatgtcaacatttcactcagaaatttcattatttctaaagccaatttatcataggaaatagaacagtttcttttgagaattatgatgtttattgctatccatatacttagttaacagtccagctcttctctttggcaaaggtcttagagtttgtg

SEQ ID NO: 415875 - DNA, 572 bp, Homo sapiens
tttccctgattaaaacttttttttctggagaagaaaacattatgcagtagtgtttaaaacagttccaaatgtagggacagaattgtattcatatgacattaagagagcatatttagtagttatttttcaaaggcttgtgagagcaagactttcaagcatattcaataatatgcctgtgacactgttatacataatttgagatattttaagggctacttgtttatataataatggatatttagaagctgcaaaaacatagctctccctgtgaaaagactaatgagaaagcacctccgaagatttgttttataaattcaaaatccaactttttggtcccaatctatgtttagactaccacttgctccagcacagaaagtaatatataaagaaatcacatatttgcaatcattgtaaataaatgtcaacatttcactcagaaatttcattatttctaaagccaatttatcataggaaatagaacagtttcttttgagaattatgatgyttattgctatccatatacttagttaacagtccagctcttctctttggcaaaggtcttagagtttgtg

SEQ ID NO: 415876 - DNA, 578 bp, Homo sapiens
taacacatttaggaagaattttgacctccgtgactttcacagaattctctttttaggaagtacttgaatacatcagaagtcaaaatttaatcgaacttgttataataaaggtacttttgtgaacagccatttgcttttgttagcaaaatatctccaacgccacatgggacagatgatagtccagctcctcatgaatgaactacttaaattagtttttagtaaataggccataacatctgacctattttaatacttttctttcttgcgaatatagcatttttgtctttgttgttttgttttttgtttacttgttttctctgtttttaatagaagggagaaagarcaagagaggcatctccaattttgtggaaatatcacaatatcactgtgaaaagaacattctccaatataggaaatatactgtaatttttatgactcattgcagctcgactttacaagaaattttcagtattgcaaattttggtactatcccttctttttattaccctaggagcgttgtctaacaaaattgtacttacttgtctgccttgaatgacagtgtgtctattttttccttg

SEQ ID NO: 415877 - DNA, 546 bp, Homo sapiens
tttaaacaaaatataagaaagttatttttctaagtaatgccaatctgagagaggttacatatatatatatgtatatatgtatatgcacacacacacatatatatatatgcttaaatrtatattgtgggccaggcaccatggctcatgcctgtaatcccagcactttgggaggctgaggcaagcgaattgcttgagcccaggagtttgagaccagcctgagcaacatggcaaaaccccatctctacaaaaaaaatacaaaaagtagccaggcacggtggcctgtgcctgtaattccagctagtctcaaagctgaggtgggagaatcgatcacttgagtccaggctatcgaggctgtcgtgagccaagatcataccactgcactccagcctgggtaacagagtaagatcctgtctaaaaaaaaaaaaaaaaattatgaaagctttacaatcaataccagtaccaaacaatgagaattcttaaacacacagaatagaaatataacctattaaataagcaggaactaatacaagtattttttctaggtgg

SEQ ID NO: 415878 - DNA, 591 bp, Homo sapiens
ctttatctccctaggtctctattatactttaataatctcactatccaagatggagaaaagagaatttatcatggtaatrtagagggcaacattaactcagagtttattttcatttgctacaattagcactacaatttgagttcttttttttaattgacagcattgtttgcagtctttgtttaccatttgtaaattctggttagtagacccactattgatataatacttaaaagcagccttaacacattgcctgggacaactcaaaggttatatatgagcaaggagaaggagaacacttctttcttcatgcttgcttcatttctctttctctttctctctccctcttggcaggctttttctgttgcacttacacatacctcagatacagtgaccgatgcccttgctttatatgtctgttcaagccatcaaccacttccagctttctgtgtcacagttttaaaaacctaagtcaaataagctgattgactcagtccaactaatgtattagatgccacagggcaagccattcaccactggtctaattagctaggagaaggaggcaggggtggaaggttctgccatgtcaacgaa

SEQ ID NO: 415879 - DNA, 591 bp, Homo sapiens
ctttatctccctaggtctctattatactttaataatctcactatccaagatggagaaaagagaatttatcatggtaatatagagggcaacattaactcagagtttattttcatttgctacaattagcactacaatttgagttcttttttttaattgacagcattgtttgcagtctttgtttaccatttgtaaattctggttagtagacccactattgatataatacttaaaagcagccttaacacattgcctgggacaactcaaaggttatatatgagcaargagaaggagaacacttctttcttcatgcttgcttcatttctctttctctttctctctccctcttggcaggctttttctgttgcacttacacatacctcagatacagtgaccgatgcccttgctttatatgtctgttcaagccatcaaccacttccagctttctgtgtcacagttttaaaaacctaagtcaaataagctgattgactcagtccaactaatgtattagatgccacagggcaagccattcaccactggtctaattagctaggagaaggaggcaggggtggaaggttctgccatgtcaacgaa

SEQ ID NO: 415880 - DNA, 592 bp, Homo sapiens
taatatgtccagaaattaaaaaaataaaaacaaattaaaagtagttacctctggaaagagagggagggaaatgtgattgagaaagattatgtaggaaatytcaaatgtaagtacatacatttttttcttagataaaacaaaaataaaaatctgtaacaaatatagaaaaaaataagatttgatatagctatataacagtaaactgatgttaatgatattatttcctatacctttctagatggtagaaatatttcactgggaaaaaaaaaagaacaattgaccagaatagattgtccaggatgcggcgaagtgaataataagagaaagggttggagaatttgcccagaagaggaaacagcacatacacagtgggctggagcaagtggacacagtcagggtgttggtagccgttctctgtcaacatccagaatattgttgtctacttctgagggagacccagagactgaagatgaaaagtagttagatttgaaattatgtttcctcgtagtaacatgatcattccttatattcaagcctagacagtttcatatcaacatttctccccaccatagcgctctggttagattacata

SEQ ID NO: 415881 - DNA, 592 bp, Homo sapiens
taatatgtccagaaattaaaaaaataaaaacaaattaaaagtagttacctctggaaagagagggagggaaatgtgattgagaaagattatgtaggaaatttcaaatgtaagtacatacatttttttcttagataaaacaaaaataaaaatctgtaacaaatatagaaaaaaataagatttgatatagctatataacagtaaactgatgttaatgatattatttcctatacctttctagatggtagaaatatttcactgggaaaaaaaaaagaacaattgaccagaatagattgtccaggatgcggcgaagtgaataataagagaaagggttggagaatttgcccagaagaggaaacagcacatacacagtgggctggagcaagtggacacagtcagggtgttggtagccgttctcygtcaacatccagaatattgttgtctacttctgagggagacccagagactgaagatgaaaagtagttagatttgaaattatgtttcctcgtagtaacatgatcattccttatattcaagcctagacagtttcatatcaacatttctccccaccatagcgctctggttagattacata

SEQ ID NO: 415882 - DNA, 542 bp, Homo sapiens
aggtaagtatccacgaagttgtggactgctgaacaaacctggttcactgctatgctaattaccagttagctgaactgtccatttctatttcaaattcctactaaatggaggaaaacagtgttgaaaaatgaaactttaactacacacagctttcttttacagtattcattgtttatacttgtgtacacatctcattttgatgttggaacacattgtgcaataatattgcagtgatgataaaatcataggattatacagattaaatccattgtagaaagatcaagatttctttgttcagtgctcactgtccttgctgtgaggggcagatgtacttagaaaaaagtaaggcaaaagttctgtaaagcaatactttctttatgatggttttatctaaatttgttggtttagttttaggcaggaatkcagtatcaacctcaagttaagtgtttaagactaaaaaggccaaatgaagctggtgaagggaaacaactgtcctcactccactggcaaaacatgcattttgataattgcagatgcttcta

SEQ ID NO: 415883 - DNA, 542 bp, Homo sapiens
aggtaagtatccacgaagttgtggactgctgaacaaacctggttcactgctatgctaattaccagttagctgaactgtccatttctatttcaaattcctactaaatggaggaaaacagtgttgaaaaatgaaactttaactacacacagctttcttttacagtattcattgtttatacttgtgtacacatctcattttgatgttggaacacattgtgcaataatattgcagtgatgataaaatcataggattatacagattaaatccattgtagaaagatcaagatttctttgttcagtgctcactgtccttgctgtgaggggcagatgtacttagaaaaaagtaaggcaaaagttctgtaaagcaatactttctttatgatggttttatctaaatttgttggtttagttttaggcaggaatgcagtatcaacctcaagttaagtgtttaagactaaaaaggccaaatgaagctggtgaagggaaamaactgtcctcactccactggcaaaacatgcattttgataattgcagatgcttcta

SEQ ID NO: 415884 - DNA, 510 bp, Homo sapiens
tagaattgttcctcttgaatgttattgctgaatttctgttgccaaagtccataacatttttaccatcttcagagtttttaagcttcyagttgctttagtgagttgtttaactaaatgcaacgtgtgtagtgaaaaatgccccgggcttagatctgggtcctgacatctccttttaaaactttggactcatcatgaaagatttaaaaaaataagaaatactttcctcataacatttccatgatggttaaatagctatgtgttatttaaaagcagaacttacatagcactgtgcctgacaaacaaattatggtaggtaacttacccctacaatttctctaataggaggtatttgtttttaaggttaccctacatataggcattttaaataaatattcgatggaataatgtatcataataatatacaatgaagtacataactctgatagagaatatttttggtgttctgaaaggtgccattgatgtataatagtgcaatgttattccttagat

SEQ ID NO: 415885 - DNA, 603 bp, Homo sapiens
aattttgcttctggaagatacaagattgggaaaaagaaagacaaagtttttgatgaagccagaaggccttcttcaactagataatgaaagctattcttcatttgctttccttacatatttgatttttaaaaactatctgcttcctgaaagtaatagacttttgttggttttggtatatttagtatgtctttttcgatctaattttattttatatataaataagttagtgtttgagagcacaattttggagtaagaaaatcttatttctaattatttataaataattataatgattagaaataaatgataatttaataagaattatttcctatttctacatattggaagggtcatttagacgatcacatattcagtattcctacttgcaaatgagataaaaccttccttgtaattttatttwaaaaaaattgaataaaatataatgtatatgtaaagtaactagctgtgggattgcttataagttttcattaacagcagctattaatatgttaatgaccttttaattgatatataggtataaaaatttttagcaccatatttgtagttacttaaacatgttttaaagaggatatttttacataa

SEQ ID NO: 415886 - DNA, 603 bp, Homo sapiens
aattttgcttctggaagatacaagattgggaaaaagaaagacaaagtttttgatgaagccagaaggccttcttcaactagataatgaaagctattcttcatttgctttccttacatatttgatttttaaaaactatctgcttcctgaaagtaatagacttttgttggttttggtatatttagtatgtctttttcgatctaattttattttatatataaataagttagtgtttgagagcacaattttggagtaagaaaatcttatttctaattatttataaataattataatgattagaaataaatgataatttaataagaattatttcctatttctacatattggaagggtcatttagacgatcacatattcagtattcctacttgcaaatgagataaaaccttccttgtaattttattttaaaaaaattgaataaaatataatgtatatgtaaagtaactagctgtgggattgcttataagttttcattaacagcagctattaatatgttaatgaccttttaattgatatataggtataaaaatttttagcaccatatttgtagttacttaamcatgttttaaagaggatatttttacataa

SEQ ID NO: 415887 - DNA, 565 bp, Homo sapiens
aatggaaatgactttctccccattcacaatgaagactctaatattatccaaagaattttagtggaatattgtacaatgatctatatgccccttgcgtatctctagggcttctttaattgaaagctattttgtcctctgaaatatatacttttcagtgttttatcggaaaaggatgaatgtgaagaatgaccttcttcttcccagcccattcagcaaaatcattttcagatcacagtcatggtcattgtgtactagttaggattctctagagaaacagaacaaacagaatgtatatatagagagacagagaaaaaragatttattaaggaattaggtcacacaattatgggaactggaaagtccaaaatttgcagagtacatcagcaggctggagacccaaaaagagctgatgttgctgcttgagttcaaagacagtctggaggaagaatttcatccttctcaggggatcccaatctattcttaaggccttcaactgattggatgaggcgaacccacattatagagagtaacctgcttattactcaaattctactgatgttcatat

SEQ ID NO: 415888 - DNA, 595 bp, Homo sapiens
atttattaaggaattaggtcacacaattatgggaactggaaagtccaaaatttgcagagtacatcagcaggctggagacccaaaaagagctgatgttgctkcttgagttcaaagacagtctggaggaagaatttcatccttctcaggggatcccaatctattcttaaggccttcaactgattggatgaggcgaacccacattatagagagtaacctgcttattactcaaattctactgatgttcatataatctaaaacatacctttacagcaacatccagactgatgaccaattatttgtgtaccatgggctagccaaattgactcatacaattaaccatcacacatagttagctacacaatatgctttagatatggttgtgtaaatcaatgcagaattcccataagaacaatagcttggaatccagaaattattatttgtgttcatatccactcatcaatttgtttgctctatctatctgcatttattgctttaggtgtggttgtgtaaatcagtgcagaattcccataagagtaatagcctggaatgcagacattattatttgtgctcatatacactcaccaatttgtttgct

SEQ ID NO: 415889 - DNA, 595 bp, Homo sapiens
atttattaaggaattaggtcacacaattatgggaactggaaagtccaaaatttgcagagtacatcagcaggctggagacccaaaaagagctgatgttgctgcttgagttcaaagacagtctggaggaagaatttcatccttctcaggggatcccaatctattcttaaggccttcaactgattggatgaggcgaacccacattatagagagtaacctgcttattactcaaattctactgatgttcatataatctaaaacatacctttacagcaacatccagactgatgaccaattatttgtgtaccatgggctagccaaattgactcatacaattaaccatcacacatagttagctacacaatatgctttagatatggttgtgtaaatcaatgcagaattcccataagaacaatagcttggaatccagaaatwattatttgtgttcatatccactcatcaatttgtttgctctatctatctgcatttattgctttaggtgtggttgtgtaaatcagtgcagaattcccataagagtaatagcctggaatgcagacattattatttgtgctcatatacactcaccaatttgtttgct

SEQ ID NO: 415890 - DNA, 618 bp, Homo sapiens
attatttgtgttcatatccactcatcaatttgtttgctctatctatctgcatttattgctttaggtgtggttgtgtaaatcagtgcagaattcccataagagtaatagcctggaatgcagacattattatttgtgctcatatacactcaccaatttgtttgctctatctatctgcatatattagtgactaccagattatgacttttcaggaccttttattgtgagacatttctccatggatctctcacatttctgcatgtctcaaagtaagacacttactgttttttcttcagaagtatcttttcaaagatgcttgtatagcaaagagtattgagagaaagagacagtcacttgccagtgaaaacagcaggccttcttactgcccattataataggcttggattttctaaactcagaattcttctcctgtaatgccacccacagtatatgaaagcatccatatggacccctcccagttgctcctgcggacttcgaagtaaagggaactgacaccaatctgctgatgaccatcctgcttgttgtgccatgagtaataaaatcttttatatctgatcyacaagtcttgtgtcttctaccagaattcatggaacaaaaaca

SEQ ID NO: 415891 - DNA, 584 bp, Homo sapiens
cgtagacacttccgttccaactcagaaaaataatgttcatgctaaggatagataacactggataaacttgtataaggtagaaaaatgtagaaactatggttttataatggccatttttgggtataatttttagtcagtttcttattatatgcctcaaattctgttgtaaagcatcaagatctatggatcatttctggaggtccagctcatgtgccataacaaaaataaggccactgctcacatcctttcttttaaaaatcatggacccattttaaaaagaggcaattatattttaagtatataaaactttagtcttctgttccatgaatgtataatatctaaaaatcagacctgtaatgaagttttcattttagaaatatgtttttctcccaaaaccactctctttaaaaatgtttatttggtctagtcyaaagtattacattcatttgaagaacagtcctatttattctttttaaatccacatcattattcttttaaaatttacataaattttattatatgttatttatcctcatttccttagtggtaggtgtctcttataggaagtaatattgttaacatca

SEQ ID NO: 415892 - DNA, 565 bp, Homo sapiens
aagtgtcagaaacaaaagtttcatccatacagcattgtaactgcttcatatgaaaaaaataagtctcaagtcatatgttaaaaggaaaagtttcaaaaataagagggttatccagcatgaagactttttgtactggggcagatttcacatgtaattcaatttttgaaaaccaactaacaaaaaycagctatagactataataaatagaaaagggtaaataactactctcattccattataccagaataggaaagtgctcaggaaaattaagtgtcaataagtgaaggcaaaattaaacttctttttctaagcataggcacaattaacctatgaaaattacttatattggatggtaatgaagcagatagctcagcgaaattgggaacatatctgattcactgtaatggaattttcagttagatcagatcacattttgtaccagtcattctgaatcacaacacatgttgattagcaacaagggttacaagggaaaattttactgtttttcctgagccagaaagaccatgattaaacaacatgataatagtaaatatccattgtgtct

SEQ ID NO: 415893 - DNA, 604 bp, Homo sapiens
aaaaccaactaacaaaaaccagctatagactataataaatagaaaagggtaaataactactctcattccattataccagaataggaaagtgctcaggaaaattaagtgtcaataagtraaggcaaaattaaacttctttttctaagcataggcacaattaacctatgaaaattacttatattggatggtaatgaagcagatagctcagcgaaattgggaacatatctgattcactgtaatggaattttcagttagatcagatcacattttgtaccagtcattctgaatcacaacacatgttgattagcaacaagggttacaagggaaaattttactgtttttcctgagccagaaagaccatgattaaacaacatgataatagtaaatatccattgtgtctgcatacagggaaatgtgatctagatttccttgtagtgtgtgaatacagagctccctctctaatatatactacctattgcctttgtccagtaaattccagttctgtaactcatgccaaaaaggaaaagaggaagtctatgtactctaccttggttttgagagaaaagaaggagttcacagccatttttcatgcaacagaagaatg

SEQ ID NO: 415894 - DNA, 604 bp, Homo sapiens
aaaaccaactaacaaaaaccagctatagactataataaatagaaaagggtaaataactactctcattccattataccagaataggaaagtgctcaggaaaattaagtgtcaataagtgaaggcaaaattaaacttctttttctaagcataggcacaattaacctatgaaaattacttatattggatggtaatgaagcagatagctcagcgaaattgggaacatatctgattcactgtaatggaattttcagttagatcagatcacattttgtaccagtcattctgaatcacaacacatgttgattagcaacaagggttacaagggaaaattttactgtttttcctgagccagaaagaccatgattaaacaacatgataatagtaaatatccattgtgtctgcatacagggaaatgtgatctagatttccttgtagtgtgtgaatacagagctccctctctaatatatactacctattgcytttgtccagtaaattccagttctgtaactcatgccaaaaaggaaaagaggaagtctatgtactctaccttggttttgagagaaaagaaggagttcacagccatttttcatgcaacagaagaatg

SEQ ID NO: 415895 - DNA, 648 bp, Homo sapiens
actgtttttcctgagccagaaagaccatgattaaacaacatgataatagtaaatatccattgtgtctgcatacagggaaatgtgatctagatttccttgtagtgtgtgaatacagagctccctctctaatatatactacctattgcctttgtccagtaaattccagttctgtaactcatgccaaaaaggaaaagaggaagtctatgtactctaccttggttttgagagaaaagaaggagttcacagccatttktcatgcaacagaagaatggaatcgtagttgtaatgttgtaggctgaagtgtggatgaagacaggatgctacagaaactcaccctaggaaccgtgcagttttgagggtttccacactgtgggtcataaggcttggatatttatccaattgctactgcttcgtgaatgataatagaccataagtaactgccttcactttgaagttttagttaccccccctttataaaataaagggtttgaattaggtgaactccaaggattattatttgtctattacatttgaattatcactgcctgtatctcatataatcctgtaataggattctttgcaaggtaagtctaaaacaaagagaagtattttggcgattccttgagattgactgttgatgcagttctg

SEQ ID NO: 415896 - DNA, 614 bp, Homo sapiens
aaaatgttcttcatagatttgttattaaaaaaatttaatagaaagatacgtgtctggcagccctcccaacccttcttcgcctcacctcataaaagatatacaagtttgctggtatagttattagattattatataaaattttcggtattttcctcctttgattcaagtaaattgttattaaaataaagaaacaggtcttgccctaggcctattaaaaaaaaagaaaaaaagagaaaatcagatcaaagacctaatagaagttctttaatgagctcatactttattttcctaattgttttcatgacatttcttatctgaattgagactctgattccagggcctctctgtatttaatgttattagattgcttattacmtttttggtattctctgaatgagtatgctcactgtggaaaggaatcaagttctctaaaatacagagcaactaagcagcagacacagccagatataggaccacacaattagtctggatagtggaaaagagagagaatacactgctcaacccactttattggtcaggctccagatattctattatatacgtaaaatattctattgtctattgtgtggttctctagtgctttcttccatacc

SEQ ID NO: 415897 - DNA, 497 bp, Homo sapiens
caaaaagattgattcctacggtgggtggtaggtagggaaaaatagcttggtgagtatcatttccatattaaattagccaataaactctattaatagaaaaattaggctacagaagaaaaagtgagatactgctaagaggcacagtagaactttaatggaactgagctgtctctagtaacacacaagcccattgctgggtactgatgataaaagctgagaaacgtccaactctgtgccaccaagattctcagaatttttcacagatttgccagacaatacctataaactgaatctgyggagagctctttgagaaaatacaaacggattttccaaataaaaggttaccaatagatacagtattgtcaatgttttttataaagattttaatgaaattctatattaaaattacctttttgtctcaataaaaatatgatctagtcatgacaaaggaaaaaagataaaggaacagttctctgtgtgaaatgaaaaagagaaag

SEQ ID NO: 415898 - DNA, 497 bp, Homo sapiens
caaaaagattgattcctacggtgggtggtaggtagggaaaaatagcttggtgagtatcatttccatattaaattagccaataaactctattaatagaaaaattaggctacagaagaaaaagtgagatactgctaagaggcacagtagaactttaatggaactgagctgtctctagtaacacacaagcccattgctgggtactgatgataaaagctgagaaacgtccaactctgtgccaccaagattctcagaatttttcacagatttgccagacaatacctataaactgaatctgtggagagctctttgagaaaatacaaayggattttccaaataaaaggttaccaatagatacagtattgtcaatgttttttataaagattttaatgaaattctatattaaaattacctttttgtctcaataaaaatatgatctagtcatgacaaaggaaaaaagataaaggaacagttctctgtgtgaaatgaaaaagagaaag

SEQ ID NO: 415899 - DNA, 497 bp, Homo sapiens
caaaaagattgattcctacggtgggtggtaggtagggaaaaatagcttggtgagtatcatttccatattaaattagccaataaactctattaatagaaaaattaggctacagaagaaaaagtgagatactgctaagaggcacagtagaactttaatggaactgagctgtctctagtaacacacaagcccattgctgggtactgatgataaaagctgagaaacgtccaactctgtgccaccaagattctcagaatttttcacagatttgccagacaatacctataaactgaatctgtggagagctctttgagaaaatacaaacggattttycaaataaaaggttaccaatagatacagtattgtcaatgttttttataaagattttaatgaaattctatattaaaattacctttttgtctcaataaaaatatgatctagtcatgacaaaggaaaaaagataaaggaacagttctctgtgtgaaatgaaaaagagaaag

SEQ ID NO: 415900 - DNA, 497 bp, Homo sapiens
caaaaagattgattcctacggtgggtggtaggtagggaaaaatagcttggtgagtatcatttccatattaaattagccaataaactctattaatagaaaaattaggctacagaagaaaaagtgagatactgctaagaggcacagtagaactttaatggaactgagctgtctctagtaacacacaagcccattgctgggtactgatgataaaagctgagaaacgtccaactctgtgccaccaagattctcagaatttttcacagatttgccagacaatacctataaactgaatctgtggagagctctttgagaaaatacaaacggattttccaaataaaaggttaccaatagatacagtattrtcaatgttttttataaagattttaatgaaattctatattaaaattacctttttgtctcaataaaaatatgatctagtcatgacaaaggaaaaaagataaaggaacagttctctgtgtgaaatgaaaaagagaaag

SEQ ID NO: 415901 - DNA, 490 bp, Homo sapiens
agaatacctctgtgaatagttttctattcatgcacattatttatgtgaagtaggtttttttccccatgaaatctcaagaccactagcctatttatatttccatataatctactctattgtaatagatctttgaatccctagccagattctcattgaatggaaatacacagcttgtggtatagtttacaatgsagtgccagaaaggtcattattaatcagataaatgttgaaaaatgatactgactagcagcagcctagtgcttctttttaaatgataaagaaaaaaatagttcatttgatgactcatattgatatgattcataaaaactgattttttaaaccattatatagagcaacatcaaaacatattaatcaccccatcaactctttctgtctttgccaaaataagccttactcaataacaagtgttataaattaccagtgaaaaatacagggcaacctctagagagaagacccaggggttgagaag

SEQ ID NO: 415902 - DNA, 490 bp, Homo sapiens
agaatacctctgtgaatagttttctattcatgcacattatttatgtgaagtaggtttttttccccatgaaatctcaagaccactagcctatttatatttccatataatctactctattgtaatagatctttgaatccctagccagattctcattgaatggaaatacacagcttgtggtatagtttacaatggagtgccagaaaggtcattattaatcagataaatgttgaaaaatgatactgactagcagcagcctagtgcttctttttaaatgataaagaaaaaaatagtkcatttgatgactcatattgatatgattcataaaaactgattttttaaaccattatatagagcaacatcaaaacatattaatcaccccatcaactctttctgtctttgccaaaataagccttactcaataacaagtgttataaattaccagtgaaaaatacagggcaacctctagagagaagacccaggggttgagaag

SEQ ID NO: 415903 - DNA, 490 bp, Homo sapiens
agaatacctctgtgaatagttttctattcatgcacattatttatgtgaagtaggtttttttccccatgaaatctcaagaccactagcctatttatatttccatataatctactctattgtaatagatctttgaatccctagccagattctcattgaatggaaatacacagcttgtggtatagtttacaatggagtgccagaaaggtcattattaatcagataaatgttgaaaaatgatactgactagcagcagcctagtgcttctttttaaatgataaagaaaaaaatagttcatttgatgactcatattgatatgattcataaaaactgattttttaaaccattatataragcaacatcaaaacatattaatcaccccatcaactctttctgtctttgccaaaataagccttactcaataacaagtgttataaattaccagtgaaaaatacagggcaacctctagagagaagacccaggggttgagaag

SEQ ID NO: 415904 - DNA, 605 bp, Homo sapiens
agaagaagcattcaagttaagtcaaacccaagctgagattttctccactaagtcatcaggagaggaatgttttttaaaaatattttattgaaatatacatgcaaaaaaaagtagataaaccagataaatatccacaaattgaccgcaccgtataaccagctcccagatcaagaagaacattggccaggcacagtggcttacgcctgtaatctcaacactttgggtggctgatgcaagaagatcactggagcccaagagttcaagaccagcctaggcaatatggtgaaaccccgtctctacaaaaaataaaaaaataagccaggtgttgcgcatgcctgtagtcgcatgcctgtagtcgcagctactcaggaggctgaggtgggaaaatcatttgagcccaggaggtagaggctgcagtgagctgtaattatgccactgcactccagcctggatgacagagtgaaatgctgtgtaaataaataaataataaagaaaagaacgttgacagcatatggaaaacctttcatgcccctactggttattatccccatgcyctgcaagggtaaacattgtcctgacttctgctggcgtggatgagttttcac

SEQ ID NO: 415905 - DNA, 374 bp, Homo sapiens
gggtctggtaatgcctgtttgcagcctctcttaactgcacacaatgcaaggatgtgcgtatgggagaaattaacatttgttgagagctttaagactttatctcattgaattmtttcaaccctaagagttggatattttttgtctctattttatagatgaggaaactgaagcttggagaaatagttttgcatacacagccactaagtcgctgagttaggatttgaaagtagggctgcttatggtgaagcatctttcactattccatgcctctattccaaagtggggtgtaggctgctcataaattgcattgaatcagaaaaaaaattagacacacaaagctgatatatgtttaatatcattgctagcactgaact

SEQ ID NO: 415906 - DNA, 374 bp, Homo sapiens
gggtctggtaatgcctgtttgcagcctctcttaactgcacacaatgcaaggatgtgcgtatgggagaaattaacatttgttgagagctttaagactttatctcattgaattctttcaaccctaagagttggatattttttgtctctattttatagatgaggaaactgaagcttggagaaatagttttgcatacacagccactaagtcgctgagttaggatttgaaagtagggctgcttatggtgaagcatctttcactatyccatgcctctattccaaagtggggtgtaggctgctcataaattgcattgaatcagaaaaaaaattagacacacaaagctgatatatgtttaatatcattgctagcactgaact

SEQ ID NO: 415907 - DNA, 579 bp, Homo sapiens
gtttatgatattcagacagatgatattttcatccaactcaagtgtcttgttttctattcacaaggcagtaaatacttttagtaactgtttaactcaaatgaatggcacccacacatgagttgcctaggttgtacttactcatgctttattgtcgtgtgcttatataaatctccttgtctctaggaagcacacttcccttgagaagcttacctgaaatgtcagctcagccagagcatgaagctctagcccagtgaataattcaaaaacctgaagaygtgcgagtactgagttaaagctctcttttcttattcacaagaagtagaaagcaaaacctgctgattagcacctacgtaggtgttatttattttcaacttttaaacataaatcaattcatattttgtgtttttgtccacaaaaggagaaaaaaaaagcagaagtgagagtaccacatttttaaaatttaaattattctgaaataagtactttatgacaaaaatttactagtgttcaaatgtcaaaaatattattgcatccaaatatctgaaaagtaacatatttgtaatgtgctaattgttgaat

SEQ ID NO: 415908 - DNA, 570 bp, Homo sapiens
ttgggtgggtcacagccaagccatatcatttgatgatactaaatgactatgttactggtttatgtatttactatactayacatctcatcattattttagagtagacaccttctacttatttttttaagttaatcttaaaacagtctcaggcaggtcattcagggatattccagaagaaggcattgttagcataggagatgacagctccatgcatgttattgcccctgaagaccttccagtgagacaagataaggaggtgaaagacagtgatactgatgattctgacccggtgtaggcctaggctactgtgtttgtttcacagacagagtctccctctgttgcctaggatagaatgcagtctgtcataatcatagctcattacaggctcaaattcttgagctcaagtgatactcccactgcctcagcctttcaagtagctgggtgaggtttcttattataataaagatggagtcttgctatgttgtccagactgaactcctgacctcaagcaatcctcccgcctcagcctttggagtagctgggactacaggcacatgccactgtgccagc

SEQ ID NO: 415909 - DNA, 603 bp, Homo sapiens
gttaagactttggtggactgttgggaaggcatgatttgtttgaaatgtgaggacatgagatttgggagaggcagaggtggaatgatatggtttggctgtgtccctacccaaatctcatcttgaactgtagctcccataatcatcacatgtcataggagagacccagtggaaggtaattgaatgatggggattgattttcccatgctgttctcatgatagtgaataagtctcacaagatctgatggttttataaagggcagttcccctgcatatgttttatttcctgctgccatttaagawgtgcctttgctcctcctttgtcttctgccatgattgtgaggcctccctagccatgtggaactgtgagtccattacaccactttttctttataaattacctgtcttgggtatttcttcatagtagtatgacaatggactaacacaaaagtaatacagtattactgctggtatggggacagttttagtggtctggatagaaaataaaattagccacaacattttgttaagccaaagcctaatccagacccagaccctaactttcatcaattctatgatgtctaacagagatgaggaagctgcaaa

SEQ ID NO: 415910 - DNA, 573 bp, Homo sapiens
tgttgttttcatgcctgctaatttgacatccattctgcagcccatggatcaaaggatattttcaactttcaagtcttatttaacaaatacattttgtaaggctatagctaccataaacagtgcttcctatgatgggtctgagcaaagtaaatttaaaatcttctagaaagtatccaccattctagctgccattaagaacatttgtgattcattggagaaggtcaaaatattaacattaacaggcatctggaaaaagttggtcccaaatcctataaaagattttgaggagtttaagaytttggtggaagaagtaactacagatgttgtagaaatggcaagaaaactgaagttaaaagcagagcctgaagatgtgacttaattgctgtaatctcaggataaaactttaacaaatgaggagttgcttcttatagatgggcaaagaaagtgtttttttttttaattttatatgtgcacaatgtgcaggtttgtagcatatgtatacatgtgccatgttggtgtgctgcacccattaactcgtcatttacattaggtatatctcctaatgctatccct

SEQ ID NO: 415911 - DNA, 573 bp, Homo sapiens
tgttgttttcatgcctgctaatttgacatccattctgcagcccatggatcaaaggatattttcaactttcaagtcttatttaacaaatacattttgtaaggctatagctaccataaacagtgcttcctatgatgggtctgagcaaagtaaatttaaaatcttctagaaagtatccaccattctagctgccattaagaacatttgtgattcattggagaaggtcaaaatattaacattaacaggcatctggaaaaagttggtcccaaatcctataaaagattttgaggagtttaagactttggtggaagaagtaactacagatgttgtagaaatggcaagaaaactgaagttaaaagcagagcctgaagatgtgacttaattgctgtaatctcaggataaaactttaacaaatkaggagttgcttcttatagatgggcaaagaaagtgtttttttttttaattttatatgtgcacaatgtgcaggtttgtagcatatgtatacatgtgccatgttggtgtgctgcacccattaactcgtcatttacattaggtatatctcctaatgctatccct

SEQ ID NO: 415912 - DNA, 615 bp, Homo sapiens
agagctttactgtggcttagaagagaawcaataatgtaatatcaaaatgtaatgtaatcaaaaatgtctttcattgctgtttatatattgtgttagttcatatgcattactgtaaaggaatacctgagactgagtaatttctaaagaaaaaaggtttattttagctcatggttccgtagacttgtacaagcatggcaccaacatctgctcagcctctggtgagggcctaggaatcttccagtcaccacagaaggtgaagggggaagcaggtgcatcacatggagagagagggaacaaacaagaggtgggtatgaaaagggcagcaagccattcaggagggatccgcccccatgacccaacatgttcctccaggccccacctctaactttggggatcacatttcatcatatttggaggggacaacattcaaacagtattatataaatatacatgagagaaggtaagtagaaacataaaatgaactgaatgttgtcttatattcttgctatataaggaaatttctttttatagctacagtgtttgtggatttcagagttgtttaccttaacctattgaagacagcattgtggagaattgctctctctgccacaccta

SEQ ID NO: 415913 - DNA, 615 bp, Homo sapiens
agagctttactgtggcttagaagagaaacaataatgtaatatcaaaatgtaatgtaatcaaaaatgtctttcattgctgtttatatattgtgttagttcatatgcattactgtaaaggaatacctgagactgagtaatttctaaagaaaaaaggtttattttagctcatggttccgtagacttgtacaagcatggcaccaacatctgctcagcctctggtgagggcctaggaatcttccagtcaccacagaaggtgaagggggaagcaggtgcatcacatggagagagagggaacaaacaagaggtgggtatgaaaagggcagcaagccattcaggagggatccgcccccatgacccaacatgttcctccaggccccacctctaactttggggatcacatttcatcatatttggaggggacaacatycaaacagtattatataaatatacatgagagaaggtaagtagaaacataaaatgaactgaatgttgtcttatattcttgctatataaggaaatttctttttatagctacagtgtttgtggatttcagagttgtttaccttaacctattgaagacagcattgtggagaattgctctctctgccacaccta

SEQ ID NO: 415914 - DNA, 551 bp, Homo sapiens
cattgctctgtctccagttcctggcagggaacatggcacaaaataggctttcaataartatttgttaaataaaaaaagggatgaatgagacatttaaaaaatatattttaactgtctctataattgctaaaatttcaaagagtaaagtaagtttcatttttgcatacttatgtaaaacaagagcatcacaaaacataggtgaatcatgttgtatcaggcatatgctgatgttcaaaaaccgtaaggtgacctgtaagacatttaaacctatgtagtaaacaaatgacttaagatgtcaggttctttttttattttttatttttttactgatacaaaaagagcatttatttggttttgaaatgcatttgtgtgaattgatgttggggatgggggcagagcaaaaacaagatacagcctcctattttttcttaataattgcaatttttattttagatatggggtacatgtgctggtttgttatatgggtatattgcatgattttgaggtttagatggcaggttcttgaatgcatggaccatgctgtttttaat

SEQ ID NO: 415915 - DNA, 551 bp, Homo sapiens
cattgctctgtctccagttcctggcagggaacatggcacaaaataggctttcaataaatatttgttaaataaaaaaagggatgaatgagacatttaaaaaatatattttaactgtctctataattgctaaaatttcaaagagtaaagtaagtttcatttttgcatacttatgtaaaacaagagcatcacaaaacataggtgaatcatgttgtatcaggcatatgctgatgttcaaaaaccgtaaggtgacctgtaagacatttaaacctatgtagtaaacaaatgacttaaratgtcaggttctttttttattttttatttttttactgatacaaaaagagcatttatttggttttgaaatgcatttgtgtgaattgatgttggggatgggggcagagcaaaaacaagatacagcctcctattttttcttaataattgcaatttttattttagatatggggtacatgtgctggtttgttatatgggtatattgcatgattttgaggtttagatggcaggttcttgaatgcatggaccatgctgtttttaat

SEQ ID NO: 415916 - DNA, 551 bp, Homo sapiens
cattgctctgtctccagttcctggcagggaacatggcacaaaataggctttcaataaatatttgttaaataaaaaaagggatgaatgagacatttaaaaaatatattttaactgtctctataattgctaaaatttcaaagagtaaagtaagtttcatttttgcatacttatgtaaaacaagagcatcacaaaacataggtgaatcatgttgtatcaggcatatgctgatgttcaaaaaccgtaaggtgacctgtaagacatttaaacctatgtagtaaacaaatgacttaagatgtcaggttctttttttattttttatttttttactgatacaaaaagagcatttatttggttttgaaatgcatttgtgtgaattgatgttggggatgggggcagagcaaaaacaagatacagcctcctattttttcttaataattgcaatttttattttagatatggggtacatgtgctgstttgttatatgggtatattgcatgattttgaggtttagatggcaggttcttgaatgcatggaccatgctgtttttaat

SEQ ID NO: 415917 - DNA, 457 bp, Homo sapiens
tgaagcctccaatgatgatacccagacaaacaggagtggacctccagcaaactccagcagacctgcagaagagggggcctgactgttagaaggaaaactaacaaacagaaagaaatagcatcaacaacatcaaaaaggatgttcacatagaaacccaatccaaaggtcaccaacatcaaagaccaaaggtcgataaatccatgaagatgaggaaaarccagcacaaaaaggctgaaaattgcaaaaaccagaatgcctcttctcctccaaaggatcacaactccttgccagcaagggagcaaaactggatggagaatgagtttgatgaattgacagaagtaggcttcagaaggtgggtaataacaaactcctccgagctaaaggagcatgttctaacccaatgcaaggaagctaataaccttgatacaaggttagaggaattgctaactacaataac

SEQ ID NO: 415918 - DNA, 591 bp, Homo sapiens
aaaatctaatggaaagctataaattcatcatttcactttatcaggcagtatcacctacccatttatttaatatgtttataaatataatgatctaaagtgcctatagatgctatatttgtaaattcaattaatacatattgcaaaactaaatcccactgattgtatatggagccctaagggaacaatattttaaagctttcttcttctcacttaaatataaataaataagttagatcaaagtcctgatttatccaagtcctgttgatccaacaacccctccagttgctcagatctgttgacctccccatttgcagccaytgctgtaagtcaagctttcatatctgtcatctaatgtacctcctcattgtttcaaaaatgcatctctatcctctgcaagacattttaaaggaacctctttgcctacataatgatttgcactgaaggaatgtaaaaactacaataatctcaaattgttttaggagagatttgttacatatttcaaatggattttctttaaaagtatgtaacactggtcagccaaataaagtctaaatttctttgtatggcatgcaagatccatcctgatctgga

SEQ ID NO: 415919 - DNA, 591 bp, Homo sapiens
aaaatctaatggaaagctataaattcatcatttcactttatcaggcagtatcacctacccatttatttaatatgtttataaatataatgatctaaagtgcctatagatgctatatttgtaaattcaattaatacatattgcaaaactaaatcccactgattgtatatggagccctaagggaacaatattttaaagctttcttcttctcacttaaatataaataaataagttagatcaaagtcctgatttatccaagtcctgttgatccaacaacccctccagttgctcagatctgttgacctccccatttgcagccattgctgtaagtcaagctttcatatctgtcatctaatstacctcctcattgtttcaaaaatgcatctctatcctctgcaagacattttaaaggaacctctttgcctacataatgatttgcactgaaggaatgtaaaaactacaataatctcaaattgttttaggagagatttgttacatatttcaaatggattttctttaaaagtatgtaacactggtcagccaaataaagtctaaatttctttgtatggcatgcaagatccatcctgatctgga

SEQ ID NO: 415920 - DNA, 594 bp, Homo sapiens
tgcctataatcacctatctccatttgtgatattcttcaattgtatttctcacataatcacagataaagttaatcatttctcccatgttttacatctgctgctcttataacagagttaaaagtatgtgtatgtccatcttatctaccaaactargctctctttgagtatatagattgtgtattgcatgttactcaccagcatatattaggtagacaataaatatttattaaattagagaaaactctttcctataaaggtattcataatattctttgcagccttggaaatcaaattatagttaaggattcttataacactatatgtcaacttgaaaaaatattacaagattaataacatattagctcagtgtaataaaagaagaatttgcagttacaaagcctatattcaaaattaccttatcattttcagcaatgacagtgaaacagtcagtgtgctaagtagtgagaattgaaaaataaataagaaaggatcactagaatcttcaattcaaaaatgtatgtggtcatctatatttatgatgtctactcaaactttactcaaatacttatgaaaatacttatgaaaaaatgatag

SEQ ID NO: 415921 - DNA, 594 bp, Homo sapiens
tgcctataatcacctatctccatttgtgatattcttcaattgtatttctcacataatcacagataaagttaatcatttctcccatgttttacatctgctgctcttataacagagttaaaagtatgtgtatgtccatcttatctaccaaactaggctctctttgagtatatagattgtgtattgcatgttactcaccagcatatattargtagacaataaatatttattaaattagagaaaactctttcctataaaggtattcataatattctttgcagccttggaaatcaaattatagttaaggattcttataacactatatgtcaacttgaaaaaatattacaagattaataacatattagctcagtgtaataaaagaagaatttgcagttacaaagcctatattcaaaattaccttatcattttcagcaatgacagtgaaacagtcagtgtgctaagtagtgagaattgaaaaataaataagaaaggatcactagaatcttcaattcaaaaatgtatgtggtcatctatatttatgatgtctactcaaactttactcaaatacttatgaaaatacttatgaaaaaatgatag

SEQ ID NO: 415922 - DNA, 594 bp, Homo sapiens
tgcctataatcacctatctccatttgtgatattcttcaattgtatttctcacataatcacagataaagttaatcatttctcccatgttttacatctgctgctcttataacagagttaaaagtatgtgtatgtccatcttatctaccaaactaggctctctttgagtatatagattgtgtattgcatgttactcaccagcatatattaggtagacaataaatatttattaaattagagaaaactctttcctataaaggtattcataatattctttgcagccttggaaatcaaattatagttaargattcttataacactatatgtcaacttgaaaaaatattacaagattaataacatattagctcagtgtaataaaagaagaatttgcagttacaaagcctatattcaaaattaccttatcattttcagcaatgacagtgaaacagtcagtgtgctaagtagtgagaattgaaaaataaataagaaaggatcactagaatcttcaattcaaaaatgtatgtggtcatctatatttatgatgtctactcaaactttactcaaatacttatgaaaatacttatgaaaaaatgatag

SEQ ID NO: 415923 - DNA, 524 bp, Homo sapiens
tacttttccatgttcaatcttatgcactagaaataaaatcatgcaaattaaatcagagaagattgtattaactgaatgaatattatgctgatttaaaatcaataagcacaayaaaatgtagacatgggatttttttcatagtagatgtacttttattttttagggtataaagatatttaatcctaacaggatattgaaagggaaaaactccaagttcactttgtaaataatgatcttaagcctggagactgaagctggagactctgtctcaaaaaaatttttttaaatttaaatttagaaataaagttcacacctttggcttcccagtatagacagtatatagagctgatcttctgatcttctagccagggtctctgcagttcctacatctagttgtaaattcagtttttctgattgatgcttaaaccttctttagtactttcaggatgatgatcacggtgattccaagatggtgatcatagcttcattcccaagatctgagggttgcagtagtctttccttaa

SEQ ID NO: 415924 - DNA, 524 bp, Homo sapiens
tacttttccatgttcaatcttatgcactagaaataaaatcatgcaaattaaatcagagaagattgtattaactgaatgaatattatgctgatttaaaatcaataagcacaacaaaatgtagacatgggatttttttcatagtagatgtacttttattttttagggtataaagatatttaatcctaacaggatattgaaagggaaaaactccaagttcactttgtaaataatgatcttaagcctggagactgaagctggagactctgtctcaaaaaawtttttttaaatttaaatttagaaataaagttcacacctttggcttcccagtatagacagtatatagagctgatcttctgatcttctagccagggtctctgcagttcctacatctagttgtaaattcagtttttctgattgatgcttaaaccttctttagtactttcaggatgatgatcacggtgattccaagatggtgatcatagcttcattcccaagatctgagggttgcagtagtctttccttaa

SEQ ID NO: 415925 - DNA, 492 bp, Homo sapiens
tttcttctgccaaatatcctatttcatcactcaagtttctccttccacaaaacaccaggacacaaacacaatcagccaaattatttgcaactytaaaacaataattgcctttccttcagtttccaataatttgttccacatttccatctgaaaccttatcagaatagcctttactgttcatatttttaccagtattctgttcactacctcttaggtaatgtctagaatactgagggtttctctacaactttcttttggttctgagcccccaccagatttgccctttacagcctgttcacatcaatataggctttctctagcatgcactccaaaactcttccaacctttatcaattacccagttccaaagccacctccacatttttaggtatatatatgtatatatttatcaacaccctcacttctcagtaccagtttcttagtccatttgggctgctataacaaaatactttagactgggtaatttacaaac

SEQ ID NO: 415926 - DNA, 631 bp, Homo sapiens
cagtgggaagaatagtagaagcaatgcaattttataattggaggattttaaaaaatatatctgagytctagagttaagttctaattgtaagaaacagtgaattatttggaaaaacttggctagcaggttgcctatgaatttatcattaagaggacagcatcatggcaccatattttaagcacagtagcaagtgtcagcttgttgatatccaaaagtgtagttgatatttttttcaatcagttataccatcataactaggtgaaattatcagagcactggctcaggaataaaaatatttaactctggcacaaactggctgtgcatctttagtctaaccaaatcaactttctgtgcctcagtttttaatctgcaaaataaaagggttggagtttatgacctctgaagaattctctttcagctttaaaaatgggatatttcattaatctattgctactcttatggaatagcctttaactcaagagataaatattgatgcatttaggatgattcaggcaaattatgtctatatctgtttatctgtctatctatctatctatctatctatctatctatctatctatctatcatctatctatctgtctatttaaagcagagactacctccttactgt

SEQ ID NO: 415927 - DNA, 600 bp, Homo sapiens
gtttggtaggttaggcttactaaatgcatttttgacatatgatgtttccaatttatgacaggtttactgggacataacccaatcacaaattgaggagcatctgtagtctattttggctatgttcaagaaagcacattctaagatctttgagtttctacttcacaccctaaattcttcagttaaaaaattaacatgagggccaggtgcagtggctcacacctgtaatcccagcactttgcaaggcgggtggatcatgaggtcaggagtttgagwccagcctggccaatatggtgaaaccctgtctctactaaaaatgtaaaaattagccgggtgtggtggcacatccctgtagtcccagctgcttgggaggctaaggcaggagaatcacttgaacctgggaggcggaggttgcagtgagcgagatcgtgacactgactccagcctggacaacagagtgagactccatctcaaaaaaaaaaaaaaattaacatgaatgtcatatggactttatgataggttggataactgccccaagtatgtctacatcctaatctcccggacctatgaatattaccttatatggcaaaagtggctttgcag

SEQ ID NO: 415928 - DNA, 655 bp, Homo sapiens
gtccaaggcatgccagagccgggctgcagatgcaggagctaaatcagagaaacaaatgtccaatatagcagggagcccacctatagaagtcaggaagggaaaayagggaaggtagcccccagaccagatttctatggcaaaggcaaggggaatatgaaaccttgaaacagtagtgaggtggaaaagctctctctggggcttctactttgagcacaaatctttatggagaaaataaattcacccacagccagtggaattctctggctactaagttataaatttttaaaaatggaaatatctgcaataaaaatatataattgtttatctcagtgaataagctatacaagattagagagagttgaagagagaattagtaaactggaagataaataaaatgattttatatagaatgatgcaaacagataagatacaaaaaatatgagactaaaagccatggaaaagaaagcctagcatgtttttgctaagcatatattttgttgtgagctaagaatgattttgtattgtgaaaccaaaaaacaacaaagatgcattggagactatgtgcggtctttgcagtctaaaaaaaacctgtgaagtccttttcataaaatgtttgccagcttctgaactaacatatgtcaaaatggagtcccag

SEQ ID NO: 415929 - DNA, 609 bp, Homo sapiens
atgcaggcccaacaaagccccagccaaaaaagcagagagatacagagtattgttcatcagggtgtccgaggtggtccatgatagccaaactattatacctgcttcatgacctcaggtgcagtggctctttgcagctgaggtagaccccaagtggataagtggagcttatctgtttagcacagaagttcccaacctttttggaaccacggaccggtttcatggaagacaatctttccatggaccagggggtggagggggatggtttggggatgatttaagcacattacatttattgtgcactttatttctattattattacattgtaatatataatgaaataattacataattcatcataatgtagtatcaatagaagccctgagcttgttttcctgcaamtagatggtctcatctggcggtgatgggaaatggtgacaggtaatcaggcattagattctcataaggagctcgtaacctacatgtctcacatgtgcagttcacgatagggttcatgctcctgtgagaatctaatgctgctgctgatctgacaggaggcggagctcaggaggtaatgtgagcaatggggagtggctgtaagtacagaggaa

SEQ ID NO: 415930 - DNA, 533 bp, Homo sapiens
aaagaggtgaaaaaggataaggccactttttcccacaggttgtccagtaattcgaactagataaaatgcagaatgcactcttctgtgtcaacagaaatacatagcaagcaaccattagtttgtttattgagttttttaaatgcacatcacatagttttatttttttttaatttttttatttccataggttattggggaacagatggtgtttggttacatgagtaagttcttcagtggtaatttgtgaaattttggtgcacctatcacccaagcagtatacattgcactcaatttgtagtcttttatttctcacccactttctatcctttccccgagtcctcaaagtccattgtgttattcttaggcctttgcatcctcatagcttagctcccacttatgaatgataacatacaatgtttggttttccactyctgagttactttacttagaataacagtctccaatctcatccaggttgctgcaaatgccattaattcattcctctttatgactgagtagacttccattgtata

SEQ ID NO: 415931 - DNA, 595 bp, Homo sapiens
gatattacacacctatacattgtctcctatcttacacatacacatgagggggcaagcccgttgctttatttgctgctgtaactcagcacctagaacaacctggtacatgttagatactcaatcattacttgcaaaatgaaacaataaataatcgaatgaacagatgaatcaatgggtaggagaaaaaggtaaagacgtaaagactcagatggggttccatggtgggaaaacagaatgcaatattaggatatcagactctggtatttgaggtcagagaagtgctaggagagtgggggaggaaaggatacaaagagaaggtaaagaggagccttgatcacttttccaggttctgatttgcctggaattggccctttggcaaatcattttgggttttggatcaaatakgaaatgcttttggtatacttatgagattttcaaggaggaaactctacatagactcacatcaaacttgagcctaaaattttaaaaaagaagacatttacttccaaatactgtagcaagaataaaatatgctaaagataaaaatatcacagaactgtggttgaatgactaactgtgaaatcccctgcctatc

SEQ ID NO: 415932 - DNA, 537 bp, Homo sapiens
ttcatagagtttgctgctttgaattttaatagctggaataaagaatagtgaaaaagakgtttaagaaattacttgtgctgaaaaaaactcagcctcacattagtttagatatcctttatgaacatctagcttcgaagaaggagatttacagaggaactgattttgacttgggcttaaggaatacaaggcatgagtcatatacccatagcaagtggcctgtgttttgtcacctgagatcaggcatggcattggggaaaactttcctgtggcacctcccatataattaagctggagttaaagggagtaaggtgaaacaagatttctgtggcatgttcctatataaggaaatttcaaaatgtattataataacatctgtggaaataagaaatacatgtctggtaaaaaaaattaactgaaatttctacacgttaaatgagagaatgttgtacaaacaaatgataaagatgggtctccatcttcattgaaaacataacagaaggacataggccttgtctgtaacatgaaagaggtgagtta

SEQ ID NO: 415933 - DNA, 533 bp, Homo sapiens
aagattcacctccaacaattgtgggaaaaacaaggctcactgtagaaatagaaagctgtgcagacacagtgggtgaatgttatgagacagaaacccgaaaggagaagagaaaggttgtgagatgataggcagtggacagaagagagacagacactagaagtaagagcttggagggaaacgggaggactggatctgggtgccccacttctccaggatgagacttgaaagagaggagaggcagaatctgcaggactgtctaggtctcggtatgtttagacaaagtttgctggtagctcagctcacctccaagttccctctctcattctggctgctatgygctgcttcctggtctgccaggccccaaccccccagcacccttgcacacctatttaagtctctctctcatctaaatccctcaaaactcacaaattacgggaggtctacattcatattggtctttttttggttggctttctcacatatgctcacgaaagtaagttctatcattatttgttcatttttaaactcctgac

SEQ ID NO: 415934 - DNA, 574 bp, Homo sapiens
ttgtgttataattgcctacagtactcagtacagtaacatactgtacaggtttgtaatctaggaacaatacactatattgtatagcccaggtatgtagtaggctgtgccatctaggtttgtggaagtatactcttcaatgtttgtacaatgatgaaatccccatagttaagcaatgtatcactgtaaatatgttatagacaatgagagccagacatgcatcagagaaataagttacaaataagcaaataaagaatagtaaaatgaacactgtgatattggactgaaatctaaagtatcagtgtaaagtcagccttacttttataggatgatatatttagaaatttaraagtgtgtacgtgggttcatacatccatatattttctagctctgttgtatgtgagggcctagaggcagtgacaaacatcaacaagcattcttagcactcagatcttggtttataaatacgcttattcgtaaaaggaatcagagcttcttagagaattggctgattctgaagctgaggtacagaaaatatgagtctggggcattttaaagtgtcaaaaagtaaggatct

SEQ ID NO: 415935 - DNA, 603 bp, Homo sapiens
ctgggtgttctgcccactgctcaccacatggaataaggattcaaaaaagcacgtgggaaccaagaaaataagcccctcactaaattctccttacatttccctccagtagcaatacttaacatggtccagctggcaaaggagaaacatttacagggttcagcttcagtatcgcaagcagggcaaagaagtacatcacgggagctgagaggcaataaaaataagaattggcacagctaactcctctggcttcttggctcctatatacaaccttctacccacatttgaacttcctatgcctccacctgtcaagaaaagctatccttcaaagaaaagatgaytttcttacccgttcttccaaattaggagactcggtcccaacagttattccatcactagttatatgatttctctctaaaattcagttacagtctgactcaattctgttacctaaaggataaattttaaatgtaacctgcaataacttatatataaaatggaaatgggaaaaaggaaactgattggcatatacagataaaaacctacagataataaataagagacaatacacaaagctactagagccctcatttctgtaattggtca

SEQ ID NO: 415936 - DNA, 594 bp, Homo sapiens
catctgtaaccatagctgcaattggtatcatcctctgattaactttatgataatccacagctttacaacttgaataaartttgcaccagcctaaagggtaattaaatggaaacatgataagaatcattatctttccagtatttgatggcatcaattctcttatggatacagtattgttttttgttgttctttctggggaaggaaaggattggagtacagtttcaggggctttcatttgacctttcctactataataatcctcactgcatagatcagaaaacctatgtatgaaatactgccagttactaagtgtatatatatatatatctgtctttatatactgggattggacaaatgaacataatgagtctatggtttgcaatgcacttattactggataaatttagtccaagaatcaaatacctagtcatcaaagactctcactttgatcagtgggctccagtgatgttttgaatctctggacctgagtcatttcagagccagtatctaagaacccttggaaggtctgggtgtttgcttctccccaggccactgtcccccgaaaaatggccaaggtcccactagagatgactt

SEQ ID NO: 415937 - DNA, 594 bp, Homo sapiens
catctgtaaccatagctgcaattggtatcatcctctgattaactttatgataatccacagctttacaacttgaataaaatttgcaccagcctaaagggtaattaaatggaaacatgataagaatcattatctttccagtatttgatggcatcaattctcttatggatacagtattgttttttgttgttctttctggggaaggaaaggattggagtacagtttcaggggctttcatttgacytttcctactataataatcctcactgcatagatcagaaaacctatgtatgaaatactgccagttactaagtgtatatatatatatatctgtctttatatactgggattggacaaatgaacataatgagtctatggtttgcaatgcacttattactggataaatttagtccaagaatcaaatacctagtcatcaaagactctcactttgatcagtgggctccagtgatgttttgaatctctggacctgagtcatttcagagccagtatctaagaacccttggaaggtctgggtgtttgcttctccccaggccactgtcccccgaaaaatggccaaggtcccactagagatgactt

SEQ ID NO: 415938 - DNA, 522 bp, Homo sapiens
aattctttacaatggagaggaccctgacaaaatcaataagaaaaataaagcatcttaacctagctacacaaaaggaagccattttcatgtgtaagccgaaagaggaaaaggaaagaatgactctcaaaattcagagacagtcatggtgcaagagggattaccactcaaccagagccgtggttttatgtagagaattgcagccactgacaacagaccaaaaagcagataggagaaaccaagggaatacataccctcatctctttctttcagacttcaaatttcctgtcctcccctctccattttactccataagtcttccattccagttgttycacccctaggtcaactggggaattctaaagtcctttattcccccctctctggctattttcttctcactgcctccctccccaaccctttcttctctgagctatgggattctcctaaagtgtcttacaaaaaatctagccatttacattccagtgtaaacattcatttgtctgtgttaaattgctgccagtt

SEQ ID NO: 415939 - DNA, 650 bp, Homo sapiens
cagcactggaacctgagaaaaatagttcttagccaggatatgtttgtgtttgatcttgtgaataaatgagsgttcatatccctgcaaagaaaaaaatcaaattctagtaaatatcacagatatattttgccaggtaaaaatactgtcatgcctcggtgcctttgcttgtcaattctttcatcccagactacctttatttttctcacgttgtctatcatcattcacgactcagctcctatgatactttaacctggaagttttccccaactctccctctgacttctctaagtttaaaccactgctagttatcaactcaatattcattctttctcccatttgagccagaggcctgattttgtatagggtgtgatgtgtctagctttcttagcccttattctaactgggggtatctagttagaatatatatatatatatatatattattaatgttatagatattgaggtgagaaaaaacaaaaataaaaacaaaacaaaacaagggaagtctgagaaactgtcaccaccaagaagaatctaaggagataactaaatatcttccaagattatttaattatacacaatatatataaccttatataattatatatatataattgaataaagcctttgaaagggacttttgagagtgg

SEQ ID NO: 415940 - DNA, 630 bp, Homo sapiens
tgtcatttctttactttcctttagctgacaccttgtgtggaattaaagaatgcagagaatcagtattaactctcgggatcctggacctagtgtaaatggagctctctacgaactcttcaggagtccctcaacttacccatcaaaatgttttacagattgcatcatgtaagttactaaaattacagtaaatggcatttaatgtttacagtgcttgctccactcccagcaagttggaagcaaatgaaaaatggagcatcagaactacaccccatcagtatgattgctatttagagcacaaaattatgaacaaaatttgagagttgggtgtttttaagcagactcatgataattaatcaaagaaggacagattctgggttccataatacctatctggtggtaatgcacatttattcattcaacaaatacttataaactccattctgtgacaggcagtattgtaggtattagagaaatagatgtaaataagccaaacaaaatcactgccttcatggaatttaccgtggaatgtgcttaaacttrctattaggagagactggtatgatgtttaggacttgtaatatgttcaaatctcttatatataccttttatttaatctgtgccatatatgcc

SEQ ID NO: 415941 - DNA, 624 bp, Homo sapiens
attatgtaaaattgtagaaactctatcaattgtattactccaaatataaactgaataagtctacagagaaagaaggtggctcagacaaatgaaacactggtttgagtaagaaataatataatgggaactttttcccttggacttttgttatattttaatattctttttgcaatacaatcaggtttttaaaaatcagtttaaaaaatataaaaattaaacaatttttattcttctagaagttttgactaaatatgagawtttgttttttcaaaaaagctaaagatgtttagtcagctttttaagtaaattttaactgaatataatcattgaaataaaactataattctctgacaacatactctaccccaagagttttgctaatagtgttttaaatagctctgcacagtaagaaggcaatgaagcatttgtcttggctttagagagccacagaagcctaacgacgctggagttggagaagatagtgtaattcaaatatgttacatttgaagttctctcagaatatccatatggacctgttcagtaataattataactttgtgataagtgttataaggaacaccaacaaggtataacatggaatctcagaaaaaaagaatttaactc

SEQ ID NO: 415942 - DNA, 527 bp, Homo sapiens
tagttctatatatctcacagtgtctacaatactctttcattcattcaacaaatatttactgtgtttactatacattaatcaatgtattaggcactgagtagataaaatactatcctggtttcaagaactctcaaatctcatgggatggaagggtaagaaaatgagtaattagaaaaaaagatgagtacgcttgatgactgtagataaataggtaactatgggttgctatgaagcacttaactggtaaaaagaaagtatctaagatgaaatctgaagaataactaggagttagccagattaaagggaaccgagtgatacaatcaaagaatcctagatttgaagttcaagttccctagagctggcactgaaaagatattaaaaaatctgttcagcaaagctgtttttatacttagatgtatttctgccaacacagataacttgatcttcaagcctaggcttttttgatttcagggcttaaggtgtttttaactctgacrcaggaaaaatgtcaactttgcttatttctc

SEQ ID NO: 415943 - DNA, 582 bp, Homo sapiens
tttgagcaagttaaaaaacaattgcatagtatatttgagagcttaattytacattatttcccaaatactaaccctgacaaataatattgagtagtaaaatgtaagcatgattatgaagagactgagattagaaaaattattaacattattaattacatttagaatatttaaatcttaaattattctattgggaaattttcttctcctctcactatacctgctgcttatacaagagaacaaacaccgcagtttagttttatttaatctgaattttaattcttttcctttggtcatagttaggttatagaaatagataggttactgatgtaaataggctggaaatatactattttgagtattccgtagttggttttttaaagcatctatgggaaaataatgataactctttttttttttttttttttttttttaagatttgcatcttttttctccaattgctagtaaggttaaactttaaaaatatgttcttatattttataaattatgtcattaatatttttactgggtcatttagtctgggttatttatacatgagtgtctttttataataaaagatattaa

SEQ ID NO: 415944 - DNA, 582 bp, Homo sapiens
tttgagcaagttaaaaaacaattgcatagtatatttgagagcttaattctacattatttcccaaatactaaccctgacaaataatattgagtagtaaaatgtaagcatgattatgaagagactgagattagaaaaattattaacattattaattacatttagaatatttaaatcttaaattattctattgggaaattttcttctcctctcactatacctgctgcttatacaagagaacaaacaccgcagtttagttttatttaatctgaattttaattcttttcctttggtcatagttaggttatagaaatagataggttactgatgtaaataggctggaaatatactattttgagtattccgtagttggttttttaaagcatctatgggaaaataatgataactctttttttttttttttttttttttttaagatttgcatcttttttctccaattgctagtaaggttaaactttaaaaatatgttcttatattttataaattatgtcattaatatttttactgkgtcatttagtctgggttatttatacatgagtgtctttttataataaaagatattaa

SEQ ID NO: 415945 - DNA, 582 bp, Homo sapiens
tttgagcaagttaaaaaacaattgcatagtatatttgagagcttaattctacattatttcccaaatactaaccctgacaaataatattgagtagtaaaatgtaagcatgattatgaagagactgagattagaaaaattattaacattattaattacatttagaatatttaaatcttaaattattctattgggaaattttcttctcctctcactatacctgctgcttatacaagagaacaaacaccgcagtttagttttatttaatctgaattttaattcttttcctttggtcatagttaggttatagaaatagataggttactgatgtaaataggctggaaatatactattttgagtattccgtagttggttttttaaagcatctatgggaaaataatgataactctttttttttttttttttttttttttaagatttgcatcttttttctccaattgctagtaaggttaaactttaaaaatatgttcttatattttataaattatgtcattaatatttttactgggtcatttagtctgkgttatttatacatgagtgtctttttataataaaagatattaa

SEQ ID NO: 415946 - DNA, 550 bp, Homo sapiens
actatctcccttttctctttggctgccaggaagctgagagccaagttgttagtttaacaaaagcaagtaggcacctgacagtttctcgcctctgacttcatcgtgatgatttctctgactcggattttttttatatctgtaaaattaaactgctgtcagtgtttggtttagagagctgtgccgtttcacaagtgtaaaagatcttggagagaagttagtgtcctgattcacttggatctaggtagccagttggtaacagcctccgcctctgsgtcctccccttctccctgccgcgtccctcctccccgccccttcgcctctgcgcccgccccttctccctgccgcttccctcctccacgcccgctcgcctctgactcctccccttctccctgacgcgtccctcttcctgtctcttcgcctctggctcctcccctttctcctgccatgtttcttctccccgccccctcgcctctgcgtcctcccccttttccctatcgcgttcctcctttgcagcccccatccccctcctctggctcctcttcttccctac

SEQ ID NO: 415947 - DNA, 550 bp, Homo sapiens
actatctcccttttctctttggctgccaggaagctgagagccaagttgttagtttaacaaaagcaagtaggcacctgacagtttctcgcctctgacttcatcgtgatgatttctctgactcggattttttttatatctgtaaaattaaactgctgtcagtgtttggtttagagagctgtgccgtttcacaagtgtaaaagatcttggagagaagttagtgtcctgattcacttggatctaggtagccagttggtaacagcctccgcctctgcstcctccccttctccctgccgcgtccctcctccccgccccttcgcctctgcgcccgccccttctccctgccgcttccctcctccacgcccgctcgcctctgactcctccccttctccctgacgcgtccctcttcctgtctcttcgcctctggctcctcccctttctcctgccatgtttcttctccccgccccctcgcctctgcgtcctcccccttttccctatcgcgttcctcctttgcagcccccatccccctcctctggctcctcttcttccctac

SEQ ID NO: 415948 - DNA, 550 bp, Homo sapiens
actatctcccttttctctttggctgccaggaagctgagagccaagttgttagtttaacaaaagcaagtaggcacctgacagtttctcgcctctgacttcatcgtgatgatttctctgactcggattttttttatatctgtaaaattaaactgctgtcagtgtttggtttagagagctgtgccgtttcacaagtgtaaaagatcttggagagaagttagtgtcctgattcacttggatctaggtagccagttggtaacagcctccgcctctgcgtcctccccttctccctgccgcgtccctcctccccgccccttcgcctctgsgcccgccccttctccctgccgcttccctcctccacgcccgctcgcctctgactcctccccttctccctgacgcgtccctcttcctgtctcttcgcctctggctcctcccctttctcctgccatgtttcttctccccgccccctcgcctctgcgtcctcccccttttccctatcgcgttcctcctttgcagcccccatccccctcctctggctcctcttcttccctac

SEQ ID NO: 415949 - DNA, 550 bp, Homo sapiens
actatctcccttttctctttggctgccaggaagctgagagccaagttgttagtttaacaaaagcaagtaggcacctgacagtttctcgcctctgacttcatcgtgatgatttctctgactcggattttttttatatctgtaaaattaaactgctgtcagtgtttggtttagagagctgtgccgtttcacaagtgtaaaagatcttggagagaagttagtgtcctgattcacttggatctaggtagccagttggtaacagcctccgcctctgcgtcctccccttctccctgccgcgtccctcctccccgccccttcgcctctgcscccgccccttctccctgccgcttccctcctccacgcccgctcgcctctgactcctccccttctccctgacgcgtccctcttcctgtctcttcgcctctggctcctcccctttctcctgccatgtttcttctccccgccccctcgcctctgcgtcctcccccttttccctatcgcgttcctcctttgcagcccccatccccctcctctggctcctcttcttccctac

SEQ ID NO: 415950 - DNA, 557 bp, Homo sapiens
aaacagaagaaaggaaatattaaagattagaaaagaaggagacagaatatcaataaagaaaatcaatgaaaccaggaattggttccctaaaaggatcaacaaaattggcaaacctttagtgaaactaagaaaaaaaagagagaagatttaatacaagcaagaataaaagaaccatcactaatagccttgctgaaataaacaggaataagaaggaatactatgaacaactatgcttaaaaaagataaagtagataaaatggccagattcctagaaaaacacaaactacctaaatcaactcaagaaggcataaagaaaaatctgactagatctaacataattaaagaaattgaattagcaagaaaaaaaaaaaaacctatccagaaggaaaagcacaggtccagatggcttcgctggtaaattccactgaacaattaaagaataacacttaagaaactattccaaaatatagaagaggaggaaacaattaacaactaattctataaggcaagtattactctgattccaaccagacaaaraaatcaacaagaaacaaaaa

SEQ ID NO: 415951 - DNA, 604 bp, Homo sapiens
aatcggtatttatggtaactatagccttataaaatgtatttttttaaataagacttgaaagtggacattactccttgactcgtggactgcagaatgatgactgcagcatgttgtgygtgaaaacaatgttaatctctttgtacatcttcatcctcagggctcttgagtgaccaggtacattttcaatgagcagtaatattttgaaagaaatcttcttttttcttagcccagactttgttgttccatttatagaacacaggcagactagatttagcatcattcttcagggtcctaggattttcaggatggtaagtgagcatgggcttcaacagctgcataagcctgtaacaagagagttagcctgtcttttgaagctttgaagccaggtgttgacttgtcctctctagctttgaaagtcttagatagcatctttttcccatagaaggctgtttcatctacatttttaaaaatctattgtttcctgtggttatctccatcagtgatcttagctagatcttctggatcttgctgcagcttctacatcagcacttgctgcttcaccttgcacttttatgttacgaaaatggcttctttccttaaacct

SEQ ID NO: 415952 - DNA, 557 bp, Homo sapiens
acttctgtatgggaaatgttgctcctcatttaaaagcaagaaagaaaataagtgatgaaaggcaaaaatgtttgtctaaggagataaaaactattttgtgggattaaaataaatatgcattattaatgtaaatggtgatgagaatatacaaatcracaaaatggtaacaaaacagtaattattttaaaaatgaataccttaacataatttagatatagaatgagaaaattaagtataaaaagttgaaaaattatgaaaatacataataaatgttgatactatatttctaactaatctcgtccaacatacaatgaccagtgaaataaacatgataaaatgggggacagaagacaacagctaaaatagagaaaggacttcagaaatgtgagaaggatatgaatgttttttaaaaactgaataaactacataacaactaaaataatcatttattaagccaaagtctattgaagtttagtctgtatcagaaactactgtaagtactgaggattctggggacctgtcagtaaactagactggccgttctcaaccattaagga

SEQ ID NO: 415953 - DNA, 595 bp, Homo sapiens
ctcagggcatgaacaccgttcagaggacatgatacttactagatagtagaagggtatgggagatctgtaagccactaaggagaaactccattaaattcctaacactttgaattcaaaacgagtctatcatcagtaattaatttatcaaataacagcatcattttactatttgcccttcttgggcattgtkagagtgtgggagtgaaaacaaaacatgatcattcaagtgagcacttaaaaaaaaaaaaaaaaaaaaaggtactctccagatacctagactccatgccagagaaaggggatcccatccaacttaagtcctaagggcacatttttgttatttctaccttcatcttttttgatgtgtcatgttctaaagaccttgtgagctttgctacatattaggtttctgaaaagtctttcggttaaactgatagacatcaaattgtgaggagaatttgctacttaagaaatgatttgctcagagtgagaacaccactcagaggaaatgattcctactagatagtaggattgtaaaattctactggaagtaggctgtaacatgaaaattttcttttatcattgtttaagtccagct

SEQ ID NO: 415954 - DNA, 595 bp, Homo sapiens
ctcagggcatgaacaccgttcagaggacatgatacttactagatagtagaagggtatgggagatctgtaagccactaaggagaaactccattaaattcctaacactttgaattcaaaacgagtctatcatcagtaattaatttatcaaataacagcatcattttactatttgcccttcttgggcattgtgagagtgtgggagtgaaaacaaaacatgatcattcaagtgagcacttaaaaaaaaaaaaaaaaaaaaaggtactctccagatacctagactccatgccagagaaaggggatcccatccaacttaagtcctaagggcacatttttgttatttctaccttcatcttttttgatgtgtcatgttctaaagaccttgtgagctttgctacatattaggtttctgaaaagtctttcggttaaactgatakacatcaaattgtgaggagaatttgctacttaagaaatgatttgctcagagtgagaacaccactcagaggaaatgattcctactagatagtaggattgtaaaattctactggaagtaggctgtaacatgaaaattttcttttatcattgtttaagtccagct

SEQ ID NO: 415955 - DNA, 666 bp, Homo sapiens
ccttgtgagctttgctacatattaggtttctgaaaagtctttcggttaaactgatagacatcaaattgtgaggagaatttgctacttaagaaatgatttgctcagagtgagaacaccactcagaggaaatgattcctactagatagtaggattgtaaaattctactggaagtaggctgtaacatgaaaattttcttttatcattgtttaagtccagctatgaatatatcacatatgtttgtatattttctccctttttgtcactcccaagactgtcaagttttgaggaaaagacatgaaacttcaagagtacttttcaaaagacttctgcaaaccatttraaactatataaatgaactttttaggtaaagcaaatggattgactagcaaactgtaaagagctttttacctgcaccagccatgaattctggggcagaaattgtgtactgttgctccatttccatttgtgaatagagaacatcttttattaatagatgaaaatctccatctatattgtaatggtaaaatatctgcaaaacaaggaaagggaggagaaattgctcaagctgatcatgatcttttcctacctaaaatgctcctgtggcttcttcttgtctcctgcagtggttctcaggcccagaccactttgagggacaggttcaaccca

SEQ ID NO: 415956 - DNA, 666 bp, Homo sapiens
ccttgtgagctttgctacatattaggtttctgaaaagtctttcggttaaactgatagacatcaaattgtgaggagaatttgctacttaagaaatgatttgctcagagtgagaacaccactcagaggaaatgattcctactagatagtaggattgtaaaattctactggaagtaggctgtaacatgaaaattttcttttatcattgtttaagtccagctatgaatatatcacatatgtttgtatattttctccctttttgtcactcccaagactgtcaagttttgaggaaaagacatgaaacttcaagagtacttttcaaaagacttctgcaaaccatttgaaactatataaatgaactttttaggtaaagcaaatgrattgactagcaaactgtaaagagctttttacctgcaccagccatgaattctggggcagaaattgtgtactgttgctccatttccatttgtgaatagagaacatcttttattaatagatgaaaatctccatctatattgtaatggtaaaatatctgcaaaacaaggaaagggaggagaaattgctcaagctgatcatgatcttttcctacctaaaatgctcctgtggcttcttcttgtctcctgcagtggttctcaggcccagaccactttgagggacaggttcaaccca

SEQ ID NO: 415957 - DNA, 591 bp, Homo sapiens
taaagtaagtcaaacaaaatgagcgaagaaagattttttcggagagaaggcacaggaaagaggagtaacattcctagacttaggaaattgtatatgggtcttctgatccttaagcataagaacactgtctcttttcctcataacatcttcataatatactgagaagcaaagtagaggggggacaagatggaaaaccaggaaaggaagtgtagccagttagtgagatgattccacaataaaaaaccaaacctaaagtttgccaaatccaatggtcagttctctgtcctcatcttacttgacttagcagcagaatttgatacagtcgatcactcctttcggctgtaaatatttttcttcccttggcttgtattctgtctcatagctctggttagccccggagttcatcccttaaacatctctatttttatatgtgcatgtactgctttggtgagctcktctagccacacggttttaagtatcactaatttatttcttcagctcagacttttcttctaaacttggaccatattaacctgcctacttaacctttcttgttagactttgataggtatctcaaattttacatgatcc

SEQ ID NO: 415958 - DNA, 572 bp, Homo sapiens
ttggcaaatcaagtctgacaatacataaagacaaggcattaacagggcctttggggatgtgattaggtaatgagggtggaaccctcatgaatgggattattgcccttattaaatagacccaagaaagctcttcatcctttctgctatgtgagatcacagtgagaaggcaccatctatgaaccaggaaacaaaccatccccagacactgagtctgctggtgcccttggagttcccrgacttgagaactctaaaaaataaatttctgttatttatatatatggcattttgttatagtagcctgaatggactacgaacttaacaaagatacaaaggcaatgcaatggagaaatgacagtgttttcaacaaatgctaaaggaacgactggatgttcaaaagcaaaaagtttaaacattcatctcaacacatatctcacatctcatacaaaatttatttcaaactggatgttatacctaaattcaaaatataacactataaaacttccagagcacataggagaaaagctgtgtgaccttaagtttggtgatgagtttttaggtataacaccaaaagc

SEQ ID NO: 415959 - DNA, 587 bp, Homo sapiens
gtgctgggaatgtcatggttgaggtgccattactcacagcaggtggagacacgtggtggcacagtgcacagtgcacagcatgccctcagcagcagtagcagcggaggaggctccccgcagtccccagtgccgatgctgccccctcgccccttctgctcttcctcccttcactggcaccatggctgatcagctgaccaaagaacagattgctgaattcgaggaagctttctccctgtcctataaagatagtaatggcactatcacaacataggaacttggaaccatcatgaggtcactgggtcagaacccagcagaatctgaattgcaggacatgatcaatgaagtggattctgatggcaaygacaccatttaattcctcgaatttttgaccatgatggctagaaaaatgaaagacacatatagtgaagaagaaatcgtgaggtattccagtctttgacgatagtggcaaaggttacatcagtgcagcagaactacgtcatgtcatgacaaacttaggagaaaaactaatagatgaagaagtagatgaaatgatgacagaagcagatattgatggagacagacaagtt

SEQ ID NO: 415960 - DNA, 587 bp, Homo sapiens
gtgctgggaatgtcatggttgaggtgccattactcacagcaggtggagacacgtggtggcacagtgcacagtgcacagcatgccctcagcagcagtagcagcggaggaggctccccgcagtccccagtgccgatgctgccccctcgccccttctgctcttcctcccttcactggcaccatggctgatcagctgaccaaagaacagattgctgaattcgaggaagctttctccctgtcctataaagatagtaatggcactatcacaacataggaacttggaaccatcatgaggtcactgggtcagaacccagcagaatctgaattgcaggacatgatcaatgaagtggattctgatggcaatgacaccatttaattcctcraatttttgaccatgatggctagaaaaatgaaagacacatatagtgaagaagaaatcgtgaggtattccagtctttgacgatagtggcaaaggttacatcagtgcagcagaactacgtcatgtcatgacaaacttaggagaaaaactaatagatgaagaagtagatgaaatgatgacagaagcagatattgatggagacagacaagtt

SEQ ID NO: 415961 - DNA, 474 bp, Homo sapiens
gtatgtaaacaactatgttttgtgaaagatttccaagagcactgtgacctgaccaagagcactgtaaccaagagcactgtgacaaagccattctccaccttcttggacccgtgctggctcccaggtgtctgcggtcctccattacctcttgatcccaaccccctcctctgtctcctgcccttaacataaaatagcctaaagtttgtagcgactcgaggtggtgctgtaggatgctagttggccatcttyttggcttgctggcactcttttcctcccaccagttctctcgtgtgtttggattcgagcagcgagcagcggaccttgggtttggttacctccgcctggagccctgcctgggctgccccgtgcctgtgagtttcctcccgaggctgctctctaggccttctcttcaccctcctgctcctgtttcccagggccttcctgatgggttggactctgctctctgggccccca

SEQ ID NO: 415962 - DNA, 521 bp, Homo sapiens
tgaggcacttggagaggaaatcaacagccccatgtcaagttcattgcttcacatctttcctcttggggctttcctttcttcctcacccgggctgagctttctgggtctgggtctgcaggagggggttggtggggtgggaatgacccacttcttcccatctcagggaggtctgacctccctgggcagcacaggaagaaggcaagcctgcctggaacccccaataattaggaaccactgccatctagtgtcggcattgctgtgaagatttaaatattaaaacccactccaagccctgaagagcaccgccttccccatgggcacccctcagggaccctacaggctacagcagtgcaggcctgagctagaaaatgctcattaggagaattaaacatctggggaaggawtatgaaaatctaatttagaatggcttgggactgccagagaggaagtggggagtccagagagaagactgaagagaaattttcttgaaagatagatcccattaattagagggtggcagc

SEQ ID NO: 415963 - DNA, 604 bp, Homo sapiens
gtcattctctaatatcgttcaagaccaggccatgytcacatttccatcactgctccccaaaagctctattatgggcttgcttatataaactaggatccaatcaatattcttggattgcaactggtgatcagtatgtttcttttattctggaacagtcctcatgcctttttgtataaaatagaaggttttatttccccttacatgtaatcatccaaatgggagtgggtggtctagggcaggctcatccacctacatcatggaattccattcctgggtccaaagtggtggctccagttgtcattttctaccagacatcaggaaggaagaaaggaggagtggaagaagcaccctcctgcaccctccgcccccaacagtggggccaaccctctcctgctgaaactgcctttgcagattatggcagtgagagaaggctagcatggatgactccaccttgcatctagcctcacaggctggctctcctcactcactcctgggcataggccaagctaaccacgggaggaatttagtttatggtttaactttgaaacaaggatgataatagtttctgtctaaaactgacccccttttgtttggggactgaaac

SEQ ID NO: 415964 - DNA, 604 bp, Homo sapiens
gtcattctctaatatcgttcaagaccaggccatgttcacatttccatcactgctccccaaaagctctattatgggcttgcttatataaactaggatccaatcaakattcttggattgcaactggtgatcagtatgtttcttttattctggaacagtcctcatgcctttttgtataaaatagaaggttttatttccccttacatgtaatcatccaaatgggagtgggtggtctagggcaggctcatccacctacatcatggaattccattcctgggtccaaagtggtggctccagttgtcattttctaccagacatcaggaaggaagaaaggaggagtggaagaagcaccctcctgcaccctccgcccccaacagtggggccaaccctctcctgctgaaactgcctttgcagattatggcagtgagagaaggctagcatggatgactccaccttgcatctagcctcacaggctggctctcctcactcactcctgggcataggccaagctaaccacgggaggaatttagtttatggtttaactttgaaacaaggatgataatagtttctgtctaaaactgacccccttttgtttggggactgaaac

SEQ ID NO: 415965 - DNA, 606 bp, Homo sapiens
ggcctggtctcttcaacaagtcaacacaatgaaaaagagatgcagaaggaaaggttaactagctttaaagagctatgaaaacatacaaccaaaagttttgtctttgatttgcccaaatcacattttaaaaacatcttggagacaactggagacatttaactttcgaatgggtattacataatattaagaaacgcttgctaatatttttaggtgtgaacaataggattgggattacataggaaaattaatttttataggagaaaacaaaagtggggtaaaatgccacattatgtgtaatttactctaaaatactttggttaaaaacaatagctgtaataagtagggcaatgtgttaatgaaatctaggtgatgagtctatagatgttcattttcatattcactccactttctggtgctttcttcttcttcttyttttttttttttttttttgagacagaatctcactctgttgctcaagttggagtgcagtggcacaatctcagctcactacaacctccgcctccggggttcaagcaattctcctgcctcagcctcctgcatagctgggattacagatgtgagccactgcacccggctactttcttg

SEQ ID NO: 415966 - DNA, 596 bp, Homo sapiens
ctggtattagtaatttgtgtgttcttttattcctggttagtgtggctagtggtttatcaattttattaatatttttgaagaaccaccttttgttttcattaattttccctattgcatttgtgttttcaatttcattggttctgctcttgtttttcatttccttccttctacttgctttggggtttgttgttgttgatggtggtggtggtagtggtttttgctctccattttctagattcttgaagtagtagcacagattattgatctgaggagatttttcctgttatgtaagcatgttgcactttaaaaagtcccctgcaagcattattttagctgcatcctatgttcatttatatttaattcaaaatatttttacatttctctggaaacttcttatttgatycatgtgttacttagaagttttttttaaaaacaacaacaacaacaaacatagactttattttttagagcagtattaggttcccagcagaattaagcatatatcccctccaaactacccatttctctgtcccaaccccctccaccaccaatcaacatcctgcaccagagtgatacacttgttgcaattgatgaac

SEQ ID NO: 415967 - DNA, 513 bp, Homo sapiens
aaggtcagtggcaacagtggaggccaggagtggggttcatttgagagctgtctgtggagcaagtggagcccccagcaactcctcaacacctgtgtaaagagaggcacctatgagagctacttaccccatggcaaaaaacctgagggctcttccttggaaaaaatggaccttccttcctgggagttccaaggcttgcatggtggatgtagcaccagataagccctacccctcctgggctyccaccaggcgatcctacaaggaacctatctgcacccacaatgattgaaatggacccacgtattcagaatttttaatagactgtgagaatgtcaaggattaaagagaagtttctagaagttttcatagaaaaaagcagctcagctgcaaaggaatgagagccaaaggggcatcaggatgctccctagtaattctagattctaaataaggttaaacctagaactctgcccccaaaccatcaatcaagtatgagggcccactgaagtattttaaggc

SEQ ID NO: 415968 - DNA, 640 bp, Homo sapiens
cccacggcctgcagcacccccgtggcccatcctctagggggctggccatgtgtggctgtgtccagccgaggtccaaagggcacatgagctgtgtgaccacacccctgcaggtcagacctttcaggggcctcctgagcccatgcatcagggaaaggagccagttctcccctgtgttgctgtgctactcttctaaatctaaaccaggacttcaggtcattgggcaggtttctttgcgaaggtgagaagagggtrtgttttatttaaatgcttgctgggttgacttacagcttgatttttatctcagacatttgtatgcagcctgtgttttcaccgtgccccctgcactgcgtgctcaggccaggcctgacctgggagaaggctggggcttccataggccatagaattagcaaagtttgtcacatgaaaaacaaatccagacttggtgagaacaaactcaagggttaggcaagtcgttttttcttgtacagagaggactaaataaggctagaaggagctggtttgggaaaatgggctgggggtggcaagtttggacatagatcagagaaggtttgacctgaggtcacatgtgctcaggaggcccccgagcggttcaaattaaggaggagctgaggtgcagggg

SEQ ID NO: 415969 - DNA, 616 bp, Homo sapiens
aagatgcaaacactggcattgtgaagcactaggttccagtagcaggcaagtctgagctcccattatatcacctatgaaaagtggcaagaaataaccgtgtatttgagggagttttgtaagcctcgcgggaggaaatgcctgtacagcgccatgtccatgcatctgcctgaggttctcctgccctttttcccttgtcatttttgtcatttttaaacaggagatggtcaccctcatctcctttcaccccagacaaaagagacgatgcaggaagaggaggaccagataggagcaaattggaaaacagtaaaggctgaaagaggagagcaccaggcacagtggcgcggcagtgcgcasgtctggggactccctcaggctgcatggagcatggcgcgcctggtgcagaggaggctcccaggagaggcaaaggggtgttgttttgataagggcaggagtttgggggcagttgcctggagggaactggagggggaagggggattcagcagaggctggaccggctcccgcttgctagctacgcgcaggaggctgtatctcagttacttggaagatggaaggattggcgaagaggctggaggaacgctgggctgcgtgcaccagc

SEQ ID NO: 415970 - DNA, 616 bp, Homo sapiens
aagatgcaaacactggcattgtgaagcactaggttccagtagcaggcaagtctgagctcccattatatcacctatgaaaagtggcaagaaataaccgtgtatttgagggagttttgtaagcctcgcgggaggaaatgcctgtacagcgccatgtccatgcatctgcctgaggttctcctgccctttttcccttgtcatttttgtcatttttaaacaggagatggtcaccctcatctcctttcaccccagacaaaagagacgatgcaggaagaggaggaccagataggagcaaattggaaaacagtaaaggctgaaagaggagagcaccaggcacagtggcgcggcagtgcgcacstctggggactccctcaggctgcatggagcatggcgcgcctggtgcagaggaggctcccaggagaggcaaaggggtgttgttttgataagggcaggagtttgggggcagttgcctggagggaactggagggggaagggggattcagcagaggctggaccggctcccgcttgctagctacgcgcaggaggctgtatctcagttacttggaagatggaaggattggcgaagaggctggaggaacgctgggctgcgtgcaccagc

SEQ ID NO: 415971 - DNA, 581 bp, Homo sapiens
ttgctcccacagctctcattaatctcattctcattcacgttgtgtatttgttgtttctrttctcaagtgaatagcttttctcatcattctctgacaggtgttcctgggaaagtgagggctttttatttgacatatttgccatgaagctagtctttctctaaactctctcacagtctaattgtttttctagaaactatgggaaacacctgcccatcaccaactgtacaaagggttctgtgactacacgctgccaggtgcccttctggggctcccagaagcagagatgcccagaggaagcctgctggccccgttctctgcgggaagggccccggtcatgctgcccacaggagcttggctgatgcctggggatgtggagttgggtaagagagacatttagtggagctttgcaaccacagtgtcctttcctcccctttcaacatgttcagggaagacccctgtctagtcagctgtcaggagccattccatcatggctcacttagaagtcagggatctgaaagtctgtctcatggttaaaattcacgtttgtcttaaaatagtgagtagaagcaaaaaaaagctat

SEQ ID NO: 415972 - DNA, 565 bp, Homo sapiens
catccccactcaccgggcagggtctccctatggggatttcaggaactccagccaggagtttacagacagaaatctgatctccctgaaatgaagtccctgccaggaggggcggccgtggtctccacagatcggtggacttagtattttcccctgctagctctgaggaatctgggcagttccaacgagtgggattcccccagcacagcgcaccccctccacaaaggggcagccagagtgcttcatcaagtrggtccctgatcctgtgcttcctgactgggtgagacccccaacaggggtcaccagacaccttttacaggagcattctcactggcatcaagtcagggcccttctggaacagagctcccagaggaaggagcaggcagccatctttactgttctgcagcctccactggtgacacctctgggttcaggagggactcaggcaaataaggtctggagtgacccccagaaaactgcagcagccctatggaagaggggcctgactgttaaaagaaaaacaaacagaaacaacagcactatcaacaaaaaagtccccacaaaaacc

SEQ ID NO: 415973 - DNA, 563 bp, Homo sapiens
tccagtcccttgcctgaggatcagtttcctgaggaaggaactcagatgagacaaatgtaagtttcaagttttaagaccagggagggtcaatattagttctctgggacaattgagccagtttcaaaataagtattgttaaagatcaaagagtgtgtacatttcctaggtgcttgtccacttccggggccagccagtcaggctgcttggcacccctcagggaacagtggctgtgccctacacactggagcaagtatcaatttacatctttccccaggaaactgagctccatgaagacattgcttatatgtgggtgatgtagaaaaggaatgaagagagatttgactgaatgaatgacacattattgtcycccgccccacccccatgtgggccattgaggctgactctggcatttgctggtgtaaggctaaatctccagaaatattggtatctggccaagctgtggccaccagaggggtttgagggcaggcctgagcacaggctctcagcagcaggcccacttggttactgtagcccccaggcaagggagcagtgggaggcctcac

SEQ ID NO: 415974 - DNA, 420 bp, Homo sapiens
ataacccgatagaaagacacacttctcaaaacaggaaattcaaaaaggccggtgaacatgggagtatatgcccaacctcattagttaaacagcaaaagcaaattagatgcctctgtacatcaacctaaatgcctatcgtttaaaagattagcaatatcaaatatgatatactcctacctatgacacagcaatccatgcacaaagacatgcacaggaacattcacagaagcattatttctaatgcccgccccccgcaagattggagaccacccaaatgtccatcaatactagaatggataattaaattgcagtgtttgcacatagagcagtactgtatagcaatraaataaattgctgctataatcaacaaggatacatctcacaaatatgatattgaaagaaaaaataaatacaaaaata

SEQ ID NO: 415975 - DNA, 494 bp, Homo sapiens
tgttctgaggtactgagtggacataaattttggggagacactgtccaacccctgtaataggtaagaaatattagtcaatacttcaccttttcttagaaatttgatcttagattccttaacccatttaactaaggtaaaatgagtgtagcaaggtaatgaaaggcaggttgttgcatttatctrtcaattattatagtgtgtttttctcttctcccttctgaataattttcttctttttataactccatctctttttcctattccagctaccctgggatgcactgcaatatttccaaggcctgagcttcctctgcaatggcctcttctcctgacttgtagcctctgagtgatattctagagaagaggccagcagggtggataacaggcactctccatggggagggagctgtgggaagaggcatctgaacagtggattgcccataaggcccatgcttaggaatggcatcagtgatggatgaagttagagagcggac

SEQ ID NO: 415976 - DNA, 623 bp, Homo sapiens
atttgaaataatctctaatgactggaaaagaaaagtggtttctgggagaggggcgaaggcaaaagaatgactagaaatgacgtgctccatgttattatttaatttacccttcacactgaaacccctgaaaattaaataattttgctttccctttcaaaatgaattagacatcacagagatccagtgaagaaaattgagtctatcatttctaatgagaagaaaacattgcactagagagccataaaactctccaagcacatttgcatgcatctttacaggatrtggcagtaaagagtgggttgtctgccctgccccaattctttaagaattgcctcatcatcctgaaagatggacccccagagattttgcttcctgaccccaatcccagctgcagttggttggataacttggaggggtggcacctgaccaaaagtacaatctcattgtttctgctgggagtagagaaagagacagggagtctacagcagccagacagtgatactgcagtaaacctaaaagaaatataaactcttggctgagtggtcttctttagacctttcataaaccctgagaagcagagaaaaatatgggttgcagaaagaaaagagcgaaacacatgtgca

SEQ ID NO: 415977 - DNA, 615 bp, Homo sapiens
gattataggcatgagccattgtgcctggcccaaaaaattcttaaccaagccagaaatcattctcaggaccggggctacagtctagaccttaagagaggtagagagacctatgaattcctcctggacagcctgacaagctctcagcctctaccacaaggtggtaaagtaaggactcaggccactttgacagcaaaatgcgctggtttcttcctgcagccttcagtaaagcataayggagaagacaccaaccagctcaagggcaaagctgctcaattgaaggaagtcagaggaagcagagccatcaaacaaggtctgccaatgtctagatctaagaatgttccctgataaagtttcaaactccctgctcaccctttcctgcagatgaagctccagcaggcacctggaaatgggtgatcctggtgactagaagggtcacacactggaatacctggagatgctaaggggctcccaacttctaagccactgcaaagcacctcccattgctgaccctgcctcagagttggcttcctggggacccaatctgcaacagtgatttgaggtcagaggccttcccagtataccacagaacggcctggagggcctgttaaaaaacag

SEQ ID NO: 415978 - DNA, 536 bp, Homo sapiens
acctggagatgctaaggggctcccaacttctaagccactgcaaagcacctcccattgctgaccctgcctcagagttggcttcctggggacccaatctgcaacagtgatttgaggtcagaggccttcccagtataccacagaacggcctggagggcctgttaaaaaacagattgctgggcccacccttagacttcctgttcctgttggtctggggtgtggcccaggatctgcatatctaacaagttcctagatgttgctgatgcggggaaccacatttgagattcattggtctagacaaatatsgtgaagcttttgattcaaaaatagcaatacaaatgattagcacagaaatactgtataggagcatgggaacattctagaagggaagagataaaaaagccgttcctctgccctatttgtggactgagatcaagacctagaagagagaaaaatggctccaggtgggtaggaagaatgacctgcccctcagggaaggtccagtcctggcagttaagaaattaacaaaacaagacaag

SEQ ID NO: 415979 - DNA, 502 bp, Homo sapiens
gatttgtttaggttttctttaatttcttccaccagaattttatagttttcaacataaaagctttgtacatgttttgttacatttatacatacctattttattttaaaacaattataagtgggcattgtatttttaactggtttctatgtgttcattgctagcataaagaagtacaattgattttgcatgttgatattgtgttctatcatgttactaaaatcacttattaatttctaagttttttcatagattcttgggattttccacatagacaatcatgtcatctgcgaatagagatagttttattttcgctttcygattttcatgcttttcatttgccatttttaccctattgctccaggtagaacctctagcactttgttgactacaagggatgagagcagacacctttggttcatcttcggttctggccttaacggaaaagcattcactgtttcatagtaagtataatgttagttttaggcttttttttttaaaataa

SEQ ID NO: 415980 - DNA, 632 bp, Homo sapiens
tattgctccaggtagaacctctagcactttgttgactacaagggatgagagcagacacctttggttcatcttcggttctggccttaacggaaaagcattcactgtttcatagtaagtataatgttagttttaggcttttttttttaaaataaatccttccttatcaagttgagaaaattttttaaaagttgataaagttcctctgtgcctctaatcccagcagtttgggaagctgaggcaggcggatcatgaggtcaggggatcaagaccatcctggctaacacagtgaaaccctgtctctactaaaaacacacaaaaaaattaagccaggcatggtggcggttgcctgtagtcccagctactcaggaagctgaggcaggagaatggcttgaacctgggaggtggagcttgcagtgagctgagattgtgccactgcactccagcctgggcgacagagcgagactgcacctcaaaaaaaaaaaaaagttcctctgtagtctgttttttttttaggttttatagaaactagtagtggtgtcaaatgcttttttctgcattaattaatatgatcttktgattttattcaatagcctattaatatggtgattatattgattgagtttttaaatatt

SEQ ID NO: 415981 - DNA, 522 bp, Homo sapiens
ttatctggttttggtatcaggttaattctgtcctcataaaattaactgaaaagagttcattcctcttctattttctttaaaaggttgtgtaaaatyggtgataattctttaaatatttagaaaaattctccaatgaaactatctgggcctggaaatgtcttctgcggggaagttttatattacagtttcaattttcttgatagctacagggctatccaaattatctattttataatgcataggttgtgtagtttctggtttttgagatccacctcatttacatttttaaattcatatgtatagtactgtgtagtacatattacttttcgtattgaaggctgcaagatctgtggtgatctcctctgtttcattccgaatttggataatttgtgtcttccgttttcatccgtcttcctagaggtttgttaattttactaattattcaaagaaccaattttgtttcattgattttctctcttatttttctggttttaatttcattaatttctcttgttttctttt

SEQ ID NO: 415982 - DNA, 522 bp, Homo sapiens
ttatctggttttggtatcaggttaattctgtcctcataaaattaactgaaaagagttcattcctcttctattttctttaaaaggttgtgtaaaatcggtgataattctttaaatatttagaaaaattctccaatgaaactatctgggcctggaaatgtcttctgcggggaagttttatattacartttcaattttcttgatagctacagggctatccaaattatctattttataatgcataggttgtgtagtttctggtttttgagatccacctcatttacatttttaaattcatatgtatagtactgtgtagtacatattacttttcgtattgaaggctgcaagatctgtggtgatctcctctgtttcattccgaatttggataatttgtgtcttccgttttcatccgtcttcctagaggtttgttaattttactaattattcaaagaaccaattttgtttcattgattttctctcttatttttctggttttaatttcattaatttctcttgttttctttt

SEQ ID NO: 415983 - DNA, 556 bp, Homo sapiens
agttacagcctcgagcttcagacgaagatcaacactgcagttagtggatcatttattcaaagcagcaatccttagactccaaatgacttctgcctgattctctggtccagctaggggtatgggagcttgcagagccaacacagtcacacgtcatttgactgtccagtggaaagatgggtgaggccaagcayacacattgtttcattcttatctacagtttacaagattcaaagcaaaaaaaattagctcactcaaccatcttatatgaataatggaattaatataggggagtcttttatggttacttcttgctgacaatgcatcaggcactgagtgcaatgagacttcttgaaagcttaaaagaaaggaaaaactcagacacctcccctcaagtgcaggaccaactgcagagtggactctttctggatattgtagtcagacagggtgcatctatcttccagctgtgtcccagcaaagatcaacctcttctggtcaagagggatgccttccttgtcttggatctttgcctagagggatggtagagagcagttcttat

SEQ ID NO: 415984 - DNA, 556 bp, Homo sapiens
agttacagcctcgagcttcagacgaagatcaacactgcagttagtggatcatttattcaaagcagcaatccttagactccaaatgacttctgcctgattctctggtccagctaggggtatgggagcttgcagagccaacacagtcacacgtcatttgactgtccagtggaaagatgggtgaggccaagcacrcacattgtttcattcttatctacagtttacaagattcaaagcaaaaaaaattagctcactcaaccatcttatatgaataatggaattaatataggggagtcttttatggttacttcttgctgacaatgcatcaggcactgagtgcaatgagacttcttgaaagcttaaaagaaaggaaaaactcagacacctcccctcaagtgcaggaccaactgcagagtggactctttctggatattgtagtcagacagggtgcatctatcttccagctgtgtcccagcaaagatcaacctcttctggtcaagagggatgccttccttgtcttggatctttgcctagagggatggtagagagcagttcttat

SEQ ID NO: 415985 - DNA, 556 bp, Homo sapiens
agttacagcctcgagcttcagacgaagatcaacactgcagttagtggatcatttattcaaagcagcaatccttagactccaaatgacttctgcctgattctctggtccagctaggggtatgggagcttgcagagccaacacagtcacacgtcatttgactgtccagtggaaagatgggtgaggccaagcacacacattgtttcattcttatctacartttacaagattcaaagcaaaaaaaattagctcactcaaccatcttatatgaataatggaattaatataggggagtcttttatggttacttcttgctgacaatgcatcaggcactgagtgcaatgagacttcttgaaagcttaaaagaaaggaaaaactcagacacctcccctcaagtgcaggaccaactgcagagtggactctttctggatattgtagtcagacagggtgcatctatcttccagctgtgtcccagcaaagatcaacctcttctggtcaagagggatgccttccttgtcttggatctttgcctagagggatggtagagagcagttcttat

SEQ ID NO: 415986 - DNA, 557 bp, Homo sapiens
attctctgtgctacctcatttaatgctcccaatactgtgtcaatcccaagaagaaacctttgctgtgacaaagaccctgcttgaccaggcattaggctcctatgagcccacttctccactaggccttgtccttgggcttttgtccctgccaggtctggttttagcaagaatctttaataagctagtttagagagaatcctcccaaccttgcaatctggtcaggttccttatcctccaccatcccccacgtgatgtctcaccaccctggctgtcttctgcaagaatcctgctaggtcagtttagccagatccccactaccctgatgtttcctcttgtgattttccatccactgacccttgcaacctgctctttgggtataggttcctacttgtccttactgtattcagagttgagcccagttctatgctgaggtttcttttcccctattgcaatcatttctgaataaaatctgtttttgccgcttyagctaccatccagctctggtctttcttaacagctgttaggacagacattgtatcccctgagcaatcattatg

SEQ ID NO: 415987 - DNA, 495 bp, Homo sapiens
atcaaaatttaaaacttttgtgccacaaaggacattattaagaaaatgaaagtccacagaatgggagaaattatttgcaaatcatatatctgataattgtctagtatccaaaatatacaaagagctcttacaactcaacaatttaaacaacccagctaaaaaggattttttwaaaaattaacagaatacagcattgtttgtattttttatttttatctatttatttatttattttgagattggattacgagactggctaatttctgtattttttgtaggatggggtttctccacattgtccaggctggcctcaaactcctggcttgagtaatccacccacctcaaactcccgaagtgctgggattacaaccatgagccaccacatctggactaaaaaaggattttaattaacaattttccaaataatgtatgcaaatggccactaggcacatgaaaagatgctcattatcattagtgattaggaaaactcaaata

SEQ ID NO: 415988 - DNA, 563 bp, Homo sapiens
ctcaaactcctggcttgagtaatccacccacctcaaactcccgaagtgctgggattacaaccatgagccaccacatctggactaaaaaaggattttaattaacaattttccaaataatgtatgcaaatggccactaggcacatgaaaagatgctcattatcattagtgattaggaaaactcaaataaaaagcacaatgagataagatttcacacctactgggatggctataataaaaaagacaatgacaagtgttggtgggaatatggaaaattgaaacccctatatactgctggtgggaatgtgaaatagtgaacccactttcgaaaacactttggctgttgctgaaaatattaaatatacagttgccagaggacccagccattccactcctgggtatgtgctcacaagaatcaaaaacataagttcaggcagaaagttgtatacacatgttcataaaagcattaatcrcaatagccagaaagtggaagtaatccaaatgcccataaactgatggaaggataaataaaatgtgttatatccatatgatggaatattattcag

SEQ ID NO: 415989 - DNA, 629 bp, Homo sapiens
tcctgtacccttcccattcctgttctctggatttctgtttatataaattagagaactcaagcagttctttttgagtgtagcatacctcttcatgagtaacactctcaacctcacctctaggggcctaccaggactttagttataagtctagaagcaagcaggggtgttgggggtggcttctaaggagaatcaacattattttgcctggcaactgactcaggggaggccatcactgttacctcaggcaggggagagtttatctcctcagacaaaggtgaaaaggctgatggcagcatgggtcggggaggggatgtagccactactggggatggggaagctgtttcttctggtaaaaacrgttcatcagactcaatgtccccagcttcttcagggtcctcctcattccaagttgcagggtcccattattttccaatcaatgccctcacttaaacagtagatgcctggcgaggctgtgcatgcacctttcgttgcaggtcagccactcacatgataagagcttatgtctgtttttctacaatttcagctctttctctacaggagataagactctcactcagggcaatcttagcagatttgaggctcagtatctgcttctgaagccaggagat

SEQ ID NO: 415990 - DNA, 629 bp, Homo sapiens
tcctgtacccttcccattcctgttctctggatttctgtttatataaattagagaactcaagcagttctttttgagtgtagcatacctcttcatgagtaacactctcaacctcacctctaggggcctaccaggactttagttataagtctagaagcaagcaggggtgttgggggtggcttctaaggagaatcaacattattttgcctggcaactgactcaggggaggccatcactgttacctcaggcaggggagagtttatctcctcagacaaaggtgaaaaggctgatggcagcatgggtcggggaggggatgtagccactactggggatggggaagctgtttcttctggtaaaaacggttcatcagactcaatgtccccagcttcttcagggtcctcctcattccaagttgcagggtcccattattttccaatcaatgccctcacttaaacagtagatgcctggcraggctgtgcatgcacctttcgttgcaggtcagccactcacatgataagagcttatgtctgtttttctacaatttcagctctttctctacaggagataagactctcactcagggcaatcttagcagatttgaggctcagtatctgcttctgaagccaggagat

SEQ ID NO: 415991 - DNA, 504 bp, Homo sapiens
tctggttgccactagccacttgagcacttgaagtgtggctggtctgaattgaaatgtgcagtaactgtaaaatataaattcaaagacatagtgcaaaaaatgtataaaacatctcattaatgattttgagtatcgaatgcatgtagaaataatgccattttggatctaaagggttaaacaaaatatatcattaaattaatttgacctatctctttttgttttttaaatgtagttactaaaaaaatataaaattacatatgcaacttgaatttatatttcatattacatttctcttgtaccatgctggtctagactgtaagcccatgtgaagggaagagctggttaactctgctcacaatagaatcaccacacacataaggagcacccttaatatttgctcaataaatgactgtgasaacttgagtggagttgtgaaggtcccctgggagttaaccacgtgagggtgtgtgtttgttttacgtggggagagaacctgggccagca

SEQ ID NO: 415992 - DNA, 584 bp, Homo sapiens
gtatccttaaatccaaaaagacaacatgtctttcactatcattctgcttctctcaaatcaacttactttccttaaaaaaaaraaacttccacaaaacttcaatgaagtaatcaagtaactgctgccattcctaatgattaatattttaatttaaaagccagcattttattcaacctaatctctaaaaaggacctccctagtaggcaatcagggctgtcaaatataaatatgacactgttgatgtaaagtggaatttacatctgaatattctgctgttgagttgccagaagcatttgtcatgatatttttcaaatcctatcaccctaaagcagcagtgtcatctgtctttgcttgtagccatttccatgcagcaacattaagaacaaacttaattgacagtcactaggaacccaagggcagcacacatgatcaattatctaaatatgctggcggttatcaaagagaatggggttcatgaatctcatataacaaggtttttatgtaaaaaaaagttcgttctttggtggcatggagctatcgcctgaacctgatttatttttatttaaaatatatattaaatgaaa

SEQ ID NO: 415993 - DNA, 492 bp, Homo sapiens
aagtggaatttacatctgaatattctgctgttgagttgccagaagcatttgtcatgatatttttcaaatcctatcaccctaaagcagcagtgtcatctgtctttgcttgtagccatttccatgcagcaacattaagaacaaacttaattgacagtcactaggaacccaagggcagcacacatgatcaattatctaaatatgctggcggttatcaaagagaatggggttcatgaatctcatataacaaggtttttatgtwaaaaaaagttcgttctttggtggcatggagctatcgcctgaacctgatttatttttatttaaaatatatattaaatgaaagttcaataagcttttcccagtttgaagtcttgagaactttatgggtgcaaactaatcctaaagaggattaccaatattaagagtgataggtagttcttatctgtcagctcttttatatattactcttttgatagaagattcttgaaggcccag

SEQ ID NO: 415994 - DNA, 596 bp, Homo sapiens
atatgtgaaggaatttttaacatacttgtaggtttaaaggaggcagctggtggggatgaagaatttgaaagaacagaaaatatgaaatataattgatgggactaatgtgtacaagagaaagrggacagaatgcagaggacagatggacagcttagcttgggtgaacagacttttctctagatggatgaatggatggatggacggatggcatattgactgaagaggcagttatatgtggcaaagaacagggagagataggataactttataacccatgatcttgatttttctttgattaaatgagacaaactctgtgaattgaaaagatattataagtgtttgctttctctctctctctcgtcttttggattttatgatgttggggtgggcatcacctgctttagtccaacttatgaatctatcagctgcaattcatattagtctcaggtgagcaataatcttctgttgctcattatggaaaagcaattaagcagtactaatggactgtacaggcatttacctttaattttgatatctgaaggttttaaaaaaatgcttatgcaggaaaatatttttttcttttcttgttaggatgg

SEQ ID NO: 415995 - DNA, 583 bp, Homo sapiens
acagtcttccctaaaaggtaaatttgagattggatctaaagtggtatgtttttagtttttatattctaccaagggagaacccatgctgtattaaattattatagaattgacattcaacacttttaggtcttctaaaagcttccgtcacaagagaaacttgacaagacagcatgacttggattctctgagctatgtagtcattgggttagagaggagactggagattatccatataatcagtccatatttacgactaatctttccccctcatatttggttwtatgtgaaatggctgaaaacttttgctctttttttacgagttgtttcttgaattctgagtcagcattctctcagaaaaatgttatagttaaattagatagttgcctatcatttactgtcttctctattgcatgcgtattcttattcttgtttacattagcaataaatagctcctggagagtataatgatacttttatttccatcaagcactgtgatcacagcttcagtcatatcataacacattgctgtaccgagctaagttaatgactcctcaatacagtgtaataaactcataaatgaacg

SEQ ID NO: 415996 - DNA, 583 bp, Homo sapiens
acagtcttccctaaaaggtaaatttgagattggatctaaagtggtatgtttttagtttttatattctaccaagggagaacccatgctgtattaaattattatagaattgacattcaacacttttaggtcttctaaaagcttccgtcacaagagaaacttgacaagacagcatgacttggattctctgagctatgtagtcattgggttagagaggagactggagattatccatataatcagtccatatttacgactaatctttccccctcatatttggttatatgtgaaatggctgaaaacttttgctctttttttacgagttgtttcttgaattctgagtcagcattctctcagaaaaatgttatagttaaattagatagttgcctatcatttactgtcttctctattgcatgcgtattcttattcttgtttacattagcaataaatagctcctggagagtataatgatacttttatttccatcaagcactgtgatcacagcttcagtcatatcrtaacacattgctgtaccgagctaagttaatgactcctcaatacagtgtaataaactcataaatgaacg

SEQ ID NO: 415997 - DNA, 571 bp, Homo sapiens
tttgcttctggttgatttctcttcatttccccaagtgctcacagaccatctgcataacaaacttgaatcgaatttcgaccctcatacctttaaggatgtctcctgcacttcttatctctcctcaggctttattgctgtttattgagccctccacctggatcttcctgcccatttgaaacacaatatatgtcaaatggaactcrtctgtgctactttttttaactaatgacataattacccatccgtccccccaatcaaattcttattctctttgtcttctacttccagtgagctttccgatacccattttatctgtccctttactctcataccacagaaatgtctcaatgcaagcctgggtgcagtggctcacgcctataatcctagcattctgggaggctgaggtttgcggattacctgaggtcaggagtttgagaccagcctggccaacatggtgaaacccgtctctactaaaaatacaaaaatcagccgggcatggtggcaggtgcctgtaatcccacctactcaggaggctgaggcaggagaatcgcttgaacctgggaggccgaga

SEQ ID NO: 415998 - DNA, 379 bp, Homo sapiens
cccctctgttccccaagaagggaagcatccatcaccaacacatggcctcccacttgcgagggtctctatwgcctcccttgcattattgctaccacaagtaccccagaaagactagcttgaccttttattaacaacaacaacaacaaaacaaaactgatttcagtgcaagagttccaggggctttgaaattctttctttctctttgtgtgaggttcttccctacatcaaactcatgacactggtttggtttgccctgtactcagaacacatcttattttctggtgtctatggatttttttcctgttccctctaggaaagcttcatcctctctaataatccagaaggaggagaggccttccttaagcactttcacttattt

SEQ ID NO: 415999 - DNA, 601 bp, Homo sapiens
tgttaatatcacatctgaaactaggaaacttatagtacacaattcagactttttagctgttggaaaggtgatatcagtatctataaacagcatatttaaactatgtctatgccatatgtaacataatacccccagcagagactggggcagcttctagaatcaagcacattaatatttctgcagccagaagtatgaattggcatactctgtgggataaatagactacaattttatagcagctcaggtcaggtcagattttgctaccagagggttacagaaaacttcatatttttggaactctttcgattttagaattgctagtaaggtactgtggacctgtattatatcttcaggaaggaaagagttcttgtctacaggaaatattcctaggtgcaagggccattactcttgtgagttcagggaggatgaagaaaatgatgctgggtctttctgcagagtagcrtgcttccagaactatcactactgctagggtctcacaggatggtgataccagagggggcaatctcagtagctcatttcccacaaagaaagctcacccattgtgccacccctgactctgtgccttttagcttatctgctg

SEQ ID NO: 416000 - DNA, 581 bp, Homo sapiens
ttcacctaaacaagcaaagctttgctcttatcaggttgtctttgagtgcatatcagtcagtgcttacgtggaatggaagcattctgtgtgcatgcctttgttttattaggagttgtgtttatccgttctgtatgctgtgtagataagcatcgtgggaatgtgtaagtagataataggctaatactgttctctgtacgaacctagtctcctgtatccaaaaatgttggtgaaaaaattcaaatatggatatgttaatacatgtttaaaaataaagtagggagcatcatttatatgctttaatctttttaaaaaatatctttttgataatttttaacagtgcaattgctcatttttccatgtgayatttggttttacctgcctttatttctaattctgtttgatttacttaaaccatgcatctgtttcgctggcatccacaagaaatctcaatgttatgctatttattaaaggaatcattttgttcttctcactttttcttagtctcttagattgcttttaaagttgtgcctttattatggttgttattgttcatgtgtaatattgacatgagcaaaaaatgg

SEQ ID NO: 416001 - DNA, 619 bp, Homo sapiens
actatatatcctagagccaccttggtttacacctgctgtcccagtttaattattaataacccccttcactcttaagtgtcctaatttgggtaatagattgcatggtcacactatgcttagggaatttcttaaagtttcatttgtgattatcttattttgatgaggaaccaaatttattttaaaactgtaagttttatttaaaacttattttaaagctgtaagtactatgataagaaagtaaattactttgtattggtcattgctgacctaaccacacaaacgttttggttcctatattattaaactttgttcctttaagcaagaaacatttattaacccaatartaatgttttcaaaatctcattacggagacttagaaataactaaaccagtgagaagaaaattggttttctgatgcgacaaccttgcagtaagaggcccaggaggagtgggttctgcctttgatgaaatacggttgcatttggggggagaaaaactatgggagaactgagcctgtttttttttgagcctgacaaaggatgtagccactactgtgctcattttgttcatttgaattaagttggggcctgcaccattggtttcccctttaaacaaggac

SEQ ID NO: 416002 - DNA, 549 bp, Homo sapiens
ctctctctctctattattctcaatattaaaaaaaagaaaccctgaattttgcattcccataccatgttttgaagcaatattgatgttatctgatagaattctcatcattcatcattgtgaagatgaattatttttttcaggaagcaagagtagtagccttaataaatgtttaaaataaaagaattctaagattgrttttggtaaaatgagtgttgatttaaaaaaaattgaatcactatgcccaaaactgagtccaaagctaagcaagcgagcagatatattggcaagagttcagccaagttagaagactggcaaatcacccttatgaaacaaagttaaacatcttgaagagcaaataaaggcttgaggtacatctgagtagcagctatcaaattttaaaaagggttattgtagaagagatggagaccagctgttttccaactctgctgagctcagataagaacaaaactggataaaaactgcaatatgacagatcacttaggtctagggaagtatttcctggaagttaacatagatggaatggttttt

SEQ ID NO: 416003 - DNA, 623 bp, Homo sapiens
ttgctgttaaggtagaacaagaaggaacacatattatacacataatgatgggaattacattgtgatttgtactatctacaaaggagtaactgccagttaggaagaacagtaaacagtgatgttaaaataaaacaatgatttgctaaggtcctgttttgagtatttaattctcattgagtacatccattaatgaggaatttcttatctcttctgaaaataaggaatcaaagtaatggagaacccattctgtcgacacttgcatacagtcaagcctttcttattggccctttgtaatccaacatttctgagtgatctcatgcctattcacaatgatgggtaaacccctttatccgcatttagtcatactatgtgtttaaaagttctgagtgaaatagaagaaaaaacrgtccagatcagccacgtttgattttcttcccctaattatttctcagtattcacgtctgtaatactgaaatcaccaattgcaaagttacagtagaatcatagagtctgtaatttgtatggataatggaataaattccctgcatctaagtccatgtttatgaaagcttctttttctcccattggttagaggtttgtgtaaattattattagcataatca

SEQ ID NO: 416004 - DNA, 623 bp, Homo sapiens
ttgctgttaaggtagaacaagaaggaacacatattatacacataatgatgggaattacattgtgatttgtactatctacaaaggagtaactgccagttaggaagaacagtaaacagtgatgttaaaataaaacaatgatttgctaaggtcctgttttgagtatttaattctcattgagtacatccattaatgaggaatttcttatctcttctgaaaataaggaatcaaagtaatggagaacccattctgtcgacacttgcatacagtcaagcctttcttattggccctttgtaatccaacatttctgagtgatctcatgcctattcacaatgatgggtaaacccctttatccgcatttagtcatactatgtgtttaaaagttctgagtgaaatagaagaaaaaacagtccagatcagccacgtttgattttcttcccctaattatttctcagtattcacrtctgtaatactgaaatcaccaattgcaaagttacagtagaatcatagagtctgtaatttgtatggataatggaataaattccctgcatctaagtccatgtttatgaaagcttctttttctcccattggttagaggtttgtgtaaattattattagcataatca

SEQ ID NO: 416005 - DNA, 623 bp, Homo sapiens
ttgctgttaaggtagaacaagaaggaacacatattatacacataatgatgggaattacattgtgatttgtactatctacaaaggagtaactgccagttaggaagaacagtaaacagtgatgttaaaataaaacaatgatttgctaaggtcctgttttgagtatttaattctcattgagtacatccattaatgaggaatttcttatctcttctgaaaataaggaatcaaagtaatggagaacccattctgtcgacacttgcatacagtcaagcctttcttattggccctttgtaatccaacatttctgagtgatctcatgcctattcacaatgatgggtaaacccctttatccgcatttagtcatactatgtgtttaaaagttctgagtgaaatagaagaaaaaacagtccagatcagccacgtttgattttcttcccctaattatttctcagtattcacgtctgtaatactgaaatcaccaattgcaaagttacagtagaatcatagagtctgtaatttgtatggataatggaataaattccctgcatctaagtccrtgtttatgaaagcttctttttctcccattggttagaggtttgtgtaaattattattagcataatca

SEQ ID NO: 416006 - DNA, 623 bp, Homo sapiens
ttcaatacccatgttgagcaaaaagtcagcattatcttctaaattacgttaagaatgagtcattcatcaacaaactattctgaagagctaagaagattatttaaagtttttcttttcactactttcaacaatctgtctgtctgtctatcccttgtgtctatccctacttcaactccttaccaaaacctttaggatctctgttttactaactacaccccatttaactatttacattacttcactgaattctgtattctcccaagaaaaccattcctctttctttagaccatgtatcagaatgcaccaaatcaaagtgagttttattttatgtcttggatgaccacattgctagcagtttgcaactcaagaaagacagaaatgttgttcaaaaactttcactttttaaagaaaaatatggtgtagcggtccatggtattagtaacagaattgtagtagaaacttgactttcttaacacaaaagccagccagccctctttgctttcagtacaattctttgaagamcagcttgaacttctgaggtcgtggggctgagtatgtggacagcagcttgctggtttttatctttaaaatcaacattatctcaaattatgaaaggtttaaga

SEQ ID NO: 416007 - DNA, 519 bp, Homo sapiens
ttttaacattgattaatcagtagactttcttgatcttttttttcttttttttgaaaatgatggtgaatgaatagaatagacgttaatttaatttaaaaatgtgacagtttattcctgaataattacaattcccttctttgcacttttcagaatttctctgcatccaaatttctattttttcagaaatagaatgtgattgctaggctcatgctatgtgtccataattgagtgatccactcaaatgtgatgaagggatagatcacatgatctcgtggactatctctttgggggctctgctaaggcattattactaaaaactgggtccaggtggagaaaattattaaaatgtcttatacygagggtttaaaggagtttagagagtttcagaaaagatttcatggaaataacatgtgaaatgaatgttagagaataaatatcattttataattcacataaataaaactatacagacagacagagttctgaaacttatattggctaataatctatatgtgaaag

SEQ ID NO: 416008 - DNA, 558 bp, Homo sapiens
aatttcaactgtgccatatacaactaagtaaattgcagaggaataaaaagtcttgcctaatcttggtcttagggaagtcttcctaaagaagttgcagaaaaaaatcttatttatggcaaatgaaaaccagggatatgacaccaaggaaaagaattttaaaatatatgtttgrcatggtaaggaagctaagtgtattagtccagtctcacttggctatgaaaaaattcctgagactgggtaacttataaagaaaagaggctgaattggctcacagttctgcaggctgtacaggaagcatggtggcatcagcttctggggagccctcaagaaactcacaatcatagaggaagacaaaggggaagcaggccatgttttacatggcaggagcaggaggaagagaggggaggtgccacacacttttaaacaaccagatctctagagaacgccctattcagtaacaaggcggatggtgctaaaccatctgtaagaactccacccccatgatccattcacattccaccaggccccactcccaacacgggggattacaatttggca

SEQ ID NO: 416009 - DNA, 558 bp, Homo sapiens
aatttcaactgtgccatatacaactaagtaaattgcagaggaataaaaagtcttgcctaatcttggtcttagggaagtcttcctaaagaagttgcagaaaaaaatcttatttatggcaaatgaaaaccagggatatgacaccaaggaaaagaattttaaaatatatgtttggcatggtaaggaagctaagtgtattagtccagtctcacytggctatgaaaaaattcctgagactgggtaacttataaagaaaagaggctgaattggctcacagttctgcaggctgtacaggaagcatggtggcatcagcttctggggagccctcaagaaactcacaatcatagaggaagacaaaggggaagcaggccatgttttacatggcaggagcaggaggaagagaggggaggtgccacacacttttaaacaaccagatctctagagaacgccctattcagtaacaaggcggatggtgctaaaccatctgtaagaactccacccccatgatccattcacattccaccaggccccactcccaacacgggggattacaatttggca

SEQ ID NO: 416010 - DNA, 570 bp, Homo sapiens
gtgggagaaaatcttcacagtctctctctctctatataaacactaatatccagagtctagaaagacctcaaacaaatcagcaagaagaaaacaaacaatcccctgaaaacatgggccaaggacattgatagacaattttcaaaagaagatatacaaatggccaacaagaatatggaaaaatgctcaatatcactaattaccagggaaacaaaaatcaaaaccacagtgcgataccacgtcactcctgcaagaatggccatcatcaaaaaaatataaaaaaaaagatgttgatgtggatgtgatgataaaggaacacttttacattattagtaggaatgcaaactagtacagccactatggaaaacagtgtggagggtccttaaagtgctaaaagtagatctaccatgtgctccagctatcccactactagttactacccacagaaaagaagttactrtatgaaaaatacacttgcacgtacacatttatagcagcacaatttgcaattgcaaaatatggaaccagcccaaatgcccatcaaacaagtggataaagaaactgtggtatata

SEQ ID NO: 416011 - DNA, 540 bp, Homo sapiens
tctatacttcaaacttgtgtgactcagaaaaagacatcacctctgggtggatgcagtagaaaccacacaacatctgggtagactggccttctatgtgcaatgcttggcaatgggacactagctttttttttttttttttaatacagtgaaggttttaatttcttaatagttttagttatatatgtcaggaaatggaaggccactattatatttatttcattttttaaacatcatagtatctatcatttagatgaataaatacattaccaaaagtgaaaacttttattattctgagaaaataaggtctgtgcatttgcygcttaatttttaatagccaattgttacttagaattaatttaaaagttcatgtagtcatatatatgaataaatattagtggtattccttagcttttagcaaggaaaaattcccttcctcccagtcattgcggccacagcagaggattggtgagtggcttggtgagtagggtagggaccagattccagcccactcagatctcttcatttcctttgtacagggcc

SEQ ID NO: 416012 - DNA, 540 bp, Homo sapiens
tctatacttcaaacttgtgtgactcagaaaaagacatcacctctgggtggatgcagtagaaaccacacaacatctgggtagactggccttctatgtgcaatgcttggcaatgggacactagctttttttttttttttttaatacagtgaaggttttaatttcttaatagttttagttatatatgtcaggaaatggaaggccactattatatttatttcattttttaaacatcatagtatctatcatttagatgaataaatacattaccaaaagtgaaaacttttattattctgagaaaataaggtctgtgcatttgctgcttaatttttaatagccaattgttacttaraattaatttaaaagttcatgtagtcatatatatgaataaatattagtggtattccttagcttttagcaaggaaaaattcccttcctcccagtcattgcggccacagcagaggattggtgagtggcttggtgagtagggtagggaccagattccagcccactcagatctcttcatttcctttgtacagggcc

SEQ ID NO: 416013 - DNA, 565 bp, Homo sapiens
caaacattgctgttttgcttctttgtctaatttactcacaagaatttggactcatatttgtctcttgagttgggtaaatggagtcatcgctctgaaactatttttttttttgtaggaatgaagactttagctttctttttttgaacatatcattaacattaattttgaaatttccatctttaaagttatctcaagaagcwtatgagatattctgcaaaagtgatctcttttacataagattttgttgggcaaactacgcattcccccactccactccccattagttgagttgcactaaaactcctatacccattctagagatagcttaatctggttgcacattataatacagtttgaagaaatgtagatatccctcattgattaatttccaatgtgctaccatttttagagaaaaggttggaaaaggaattctaaaaaatgcatttacatgacaaaatcatattattgtcaataatttgggcaaaaataacttctttattcatctctcaaagaaatgataatcaatcaatggtttacttgtttaaaatcagaaactttggtaaat

SEQ ID NO: 416014 - DNA, 565 bp, Homo sapiens
caaacattgctgttttgcttctttgtctaatttactcacaagaatttggactcatatttgtctcttgagttgggtaaatggagtcatcgctctgaaactatttttttttttgtaggaatgaagactttagctttctttttttgaacatatcattaacattaattttgaaatttccatctttaaagttatctcaagaagcttatgagatattctgcaaaagtgatctcttttacataagattttgttgggcaaactacgcattmccccactccactccccattagttgagttgcactaaaactcctatacccattctagagatagcttaatctggttgcacattataatacagtttgaagaaatgtagatatccctcattgattaatttccaatgtgctaccatttttagagaaaaggttggaaaaggaattctaaaaaatgcatttacatgacaaaatcatattattgtcaataatttgggcaaaaataacttctttattcatctctcaaagaaatgataatcaatcaatggtttacttgtttaaaatcagaaactttggtaaat

SEQ ID NO: 416015 - DNA, 565 bp, Homo sapiens
caaacattgctgttttgcttctttgtctaatttactcacaagaatttggactcatatttgtctcttgagttgggtaaatggagtcatcgctctgaaactatttttttttttgtaggaatgaagactttagctttctttttttgaacatatcattaacattaattttgaaatttccatctttaaagttatctcaagaagcttatgagatattctgcaaaagtgatctcttttacataagattttgttgggcaaactacgcattcccccactccactccccattagttgagttgcactaaaactcctatacccattctagagatagcttaatctggtygcacattataatacagtttgaagaaatgtagatatccctcattgattaatttccaatgtgctaccatttttagagaaaaggttggaaaaggaattctaaaaaatgcatttacatgacaaaatcatattattgtcaataatttgggcaaaaataacttctttattcatctctcaaagaaatgataatcaatcaatggtttacttgtttaaaatcagaaactttggtaaat

SEQ ID NO: 416016 - DNA, 413 bp, Homo sapiens
ctacattccatcttaatccctccgcttcactcacartgtaattcctatcgtgacttctacaactatagtcaagttttcactgtgtttgaactttatattaatataaatgagatccgatatcgtatactctgttgtgtctgaaatatcttgctcaactttatgtttgtaagattcatccacattttgtgtatagttatcatttgctcagtttcctttctataagtacactatgtagtcatagggatatataattttgttttaaattttgctattatgaacaatgctatagtgtacattcttgtctatcttttttggtgcacttatgcagtcttctatacccagaattagaatcgttgagtgaaaagccatgtattttgagctttagtgcttactgccaaacagaggaccaacat

SEQ ID NO: 416017 - DNA, 549 bp, Homo sapiens
gcgttgccaccacgcccggctaatttttgtatttttagtagagacggggtttcaccacattggccaggctggtctcaaactcctgaccttgtgatccgcccacctcagccttccaaagtgctggggttacaggggtgagccaccgcaccctgctgaaaattgacatttttaagtcttttactatttccaaaatcagcaattaatcawacctttattatcaccatgacaaataaatatttggtcatctgcagaagaaaaatttactccaaataaattgctgagaaaaagaattttcattttaggacaggcaataatattttccatattatgattgagaaagaagatgtaagaaaaccagcttcacaaagcagctgaaactatcttgagtgttgcatttaatgtgtgttctatggtgggaaaggtgcacatgtacaaataaacatcatctttcatggatctttgattctgactggcagatgaggaatatagtattttaataacatttattttggcagaagtagaaggaagtaatctagttttgtaaccagt

SEQ ID NO: 416018 - DNA, 572 bp, Homo sapiens
gtgtccactgcagaattgattgattgtttagtggatggggaaaaaaatcccacacatttggtcgtagaaatcactgtgttaatagttgtggasaagttttattcatgtcctttgcccgctttttaatggggttgataatttctctcctgtaaatttctttaagttctttataggcactggatattagacctttgttagatgcatagtttgcaaaatgtttctctgtagattgtttagtctgttgagtaattctctgtagattctgtagattgtttactctgttgatggtttcttttgcagtgcagaagctcttaagtttaattagataccacttgtcaatttttgcttttgttgtgattgcttttggtgtttttgttattaaatctttgcccattcctgtgtctagagtggtattgcctagattgtcttccagggtttttgtagttttctcctttacatttgtctttaatccatcttgagttggtttttgtgtgtgctataaggaaggggtccaacttcaatcttctgcatatggctaaccagtttatcccagcaccatttattgaacaggg

SEQ ID NO: 416019 - DNA, 450 bp, Homo sapiens
gtttcctcactattctgaagtagcgggctccatagaatggtaaaatggctttttgaaggtgcaaatacgataccagctaggtgacaataccatgcagggctgggacagcgttctccagaaggctgtatatgctctgaatcagcgtccaatagatggtactatttctcctattgccaggattcacaagtccagaaacaaagagtagtatcactcaccgttacccatagtaaccctctagcaaacattttgctttttgttttgtgactttgtgctcttctagcctagatattttagtcccagarggaggaatgatcctaccaggaaacacgacaatgatcccattaaatggaatttgagacttccacctggcaaccttggcctcctcatgcctttgaatcaaaaggtcaggaaagcagttaccatgttggttgggatgatctgggctaccaa

SEQ ID NO: 416020 - DNA, 450 bp, Homo sapiens
gtttcctcactattctgaagtagcgggctccatagaatggtaaaatggctttttgaaggtgcaaatacgataccagctaggtgacaataccatgcagggctgggacagcgttctccagaaggctgtatatgctctgaatcagcgtccaatagatggtactatttctcctattgccaggattcacaagtccagaaacaaagagtagtatcactcaccgttacccatagtaaccctctagcaaacattttgctttttgttttgtgactttgtgctcttctagcctagatattttagtcccagaaggaggaatgatcctaccaggaaacacgacaatgatcccattaaatggaatttgagacttccacctggcaacsttggcctcctcatgcctttgaatcaaaaggtcaggaaagcagttaccatgttggttgggatgatctgggctaccaa

SEQ ID NO: 416021 - DNA, 460 bp, Homo sapiens
ctgtgtttactccttgctcctcactgttcatcataatctgctttctggaaaagagttcttctatttattttttaaagtatatttagttcaatgcattatatataatgggggcccttgcactgaaaacaatgattgcctctagtgatactatgagtggctttgttccaggccacagaagttgtggtaaaagtgaaatcagtgtttgaaaaggtgaaccaaatgtgaggcttctgaataccctaataaatacatcatttctggagcagtgtttggcttgattccaagtagttcagtgacaggtttgcctgaaaagcatgagatgayatcttccttttgttccccagtaccttttctattcaaagtgacaataccaaaattctagtgagaacacttttttaggaagaatatatgctattgttaagatcatagattctaaaatcagctgacctaaatttctgct

SEQ ID NO: 416022 - DNA, 628 bp, Homo sapiens
tcaatcctacaagaaaaaggtacttggttaagtgacataactaattagtggctgatgttgtatgactaggaaaacagatgtcataaatccaggtcattatcayctctggcctaatattcttttgattaagtttttaatttatgtttcttgggtcttgagaaaaagaacatgttgattgttattaattattttcctgttgtggggacactagaaaccaattaggaacacaaagagccaggactaatacatcttagaataataataacaaggagggtcagtttcacactttgcttaagtcctctcctatttatggtcttctcctttttctttacctccctttttacttcttagcgctctttgttccctttataatgctttctttcttctccaaacacatatcccatgccacgacataattgttcttgctttttaaattttttaattgacaaataataattgcatatatttatggggtagaatgtgatgtttccatacatgcatacagtgtgaaatgatcaaatcaggctaattagcacatctatcacctcaaataccaatcatttctttgtgatgcgaatatttaaaatcaattcatttagctattttgagatatacattattattatta

SEQ ID NO: 416023 - DNA, 628 bp, Homo sapiens
tcaatcctacaagaaaaaggtacttggttaagtgacataactaattagtggctgatgttgtatgactaggaaaacagatgtcataaatccaggtcattatcacctctggcctaatattcttttgattaagtttttaatttatgtttcttgggtcttgagaaaaagaacatgttgattgttattaattattttcctgttgtggggacactagaaaccaattaggaacacaaagagccagsactaatacatcttagaataataataacaaggagggtcagtttcacactttgcttaagtcctctcctatttatggtcttctcctttttctttacctccctttttacttcttagcgctctttgttccctttataatgctttctttcttctccaaacacatatcccatgccacgacataattgttcttgctttttaaattttttaattgacaaataataattgcatatatttatggggtagaatgtgatgtttccatacatgcatacagtgtgaaatgatcaaatcaggctaattagcacatctatcacctcaaataccaatcatttctttgtgatgcgaatatttaaaatcaattcatttagctattttgagatatacattattattatta

SEQ ID NO: 416024 - DNA, 628 bp, Homo sapiens
tcaatcctacaagaaaaaggtacttggttaagtgacataactaattagtggctgatgttgtatgactaggaaaacagatgtcataaatccaggtcattatcacctctggcctaatattcttttgattaagtttttaatttatgtttcttgggtcttgagaaaaagaacatgttgattgttattaattattttcctgttgtggggacactagaaaccaattaggaacacaaagagccaggactaatacatcttagaataataataacaaggagggtcagtttcacactttscttaagtcctctcctatttatggtcttctcctttttctttacctccctttttacttcttagcgctctttgttccctttataatgctttctttcttctccaaacacatatcccatgccacgacataattgttcttgctttttaaattttttaattgacaaataataattgcatatatttatggggtagaatgtgatgtttccatacatgcatacagtgtgaaatgatcaaatcaggctaattagcacatctatcacctcaaataccaatcatttctttgtgatgcgaatatttaaaatcaattcatttagctattttgagatatacattattattatta

SEQ ID NO: 416025 - DNA, 587 bp, Homo sapiens
tttgggtatataccccaaaaactaagtctgctgaagaactatgtgagagaggaagttgagaaaagtgagtgttactccactgtatgttatctttattgtttaggttgagtaatttctattgttgtctcttcaaattcaccaattccttcttttgttctcttcattctgctgtttagctcttccattgagtttttaattttggttattgtgtttttcaattctaaaagttctagttggttcttctttatatctcacttttttttttctgagacttcctattctttttttaataatatttgattggtcattgaagaatttttatgatggctgctctaaaatctttgtcagatatttcsaaaatctatgccatcttactggtgctgtattttattgttgtttcttactgaagttgtgatttttctaatttttggtgtaatgaatattttttattgtatctgggggatattttgggcattttgttatgagattctggatcctctgtttaagcaggatgtttctgacatcactccggttaaagaagaatgccattgcttcattaatgctcaacgggagtaaaaatccagttt

SEQ ID NO: 416026 - DNA, 587 bp, Homo sapiens
tttgggtatataccccaaaaactaagtctgctgaagaactatgtgagagaggaagttgagaaaagtgagtgttactccactgtatgttatctttattgtttaggttgagtaatttctattgttgtctcttcaaattcaccaattccttcttttgttctcttcattctgctgtttagctcttccattgagtttttaattttggttattgtgtttttcaattctaaaagttctagttggttcttctttatatctcacttttttttttctgagacttcctattctttttttaataatatttgattggtcattgaagaatttttatgatggctgctctaaaatctttgtcagatatttccaaaatctatgccatcttactggtgctgtattttattgttgtttcttacwgaagttgtgatttttctaatttttggtgtaatgaatattttttattgtatctgggggatattttgggcattttgttatgagattctggatcctctgtttaagcaggatgtttctgacatcactccggttaaagaagaatgccattgcttcattaatgctcaacgggagtaaaaatccagttt

SEQ ID NO: 416027 - DNA, 619 bp, Homo sapiens
tgtactagaaactgacaatcaaaaaagaaaattttgggggtrttgaatgcagtactcagaaatatcttatctgaagagtagggaaaaaccaaacttaaaccaaaaggtattctggttcttcctttaaaaaaaagattgggaaagaacaaaatatttctgagtaacaaccccattgcataaaaaagttcaagtatatttatagaaatacaaaattagcaagcactccacaagataaaattcaacatgacataaatgggtgacagatataaaaaatgatatgggtgacagatataaacaagtttcaaaaaaatttataaagatgaaacaacaacaatgtctttgatcaaatatacattggatagaattaaaggcagattagactttgcagaagaaaaaatatgatctggaaaaatacagcaatagaaataatccagaataaagcacaaaaaagaattaaaaatgcaaaacatttaaaccattatgttaatgggaataaatgataccaaatgtatacaaaattttccagaaaatttaggaagagattagtttatacttagtatataagtctgaccatattctgataccaagattaaagatgtgaacagaaaacttcagacct

SEQ ID NO: 416028 - DNA, 619 bp, Homo sapiens
tgtactagaaactgacaatcaaaaaagaaaattttgggggtgttgaatgcagtactcagaaatatcttatctgaagagtagggaaaaaccaaacttaaaccaaaaggtattctggttcttcctttaaaaaaaagattgggaaagaacaaaatatttctgagtaacaaccccattgcataaaaaagwtcaagtatatttatagaaatacaaaattagcaagcactccacaagataaaattcaacatgacataaatgggtgacagatataaaaaatgatatgggtgacagatataaacaagtttcaaaaaaatttataaagatgaaacaacaacaatgtctttgatcaaatatacattggatagaattaaaggcagattagactttgcagaagaaaaaatatgatctggaaaaatacagcaatagaaataatccagaataaagcacaaaaaagaattaaaaatgcaaaacatttaaaccattatgttaatgggaataaatgataccaaatgtatacaaaattttccagaaaatttaggaagagattagtttatacttagtatataagtctgaccatattctgataccaagattaaagatgtgaacagaaaacttcagacct

SEQ ID NO: 416029 - DNA, 619 bp, Homo sapiens
tgtactagaaactgacaatcaaaaaagaaaattttgggggtgttgaatgcagtactcagaaatatcttatctgaagagtagggaaaaaccaaacttaaaccaaaaggtattctggttcttcctttaaaaaaaagattgggaaagaacaaaatatttctgagtaacaaccccattgcataaaaaagttcaagtatatttatagaaatacaaaattagcaagcactccacaagataaaattcaacatgacataaatgggtgacagatataaaaaatgatatgggtgacagatataaacaagtttcaaaaaaatttataaagatgaaacaacaacaatgtctttgatcaaatatacattggatagaattaaaggcagattagactttgcagaagaaaaaatatgatctggaaaaatacagcaatagaaataatccagaataaagcmcaaaaaagaattaaaaatgcaaaacatttaaaccattatgttaatgggaataaatgataccaaatgtatacaaaattttccagaaaatttaggaagagattagtttatacttagtatataagtctgaccatattctgataccaagattaaagatgtgaacagaaaacttcagacct

SEQ ID NO: 416030 - DNA, 619 bp, Homo sapiens
tgtactagaaactgacaatcaaaaaagaaaattttgggggtgttgaatgcagtactcagaaatatcttatctgaagagtagggaaaaaccaaacttaaaccaaaaggtattctggttcttcctttaaaaaaaagattgggaaagaacaaaatatttctgagtaacaaccccattgcataaaaaagttcaagtatatttatagaaatacaaaattagcaagcactccacaagataaaattcaacatgacataaatgggtgacagatataaaaaatgatatgggtgacagatataaacaagtttcaaaaaaatttataaagatgaaacaacaacaatgtctttgatcaaatatacattggatagaattaaaggcagattagactttgcagaagaaaaaatatgatctggaaaaatacagcaatagaaataatccagaataaagcacaaaaaagaattaaaaatgcaaaacatttaaaccattatgttaatgggaataaatgataccaaatgtatacaaaattttccagaaaatttaggaagagattagtttatasttagtatataagtctgaccatattctgataccaagattaaagatgtgaacagaaaacttcagacct

SEQ ID NO: 416031 - DNA, 595 bp, Homo sapiens
taggaactgaaattaaaattgggaaacaataccatgaaaacctaaaacacctcaggaaaatatgagtaaaggttcaagctgtacackgaaactgaaaatattgctgagaatataaagaaaaataaatgaagagaaatactgtgtttgtatgtagaaagactcaatattgtttatgtcatttctccccaaattgatacatgaattcaactgatttttattcaagtctcaggagggttttttttttgtggatattgacgaactcattgtaaaatcaatagggaaataaaatggacctaaaatagccaaaaacaatcctgaaaaacaaagtaggtttggaaaacttgaaatatttaatttgaagacatatcaaagttacaatattcaaaacattgtagtgtcagcatggagatagctaagttgatcaatatctcagaatacagtgttgagaaataaacacacatgtatatggtctattgattttcaacaaatattcaaagctaatttggtggaaaaaagaataatttttctcagtaaaatgtattgtgaaatagttatatttttgtaagtctaaaaagaaagtttggttcatacccta

SEQ ID NO: 416032 - DNA, 595 bp, Homo sapiens
taggaactgaaattaaaattgggaaacaataccatgaaaacctaaaacacctcaggaaaatatgagtaaaggttcaagctgtacacggaaactgaaaatattgctgagaatataaagaaaaataaatgaagagaaatactgtgtttgtatgtagaaagactcaatattgtttatgtcatttctccccaaattgayacatgaattcaactgatttttattcaagtctcaggagggttttttttttgtggatattgacgaactcattgtaaaatcaatagggaaataaaatggacctaaaatagccaaaaacaatcctgaaaaacaaagtaggtttggaaaacttgaaatatttaatttgaagacatatcaaagttacaatattcaaaacattgtagtgtcagcatggagatagctaagttgatcaatatctcagaatacagtgttgagaaataaacacacatgtatatggtctattgattttcaacaaatattcaaagctaatttggtggaaaaaagaataatttttctcagtaaaatgtattgtgaaatagttatatttttgtaagtctaaaaagaaagtttggttcatacccta

SEQ ID NO: 416033 - DNA, 595 bp, Homo sapiens
taggaactgaaattaaaattgggaaacaataccatgaaaacctaaaacacctcaggaaaatatgagtaaaggttcaagctgtacacggaaactgaaaatattgctgagaatataaagaaaaataaatgaagagaaatactgtgtttgtatgtagaaagactcaatattgtttatgtcatttctccccaaattgatacatgaattcaactgatttttattcaagtstcaggagggttttttttttgtggatattgacgaactcattgtaaaatcaatagggaaataaaatggacctaaaatagccaaaaacaatcctgaaaaacaaagtaggtttggaaaacttgaaatatttaatttgaagacatatcaaagttacaatattcaaaacattgtagtgtcagcatggagatagctaagttgatcaatatctcagaatacagtgttgagaaataaacacacatgtatatggtctattgattttcaacaaatattcaaagctaatttggtggaaaaaagaataatttttctcagtaaaatgtattgtgaaatagttatatttttgtaagtctaaaaagaaagtttggttcatacccta

SEQ ID NO: 416034 - DNA, 629 bp, Homo sapiens
caatccaaaaccacaatctataaaacaaaatttgatgaattggactacaacaaaatttaaaaaattttcttttcatgagtatatttgtccattttcgtgctgctgataaagatatacctgagactgggcaatttacaaaagaaagagttttaacggacttagagttccacatggctggggaagccttacaatcatagtggtaggcaaggaggagcaagttatgtcttaaatggatggcagmtggcaaagacagagagcttgtgtacaagaactcctctttacaaaaccatcagatctcatgagacttattcactatcatgagaacaacatgggaaagacttgctcctatgactcacttaccttccattggatccctcccacaacatgtgggaattcaggatgagatttggatggggacacagccaaacaatatcaactagaagcagctaatagagtgaaaggacaagtgagactaggagaagatagttgcaaatcacatatttaataaagactttattcagaatatataaagggtgatcaaaacttcataataagaaaagaaacactgcataataaaatgaatgaaagatttaaacagatctttcaccagggaagatgcatagatatca

SEQ ID NO: 416035 - DNA, 629 bp, Homo sapiens
caatccaaaaccacaatctataaaacaaaatttgatgaattggactacaacaaaatttaaaaaattttcttttcatgagtatatttgtccattttcgtgctgctgataaagatatacctgagactgggcaatttacaaaagaaagagttttaacggacttagagttccacatggctggggaagccttacaatcatagtggtaggcaaggaggagcaagttatgtcttaaatggatggcagatggcaaagacagagagcttgtgtacaagaactcctctttacaaaaccatcagatctcatgagacttattcactatcatgagaacaacatgggaaagacttgctcctatgactcacttaccttccawtggatccctcccacaacatgtgggaattcaggatgagatttggatggggacacagccaaacaatatcaactagaagcagctaatagagtgaaaggacaagtgagactaggagaagatagttgcaaatcacatatttaataaagactttattcagaatatataaagggtgatcaaaacttcataataagaaaagaaacactgcataataaaatgaatgaaagatttaaacagatctttcaccagggaagatgcatagatatca

SEQ ID NO: 416036 - DNA, 603 bp, Homo sapiens
gatattttttatggctgaatagtatatcaatgtgtatatatatcacattatctttatacaatcaaccattgatagacacttaggtcagacacctgaattttttttggaagttcgttacktttaatttttaaatttttttatttttattttttgcagaacgtggaggtttgttacataggtatacgtgtgccatggtggtttgctgcaccttttgacccatcctctaagttcccttccctcaccctccactcccaacaggctgttgtgtgtgttgttcccctctctgtgtccatgtgttctcaatgtcaccatgaatttggtggcctttagctgttattaagaatttgacatgtgctccaatcacattagctgtaataattatcactaaacccaaatattattgggctgcaataatgagttttcttgtataatactcaaatattatataaatttgagtggacgttattcaatccaaaacatgaaactcaataacaccacagtagatgagaaatgacctcactaaagcagtggtgtcaaagatcatagaacatctttacatacaacacattattttttcctttagcttaaaaaaggggatgatat

SEQ ID NO: 416037 - DNA, 603 bp, Homo sapiens
gatattttttatggctgaatagtatatcaatgtgtatatatatcacattatctttatacaatcaaccattgatagacacttaggtcagacacctgaattttttttggaagttcgttacttttaatttttaaatttttttatttttattttttgcagracgtggaggtttgttacataggtatacgtgtgccatggtggtttgctgcaccttttgacccatcctctaagttcccttccctcaccctccactcccaacaggctgttgtgtgtgttgttcccctctctgtgtccatgtgttctcaatgtcaccatgaatttggtggcctttagctgttattaagaatttgacatgtgctccaatcacattagctgtaataattatcactaaacccaaatattattgggctgcaataatgagttttcttgtataatactcaaatattatataaatttgagtggacgttattcaatccaaaacatgaaactcaataacaccacagtagatgagaaatgacctcactaaagcagtggtgtcaaagatcatagaacatctttacatacaacacattattttttcctttagcttaaaaaaggggatgatat

SEQ ID NO: 416038 - DNA, 603 bp, Homo sapiens
gatattttttatggctgaatagtatatcaatgtgtatatatatcacattatctttatacaatcaaccattgatagacacttaggtcagacacctgaattttttttggaagttcgttacttttaatttttaaatttttttatttttattttttgcagaacgtggaggtttgttacataggtatacgtgtgccatrgtggtttgctgcaccttttgacccatcctctaagttcccttccctcaccctccactcccaacaggctgttgtgtgtgttgttcccctctctgtgtccatgtgttctcaatgtcaccatgaatttggtggcctttagctgttattaagaatttgacatgtgctccaatcacattagctgtaataattatcactaaacccaaatattattgggctgcaataatgagttttcttgtataatactcaaatattatataaatttgagtggacgttattcaatccaaaacatgaaactcaataacaccacagtagatgagaaatgacctcactaaagcagtggtgtcaaagatcatagaacatctttacatacaacacattattttttcctttagcttaaaaaaggggatgatat

SEQ ID NO: 416039 - DNA, 375 bp, Homo sapiens
gctgttgatccctttgtactgctcttaytatacatgaactacttttctctaatgtacatggaaaatatctttggaagattagacaatggagtttgctcctctccctgttaaaactcttctccatacttctatcttcagatatatcatagttccaattaattttttcttttgagttacatcattgagtactcctagatttgcgtttagatcattatgtcttatttttgctgtgcaagaaccacatatcttgcctcttgacagtatttttgtgctctggaatgttaggagtgtttctgagccatttaagatgcacccaactaaatagcacaaaccattatactctattatttttggtaatctaagaggtctgatata

SEQ ID NO: 416040 - DNA, 597 bp, Homo sapiens
atatttttgtaatttttttctaatgacagtttgtattacttctatcatttcaaactatgttcttaactataggttcctagatgttaagctgagaagaaatattatttttttttggtatcaaatcaaaggaaagacctacactttttcattacaactgtatatgtacttgtcttatcctggtttcctcagaaagcagagcctgaagcaagagaaagtgttactccttcattatggaataccagaatgctgccccaggagcagaaaaggggggaaaaagtaaatgttgcccaaaacgtgagagcaagtaagacaatgtgttttcatcctgaccaccatgtgggtatcaagcacaaattctcagtctcctgacaccatcttctgagaggtctcatacatgactaattttcagggaagtcaagaaaaaagcagaggaaggaaaaataatataatcatcagctcctttctgccactggtcaaagtgagcccacagggaattaagttcctctacactccctaattgtgcacatgagatcaccaaaggtttcagtgaccctgtgctatygtcagtaaggaaaccccaggccccaggactactgt

SEQ ID NO: 416041 - DNA, 601 bp, Homo sapiens
tctcatacatgactaattttcagggaagtcaagaaaaaagcagaggaaggaaaaataatataatcatcagctcctttctgccactggtcaaagtgagcccacagggaattaagttcctctacactccctaattgtgcacatgagatcaccaaaggtttcagtgaccctgtgctattgtcagtaaggaaaccccaggccccaggactactgttctttgtgccacagaaagctcatggagaaataggctattcctaatggctgataagaatacaaatggccaaatgcccaacagacagtttakgacaaaagaatctgaagtggttaatgacagggtctataatactgttcattgtagaatattatcttccctgtcacttctgctcctttatgagggtggtgaacatgttgtttttgaaattcattattgccctgacttctaggaaaacaatctttattgtctctgcccttctctctgtgactgcctgtattcttcataccacttttcctttatatatcacttaaatattgcttgggctacgacctttagccatcttttcttctcacatttacttctttctgatgatctcatctactcatattg

SEQ ID NO: 416042 - DNA, 636 bp, Homo sapiens
tttctgcactggaaatgattatatgtaacttggttaaaattgtgggacgaaggttctatgagtatagaagcaccgcaagggcaaaaatgtggccacaatttcacccacagtatttagaaagatgatacagtaggtatttaataagtatttattgcatgaatggataaatgagtgaattactctcataccactacatctatacctaaaagtttttccttgggagaagaaggatgtttgttttttaatttctgtacataatactaagactattaataatttttctttatagtaggctaacacgttaggaacaatatttcatttaatctagttaatattgatagagtgattatatgtgctaggtactgttgtaaatactttctctgtattatctcatttaattattactataagcatatatggagtaggtgccatgattttttmtttctgtttcacaggaaaggaaatagtggttttgtgagattaagcaatttatttaaagaagaacaactaataagtgacagagtccaggttggaatccgagtctgcctgacttttaaatcttcactcgcagtttcttttctagagaaagtaaatgtggggcccttgcactgctactctcctctttcactcattgca

SEQ ID NO: 416043 - DNA, 567 bp, Homo sapiens
aggtgctcagttaagacctgtcgaatgaatgtgatcttaactttcatggtttttaagtagcagtgtttccgttatttaacaagacataacttccatgataagattttttattacatctttatacttggacttatatacctagggattagggccgattataaaaraaagttttaaaaatgtaattttttgttagcttttagagaacgctgtggtaataagctgacttgaactaatcaattcgtagatgaaatgctccttaataggagagactgtgtctggcttggtcaacactgccccctgcacctagctcagagcctgtagtacagcaggagctcaataaaggtttgttcaatgaactgagtgggaaatttagggcaggggtgtgaatggaggaagaaaactttggtaggaagctgtttgtaattttggttttgtcctcatggaagagtgcttatatgtttgcaaagcactaaagattttttttaaatatatatttttattatactttaagttctagggtacatggcccaagtgtgtgatgttccccttcctggcaaaggactaatg

SEQ ID NO: 416044 - DNA, 567 bp, Homo sapiens
aggtgctcagttaagacctgtcgaatgaatgtgatcttaactttcatggtttttaagtagcagtgtttccgttatttaacaagacataacttccatgataagattttttattacatctttatacttggacttatatacctagggattagggccgattataaaagaaagttttaaaaatgtaattttttgttagcttttagagaacgctgtggtaataagctgacttgaactaatcaattcgtagatgaaatgctccttaataggagagactgtgtctggcttggtcaacactgccccctgcacctagctcagagcctgtagtacagcaggagctcaataaaggtttgttcaatgaactgagtgggaaatttakggcaggggtgtgaatggaggaagaaaactttggtaggaagctgtttgtaattttggttttgtcctcatggaagagtgcttatatgtttgcaaagcactaaagattttttttaaatatatatttttattatactttaagttctagggtacatggcccaagtgtgtgatgttccccttcctggcaaaggactaatg

SEQ ID NO: 416045 - DNA, 540 bp, Homo sapiens
ccaaaggttactaaaagggaaattatctttcctgcatgattttgctgaactctgtggtttttccatgatggagggagaagggaaggtgggattcagttcttattctaaaataagagttaataagagttcattgtgcccaaccagcaaaataaacacagccatcctcacatttgtgccaattcccagcatcagccaaaggtgtttacaatcaaggcaggcaataaatctcattcagtaaatactggtcaactttttatactttaataattcaaaaggagcaggtcataccaggcatagttctttatgcttgagaaaaatcattgtttttgtttgatttcctgaaatactcctattttataggtagtatatggcaattatatttttgaaatataagtgcattacatttattttgccttaagaytttttcaaaataaaaatttactactcatcaaaacaaatggagaaagttagggttgtaacaaaattaggtgttgaaattcctgcaaaagtcttccacgaaagtgttcactggaatgttcc

SEQ ID NO: 416046 - DNA, 563 bp, Homo sapiens
tcatgttttgagatgttttatagtaagatacagctatctgtaacaccttggttagacaaaaaaaaaaaaaaaaaggttaggtatatacatgaattgaacaaaattatttatttagttgttttgttgttagggtaaaaatggcaaattctattaattcttaagcttcaagcattacctaattgccagctaagatctaccaggggttctcctggtagagctgttttttgcacaattggccaggcacatcgtggactttatccccttccaaaccatctggtttatgggccactgttagaaatgttgtatacattgtactagcaatgacctttgatctggtctcatctcttttgccatatgctgtgttttgtctctaaaacagtaaacattggttaatattcatgtgaaatgctatgatgtgaaattgrtcaaaagagcagaaatgtccaagtgagtggatctgaccgctgtttgttttctttcacagtggcacatttcagtacaccctggaagccaccaaatctctccgtcagaagcagggggagggccccatgacctacctcaac

SEQ ID NO: 416047 - DNA, 670 bp, Homo sapiens
tgaacatcacacaccggggcctgttgtggggtagggggagcgcagagggaaagcattaggagatataccaaatgtaaataacgagttaatgggtgcagcacaccaacatggcacatgtatacatatgtaacaaacctgcacgttatgcacatgtaccgtggaacttaaagcataaaaaaaaaaaacaactctcaaaaaactgggtatagaaggaacatatctcaacacgataaaagccatacacgacagacccacagctggtactatcctgaatgcagaaaatctgaaattcttttctctaagttgtggaacatgacaaggatgcccactttcaccagtatttattatttaacatattactggaagtcctaagtagagcaatcagacaagagaaagaaaagaaagaaagaacatccaaattggaaaggaagaagtgaaattatccttgtttgcagatgacatgatcttatcatatatttggaaaaacgtagagtccacaaaaaactatgagaacctagaaacaaattcagtagagttccagaatacaaaatcaatatacaaaaatcagtagcatatctatayacaaacactgaaataatttgaaaaaaaaagtaatcccctttacaaaagctaaaaataaaataagtaggagttaaccaaagaagtaaaa

SEQ ID NO: 416048 - DNA, 405 bp, Homo sapiens
aaactggaggaatcacattacctgacttcaaattacactacagagctatagtaaccaaaaaagcacgggactggcataaaaccagacacacaraccagtggaacagaatagagagccccaaaataaatctacatatttacaataaacttatttttgacaaagctgccaagaacatacattgggaaaaaagatagtctcttcaataaacagtgctggaaaactgtttatccatatgcagaagaatgaagctagatccctatctcttgcaatatacagaaatgaaatcaaaatggataaaaatttaaatttaagacctcaaactatgaaactgctaaaagaaaacattggggaaactctccaggacactggactggacaaagatttcttgagtaataccctacacag

SEQ ID NO: 416049 - DNA, 604 bp, Homo sapiens
gtcattaaatagtactaatttaattatagccagctattaacaaaggcttgcagacttaatatgtacattaatcattatgtaccatgtgaagggtaaacaccaccacagcacatcatacaaaggattagtagtacttgtaatagcaaaaagtggtgagagaatgaagtaattatatggcacatawaattagcatacaccacataagcatacaccacaacataaagagtggccgtttagtttcagcaaaataacttaatttgtcatattaatgttagtgttgacttacattttactacgtttatagtttgcttatatttaaacaaattgtgcttctatttatacatcattgagaagtagaagcatgtggagtttatgtttagtttcatattgtacatatttaaataacgtgctaccaaaagtaatttgtcaacattggaagttcatgagatcatttttccctttaaagtcggtccatacatttttcaaatttgagctatatgatatagtgaggccacttcttttcctaatgaagcactatctctagtggtaattctaaatgggcaaagcacaaaagaggccatttataccaaagaccagtgtatta

SEQ ID NO: 416050 - DNA, 604 bp, Homo sapiens
gtcattaaatagtactaatttaattatagccagctattaacaaaggcttgcagacttaatatgtacattaatcattatgtaccatgtgaagggtaaacaccaccacagcacatcatacaaaggattagtagtacttgtaatagcaaaaagtggtgagagaatgaagtaattatatggcacataaaattagcatacaccacataagcatacaccacaacataaagagtggccgtttagtttcagcaaaataacttaatttgtcatattaatgttagtgttgacttacattttactacgtttatagtttgcttatatttaaacaaattgtgcttctatttatacatcattgagaagtagaagcatgtggagtttatgtttagttycatattgtacatatttaaataacgtgctaccaaaagtaatttgtcaacattggaagttcatgagatcatttttccctttaaagtcggtccatacatttttcaaatttgagctatatgatatagtgaggccacttcttttcctaatgaagcactatctctagtggtaattctaaatgggcaaagcacaaaagaggccatttataccaaagaccagtgtatta

SEQ ID NO: 416051 - DNA, 587 bp, Homo sapiens
tgtaccattttattaatgaacaaagtgcttgagtcttagaggggcttgtgaagatcacactagcttgagtgatcaactcacagcaaccaggccagtgctgccaagactttcacttattgcagaaggcattttccccatggtgggaagtccatccrttggtaacttcaaccttccatcttgaagtattgtggcttaggtggagggattttcttctacccaattttagtataaaaaacatcccagggaatggattctgattggtccacagttgaaacatgccaaaaatctagacctacctctatagccaaaggggttgaaactgcaactggtcagactagggtcatgtgcctaaccatgaagtcccatcagaattacaggtagaaaagaggaagatgcagctccctaaagcaaaaagatggggactggacacagttaccagaagaaaaggaagagcactggccagacaaaaacagcccatgttcaccacaggctctctgtatataacactttgcatttgtagaactgtatcattgtgaaaacactgttacacataatttcctcaatataaagatccattggtaattagc

SEQ ID NO: 416052 - DNA, 587 bp, Homo sapiens
tgtaccattttattaatgaacaaagtgcttgagtcttagaggggcttgtgaagatcacactagcttgagtgatcaactcacagcaaccaggccagtgctgccaagactttcacttattgcagaaggcattttccccatggtgggaagtccatccgttggtaacttcaaccttccatcttgaagtattgtggcttaggtggagggattttcttctacccaattttagtataaaaaacatcccagggaatggattctgattggtccacakttgaaacatgccaaaaatctagacctacctctatagccaaaggggttgaaactgcaactggtcagactagggtcatgtgcctaaccatgaagtcccatcagaattacaggtagaaaagaggaagatgcagctccctaaagcaaaaagatggggactggacacagttaccagaagaaaaggaagagcactggccagacaaaaacagcccatgttcaccacaggctctctgtatataacactttgcatttgtagaactgtatcattgtgaaaacactgttacacataatttcctcaatataaagatccattggtaattagc

SEQ ID NO: 416053 - DNA, 587 bp, Homo sapiens
tgtaccattttattaatgaacaaagtgcttgagtcttagaggggcttgtgaagatcacactagcttgagtgatcaactcacagcaaccaggccagtgctgccaagactttcacttattgcagaaggcattttccccatggtgggaagtccatccgttggtaacttcaaccttccatcttgaagtattgtggcttaggtggagggattttcttctacccaattttagtataaaaaacatcccagggaatggattctgattggtccacagttgaaacatgccaaaaatctagacctacctctatagccaaaggggtkgaaactgcaactggtcagactagggtcatgtgcctaaccatgaagtcccatcagaattacaggtagaaaagaggaagatgcagctccctaaagcaaaaagatggggactggacacagttaccagaagaaaaggaagagcactggccagacaaaaacagcccatgttcaccacaggctctctgtatataacactttgcatttgtagaactgtatcattgtgaaaacactgttacacataatttcctcaatataaagatccattggtaattagc

SEQ ID NO: 416054 - DNA, 586 bp, Homo sapiens
atctttgccatgcctgggctactgcccacccttctctgctttacctgaccttgattaacttgatccatgtccatctaaccagactcctgtttctgttctagcttgagctgatcattcatttcttcagtcagtcacagtacctatttactgagggcttttcagctatcaaggtctattccaggcaccaggcctgtgagagtgaccaaaattggcatgtttcctgccctcaggaccttaaactcaagactagggaacaattaataaacaaatgataaaatttagattgcttgtgataaataaataatcagggatgtgcaaggagagaacaccaagtrcaaaggaaaagagcttgacatgtgaacagccaggtcatggggctgtagaggtgtgaagatcatgatgaaaatggttccctacacagaacactcagggaaagccaagacccactaggcagagttggggacccttcctgtgtggcttcattttctgtagattcctcttaattgctcttatcaaatctgatgtgacgcttcctgtttgtctcccttattaaactgtggattatttcctctctatatacaaagtg

SEQ ID NO: 416055 - DNA, 581 bp, Homo sapiens
gatgagtgggcagattctggttacattctgaagcaaaagctgagagaatttgctatggaattgaatatgggtgtgaggggaagaatagagtcaaatatgactccaagttttccaacatgaacaaatggaagagcggagttgtcatttattgaaatgggaaaagtggagtccaattattgacatgttgagttcaaaatacctgttacatatttaagtcaaaatattaggtcagctgttggatatacgagtatagatttcagggaagggaacaggctggaaatttgtatgcagttaaagggaattatctaacccgcaaggtgaactagcatcacacttaggtgtttataataatgttcamcaaaaactataaaaagagtttatgggaaagaaatagaatgctgtatgaaaagaattttctttagtagaccctcattaaatatgcttccaatgctgtttatctgggaagcaactagttagaaaatacatttgctatggaatgctagccccctgaagaaatgagatagtgcctatttaaacatccttagggtatcagatgctaaggtgtagtaacttgcaatcaa

SEQ ID NO: 416056 - DNA, 476 bp, Homo sapiens
cccagaaataagagtgacccaaccataaagctagacacatccccagrgctagagccaacagagacactggcattcttacacattgcacagagctcagctctcctctcctggggagccatggctcctagatctaaggcctaagtctctgcctcctggatggtacatacataagcacctcttgtagggaggaagagccacattccccagaaaaccctggagggccttctacctaaggcttcacagttgtgttgtaacaaggaggtctgtggaaggcttcactggaggccttggaatgatccctgaattttgtgcccttcaatagcgataagagtcaaagctttggagacaatttcagaaaaacccaatatctttgaacactattctctagctccttgaactctccaaaagaggacaaaaaattaacatgtatttctgggaaattgcggtggttcacagagatgtcttgatttctcaat

SEQ ID NO: 416057 - DNA, 496 bp, Homo sapiens
cacattccccagaaaaccctggagggccttctacctaaggcttcacagttgtgttgtaacaakgaggtctgtggaaggcttcactggaggccttggaatgatccctgaattttgtgcccttcaatagcgataagagtcaaagctttggagacaatttcagaaaaacccaatatctttgaacactattctctagctccttgaactctccaaaagaggacaaaaaattaacatgtatttctgggaaattgcggtggttcacagagatgtcttgatttctcaatatatttttaatagttttttattcatccaccataaagcaatccatacagagtgtcaattttgagctagaagctggagatagggtagaacacaagacaaagtccatgcccttgggaagcttacatcctattggggaaaatatagattcactctatttttccctcagctcttggctagaaaaaaaattgaggtgaacatccaaagtaaatattctatt

SEQ ID NO: 416058 - DNA, 569 bp, Homo sapiens
accttgcccatgctgtcccacttggataatgtattagtctgttcttgcattgctacgaagaaatatggggcactgggtaatttataaagaggcttaactggctcacagttctgcaggctacacaggaaacatagcagtttctgcttctggggaagcctcaggaaacttacaatcatgrtggaaggggaaaggaaagcaggcacgtcttacatggctagaacaggagcaagagagagagagtggggaggtgccacacacttttaaacaatgagaactctatcatgagaacagcaccaaagggggaaatctgcccccatgatccaatcacctcccatcacgccccacctccaacattgaggattacaattcaacatgagatttgaatggggacacaaatccaaaccatatcagcaggttcattcccatagcccatggtaagcctgagtaccttctcatgctcaagagaccaagttaacttgctaaatctctttttctcctttgttcactatcctatcctctcagaaacaggaggaaaatactaattactagttctcttttgtaatgtcatg

SEQ ID NO: 416059 - DNA, 534 bp, Homo sapiens
attcatgtgtcttttttagtttatgaaaagattaaaggaaaattataccagcagtaaagttctcagctacatctgaggattaaattccaagacttttgactaacattaacctagaccatttcactaacttccagataaaaatgtttctaaccttgccttttttgtcctataaaaattacaatgtgatataaaaatatacaaaacctaaccatctccaaaaggtagttcttatttccttgaaagactcrtaagtatgacaaagaataattagcaataaaacaaggccatcagttagtgattccataggaagaaaatgtacttaaagagaaaaaaaattgtaagcctaaagggtctgatattctgacttggacgggtgaaaacgatgcttgcttaagacttgaagaatgactcttcagtgataggactactttgccccaaacagagtaggctatacaaagaggctcagcattacaaaattccaggaggagctatttacatagaatacaatgagaccaggactttgtagttgtgcaa

SEQ ID NO: 416060 - DNA, 534 bp, Homo sapiens
tttgttttgttcactgtggtattcttggaagagtgcctacaacattaagggtacacagtaaatgctggttgaatgaatgaatgttgaatacatgcacatataatgaagtatagttatgtgttacttaacaatggagatacatgctgaaaaatgcttcattaggcaattttgtcattgtgcgaacatcatagcgtgtacttacacaaacctaattggtacagcctactacacacctaggctataygatatagcttactgctcctaggctacaaatctcaacagcatgttactgtactgaatactatggacagttgcaacatattggtgagtatttgtgtacctaaacatagcaaacatagaaaagggacagtaaaattacagttttataatcttatgagactactgtcctatatgcggtctgttgttgaccaaaaagttgttatgcagcacataactatagttaataataataatagtaataggtaacctctatgagccgtcctgtatgctagcactatactaagtactgacata

SEQ ID NO: 416061 - DNA, 565 bp, Homo sapiens
atgcctttcttataatttttctgtcagtaaaaatatctcatttttggtgctctttatatacagaattatatatataataattagttataactctcagtaaccttaatttttagcaagcaattttgaactgtcacatatcagtatctgatagatgaaaaccattttacacsttttagaaatctgtttcctcataacataattgttatatgtataaatacaccaaataatatgatatatttagtttttttataaaattttaagaagtaaagaacaaacatgttattatcagtaatatattttagtttttatcttatttggaaattacccagatatttaatctatcacttaataaaacataacataatttaagattttaaactacatgaaaagtttatttataaatatttactgcatttacatttacctactttatttttaagtattataactagattacttatgaaacctaagatattagacaaagtcaacatttcaagttattttcctcttaaccatttttataccctgtgaatatcaggtgttcacctaagtaaaaaatatatgg

SEQ ID NO: 416062 - DNA, 565 bp, Homo sapiens
atgcctttcttataatttttctgtcagtaaaaatatctcatttttggtgctctttatatacagaattatatatataataattagttataactctcagtaaccttaatttttagcaagcaattttgaactgtcacatatcagtatctgatagatgaaaaccattttacacgttttagaaatctgtttcctcataacataattgttatatgtataaatacaccaaataatrtgatatatttagtttttttataaaattttaagaagtaaagaacaaacatgttattatcagtaatatattttagtttttatcttatttggaaattacccagatatttaatctatcacttaataaaacataacataatttaagattttaaactacatgaaaagtttatttataaatatttactgcatttacatttacctactttatttttaagtattataactagattacttatgaaacctaagatattagacaaagtcaacatttcaagttattttcctcttaaccatttttataccctgtgaatatcaggtgttcacctaagtaaaaaatatatgg

SEQ ID NO: 416063 - DNA, 421 bp, Homo sapiens
ttagagagtctgaataatgatcaatcaagccttgagtctttcttaatgtaatttgcccatcagtttaaaaatgtgcatgagaacaggccataatacgtagtcagctagagtcccacaaacccttggcatgccttaatgtttgagaattccattctatttctcattaatctcttgaaagcaaagmtaattttataaatccttttggaccagtgttttagatggtagtggctgtggcagtgacttttaattagccatcctgaacccatcatttaaaatatttatttttgctttcagaaattttgaaataagtaagggaaaaaaccaaattatttacagatacacataaccaacccaaaataaaagcaaaatactaaattaggcacacagaaagaactaaaagtaaattcactaggaaagacac

SEQ ID NO: 416064 - DNA, 522 bp, Homo sapiens
attttataaatccttttggaccagtgttttagatggtagtggctgtggcagtgacttttaattagccatcctgaacccatcatttaaaatatttatttttgctttcagaaattttgaaataagtaagggaaaaaaccaaattatttacagatacacataaccaacccaaaataaaagcaaaatactaaattaggcacacagaaagaactaaaagtaaattcactaggaaagacactcctcaaagatagaatgtaaattwtgtgaatccagagtgctcaaaccagaataacgcttgtccttataccctaaaggacttgccaagaaagataaaaagtattttattatcccagaaagaatgcaaggttcttcatttcagttggcttataacaacaataacaacaacaaaaaaaaaaagtcaggcacttctaacaaaaagagggaagcttggcctgacagaagactcacaatggcagaataggtgagttgtggaagcagggagctgaaagggctcagaagagtact

SEQ ID NO: 416065 - DNA, 567 bp, Homo sapiens
atatggacttttttgtttcccagtgcatataaaagttgtgtttatactatcctattagtctattaagtgtgcagtagcattatatctacaaatcagtgggcatgccttaattttaaaatgccctattgctaaaaatgctaacaattatctgaaacttcagcgagttatagtctttttgctggtgaagggtcttgcctcaatattgatggctgctgactgattagggtgrtagttgctgaaggctggagtggctgtggcaatttcttaaaataagacagcaatgaaatttgtcacatcagttgactcttcctttcatggaagatttctctgcagcatgtgatgctatttgattgcattttacctactgtagatgtttcaaaatttgaggcaatcatctcaaactctgctgctgctctatcagctatgtttatatcatattctaaattccttgttatcatttcaacaatgttaacaacatctttacaaggaatagatggtgaactttctcaagaaaccactttttttgttcatccataagaagcaacccttaatttgtccaagtttaat

SEQ ID NO: 416066 - DNA, 620 bp, Homo sapiens
aatagccactacttataataggagattgctttgagggctaaatgagttaagtatatttgtttatttattttttagagacagggtctcactctgtggcccaggctggagtgtagtggcatgatcatctcattgcagcctcgaactcctggcctcacttgatcctcccaccttaggctcccaagttgctgggaccacagatgtgtgccactacactgactaatttttttattttttggtagagatggggtcttgctatgttgtccaggttggtctcaaacacytagcctcaagagatcttcttgcctccacctcccaaagtgctgggattacagggatgagccactgtccctagctaaatgaattaaatgtacataaaagctttttgcaaaacataatgtgatttccaaactacagatgttgttactgctactaattatcataaaattgaaatgaaaaattaatatactatgtgaaatgatgagacatattttaggtatacaacattaaaacacacacacacacacaaacacataacaaaataacaaaacctacctctcctttaagttaaatgacctaaagaaatggcttttggaatggcacttaaagggattttaaggaga

SEQ ID NO: 416067 - DNA, 687 bp, Homo sapiens
taggttgccattgtttctaagccttttccatgaacaaagctagacaacactgatttttgtttttttagaaagagtaaggtaaatcattatttcatactaatgtcttctgttcaaatttgtaattaccaggtatttacttcttatattttatatttacttttcactgaaagtcttggttcttattgacatcatttcttatttgacttatcctacaatatataaataatagtttcaaaataagaatactaacaagttgattgratgaggtttaatatttctttatggtttgttttgtccctaggatatattccattatagatgtacaaccaatgtctttaaaattatttgacataattttctctgtgtgattataccacctccttgatatagactattagagctatatggcattgaacaattaagttcacttttgttttttcttttctaccgaggctacaagtcagttaactaaactcagttgacctaaaattttagcattctttaggtattgctgtgtagtcacagccacatgcaccaaacactctgcttttaggttgattctacccagcactctcttgggccttcagttctacaatgtcggacaacccatactcccagagaagctgccaatctggacttctgcttaacatggatttgttttgtgtggtaatttgtgccagtccacca

SEQ ID NO: 416068 - DNA, 647 bp, Homo sapiens
aaaggatgtgccttttatctatttccccggcattggttcgtttattctgaatcttttgtctggacttgtctgtgtggattatggattcagaatgagtgagcatttgagagggagtcgggtaccatagacctgaaagatgaggactgaggtcaccaacgttcctttttgtaagccgtgaaggcttgaagaagaggccaaagaaccagccactgtggaggtgaagaaagaaagcaagttcaatgcatcaggcgaatgggagttgcaacaagaaagtagacattgttgttccaccattcttaactcacagcaaactgagaaaacagagagagagaaagagagaaataatttttttcatttttattatttaaaatttgtttatgggtacatagtaggtgtatatatttatggggtacatgagatgctttgatacgggcatgcaatgcataaaaatcacattatggagaataggatatccaccccctygagcatttatcctttgaattacagacaatccaattacattcttcaagttattttaatgtatactatatgtatatagtgtgactatatactatgtacataatatgagtatatggtgtcaccatatagtcaataataacttaattattactaagttattattaata

SEQ ID NO: 416069 - DNA, 553 bp, Homo sapiens
atcaatcaaatgttctaggcattcttctggggctttcctcacatagaaaatgaaatcatactcttccaagtgttaagtgcatcaattcaaacactggacacagaagactttaagacttactcgatgaaagcagctggaatcctgagtcttcaaagatatcttcttgtctctaggatgagtggcctgacctgcaagccctctgggtgtctgtcttcactctcactggtgtctctctcggcttctgctggctttaatcttgaatgcatcaactgtcttggactcctaccttgcccatgacaacatgaagtttctctttatgtcactttaggatctracacttccaggacacaacagctctcatgagttgacctgactctttctggattgatctctgtcactcctgtttgtaggctgagagactgctcttctggtctggttagagatgggaagaggtggaaggactgggaagaccacaggctcttcagacaatcctccataaatacagattctcccaggcgagttctaaggcactataggtagcaggaagttggca

SEQ ID NO: 416070 - DNA, 533 bp, Homo sapiens
tgcagtgagctgagatagcaccactgcactccagcctgggtgacagagcgagactctatctcaaaaaaaaaaaaaaaaaggaaacttggatgccccttttgggaccaagccaccaaacatactgtctgtggcaggaggcaactcataaagaagcatggtccaagcataggagggttcagcctctcacttgcttttgttacagccaagatgaggggtctgacccatgtgattcctctgtgaacttatgcatgcaaggaactacatctgataaactaacatgcactccattctcaggcttggcaaagagaatagagagtgagaaaatagctayaaattaaatttaaacagagtgaatccactctccattctactcatgagatagaaacacgctgagtcccagaggaaggtggtggcctgtggctggggctgctggtgctccaggaacagccctggtcctgccatgctgagctgggttatcctttgcttacttacttcaacatagaatgttctcagaacccttcttggagctccat

SEQ ID NO: 416071 - DNA, 607 bp, Homo sapiens
gctgctggtgataccagataatttaaagccagggaaagacaaatacagatcccatttcacttaggcctaggcacaaaatgacattcacaaccatgacatgacccgtctatgtgaaattgggcctgcaggcttgatatttgccaattggtaaattactccaccagctgacttcacaactgaagtcaggttttctcctcttcaggtttttaaatgtaaacattagggctttgatcaggagaggatcctagaagtggaggaggtacttatacactgaagaaatgacaaatctcagtcccttttattgaatggaaacttctattttgttccccagaacagaaagccagtgatactcttcttgggcctataaccatctgtaatagttcattttcacactgctataaagatactacccaagactgggtaatttataaaggaaagaggtttaagtgactcagagttctgcatggctggggaagcctcaggaaacttacaatcatggyggaaagggaagcaggcacttcttcacaaggcagcaggagagagagagggtgtgtaggaggaactgtcaaacacttataaaaccatcagatcttgtgagaactcactc

SEQ ID NO: 416072 - DNA, 578 bp, Homo sapiens
ggaggacatgcatggataagggagtgaatacagtgttttcrccctccctgctctgccagcttctacaccaaaggttctaaagtcattttcaatactttcctggcattctatttttaagctctgaggaaagaataaaggctatgagcctggcagtgacatccatgtctaaattatctttatacccctggcagcgtttagcttggagctcttagtaaacatgtagatagcactggattgaataactaaggaaggtaaattgttagaagttaaaggcatcaggctgggtgctgggaataccaagaataataaaatgcttaatacttacttagttgaagctgttgtagagagaggactaatggaccagtgtttgaactgtcagagtcgggaggacagaaatagagtgagagctagtagatgtgaagtagtgggtggtagggaagagggaatgcaggagaggagaggaagggatgggagcacaaaaaaaaaaaaaaaaaaaaaggaagggaggtggggagaataggacaaagccaatctagacatgcctgatccaggctactttttaggcttttttttttttt

SEQ ID NO: 416073 - DNA, 490 bp, Homo sapiens
gattgaataactaaggaaggtaaattgttagaagttaaaggcatcaggctgggtgctgggaataccaagaataataaaatgcttaatacttacttagttgaagctgttgtagagagaggactaatggaccagtgtttgaactgtcagagtcgggaggacagaaatagagtgagagctagtagatgtgaagtagtgggtggtagggaagagggaatgcaggagaggagaggaagggatgggagcmcaaaaaaaaaaaaaaaaaaaaaggaagggaggtggggagaataggacaaagccaatctagacatgcctgatccaggctactttttaggctttttttttttttgagatggagtcttcctctgtcgccaggctagagtacagtggtgcgatctcggctcactgcaacctctgcctcccaggtttaagcaattctcctgcctcagactcctgggtagctgggactacaggtgtgtgccaccacacccag

SEQ ID NO: 416074 - DNA, 648 bp, Homo sapiens
gtgaaaataaacccatattattcttttcagtacatagtaacagcaacaaaaatcaaaagaaaagaaaaaagtcctcccagccctacttctgggctctatagatcaagctgctttcaatctgcatttcttgacttctctgaactgctcatcacaaaacacttcatcttaattcctcttgccagtcaatgacttgcattgactggcaagaggatccacgtatttagaagttcttaccaccgcggtacttaaattgagatatgtcttgaggtccatatttgtcaatcccatttctgagaagcagtcataaataaagcagaagattgaaattgaattttttaaaaggactttaggaggaaagccattatgcaaccgtcccgtttagtgaaagagaatgttgatttaaactgggaaaagtcagctcaccatctcyagcatggcagagagaaacgctgaggaaaattctccctattttcaggagtagtagcttgctcctctgggaaggaggttaccagaaaggcccgcaaatgattggtaggatgcgagtaacaaattaaaatattctctttgccagaaacctgtgttgttgagaatcagacaaagggctaaaatttgcctgcgcttggattaccagatggtgttatttacgta

SEQ ID NO: 416075 - DNA, 436 bp, Homo sapiens
ttagaaaaattatgaatgcatttcaaagggattcacagatgtctcagctttagaactcytgcctaactccagggctagcacaatggaagtctctttaaatccacttacagagattagaagggtcttagtgtgttaatcccagtcttattatgttaatctggctgccctgctcctgatgatatgctgtgtccaggaagttcttgcccagatacttcacagcagactcttcatcctgccagtgtgtgacttcccatggagctccagctgccccgtatcatatgcctttactctatgccaaatcccctagctcttcagctctcctccacattctgctcagaagatggcccaaggaaatttccatgttactgcagccccacaggagtgtcatgcggtagttgtatattagcgtggtttgaatcccaactctatcatttat

SEQ ID NO: 416076 - DNA, 436 bp, Homo sapiens
ttagaaaaattatgaatgcatttcaaagggattcacagatgtctcagctttagaactcctgcctaactccagggctagcacaatggaagtctctttaaatccacttacagagattagaagggtcttagtgtgttaatcccagtcttattatgttaatctggctgccctgctcctgatgatatgctgtgtccaggaagttcttgcccagatacttcacagcagacycttcatcctgccagtgtgtgacttcccatggagctccagctgccccgtatcatatgcctttactctatgccaaatcccctagctcttcagctctcctccacattctgctcagaagatggcccaaggaaatttccatgttactgcagccccacaggagtgtcatgcggtagttgtatattagcgtggtttgaatcccaactctatcatttat

SEQ ID NO: 416077 - DNA, 436 bp, Homo sapiens
ttagaaaaattatgaatgcatttcaaagggattcacagatgtctcagctttagaactcctgcctaactccagggctagcacaatggaagtctctttaaatccacttacagagattagaagggtcttagtgtgttaatcccagtcttattatgttaatctggctgccctgctcctgatgatatgctgtgtccaggaagttcttgcccagatacttcacagcagactyttcatcctgccagtgtgtgacttcccatggagctccagctgccccgtatcatatgcctttactctatgccaaatcccctagctcttcagctctcctccacattctgctcagaagatggcccaaggaaatttccatgttactgcagccccacaggagtgtcatgcggtagttgtatattagcgtggtttgaatcccaactctatcatttat

SEQ ID NO: 416078 - DNA, 436 bp, Homo sapiens
ttagaaaaattatgaatgcatttcaaagggattcacagatgtctcagctttagaactcctgcctaactccagggctagcacaatggaagtctctttaaatccacttacagagattagaagggtcttagtgtgttaatcccagtcttattatgttaatctggctgccctgctcctgatgatatgctgtgtccaggaagttcttgcccagatacttcacagcagactcttcatcytgccagtgtgtgacttcccatggagctccagctgccccgtatcatatgcctttactctatgccaaatcccctagctcttcagctctcctccacattctgctcagaagatggcccaaggaaatttccatgttactgcagccccacaggagtgtcatgcggtagttgtatattagcgtggtttgaatcccaactctatcatttat

SEQ ID NO: 416079 - DNA, 577 bp, Homo sapiens
caagcatagctttcaccatgatggagtatagaggtgggggagctgggtctagtgcaggtgagactccactagatggagtccatcaagctcaggaatcggggctttctcatcaagagccatctgaattttaggctgaccacactgtctgttgagtggagaatgaactgcaatgaggatggaagtagaggggcggatgaaggtctgaactcaagtgtgacagtgaaggttagaagaagacagatttgagaatgcatacaagttaagtagttaagaattcttctttttttttttttttgagaaagtctcactatgtcacccaaactgtagtgcagtggcgtgatctcggctcactgcaacytccgccacctgggctcaagtgattcttggccttagcctcctgagtatctgggactacaggtgtgcatcactgtgcctggctagttttttgttgttgttgttgttgtatttttagtagacatgggctttcgctatgttggccaggctggtcttgaactcctagcctcaagtgatctgcccgccttggcctcccaaactgctgtgattacaggtgtgagcc

SEQ ID NO: 416080 - DNA, 501 bp, Homo sapiens
tttttttttttttaactttttttaaagtgcaggggtacatatgcaggtttgttacacaggtaaacttgtgtcatgggggtttgttgtacagcttatttcatcacccaggtattaagcctagtacccattagctatttaatatttttcctgatcccctccctcctaccaccctccaccccctaccctccaataggccccagtgtttgttattcccttctatgtgtccacgtgttctcataattcagatcctacttataagagagaagttatttggttttctgtttctgtgttactttgctaaggataatggcctcaagctccatccatgtccctgcaaaggacaagattccattcttttttatgtctataaagtattccatgatgtatatgcaccacatttttttaatccagtctatcattgaagggacatgcaaatcaaaaccacaaacatggattttcttcccaggatccaacccrggatctcacattgcattgttttgg

SEQ ID NO: 416081 - DNA, 579 bp, Homo sapiens
ttcgtgtgttcactggagtagcatgtttaatttccttcaataacttttcctttgcattcataacttggcaaattatttggcacaagaggcctagctttcagccttatttggcttgtgacttgtcttcctcactaaagcttttagaggccattatagggctgttaattggctgaatttcaatattgctgtgtctcggggaatagaaaggcccgagaattgggagagagataggagaatggcccaacagtggagccgtcaaacacacacaacatttatgatttacgttcgcggtcctgtctrggtgcagctcatagtgccccgaataattacaatagtaacatcaaagatactgatcacaaaccaccataacagatacaatactaatgaaaaagtttgaaatattgcaagaattaccaaaatgtgacacagcgacaggaagtgagcaggtgctgttggaaaaacggcacccatagacttgctcgatgtcacgttgccacaacccttcgatctgtgaaaaaatgcaacatctacaaagtaccataaagtgaaacgctatgaaatgaggtatgcctgtacatg

SEQ ID NO: 416082 - DNA, 563 bp, Homo sapiens
cagcgcctgggggcaattgaagtttataatttatagatcctggtttattaggctgttcttgccttgttttaaagaaatactggagactgggtaatttataaagaaaagaggtttaattggcttttggctgtacaacatctgctcagcttctggtgaggcctcagggagcttttgcccatgacggaaggtgaagcaggagcaggcacatcaatgggcaagagtgggaaaaagagagtgaggtgagaaggtcctagacttctaaacaaccagatcttgcattaactaactaagcaagaactcatttatcaccaaggggatggtgcttaaaccattcataagggatatggccccatgatacagttacctcccatcagaccccatctccaacaccgtcaatcacatttcaacatgatatttggaggagacaaacactcaaacygcatcacctgataacctttaaaagagcaatttcaataaagtaacaatggcagaagttaggtttcaaggcattaaaggtataagagagaggaaattcaaattaagagataagtagagctgtggct

SEQ ID NO: 416083 - DNA, 626 bp, Homo sapiens
ctgcctgctggataatagattgattcataatttcagtaagcagctgtgtatatctttccctgaacataaaggcagcttgctgtcattcatcactttgcatttggagaatttaaatatattcaggcagacattgtttagggasggggagggagggcttctgattttcttaccattttgcttctaacaatgactttgatttggaactaattggggtttaaagcacacgttaaccacatctctctcaagggcacttaataaactccctgtcccttgttcaaggagaccagccaggccctccttttgggataagagccaagagcttctgagtacctttcaccaagaaatgagaaccccatgcagagaatcttatctgccagaaaagagccactcctgtccctgagcagagctacttatttcattcctgggcagaatatgctcaagctttctggaggaggtggggttctcctggcaatctgggagggggctcttctgctgctcagctgctgggccatggcagccaaccatgaggtattcggtgaccaaaagaaagcggccagcacccagccaggtgaccagatgtcttcatgcctcagtttcctcatctataaaatgtaaagaataataaa

SEQ ID NO: 416084 - DNA, 626 bp, Homo sapiens
ctgcctgctggataatagattgattcataatttcagtaagcagctgtgtatatctttccctgaacataaaggcagcttgctgtcattcatcactttgcatttggagaatttaaatatattcaggcagacattgtttagggacggggagggagggcttctgattttcttaccattttgcttctaacaatgactttgatttggaactaattggggtttaaagcacacgttaaccacatctctctcaagggcacttaataaactccctgtcccttgttcaaggagaccagccaggccctccttttgggataagagccaagagcttctgagtacctttcaccaagaaatgagaaccccatgcagagaatcttatctgccagaaaagagccactcctgtccctgagcagagctacttatttcattcctgggcagaatatgctcaagctttctggaggaggtggggttctcctggcaatctgggagggggctcttctgctgctcagctgctgggccatggcagccaaccatsaggtattcggtgaccaaaagaaagcggccagcacccagccaggtgaccagatgtcttcatgcctcagtttcctcatctataaaatgtaaagaataataaa

SEQ ID NO: 416085 - DNA, 590 bp, Homo sapiens
atggttagaaatgatgcagagtatttttttttaatttattaggcaacagctgtgtagatgtggctgccttttcaaatgatgccattcaccacagttatgtgctcaaccccaaacacgttttgagcacttggtctgtgatttgctcctagtaaggaaggaaattaattaggcacagcccctccctctcaggagtgtgaaagatggatgaatgaatgcattttttttattttggaatatgattcttaaacaatataattttccttccccaggaaagtaaaggcagcagaggcgaggctactagcctartacaggccctgttgtgggaaggttgccgggcaacaccttccctgtatcagtcaggaattgctgcataacaactaccccaaaacgtagtggcttaaaacaatatgcattttttattgctcacgagtctacaggtcagctggatggttctctgatctggactaggcttggctgatctaggctggactcattcgtgcatctcctatcagcagctggcaggttggctgagggctccctgatccaggttggcctcatccatttggttaactggtggttaactagcaatt

SEQ ID NO: 416086 - DNA, 485 bp, Homo sapiens
caggcaaagaccccatttgcataataaggttagaatggggtgaccagcctcccctggcacactatgtaaacgtcacacctggcygaaccaatatgtgggccttatggaaatcagacaccatctcctcaagcctgcctataaaatctggtgtagtccaagggctgggttttctttttcaggaatccctctctcacaagggagagacctgttctcctttctctttcttttgcctattaaccctctgctcctaaactcactcctcctgtgtgtctggtccatgtccttaatcttcttggtgtgagacaatgaaccctgggtatttaccccagacaatgacaccgcttcaataccaccttacccggctatttttttttcttttgtaaagatgagatctcactatgtcacccaggctggtagtatttcttaaataaagtaataagtggcatccttctaaagaaaaaaaaaactctcacagaccctcaggg

SEQ ID NO: 416087 - DNA, 485 bp, Homo sapiens
caggcaaagaccccatttgcataataaggttagaatggggtgaccagcctcccctggcacactatgtaaacgtcacacctggccgaaccaatatgtgggccttatggaaatcagacaccatctcctcaagcctgcctataaaatctggtgtagtccaagggctggrttttctttttcaggaatccctctctcacaagggagagacctgttctcctttctctttcttttgcctattaaccctctgctcctaaactcactcctcctgtgtgtctggtccatgtccttaatcttcttggtgtgagacaatgaaccctgggtatttaccccagacaatgacaccgcttcaataccaccttacccggctatttttttttcttttgtaaagatgagatctcactatgtcacccaggctggtagtatttcttaaataaagtaataagtggcatccttctaaagaaaaaaaaaactctcacagaccctcaggg

SEQ ID NO: 416088 - DNA, 550 bp, Homo sapiens
tttgttgcagcacttttcacaatagccaagatttggaagcaacccaagtgtccatcgataaatgaataaggaaaatgtggtgtatatatacacaagggaatactattcagccataaaaargaatgggatcctgctatttgcaataacatggatggacctggaggtcattatgttaagtgaaataagccaggcacagagaaacaaacttcacctgttctcacttatttgtgggatctaaaaatcaaaacaactgaattcatggagagagtagaaggatggttaccagacgctgggaagggtagtgcggagataggaggggatgattaataggtacaaaaaaaaattgaataagatctagtacttgatagcacaacaggataactatagttaataataatttaattgtatatttgtttgaaacacaaaggataaatgcttgagggcatggataccccattttccatgatgtgattattatgctttgcatgcctgtgtcaatatatctcatggaccctatacacatgttcacttatgtacccacaaaaactaa

SEQ ID NO: 416089 - DNA, 594 bp, Homo sapiens
gtttgtcaaccagctatttatttgagtaaaaattatatccatgaaaaatgactaggttaacacagtctcacatgactttttccttcagatgatcttaatagtttggtatgtagtggaagtacctcatgcatacttcccatttcatcacaagcaatattaaaaatatccattaaatattagcataaataacacttcatgaaaaatcactatttttttaaatagtgaaaattgggacacttttacaggagtcaaaaacgaataccaaaggagtagaatgaacaagacagccaaacagaagcctccagcgatcactcttccctccaccctaacaggaacaccaaattggacaaatatccacacaagaaagcaccttcatagaacctaaaatcaggtgagcaatcacagyacctggttttaaaatcatatcaaggaaaaggcactgaaggggctaggaaagacaatcttgaattgccagcatttcccttcctccatcccctggtggctgtatggcgtggagagagaatctgtgcacctgcaggagagaaagcacggtgattgtgggactttacatcggaactcagtgcttccctgtca

SEQ ID NO: 416090 - DNA, 595 bp, Homo sapiens
aaaaggccattgtgagttccactttcattcatttattaatattacactgtttaggaaattttcaggcatgctcctgtgttagagtttggaatttggaaaactaatttgagccagaatagttttcaaagatttttcttcatgaaagtacaacatgtctcctgcatcctttgtctagccactgatagaaacacctaccccacttcaactacttggtgtgaagtctttggatataagtccaaacttgttaccaggttcagcattcacaaasgtgccgccctctcccacccgtcacaacacctacctacttttgaagtatgcagttaggatatactgccaccaggtggtagattttggtatcattcccaaagtctcaactctaaattgcatgttttgaaggaaattcaaggtttatccaattaatgttcctactagtgctatttatgaaaatgtttcaatgaagagcctaaacatttaaatatgtcatagtaaaaaaattcacatcgattgtttttcttagaaaaacagtttctaatggaaacatattcttctcactagtgtttgttattaaaaacaacttaatctaatcctgttgtac

SEQ ID NO: 416091 - DNA, 595 bp, Homo sapiens
aaaaggccattgtgagttccactttcattcatttattaatattacactgtttaggaaattttcaggcatgctcctgtgttagagtttggaatttggaaaactaatttgagccagaatagttttcaaagatttttcttcatgaaagtacaacatgtctcctgcatcctttgtctagccactgatagaaacacctaccccacttcaactacttggtgtgaagtctttggatataagtccaaacttgttaccaggttcagcattcacaaacstgccgccctctcccacccgtcacaacacctacctacttttgaagtatgcagttaggatatactgccaccaggtggtagattttggtatcattcccaaagtctcaactctaaattgcatgttttgaaggaaattcaaggtttatccaattaatgttcctactagtgctatttatgaaaatgtttcaatgaagagcctaaacatttaaatatgtcatagtaaaaaaattcacatcgattgtttttcttagaaaaacagtttctaatggaaacatattcttctcactagtgtttgttattaaaaacaacttaatctaatcctgttgtac

SEQ ID NO: 416092 - DNA, 547 bp, Homo sapiens
ggtttattgaaagcctcccccgcagttgcatgaacttgttggctcrctgtgagggcactgcctgctccattcagatcctcccagccgcgacacagctgctgtgtccttccaacttccacacttcggcgtctggcagcctgcagtgtgggaagttgacttgagttttaggctgttactgtgggtagtttctagtaactattcaactcgagagactgagatctttgtgataccattagacaacaaagcatccctaaccttctgtttccttaatgatgtgaactttcctgcaaaaaggtgtatactctcagggccatgatgagtagtagtgatactttttcctatatttgtataatacatgatgaaacactttcacatggattatcacttttggtccttggaccagggcctagcacagtgcctgcaatatagtaaatgcatatatatttgttgaagacatgaataacaaataagaggcttttaaacagtaactgtaaacacagaatgaaaggaaaacgcaaagacacctttagccttcagatcttctgct

SEQ ID NO: 416093 - DNA, 547 bp, Homo sapiens
ggtttattgaaagcctcccccgcagttgcatgaacttgttggctcactgtgagggcactgcctgctccattcagatcctcccagccgcgacacagctgctgtgtccttccaacttccacacttyggcgtctggcagcctgcagtgtgggaagttgacttgagttttaggctgttactgtgggtagtttctagtaactattcaactcgagagactgagatctttgtgataccattagacaacaaagcatccctaaccttctgtttccttaatgatgtgaactttcctgcaaaaaggtgtatactctcagggccatgatgagtagtagtgatactttttcctatatttgtataatacatgatgaaacactttcacatggattatcacttttggtccttggaccagggcctagcacagtgcctgcaatatagtaaatgcatatatatttgttgaagacatgaataacaaataagaggcttttaaacagtaactgtaaacacagaatgaaaggaaaacgcaaagacacctttagccttcagatcttctgct

SEQ ID NO: 416094 - DNA, 625 bp, Homo sapiens
ataggtatgtacagtgggttcaatagcatttagaggcatttttgttattgttattgctgcggttgtttcttctcttagaagacagaagtcattttggagcagaattactttgctctgggaagcatccctcgagtggaccgtgttagttatataagaaagaaacaacattgctttgaaggaatgatagaatattacctttttctttgttttgacctgatgcttactgccttttccaattgctctatgtatttaaagcttctcctttgggagaaagtaaaccaatttgttcctaaacggaagagaattgagccctccagtctttcttttttgagattcactgcatttagccactgctgaagagatgtttccagcctaaggctgatgatgctggggaaagtataggaggccctcaagagggagctcacggtgaaggcagagtrcagccttctacactggttacctgggtctcaacattcagacctagcctgtcttgagggcagaagcccctgcaatcccaaccccctggcatggaggagggaagctttggaaactaggtaaatttaaactaaactagtgttgccttgggaagcaaagtataaaacaacagcgagcccagcagtctaat

SEQ ID NO: 416095 - DNA, 625 bp, Homo sapiens
ataggtatgtacagtgggttcaatagcatttagaggcatttttgttattgttattgctgcggttgtttcttctcttagaagacagaagtcattttggagcagaattactttgctctgggaagcatccctcgagtggaccgtgttagttatataagaaagaaacaacattgctttgaaggaatgatagaatattacctttttctttgttttgacctgatgcttactgccttttccaattgctctatgtatttaaagcttctcctttgggagaaagtaaaccaatttgttcctaaacggaagagaattgagccctccagtctttcttttttgagattcactgcatttagccactgctgaagagatgtttccagcctaaggctgatgatgctggggaaagtataggaggccctcaagagggagctcacggtgaaggcagagtacagccttctacactggttacctgggtctcaacattcagacctagcctgtcttgagggcagaagcccctgcaatcccarccccctggcatggaggagggaagctttggaaactaggtaaatttaaactaaactagtgttgccttgggaagcaaagtataaaacaacagcgagcccagcagtctaat

SEQ ID NO: 416096 - DNA, 644 bp, Homo sapiens
ttagaattgcagtaactcactctagacagctagataaagtggcatggaaacaattgtgttagacggttcaaaatgccactgtcatgatggcaaaggagctgctttcaaaactgcaatggcagagtttgactacaactattccccaaatattaggctaaaggacatttctgaattattatattaccttaaacatgggtaactaaatttaaacattaaatataagtagacatttgactatgtcttctatatgcctgagactttacctatttgtcacgcaaggtgtaaggtgacctacagtactagtgacacatagtttagcaatgagatctatcgatgacaacatacaactgaaggaacgacaaagagtgcaggatcccaaaaccccattgtcactccatgagaggcagtcatgcctttgtgatcagaatagggtakctgtgaagagccctcccattgtggaaaccctatccctgttgaacttcatatattcatgtatggcatcatatagttatatttatagcccaagagggggatcatccagtcttctgtgaaacaatataatgaaagctccccgagtcaggaaatagccttgaattgtttccttagaccaccacatagccagccaagcccaaatatttactgtt

SEQ ID NO: 416097 - DNA, 566 bp, Homo sapiens
gtaggtgtatattgggagaaagaggaaattcctttctgatgactctctgtaaattcaaatatatgatagcatctttaaagttagagtatcatgtgttaatctgttatttttcataatattcaggttttgcatatcctttggaaaaaatgagtggawgacagctatctccacccaaacttgtagagagctgttttcctaagacattaaaagtgagaagaggcaaaattttgcttccttgtaaaccttgaatttagcagcagacacataatggtttcttttgatggcttgaagtttgtctatataaaaatcattggttatgattttgttttttctgattgaggtggtaggcacacattatttacttttcccacagtcaatttacatcaagaaaatatgttgccctacaaagtttatttacaatgaaaattcacgtgcatggagagtacttcctaaaaggaatgcatatttagcaaatctggaaaaaataataaaataattgtataaattctaaatattataggtaagagattttaaaactcagtttattattttttgggtccactttg

SEQ ID NO: 416098 - DNA, 595 bp, Homo sapiens
tattttcctcaaaggtatgtgaaggtctcctaagagcagaaacttttttttttctggtagaagcagactttcagtctatattttcttccattcatttttgcacttctgatccagatcacacctttatttcactcatccaatctaytggacaactttgagcttttctagatttctttttgggggaccgactgtgactagatgtgtgttaaaatggacaattgttctgtttcctgaagagattccagtctcttactcttataggtgttctacagatgtagaattaggaaaagcattgtctacatgaagaaatttagaaaacacaaggaaaaccaatcagaaggccaaagttgaggaagactcatgtctaagaaaatgaaggtgtacatcaggcttaggtaagagaagtctaggatacaggaaagaggggattcaaatccaatccaaaagctgaacattgaccagcaccatactaaaataaacgtaccatatagaattaatgggaagatttttaatctcacatgtagtctaatgcttcctgcttctcttcaagttctaagaactaacaggcaagtacttttagttgtaggtgaagttt

SEQ ID NO: 416099 - DNA, 471 bp, Homo sapiens
ttaaagagttactcatctttctttgggaattccattttttcttgttttagatgaaaagtgccacaaatttaactttctcacagtccttcactgtatttactcaaagtattgtctagcatatgaaagccaaaacacttytaagccaataaatagcaaaaaactcaactgaaattagaaaattcatgataaaacaaaaaattaaatgtcaaataaaagttgctactcaatataacttcagtgtttatattgaacattgtgaagaatgtgaaagtgaaagtgaaaacacacttcttttttgttggggcaaggaggggtcttcttagctttagttacaggactggggcctgcagttagctgccagtatttaatctaattttatgcttatattcattttgtctgtcttccaaaattccagtgtattctgaaaacatttcctttttttttttttttttttttttttttgagacagag

SEQ ID NO: 416100 - DNA, 492 bp, Homo sapiens
tgggcaaaagactagaaaaggcaattcacaaaaaaaactatctaaatagccccaaaatatatacaaaggtgtgttagtagtcatcatgayaggcaataccaaatgttggagaggatattaatcaaatggaactcctattgttagcagaaattactaaagcttctagctaaagacacatatccgatgatcccgacaatttcattcttagaaatgtattcgacaggacacctgtgtttaccaaaagacaatgacaacattcatgtctgcaatagaataatagctcgaaactggaaatatccaaatgtctataatagtagaatggacataaaaattatggtatactgacacaatacattactgcttagcaatgagaataaatgaacaataactacagttaaaaacatggatggatcccatacacatacttgaagtgaaagaatcagatacaaaacagtacttataggaagattttactcaattaaaaaaattcag

SEQ ID NO: 416101 - DNA, 495 bp, Homo sapiens
actggtatatggacagcaagctgtctggatgaagtggcagaaggcaacaccaattccatgaaatccttggctctgggctgactcacagtgaactttgtggccactttcagttctccagatcagaaggacaaatagctctctctccttcagagatacatcaatctagagaaagagaaggaygacccaaagggcatttccctcaaaatctccaccaaggacattgagaattatgcctattctaaaactataacagtaatggattcacatacagaaaatgaagatatcaacatatcattaccaatgctaaggatagctggccctgagagaggttacaagttatgggtcaattctggcaaagaagaggcttcatgcctactcacggggcatgaagatctatatggaattaaaatgagccaccttcgagacactgcactgctaacaccagaaccaaaggactctaccacccttttcaaccaacaagcacccttcttcaca

SEQ ID NO: 416102 - DNA, 495 bp, Homo sapiens
actggtatatggacagcaagctgtctggatgaagtggcagaaggcaacaccaattccatgaaatccttggctctgggctgactcacagtgaactttgtggccactttcagttctccagatcagaaggacaaatagctctctctccttcagagatacatcaatctagagaaagagaaggacgacccaaagggcatttccctcaaaatctccaccraggacattgagaattatgcctattctaaaactataacagtaatggattcacatacagaaaatgaagatatcaacatatcattaccaatgctaaggatagctggccctgagagaggttacaagttatgggtcaattctggcaaagaagaggcttcatgcctactcacggggcatgaagatctatatggaattaaaatgagccaccttcgagacactgcactgctaacaccagaaccaaaggactctaccacccttttcaaccaacaagcacccttcttcaca

SEQ ID NO: 416103 - DNA, 495 bp, Homo sapiens
actggtatatggacagcaagctgtctggatgaagtggcagaaggcaacaccaattccatgaaatccttggctctgggctgactcacagtgaactttgtggccactttcagttctccagatcagaaggacaaatagctctctctccttcagagatacatcaatctagagaaagagaaggacgacccaaagggcatttccctcaaaatctccaccaaggacattgagaattatgcctattctaaaactataacagtaatggattcacatacagaaaatgaagatatcaacatatcattaccaatgctaaggatagctggccctgagagasgttacaagttatgggtcaattctggcaaagaagaggcttcatgcctactcacggggcatgaagatctatatggaattaaaatgagccaccttcgagacactgcactgctaacaccagaaccaaaggactctaccacccttttcaaccaacaagcacccttcttcaca

SEQ ID NO: 416104 - DNA, 606 bp, Homo sapiens
tgtctttttttctaccctgctttcagtacttgctaggagtaaggtgatgaagatccctttcttgctcagttaatgtgacagcagtcatgcctgctgacataaccgcggaatgccaaatgacctattcattcatttcattccttgcactagaacatcagagcagagaatccacaaatgcacccacatatccaaagctgatggcattttggcctctttctgcccccattactgtgaaaagatttctccaagggaacctgaaagtaatctttgtgggttgcagcaaacgtacacacccttttggaattttatcaggcaatcttagcacagggcagctcaaacaaagcagggccccacagcgtcagtggccttcacttaagcactagaggaacacrataccagcctgtaaccgtctccttacaggtgggtgttggctcattttaagcagatggtggatttatgattctaatgtgccgtatattgctcaatggacaaatatttgcactggaccagaataaataaaaaaaaattcttcagcttagcttccaaagaatatcagaagttttaggacacctcagcatttgaacattataggaagtgagtgaataa

SEQ ID NO: 416105 - DNA, 539 bp, Homo sapiens
aatctttgtgggttgcagcaaacgtacacacccttttggaattttatcaggcaatcttagcacagggcagctcaaacaaagcagggccccacagcgtcagtggccttcacttaagcactagaggaacacaataccagcctgtaaccgtctccttacaggtgggtgttggctcattttaagcagatggtggatttatgattctaatgtgccgtatattgctcaatggacaaatatttgcactggaccagaataaataaaaaaaaattcttcagcttagcttccaaagaatakcagaagttttaggacacctcagcatttgaacattataggaagtgagtgaataagccgcgactcctatctttcctttttcttctgcttcaaacctgccctgaaaaatgaaagaaaatgtttggaaggcacaagcatagtgagttatattcaggaactgctatgtttctcccattgagagaactcttaaaaatgtacagtataagcatattttagctctaacaaaaagattcaagttaaatttccaactg

SEQ ID NO: 416106 - DNA, 539 bp, Homo sapiens
aatctttgtgggttgcagcaaacgtacacacccttttggaattttatcaggcaatcttagcacagggcagctcaaacaaagcagggccccacagcgtcagtggccttcacttaagcactagaggaacacaataccagcctgtaaccgtctccttacaggtgggtgttggctcattttaagcagatggtggatttatgattctaatgtgccgtatattgctcaatggacaaatatttgcactggaccagaataaataaaaaaaaattcttcagcttagcttccaaagaatatcagaagttttaggacacctcagcatttraacattataggaagtgagtgaataagccgcgactcctatctttcctttttcttctgcttcaaacctgccctgaaaaatgaaagaaaatgtttggaaggcacaagcatagtgagttatattcaggaactgctatgtttctcccattgagagaactcttaaaaatgtacagtataagcatattttagctctaacaaaaagattcaagttaaatttccaactg

SEQ ID NO: 416107 - DNA, 539 bp, Homo sapiens
aatctttgtgggttgcagcaaacgtacacacccttttggaattttatcaggcaatcttagcacagggcagctcaaacaaagcagggccccacagcgtcagtggccttcacttaagcactagaggaacacaataccagcctgtaaccgtctccttacaggtgggtgttggctcattttaagcagatggtggatttatgattctaatgtgccgtatattgctcaatggacaaatatttgcactggaccagaataaataaaaaaaaattcttcagcttagcttccaaagaatatcagaagttttaggacacctcagcatttgaacattataggaagtgagtgaataagccgcgactcctatctttcctttttcttctgcttcaaacctgccctgaaaaatgaaagaaaatgtttggaaggcacaagcatartgagttatattcaggaactgctatgtttctcccattgagagaactcttaaaaatgtacagtataagcatattttagctctaacaaaaagattcaagttaaatttccaactg

SEQ ID NO: 416108 - DNA, 569 bp, Homo sapiens
aattacttaaaaagtcattctacctttaattactacaatttatacattacgaactgaaatagatgcttcatttaatctaaaaacagttacttgctgtttttcccttcgaaacaaaaggaaattctcagaggagtatagaaccaatctcttgaaacctttcttcctcagcggaccagaaagtcagttgtaagagcaacagcctgactaaaagaaagaatgtaaaccaaaagatgtggagctattgagtcagggattatggctacaatggccccagtagatcaaccatttactacctggttggtcactacaatgctttccttttataagcactacctaaaagaatcccaactcttattacaatgtgatcattcttttaatgaawatcaggaccttgaactggcccgatccagcacatgaaaatcactaaacacatgaaaatcactaagttaaacctgtaggaacatgactgaactctgaaaattggatacggtggatgaaaacaagaatcagcaatgtttagcactttcaccactaccaatgatgaaaaaaactgtaagttgatacgaaag

SEQ ID NO: 416109 - DNA, 444 bp, Homo sapiens
acacacatacaaagtagagtgagccaagaaataaaacagtggtgggtggtgggagtcgttcttgttttggggttattttttttaactgtctttctatattacctaaagctagttacctttggtttaaatccttccctattccaaaagcttctatatctgagaccctgattttttcttaacctttagattcaaaatttggaattaagagtgccaactttaccattttaccatggagtaaatcrtaatttaaagaaaaccagcagttaaaatatttctgcagctagcaacaattaccaggagatctgtttctgcagttacctctagatcatctgacccaggatggatggacttaaatagaatcaccagaggccaatcaagtgctacctggcttatttaaatacactggctgcttcagactaatgcctgaaaagggaagtaaaaatt

SEQ ID NO: 416110 - DNA, 444 bp, Homo sapiens
acacacatacaaagtagagtgagccaagaaataaaacagtggtgggtggtgggagtcgttcttgttttggggttattttttttaactgtctttctatattacctaaagctagttacctttggtttaaatccttccctattccaaaagcttctatatctgagaccctgattttttcttaacctttagattcaaaatttggaattaagagtgccaactttaccattttaccatggagtaaatcataatttaaagaaaaccagcagttaaaatatttctgcagctagcaacaattaccaggagatctgtttctgcrgttacctctagatcatctgacccaggatggatggacttaaatagaatcaccagaggccaatcaagtgctacctggcttatttaaatacactggctgcttcagactaatgcctgaaaagggaagtaaaaatt

SEQ ID NO: 416111 - DNA, 644 bp, Homo sapiens
acaattggaattgtaataactgctttataatattattgtaaggattagaaataactgattgtacatttctggcacacagttggcattcaacagcttggagtaatattattaaagttctttgtgttatttctccataattctaaactttagtcttmaactgagttgtttccgtctttgcaaggataaaaatctcagagaaaaacttttagagttttagacaagatggagtagatatacttatttctattcttctcactaaggacagctaaaaatcatgggtattataaataaaacaaacataagaagactcttagagatagagaagaaggcaaaccagagaccttgggactggagaaataacacagtggtgagttccctgggtttggttttggttttgttgttgttgtttgcctcaaatattctaaaatcgagacagaagaagctggcaacctgaaacttccaatgggcacagacaaaataagctccaataaagtcacgctctttctaaccaaagaaacaagagagcacagcccagaaagacaaaaaaacttttggacaataaccacactactccaaccaaacgttgttggaaaagttatggctttactaccacttttgtcagcaaaggccaagtggaaagccag

SEQ ID NO: 416112 - DNA, 557 bp, Homo sapiens
atcagatctgaccctgggaattctcctactgtctttcactataacacacagcatttatttttttatttttatgggtaaataataggcacacatatttatrgggtatgtgcatagtgggtgcatatatttatatgcctagtaataggattggtggatcctatgttagctctatttttagttgtttgaggaatctccaaactgttctctatagtggttgtactaatttacattcccaccaacagtgtacgagggttcccttttctccacatccctgccagcatttgttattgcctgtcttttaacggggaaaaaagccactttaactggggtgagatgatatctcattgtagttttgttttgcatttctccaatgatcaatgatattgagcaccttttcatatacctgtttgccatttgtatgtctttttttgagaaatgtctatccagatcttttgcccatttttaaagcaggttattagatttttttttcctatagagttgtttgagcttcttatatatgctgtttatcaatctcctatcaaatggatagtttgcaa

SEQ ID NO: 416113 - DNA, 540 bp, Homo sapiens
tgttgaataacagtgcaaacatgacagtgggcatccttgttatgttccagatctcagaggaaaggctttcaggttttcccctttcagtatgatactagctgtgggtctgctgaatatgacttttattgtgttgaggtatgtaccttctatgcccagtttttttagggtttttatcattaaggaatgttggatcttataaaatactttttcaacatcagtcraaatgattatatgatttttgtccttcatgctgttgatatgatgtatcacattgatttgtgtatgttgaaccattctcacatccctggaataaagcccactggatcatgatgaatgatctttttaatgtgttgttgaattcagtattcttatattttgttgaggatttttgcatcaatattgatcagagatattggcctgtccttttctttttttgacgtgtcttttttttggttttggtatcagggtaatattagcctcagaaaaatgagtttggaagtatttcttccctgtttttcagaacagctcgattaagattgg

SEQ ID NO: 416114 - DNA, 544 bp, Homo sapiens
gatgaatcctcccaggactgggtcattcctttcaaagcagtgcattaccttctggcccatggtatatttagaaatgtcatcttggagctagagcctggaatgggggcctcaggaccatggtgccctatctactgtggctgaacaggtatccaagttgcaagacaaagtcctctttactctcccctctcctcttctaaaacagagggaaggagtctctcctggagctatgagctgcactgctggggttgggggagaggtggtgcaagcactcccttggccaccctagctggtatctcactaggtcacgtgtacccaagtccactccgccacaggaattgtagtccttatggcctagactgcctttcaagtttattcaagaccccagagcattgtagtccactctggcaggacttgctagaacccaggttctaactgctgtgatggatgatttgcctctggctyaggctgacctaaatgctccttctgtgcgtgccaagtgagttctgtcctgtgttgcttttcactgtgacagggtagcactgag

SEQ ID NO: 416115 - DNA, 580 bp, Homo sapiens
aaaaaaaagtatatatatatatatatatatatatatatactttttaaaaatgtatatacgtatatatacatgtttttgagtcagggcaataacagaattcttgtgcattagtctagatcttctgagaagcagatgccaaaactgggttagatgkgcaagcaattaattaggagaaatgtccatgaggggaaatagggagggaactcttggaggctgggagagctaaaagaccacagtgcaggtttgacatctgtgaaggagagagagaataaggcaagagaagaaaggaaggggagagagaggagggaaggaagggtctatgactgcagtgcagttttaaggagatttggcaaggccaacagggagtccaagccagatgtcagagaaatcccacatgctctcctggaatgaccctgccttagtgttcctgccacgctgtcacaggctggaaatatcagcacaaatgctgtgatggatttcagagtataacatgggactggcttcatttatgctccccacaatagatctgagaagtacattttcttgaaaaataattctgattacattttttccctgtatt

SEQ ID NO: 416116 - DNA, 567 bp, Homo sapiens
ctgcctgccacctactcagtggggacttcctagaccactaggcatcgtcattccctccctcagcctagcggcaccaaggcttagtgctttcttcattctgcctggtttcagagctggtttattcctgtctgtgtagtcttccatgaggcctagaacttcctccaaggcaagaatgaggcctgattgcgctgcctctatggaacttggcacaaggctaggtaaatggcacatgctcaattagtgctcgatgatggggagtctatgctgacctttcttacacagtggggctcagggaatgttcactgagtgagcaaaggaaggaaggagggagtgaaaaacttcctttatagcaatactactacatagtctaatttagtctaggtctgtctcccctcaccctcaatgtttcttgaaggcaggatctggcctgaatcttttctctgtccccagaactcagcacagggcctggcatggggtgggtggcaggagggggcttgagygagagtacctgtgatcttatagtcaactctgagctcatcttacacagtggtgctcagtgtggctatg

SEQ ID NO: 416117 - DNA, 668 bp, Homo sapiens
atttacctggtcaggttctgctgtcactgtacttttgtattagatactagatcctaattttgtgatggttgtatctacgattacttcttgtagtaattccagttttatgctgtattatacaaacttgacactcgacaattcagagatgattaccctcctttgtttttctcatactttgcatgcccatctttaaaattcagacattgagagattagttctgagtcatcaaacattgagtacctactaggtgttttaggtgaggttatagaaaacattagttatttgttttgactggaaggcatgtaagtgatataaattcgtagcttttattactactttgaactatttatactaatttgtatgccatcacagaggttaatactcttgcaaaattgcctccagttagaactgggaaatcatttttctcctttcatgtgtagattatcttcccctcctcccttttggggggaaaaatacaatctccctcctttttgcttatatattttcctgaagtaagtataaacttgtgtctttaggtgagtaacttggtagaacctatggagttgcttctagtccagcttttctgtgtcaatatcaggatagttyccaaacataaaatacagtttattggttattattgataaaaaggatccaaagtgcttattgtg

SEQ ID NO: 416118 - DNA, 668 bp, Homo sapiens
atttacctggtcaggttctgctgtcactgtacttttgtattagatactagatcctaattttgtgatggttgtatctacgattacttcttgtagtaattccagttttatgctgtattatacaaacttgacactcgacaattcagagatgattaccctcctttgtttttctcatactttgcatgcccatctttaaaattcagacattgagagattagttctgagtcatcaaacattgagtacctactaggtgttttaggtgaggttatagaaaacattagttatttgttttgactggaaggcatgtaagtgatataaattcgtagcttttattactactttgaactatttatactaatttgtatgccatcacagaggttaatactcttgcaaaattgcctccagttagaactgggaaatcatttttctcctttcatgtgtagattatcttcccctcctcccttttggggggaaaaatacaatctccctcctttttgcttatatattttcctgaagtaagtataaacttgtgtctttaggtgagtaacttggtagaacctatggagttgcttctagtccagcttttctgtgtcaatatcaggatagtttccaaacataaaatayagtttattggttattattgataaaaaggatccaaagtgcttattgtg

SEQ ID NO: 416119 - DNA, 572 bp, Homo sapiens
ggatcggtcctgtttatcagcacgttggtcctttcacaaatggtggtgaatcacctttaaaacacccagtgatggagaccttccaatcaccctaactataacggacgttcagagctcatgtggataaacccaaagccccaaacgccaaaatgcaacagggacgcatctcctctgctgatgggatgccaaggacaagccccgcagggctgggagctggmgaagtcagtcctgacattcagcttgtccacaagctcaaaaggaaatgacagtaatggatatatttcaaactagcacttctagagtccagatcggccacagtgtcagcatgcaggctcaacacggggttagcactggcgggaggaggctgggttgactgcacagaggcctgacacacattgcttcctttatatacaagagaatgaaatatacactgggaacaccggctgcacatttggtgggggtgtatcttacaaggctaacgtagcacatcatcaacctcctgctcgtggcaggaaggtcacggagccacccccacgatgggagagggatgcgcgcaggcccacagaaccctc

SEQ ID NO: 416120 - DNA, 480 bp, Homo sapiens
aaccagctttgttcccctcgccctttactgccacacaactgtcagaacatttgccaggatttgcaacacaaagaagtatcacagcacattaatccttgtgacggagacaatgctctattaatattttatggcaaacaaatggactaataaaaaattgatatgcttctcaccaggaagagtcactatattctgatttgaaggcacctttggcctaggactcatggaatgtaataacgtttcctcagccaggctgtgctattgcatgtgctcccccacgtaatccatggcagtccccaccctgtgctgaagttagtggcttgcccatctctgcaccgtcygcacctagaaccgtgtctcccacatgccaagccctgactagatgcgcttggatgcatcagtgcattggtaggcagatatagtgctttagaataaagagaaatttggtagcatttcttccagctatcttcgcttcctgttcat

SEQ ID NO: 416121 - DNA, 592 bp, Homo sapiens
cttctctcgtctctgcccgtgcttccttctaggcagcagtgccttctgagtacagtcatggtggtgccaatgatgtccctgtatgacacgagatgtgtcacccatgcagacaccaacaggtttacagggagcagcgcgggtcagtggsgtgtggcattattgcggctcgctgagcagtgggcagccattcccgcagcacaggattctgctctccctccacttccctttgtgaggcatggacgcctcccatcagtccaacctgttctcatgactgtgccttctgttgacgttgagtgttctggcattataacgttcctgtagagtctccctctgatcaatgcttccctttgtcccctcgagagacagtcttactcggggcatgggaatttgacaggcatctgcaggtcccacgccttgggacagaacacacatgagtagaagcacttccttctccttgctctttgtctcaaggagctccccgcctggccaacccaggactgtgaggaagaatggtaaggcctggaccttgtgagggaggaggcaggaaccagaagggctggaaaagggcacaggacaggctgacaaacatggc

SEQ ID NO: 416122 - DNA, 568 bp, Homo sapiens
gtcattccgggagaccttacattttctttcttgattgcatgcagacgaaatgtgtttgctgagagagtaagtgcagggtaccctgtggcttcgccactgcccccattgtggacatggaatcttgcaaccacaggccccatgtggctctcacacacgtcccatggtagggaataagttctcatgagatctgatggttttataaatggcagtttccctgcacacgcttcagcgtcctccagtgtggactcaaagaccagttacaacatcattaaaaaataaaagtgttctatgtaaagcaagggctaggcagagacgttgaattatatttaaggacaaaagtgacatatatttttttcttatgattgtaaataatgaccaaatcccatcattataaatgcctgtccctgcctttgggccatgaaacagcaaagcaggacctttgtwgaatgttgctggcaggatgtgccacctgtcagtgccagggccaggatggagagcaggggggagggcatggtccctgtggacatgcaagccaggttctggggcaggccaggctctaggacgggcc

SEQ ID NO: 416123 - DNA, 577 bp, Homo sapiens
ctcagacagcagctaggggtcctgcttagcggatagagctttggaaagaggaaatattagaaatttggttgagaattttctatgaagttcagtgctaagagcagagaccacaacttaggctttgcagccagcattcccttccataaacttcaaacgtaagcctgatcagaacaaggctagcaggaagatgtgctggtggggacaggctaggtcctgctgtgggtagcaaaaaacaarcaaaagcaaacagaacactgcctctaatttaaaacagcaaagtgtatttctcgtcggagatcactcaagcccactctagatcagggatggggaggaggtgaggctctttccctcacggtcactcaaggtcccaggctgctggggctgtcctcttaggcatcgcagccacactagtggaaaggggagtgttccggaggacacaagctggggaataaatgcttggcctgggaatgaccctggcacttctacgcatgactcattgtccagaacacctcatatggtcccaccagggttccaggaagtagcactgagccattgtccagaagagggggaggccaga

SEQ ID NO: 416124 - DNA, 609 bp, Homo sapiens
tgcttcctactgaaacattttttgtatgtttaaaaatagctaaataaacttccttctcctgaagccgaggatggaattattgcagtcacttgctgctctgagtgggaacgggacagtctgtgttcatgaatcccttacagctctgggctctcacccccgcccctttcagtgttgagccatgattagggagctactttccagactttaagaagtttggtcttagacttagcagattggtttatcaagacaggcttctccttctccaagttgagtggaaccaaagtattattacctgagcctaaaatacagtgactcaaatctgataactattcttcttactattaaatattccccaagatcttctgtcatcaccatcattgccatcattatcaaaatcacaggagattgaaatggcagtaagggaggtctatggagtatggaaccgtagagctgggttcaaacctggactctgccacctacagcttygcgaccttgggcatcttggttaaccttgcttaatcctccacaccctcatcctgaaaatcggaggaataacagtatggcagtccccccttatccacagttctagtttttgaggtttcagttacc

SEQ ID NO: 416125 - DNA, 559 bp, Homo sapiens
  misc_feature (1)...(559): n = A,T,C or G
ggaggttggctttgaccgggttcggcctgagatgctgtgtagacagtgtcagcaaatggatctgaaggtgnnnnnnnnnnnnnnnnnnnnnnnnnnnnnnnnnnnnnnnnnnnnnnnnnnnnnnnnnnnnnnnnnnnnnnnnnnnnnnnnnnnnnnnnnnnnnnnnnnnngggtaggcgtctctcccggatggctgagtaacccggcagactcaccctaggatgtccttgttcaattgcctctatacaactagcttctcgatggttctatggcctctttttaagagctcactggttcccttattaattaatgagtttaataaagtcttggacacatgttgattgattttgtctgagaatcacaatttgaccatttaaaaattatatggtgaccackcccagtagaaatgctggttgggtggttggctttttgaacctagagtcctgacccaggccaggttgaggtacacaggggagagttgtccacatacaaggggtatgtatagccacaagatggaacgattggaggaaccagccctatgatccttgccttatctcat

SEQ ID NO: 416126 - DNA, 505 bp, Homo sapiens
caccctcagcatgaccaaaggacccctgtggtccccagggacacagtttctcaagagaggcctgggaccaacatgtacagcattatttttgctcccactgaatttgctgtacaaacaactggcaattggggtatgttggctgaaataatttcatcacttaatcctcaattttacgtgtgactggttgattgcacacagatcctgtgacccctgagtctgtttcctagtgattgcccgggcttatcactatattgtttgctttctgctcttccccggggtttgctttccaggggcagttgtgtgacctgcctgcctcttggtgacctccttttcactctggtgaacactccttcatctccccgttatcattgatttctcrggtattttccattctgtaatactttggctgctgtttcttccttgtttttataaaattcatctgctggttgctgtttacaaaacatctcctttaaaccatcaggcacgaaggcaggattgctgccca

SEQ ID NO: 416127 - DNA, 518 bp, Homo sapiens
gtggtcacttcccgtaagaagaaaacccaaaggaagacttcatgaatgttttaagaccagcgtgttagtggtctctcattttgttcctttcatttgccccaagcatgtcttttaagatttgaagaagactcttaattctggcatttctgagatttgctgggatattagtttcctgcggctgctgtaacaaattcccacaaatggttgcttaaaacaacagaaatttattctctcacagttctggaggccagaagtctgaaattggtatcaatgggttgcaattaagggctgtagggcagcggtcctcaacctttttgggaccaaggaccagttttgtggaagacagtttttccatgggcgtgggggtaggggatagttttgggatgatccaagcgcattacatttattgtgcactttatttctattattattacatggtaatgtgtratgagataattatacaattcaccatcatgtagaatcagtgtgaggcttcacttgtttttttgcaactagat

SEQ ID NO: 416128 - DNA, 553 bp, Homo sapiens
caaggtactatattgatcagagttctccagagcaacagaacagagagagagggagaaaggagaaagagagaaagagagagagagattattatttcagaaactagtaacacgattgtggaggcttggtaaatccaaaattttcaaggtaggctggcagactggagatcgtgggaagagttgcagttcaagtctgaaaataatctgctggcagcatttcctytttctcaggggaggtcagtctgttctattaagactttcaactgatcagatggggatcaccctcattatagaggatgatcaactttactcaaagtccaccaatttaagtgttaatctcattcagaaaacaccttcatagaagcatcagaataatgtttgatgagatatctgggcactactgtattgtcaagttgacaaaatattaatcatcacaggcaccaatatacctagcacatccttcactatcagttcttcatagaaaatcactcagattctactgatacaaacaggaagagaggaactgaagcaaggaaggtaaatgacaattaactca

SEQ ID NO: 416129 - DNA, 510 bp, Homo sapiens
tcactatagaaaaagatatatattaataaatctatatgaatataaatttatctgtgtcttttatttgtgcattccttaagttccacctatataaagaaaatgtagatcgtgactactcacatataacatcaggtctatgaattagaataataaacagtgaaaaccatcaaagccaatttccttaacaatgtttagatcttacctatttctgtaattgttttatcagtcatgccctaactgtaataaactcagtggccatttgtacatagatatatacacagatactgctatatattactataagtacattttaaaaaattataattgacaattccatagaaaaakattttaggctaaatttgctacaaaattagttacttcttgaattgacctccatatagccagtttgaattgaaagcggaattcatgcaaattataaaatttattttaatataaaacaacgttaaaagggggtacttatccatatatttaaggaaatagaataaaagg

SEQ ID NO: 416130 - DNA, 510 bp, Homo sapiens
tcactatagaaaaagatatatattaataaatctatatgaatataaatttatctgtgtcttttatttgtgcattccttaagttccacctatataaagaaaatgtagatcgtgactactcacatataacatcaggtctatgaattagaataataaacagtgaaaaccatcaaagccaatttccttaacaatgtttagatcttacctatttctgtaattgttttatcagtcatgccctaactgtaataaactcagtggccatttgtacatagatatatacacagatactgctatatattactataagtacattttaaaaaattataattgacaattccatagaaaaatattttaggctaaatttgctacaaaattagttacttcttgaattgacctccatatagccagtttgaattgaaagcggaattcatgcaaattataaaatttattttaatataaaacaacrttaaaagggggtacttatccatatatttaaggaaatagaataaaagg

SEQ ID NO: 416131 - DNA, 488 bp, Homo sapiens
aagccatctgctacttgtctttattcttagatcccccgaaggcaaccaaactaacttgttccatccattatgttcaaaggagaataatmtgtagtacttataaacttgaagttgcaactgatgtggcaatattagtacttaccattcatcactgaagtacatgttctgtgtaagtaaccctgctttatttttctcaatatgaataaaatttacatatttgatatgatccaataatatagttcaaaaatgtcttttaaaaaattaactgtctggaaacataagctgaaaaatatgtatttggaacatataggtgcagaacaatgaattccttagatatgcagtctatttatacaattcaaagaaaaaaattacagaccctataatgcagagtcgtaataattatacttttagtcataatgtggaaattaaaatacattaacatcttttattttgcctaattatttgatgttaaatgtgtgtgtgtgtgt

SEQ ID NO: 416132 - DNA, 488 bp, Homo sapiens
aagccatctgctacttgtctttattcttagatcccccgaaggcaaccaaactaacttgttccatccattatgttcaaaggagaataatatgtagtacttataaacttgaagttgcaactgatgtggcaatattagtacttaccattcatcactgaagtacatgttctrtgtaagtaaccctgctttatttttctcaatatgaataaaatttacatatttgatatgatccaataatatagttcaaaaatgtcttttaaaaaattaactgtctggaaacataagctgaaaaatatgtatttggaacatataggtgcagaacaatgaattccttagatatgcagtctatttatacaattcaaagaaaaaaattacagaccctataatgcagagtcgtaataattatacttttagtcataatgtggaaattaaaatacattaacatcttttattttgcctaattatttgatgttaaatgtgtgtgtgtgtgt

SEQ ID NO: 416133 - DNA, 462 bp, Homo sapiens
cgtttaactggcatatgaccttcctccaggaatgctagactagtaagggaagaacacttcaaatgagcagacatacaactccagtaaacacacgcacatactcagttcccaagtgctatcatgccactgcacatgcagrcagcctaccccacgggaagaatcaggggagaaaatggcaagaccacagaagtacgccaacatataaagcccaaagtcaaaaggtcaaaccactcacttgatctttcaggtagctgcttggccctcttccatgcatactgtacttcctgtcattcctgtcttaaaggtttttaataaactttcacttctgcgttggtctctccttctgtcttatgcccctcagtccaattctttcttatgagaaggcaagaattgaggttgctgcagaacgtatggattcgctgctggtaacgtaggcagatctttcagttggctcttatttcc

SEQ ID NO: 416134 - DNA, 607 bp, Homo sapiens
atttgagaatgtgtatatatttctaacccatacagagtcatgaaacaaaataataaatttaagtaataaaacttaaaagtaaaaattatgataaaacgtggggttttccagaattatctagttataataaataggaaactagtactaacataaaaatattagaaaggttatataatggtacagaatcttaaatgagaataaaaaatgattatgttattaataaaatagtggtaagttaatatttttcgtttctgtgcacatacatttagaaaaattgagtgaaatcagtcttaaagtaaaaatttcaaaaatatatagcagaaaaattaaacatgttattttatataagataatctgtaaggctttaagtaaatgtaccccstccagaaaccaaacatggaagatcccaatacagctcaatgaacttttctataacagatgattccagttatttaaattcagacagagcatagggacacacttggttcatgagaagagtatactagtgattttaaatttatataatgaaggaaaacatagaagcttatgggccaatattattcttaaagatcaacccaaaataccacataggaaaaaaagatgtctc

SEQ ID NO: 416135 - DNA, 633 bp, Homo sapiens
gtagaaaattattatcatttctttcattaatgattgatagaactcccaagtgaacaattctgggactggtactttctgtttgaaaaggttattaattaatgattcagtttctttaaaatatatataggttcatttattcagaggatctctatgtcattgtgtgagttttggtagattttgtctttcaaaaatttatttcatctaagctatcaaattgtaaggcagagagttgctcataatatttctttattatccttttaatgtccgtgaggatcagtttcgttagccctttcttcaattctgatattaataatttgggtctttactctttttcttccttagcagggctcaaggcttatcaatttcattgatcaacagtcatacttttagtattatgttttacttatgattttttatgatayccatagctacaattgagatggtgatgcataccctatagaatacacagaaaatgttgtagatttataagaaaatcccaggtagtgggatttcaactaaactggaaaaaaaatttataatctttagacagaaaatgacatgaatctactggttatatttttcaaagtgtattttcttacattgaatataattaattgtataaagaatctgtac

SEQ ID NO: 416136 - DNA, 382 bp, Homo sapiens
atcttttaattttaaaaaagaatgagattctgtcatttgtaacaacgtggatggaactggaagtcattatgttaagtgaaataagccaggcacagaaagacaaacttcacaagttcttacttatttttggaaactaaaaatttaartaattgagcccatggagaaacagagaagaaggatggttactagaggctatgaatgatgcaggggggtgagagatagtggaagtgataaatgggtacaaaaatatttagacagaataaataagacctagtatttgctagcacaacaggtgactatagttaaaaaaatttaattatatattttaaaataactaatagagtgtaattggattatatgtaacacaaagaataaatgtttg

SEQ ID NO: 416137 - DNA, 590 bp, Homo sapiens
tgagcttgccttcatgtcttcctcccaagcttacaccataacttctgggactggatcctagggaaaacatggttcccatctgtcatcctaactctagataaacgtagacataggcagcactaatgtctacaatgcgaaaactgactttagtaaatcctcacttaaagtgctatttgtagtcttgctttgatgaataactgctacctaaggacagtatatcttagcgagaattaacactctgtcaaattcttcagttggctagatactgacagtaagtagagagaaaacagagtcccttctgacaaatgaaattcaagtcctatttcttactggaaagcaagaatgattggagataatccaacacttcaaatgattatcactgataactggaggtaaaaatgaccgtgcttcaaaatgtgttcccagarctctacttttagcttcagtttagattttagtcctgccatattatattatgatcatgaagtcatgagttattttattttaaagaactcttgaatgttccaagattctctagtgatgctgagttttgttactccaggatatgtccatgaagcaaggcaaagtta

SEQ ID NO: 416138 - DNA, 591 bp, Homo sapiens
tcttattcgctcagaataggcaaatgggtttctagaagagaaactggattgttatggattaaggtgatggatggatcatatatgtcaagagtctactttagttgcaagtaaccccccaaaatcaaattcaagtgaaatttaacagatattattaggtctctttctccacatctcagctttctttctctttttctgctgacttcaacttctcttgttgcagatggcttctccatggaagcttccttccagggagccacaaggagcacagatgcaggcaagtccagtttattttgtcctcactggcacatcttacagcagtggttcctaactagggttaattttgcaccccacccccatggaaatttgtcaatgtctagaaatatttttggttgtcacaactggggcttgttactggcatctattgggaatactactgaacatcctagaatgtacaagacagctcccataacagacaattatccagaacaaaatgtcaagagcgctgatawtgagaaactctgtcttagaacatctctcctgaaagtgctggtggagatgtttcaagaggactccaatctcccaagttttggt

SEQ ID NO: 416139 - DNA, 453 bp, Homo sapiens
acaataatagccggtgtttgatataagtttgtcctgcccagtaaactccatgtcaacaggattattccctgttgttagtttgtgcatcttcaggcagggcccacccagcatggggacttcacagagcagacactccataaatacttgtgggatgagtgaatcagtgcacacagtaggctcaacaaacmtttgattgattccatccacttctctccagtttataatagtattgtcaccaggtgcagtggttcaagcctgtaatcccagcactttgggtggctgaagcaggtggattgcatgagttcaaggccagcctgggcaacatggcgaaacctcatctctacaaaaaataaaaaattagttttccatggtcctcacaccctggtcagccagttgctcctcgtagtcttcccaaaggagatcattattccctacgatggccttcagctcctc

SEQ ID NO: 416140 - DNA, 398 bp, Homo sapiens
ggggacttcacagagcagacactccataaatacttgtgggatgagtgaatcagtgcacacagtaggctcaacaaacctttgattgattccatccacttctctccagtttataatagtattgtcaccaggtgcagtggttcaagcctgtaatcccagcactttgggtggctgaagcaggtggattgcatgagttcaaggccagcctgggyaacatggcgaaacctcatctctacaaaaaataaaaaattagttttccatggtcctcacaccctggtcagccagttgctcctcgtagtcttcccaaaggagatcattattccctacgatggccttcagctcctcatgactatcccactcactgctgtagatttcctgcagggtttctgatactctttttg

SEQ ID NO: 416141 - DNA, 589 bp, Homo sapiens
ctatacatgtacatttattcacccatttgccaatgtgggtctaaggtcttttcattgagcatgaattggctaatcatggctctgcatcattttcatgtgtaagctaaccccatattgtcttctctatgattcccagtttcatctttaaagtacaatgaggatttaaagcctcctgcaaaaacaaaaacaaaatgtgagtgtagaactcttctagagttcttttatagytgccttccccacacctcattcatttaaacatttaccaaatttatttttccttccaaaatattcaacttatatttttattaacataattactactttttcatacccatattttgtcagtttgagtaatattcaatcaaattatattattatgatgaagggaactagcataaccaggtttgggagtaaacccagctgaatctttagtgaaaatacagctccacaggtgggaacagaagtaataggttgtgtccagaagcatggcctcctgatgtggagaattcagcctcccacaagtgttagtcagcatttgttacagagggaatggagagtggttgttaattttgtgaattggttcagtgaa

SEQ ID NO: 416142 - DNA, 589 bp, Homo sapiens
ctatacatgtacatttattcacccatttgccaatgtgggtctaaggtcttttcattgagcatgaattggctaatcatggctctgcatcattttcatgtgtaagctaaccccatattgtcttctctatgattcccagtttcatctttaaagtacaatgaggatttaaagcctcctgcaaaaacaaaaacaaaatgtgagtgtagaactcttctagagttcttttatagctgccttccccacacctcattcatttaaacatttaccaaatttatttttccttccaaaatattcaacttatatttttattaacataattactactttttcatacccatattttgtcagtttgagtaatattcaatcaaaytatattattatgatgaagggaactagcataaccaggtttgggagtaaacccagctgaatctttagtgaaaatacagctccacaggtgggaacagaagtaataggttgtgtccagaagcatggcctcctgatgtggagaattcagcctcccacaagtgttagtcagcatttgttacagagggaatggagagtggttgttaattttgtgaattggttcagtgaa

SEQ ID NO: 416143 - DNA, 525 bp, Homo sapiens
cttaccgctggagaagatggaactgtggctgaggcatcctgtactcatcctttctctgccctttcttggaggactaatcttcccaagacaaaagacatctttatccatccctctgcttcttcttgtgttgcacagtgatatccaaatctcagtagatacagaaagagaagacgtgataatcggagtagggtgtgacaccaaactggttcattttgatcagaacaatttccatgctgtgcgatggtggtasagtgcagtggttggcttcgggaatcacggaacggggagcatatctaacagtattggtgtgaactcaggcatcatctgttacctggtgtggattccaaaatatttactatttcagtccttggtcagggaggaccaacacctttctcaaatgtttacagccagaaagagtgttgccaggggaaactggtaaatgtttaatgacaaggtctttgaacaaagaaaaagccttgatgtatagcatttgccaacttctcccagtatggctgatttcatgct

SEQ ID NO: 416144 - DNA, 525 bp, Homo sapiens
cttaccgctggagaagatggaactgtggctgaggcatcctgtactcatcctttctctgccctttcttggaggactaatcttcccaagacaaaagacatctttatccatccctctgcttcttcttgtgttgcacagtgatatccaaatctcagtagatacagaaagagaagacgtgataatcggagtagggtgtgacaccaaactggttcattttgatcagaacaatttccatgctgtgcgatggtggtacagtgcagtggttggcttcgggaatcacggaacggggagcatatctaacagtattggtgtgaactcaggcatcatctgttacctggtgtggattccaaaatatttactatttcagtccttggtcagggaggaccaacacctttctcaaaygtttacagccagaaagagtgttgccaggggaaactggtaaatgtttaatgacaaggtctttgaacaaagaaaaagccttgatgtatagcatttgccaacttctcccagtatggctgatttcatgct

SEQ ID NO: 416145 - DNA, 555 bp, Homo sapiens
gacatataatgctgaggattgagaagggaattggagttgggggcagagtcccagggctgggtgtcagtggagttaaagggaagtcagactcagagccaaaccccatcctgccactccagagtcccctgcccacaattcttcctacccaacatgtctctgtaaatatgtcctcygaccagcactctaccaagaagctttccctggttccctgacatgaattgcagggcgtaggctttgcttgagagattaacatcataagcatgagtttttccttctttactggcttcaggtgagactcagcacattcccaaatgtggtgtgtggtgtctatagggagaaactccttctgtttgagaaaagcagatgaaaaagtaaataaaggggactttgtcttgtactttaggtacccgcttggccacaggtgggatacagcaccaagtgggctcttggggtccctgattctaccagctaggttcttggggtcttgcactttaggtacccacctggccacagggggatacagcaccaagtgggctcttggggtcctgattggct

SEQ ID NO: 416146 - DNA, 509 bp, Homo sapiens
gtaatgcaccaccatgccttcctagctgcaggttgtgcaacttgtaaacgtcgtttttcattgccttcgaattgtaaaatgtttgtctctcctgtggcatcacctctgaattccaggtggaaatarggagagggcaaaggcttgctagctgagtcttccatctttatagagcgttcctgggagctccacccggtgacttgtgctttcatctcgttggtcagaacttagttacacagacactgctagcttcaagcaaggctgggaaatgtagcttatcagctgggcacattcaaaattagaattctgttggtaaggaagaagaacgaatattgacagacacccagcagtttctgccacattcctgttcttagccgttttctgtttgtaatgatgagatcagaaacatctgattttcttattcagagtaatattaaggtacattcacactcttcaattcaatgccatcctttttgataggaaccagtttatatgcaaatgtgtgagctgaa

SEQ ID NO: 416147 - DNA, 566 bp, Homo sapiens
atctacagactcaatacaatcactataaaaataccaatgacattcttcacaaaaatagaaaaaccagtattaaaattgatcttgagtcaaaaaagacacagaataacaaaagctatcctgagcaaaaagaacaaatctggaggaatcccattacctgacttcaaattatactacagagctatagtaacaaaaacagcatggtactagcacaaaaacagacacatagactaatggaacagagaatccagaaataaatctacatacctacagtgaacttattcttgacaaagctgccaataacatacaytggggaaaagacagtctcttcaataaatggtgcggggaaaactgaatatctatgcagaagaacgaaacttaattctctcactttatacaaaaatcaaatcaaaatggaccacagacttaaatctaagatctcaaactatgaaactactgtaagaaaacattggggaaactccaaggacattggtctgggcaagaagttcttgagtaatattccatatgcacaggcaatcacagcaaaaatggacaaatgggatcacatc

SEQ ID NO: 416148 - DNA, 566 bp, Homo sapiens
atctacagactcaatacaatcactataaaaataccaatgacattcttcacaaaaatagaaaaaccagtattaaaattgatcttgagtcaaaaaagacacagaataacaaaagctatcctgagcaaaaagaacaaatctggaggaatcccattacctgacttcaaattatactacagagctatagtaacaaaaacagcatggtactagcacaaaaacagacacatagactaatggaacagagaatccagaaataaatctacatacctacagtgaacttattcttgacaaagctgccaataacatacattggggaaaagacagtctcttcaataaatggtgcggggaaaactgaatatctatgcagaagaacgaaacttaattctctcactttatacaaaaatcaaatcaaaatggaccacagacttaaatctaagatctcaaactatgaaactactrtaagaaaacattggggaaactccaaggacattggtctgggcaagaagttcttgagtaatattccatatgcacaggcaatcacagcaaaaatggacaaatgggatcacatc

SEQ ID NO: 416149 - DNA, 635 bp, Homo sapiens
gtgtacatttgggtaacatagttcccttgctggcccctgggattgccactgtgggaagagcagagtgagatcaagtagaaaccactcactacacaccaagctaagtccawctcagtagctctttcctcccgcagatacctaaggaaacaaggttgtttctcaaggggattctgacattaagaccaggttgcagtctgtgcaggagtaacagtccctagtcctggcccacaccctgaaccctctgaaccattttccctcttggcttgagggaagagggactcctctgttatatcttactctcttctcatatctttcatttcagcttttaaaacttttattttgaacatcatgatgtattggggaaaaaaaaagcttttatgacattatttcagattttatctccctatgtttgtttttaaccatgttcaatgtatagtttcttcctactttttataacatgtttttacaaatgttcctatatttcccaacaatcaagttttggacttacagtgacattgtggagctccacttcatatatgtcttatctatcatataggacaagggtcagcaaactccagtcctcctacccccttgttttggtaaacagttttatcagttcacatcctcacccattt

SEQ ID NO: 416150 - DNA, 635 bp, Homo sapiens
gtgtacatttgggtaacatagttcccttgctggcccctgggattgccactgtgggaagagcagagtgagatcaagtagaaaccactcactacacaccaagctaagtccaactcagtagctctttcctcccgcagatacctaaggaaacaaggttgtttctcaaggggattctgacattaagaccaggttgcagtctgtgcaggagtaacagtccctagtcctggcccacaccctgaaccctctgaaccattttccctcttggcttgagggaagagggactcctctgttatatcttactctcttctcatatctttcatttcagcttttaaaacttttattttgaacatcatgatgtattggggaaaaaaaaagcttttatgacattatttcagattttatctccctatgtttgtttttaaccatgttcaatgtatagtttcttcctactttttataacatgtttttacaaatgttcctatatttcccaacaatcaagttttggacttacagtgacattgtggagctccacttcatatatgtcwtatctatcatataggacaagggtcagcaaactccagtcctcctacccccttgttttggtaaacagttttatcagttcacatcctcacccattt

SEQ ID NO: 416151 - DNA, 510 bp, Homo sapiens
ccaaatggtcccacaaagtctaaaatacttattattggcctttcacagaaaaacgtgtccaccaccagtaaaggctgtcaagtattctgagttaatataaaataycggaatatccagactccaatttgtattgttcatgtgctagccatttggggaaaattattaatctacttgtttggtgattgttttttgtcatattttctgtaaaaagatttatgctctcactcaatcccttcaattgctacatgatattgtaaattgagaacctgatattaaaatatagttaattattggcaatatgcaatatggctttcacatataaggcataagataaatgttaaacataatctatttcaaatttaggatttgttgtattttttgtgaattattactattaatattggtttactttcaaatgcactttttgttttgacaggagacatcctcctaaattatttatataaaatgtattatcactcttttgttgaatcagtgaactagatgacagct

SEQ ID NO: 416152 - DNA, 547 bp, Homo sapiens
gagattcaaaatgaccaacagtgaggaataacatctgctagttttctcaccattcaaagtatactcaataacaacgacaaaataatagcattcagcttatctccattcctctcycactcttctccagatatttgacaggctaagtaattggtcacttttatatttcaatgtgatttataatagcaatatagtttctgacttgggaaaagtagatattgatttatgacttaaaaatgttaaaacattgatgtgccaaaaacaggttgaataacaaatgaatcatcaagactgactaggaattctggatgtatttaattggatatggaataccaagaggtctttgatagtgatcagaagacaacaaggagaaggaagaggtccaagtctcaccgttcactcttggttctaatgaatgaggctggatgaagcacttcaccttttttacatcgtggtcttttcatcaataaaacacaatgtgaagactgtctctgaccttctgagtaaggatttcttggcagtgctgaacccaaaatgttccaaggactta

SEQ ID NO: 416153 - DNA, 335 bp, Homo sapiens
gacacagtttatgagctaggctttccgttttggtgaattcaaggttagcagagctggcttaattgaatttcttttctgcctctacattttaatgcatttcctttgtacgtaagtagtttagacattagtgtattttgcaagtacctatgagacaaaaattttaaatgggagcatgctttccacatttggaattggttcactgcacctggtrtattcctagaagtcacaaaatggcattcatatgttttggacaacttttctcagtacctactatttgcaccctaatagccactattccagagaaaactagagtaattctggaaactgtagtcatc

SEQ ID NO: 416154 - DNA, 579 bp, Homo sapiens
ggttgcgtctttaataaactgaaaatactgccattcatggtttaagatagaattcttaatcaaaagctcgatttatctacaacttctaaaacagatattggctttaaaatgttactttaaacatcttctatagccaatatctacattataatataaagcccagtgcctttctattcaacatatgcttgttataagatagccaccaggtatttgaaggatgtacaaaaaaatcccccttatcaaaattactgtggcagactctgacagttttattccttatagatgttctcatttttaattctagtaatagaaatttaaggtaggtatatggctgtccagctaaaatacctatgatattatgatacatacattggttttcatccacagctcctggctcataaytcctataacccttgttattgtcttttgttataatgttggggcactttaggcctcagaggcaggcctcaggaagcagaatctctctgaccttctcctgccttcctttacctcctttctttctccaaggtaggaatctttttgggcctttctaccttggagctggacataaataaattc

SEQ ID NO: 416155 - DNA, 481 bp, Homo sapiens
aattcccctgacctaggcaaactgggatggttgttcaacctaagcctgctaggcattgcagttccttcttagtggtaggagatgcaagatgtaatttgtccttcactttatttttttatttttaaaatatttagcatttatttcttaattgactaatacaattacatgtatttatgatgtataagtatgatgttttgattataygtatacattgtgaaatggctaaatcaagctaaattatcatatgcattacctcagagatttatcatttttttgtgttgagaacacttaaaatctactcttttagctattttcaagcatacgatacattgttgttagctatggttatgatattatataatagattgcctggacttattcctcctgtttaactgagattttgaaccctttgactaatagctctccagcacccccaccccagccccccgtaaccaagtttctactctctgcctctatgagc

SEQ ID NO: 416156 - DNA, 545 bp, Homo sapiens
ggtgctaagcaactgagcagtagctggagagtgatgacagcccaggaatggctttttgaaatggaagctaccatacagtgtttgcatgttaatgggaatggtccagcagagcaggaaaatgtgataattcgagaggagaggataagtgcaagagtgatgtccttaactaggtgagggaggatatgagccagtgcacaaaggaagggataggctatggctaagaccaagggcagtacatccattaggcaggcacgaaggctgtkcatgtgttggcagatgcactgccggaagtatatggaagcttgcctttgatgggttctttgttctgagtgaggctccctttcagcccgctatgggtgaggagaaggctcttctttgaaaggaacagaacacatggactagagcctccagtggtttcttggtagtgctaaaaaacaaaatttcaacaaatttaatttaaaggtctaattggcttttaatagtgattaatgaatcaggcaacatctcatccataaaataggagttccagtgaactgagcagagga

SEQ ID NO: 416157 - DNA, 620 bp, Homo sapiens
gctgtaagggatagagagaccgatgctgcctgagcttcggtgctcttctaagtttatgtcactgtgtgaagacagctgtgctccaagtctttccccagagcctcaacactctaatcccatctctattttacaatgcctgtaatatatgcatcccaaggctctgcatataaagcatcattaaaacaggcttttacgcctagaaaccagaatgtccttcctgttgcgagttcacagaaccagaagaagaggttccaggattttaatccctctctgaagtgtatatcttgtcacatggagcttgagaaagcttaaaagattcacacccagtgcacattatcgtattcaacatgagacacaggaaagtgtcaagaataggtcttagacatcctctaagttttaagtaaattcctacatgaattggaaataaaataygtctatagacatggagcaaggattttgacagatgtggtcatttatatccaagttcaggtgattaatttacaagtccatcctttcattttaggcagatatcaaactgacttgaagagtgacagttgcttcatcatttaataaatattaaaaccataaaaatacatacaaatagggcttcactaggtgca

SEQ ID NO: 416158 - DNA, 548 bp, Homo sapiens
gaatatcatttttcactatagtcttttcagcaaatttactctgcaataaaaatgtgaagtagaaacattacaacaaattttgtctaaggaagcaataatggtgctctaggtctttaaaagaatattgatttttagtatactttctcatttctttgtgaataggactggtcttatctttccttttacctctacaggaaagagaaacatttgcaaaatcaggtatttctacctttggactgacagaagataaatgtggaatgaatatgtgagcaatggacccctcaaaataacaatgaagtgatgttgcytgaattgtactttatgtcatctctgtggatttaataattgatatttcccccaattatcatagaagctagattagattccttgagcagaagtataacttgctgatgtgtttgcatatatgtgtgcacacatgtgcatgtgttttggggataaacctcaaccctggctacattttaaattcacttgagaagccttcaataaatatcaatgccatgtccactactccaaagattaaagagaga

SEQ ID NO: 416159 - DNA, 665 bp, Homo sapiens
tttagcaacaaatgcaaaaataaaacagtaataaacattgttttaaactgtatttttatctggcatacagtaaatttcattcattttatagtacagtttctgtaattctcatgaatggatagagtcatgtacctatgagcacaaatatgatagaacagtacttttgactcccaaaattcttttgtgttgtacctttgtagtcaaaccctaccccctggcagccactgatgtgttctctgtccttacagttttgtttttccagaatgttatacgaatgaaatcataaaataggtagccttcgagtctaccttgttttgcttaggttaatacatttgagattcacctattttgttagatgttttgacagtgttatcactgtgccatatttcattgttattcatayggtaatgcaaaggacccggaatagttaaaacaatttcaaaaaaggagaacaaaattggaagacttgcatgatctgacttcaagatttactagaaagctacaataataaaaacaatgtggaattggtgaacagatagtcatgtaaacccatggaactgactagagagttcagaaattaagtcacagaaatatgatcaaatgatttttgacaaaaatgcaagcaaaggtaattcaatggaaaatgatgatcttttccaaaaatg

SEQ ID NO: 416160 - DNA, 360 bp, Homo sapiens
tttgattctcctcacagtctttgagcaacagggacccctttttccagtttttttagccaagacagtccatcttttttgggggttttaggtgcctgcaccaaatggtggaagtgtagtgtcacagctggggctggccctgggtcagggctgggagagaaaaaacataaaaactgtaaaagaaatgggtacttttctcctgccacactctccggaaagcaagagtcccttttcctgtgctctgctagaaagagatgatttctgccagagttcttctgtcagcacttgctgacagttagcatatattagcctgtccttagttcaaaccyaggtgtcaaaggagaaaaaaatccatgaaaccct

SEQ ID NO: 416161 - DNA, 571 bp, Homo sapiens
ttgtttactgtaaggaatgcttttagttaatctataatctatagaaataatgcttatcactggcttgctgtcaataaatatgtgggtcaaactgtttgtggctctcagctctgaaggctgttagcccccgatcccactttgcactctgtttctgtatctttgtcttaattcctctagcactgctgggttcgggtctccacaaccgagctggtcttggcagagaaagatggggcagagcaagacatgaactgagtggcagacccagatgatagccacagccgatcccatgtgamgctctgcagctagaatggctatccagagttgcccagagttggccaagcctttatactcccaagatgagtggaccctggatgtagggctccccgggaagaaggaagtggctccctgtgtctgaggccagcctgcaggggctgactgttgaagacatctaccaacagcattcccagaagccagactgctcactgtgttcaccatagccatggtctgagatggttgggatttattcaaatgccgtgggaagccttcaaatgatgggaatgaagtgagcaac

SEQ ID NO: 416162 - DNA, 545 bp, Homo sapiens
gcttttcctttcattcttttctcctggtagctaagaggaatttgaagacatttccataaacatttatttttgtaggtacaacagataggactttgacagcaaaagttctgataattatccaaatgtatattaacagtctgtattcaggactttcagagctttaagatacaaccaatattttacaaaacgtagttttcttctcttaaaatgaattagataataaccatgcttaatgagcaaataaagactggaaacagagtatraaactacataaaataatttctataaagtgattaagatggtagctggcatgtagaagctcagcaaacaataaattattgttatttgtgtaatgttgcaacccaacaaaacttacaataaaattagttgtgtacatatacataagtgtatatgcatgtggtaattagccataagttctcataaattcttgtaattaatattacctttacagaaccagatctagtttttctgttttagagctctgcatctttataatgtaccactgtttatgttttccctaaatg

SEQ ID NO: 416163 - DNA, 545 bp, Homo sapiens
gcttttcctttcattcttttctcctggtagctaagaggaatttgaagacatttccataaacatttatttttgtaggtacaacagataggactttgacagcaaaagttctgataattatccaaatgtatattaacagtctgtattcaggactttcagagctttaagatacaaccaatattttacaaaacgtagttttcttctcttaaaatgaattagataataaccatgcttaatgagcaaataaagactggaaacagagtataaractacataaaataatttctataaagtgattaagatggtagctggcatgtagaagctcagcaaacaataaattattgttatttgtgtaatgttgcaacccaacaaaacttacaataaaattagttgtgtacatatacataagtgtatatgcatgtggtaattagccataagttctcataaattcttgtaattaatattacctttacagaaccagatctagtttttctgttttagagctctgcatctttataatgtaccactgtttatgttttccctaaatg

SEQ ID NO: 416164 - DNA, 546 bp, Homo sapiens
taagcagagagaatttgaaacctagccataatgagtgcaaaatggcagagataaggtcaaaagaacacaggggttcctctctatgcaggcagaggaaagaagcaaaattattctccccttcctgtcatgcttcatgcacttgttcttttattaatattccaattgtactatccaggcatttcctccagttctcccatctctctaggcttcaggatgcagactatagatagaagttggtaaggtgagatggggtctggggagtggaagatggagagaggagactgggaacagaatttcttccaagcttccttaaaccaaattaaccacagagggatgacacagagacagtaaragtacttaaactctgtgactccatcacgaagttttgagggttcagtgcctactccccagcctctatcttcaaaaatggggattgtaatcattttggggattatatatccttctaaggttgaggaggaaaaagctacataatcatttcccaagcaaatgcatctgcatccaaaattctgattacaattgcaggga

SEQ ID NO: 416165 - DNA, 510 bp, Homo sapiens
tgttgtttttgttgcatttgcttttggggtcttagtcattaattctttgcctaagccaatgtccagagagcttttctgatgttatcttctagaatttttatggtttcaggtcttagatttaactaagtctttgatccttctcgagttgatttttgcatgaggtgaaagattgggatccagtttcattcttctacatgtggcttgccagttttcccagcaccatttattaaatagggtgtcctttcyccactttatgttattgtatgctttgtcgaagatcagttggctgcaagtatttgtctttatttctaggtcatctatttggttctattggtctacatgcctatttttatgccagtatcaaagctcagctatttgtttgctttgtgaccacgggcaagttacttatccctctgtgcctcagtagcctcatctgtaaaatggggataaaatattttgttatttccattagttgatatgttctgttgtggtaacaattcaattccctat

SEQ ID NO: 416166 - DNA, 572 bp, Homo sapiens
tggtggctcacacctgtaatcccagcactttgggaggccaaagagggcagatcacctgaggtcaggggttcgagaccagtctggccaacatggtgaaaccctgtctctactaaaaayacaaaaattagccaggcgtggtggtgcatgcctgtaatcccagctacttgggaggctgaggtaggagaatcgcttgaacctgggaggtggaggttgcagtgagctgagatggtgccattgcacttcagcctgggcaacaagagcaaaactctgtctaaaacaaacaaaaaaaagtcaatctgaaaaggctacatgctttgtgattccaacatgacactctggaaaggcaaaagtaaaaagatcagtgtttgccagggatttgaggggagtgaggaaggataaataggtcaagtacaggagattttaggatggtacaaatatactgtatgatactgcaatagtgtatattacacatttgtcaaaacaaatagaactttatggcaaaagagaaaactttaatatatgtaaattgaaaaaaaccatttaggaggtcaaggagacccagtgtggaatgc

SEQ ID NO: 416167 - DNA, 572 bp, Homo sapiens
tggtggctcacacctgtaatcccagcactttgggaggccaaagagggcagatcacctgaggtcaggggttcgagaccagtctggccaacatggtgaaaccctgtctctactaaaaatacaaaaattagccaggcgtggtggtgcatgcctgtaatcccagctacttgggaggctgaggtaggagaatygcttgaacctgggaggtggaggttgcagtgagctgagatggtgccattgcacttcagcctgggcaacaagagcaaaactctgtctaaaacaaacaaaaaaaagtcaatctgaaaaggctacatgctttgtgattccaacatgacactctggaaaggcaaaagtaaaaagatcagtgtttgccagggatttgaggggagtgaggaaggataaataggtcaagtacaggagattttaggatggtacaaatatactgtatgatactgcaatagtgtatattacacatttgtcaaaacaaatagaactttatggcaaaagagaaaactttaatatatgtaaattgaaaaaaaccatttaggaggtcaaggagacccagtgtggaatgc

SEQ ID NO: 416168 - DNA, 199 bp, Homo sapiens
cagctacacagcaggctgaagtaggaggatcacttgagcccaggaattcaaggtgcactcaacctrggtaaaaagagtgagaccctatctcaaaattaattaattaaataataggtttaatctgccagtcgagaaaaattgaattttttaaagctacagatgataatgctttaaaaatatttagcataggccaggcaca

SEQ ID NO: 416169 - DNA, 640 bp, Homo sapiens
gattactacttacagagttacttgtgcatgtccattcaggaaaagttgagttcactcttcctagcctttcatgagcttttcccagcatctctgttcacctgtctactttcattctggcttgcttctcatcaggccgtttacagtcaggtggtgggaagtaagtggggaaggagggtgaaattggctagaatttgaatttctattatatttttgatgttcattttagtattatagtaaaataatacctcaccttttttttraaggaactatgaaaatttggtagacaccttgctagatggtgtggagcaaagaaacctgtaagtgcaaaagatttttgtaattctcacagcatttttcataaatactataggagttttctacatggaaggctatgaatgactatgtcacaaaaagttatattccggtttgtgtatttggaagcagattaagaggaaaagagatggagggaaagtttgggattaatgataggagcagtgttcttcactagacctattttaattcttgagaaatttaaaattataaggtgtttcacatacagttttttttttccaagtggttttatgtgtgatatgctttgttatttttcctccttttaaggccctggaaatttgaacatata

SEQ ID NO: 416170 - DNA, 640 bp, Homo sapiens
gattactacttacagagttacttgtgcatgtccattcaggaaaagttgagttcactcttcctagcctttcatgagcttttcccagcatctctgttcacctgtctactttcattctggcttgcttctcatcaggccgtttacagtcaggtggtgggaagtaagtggggaaggagggtgaaattggctagaatttgaatttctattatatttttgatgttcattttagtattatagtaaaataatacctcaccttttttttgaaggaactatgaaaatttggtagacaccttgctagatggtgtggagcaaagaaacctgtaagtgcaaaagatttttgtaattctcacagcatttttcataaatactataggagttttctacatggaaggctatgaatgactatgtcacaaaaagttatattccggtttgtgtatttggaagcagattaagaggaaaagagatggagggaaagtttgggattaatgataggagcagtrttcttcactagacctattttaattcttgagaaatttaaaattataaggtgtttcacatacagttttttttttccaagtggttttatgtgtgatatgctttgttatttttcctccttttaaggccctggaaatttgaacatata

SEQ ID NO: 416171 - DNA, 340 bp, Homo sapiens
aaacacttgtttttttttttwaaatcaaaagggatctacagagtaactaagctttggatgggttttcttataccctatttcctctttaaaaagatacatcaggttgaaaaagaaagccacagtagtgcatataatggtttacagtttggccttagagtcagacagatcttaatttgagtatcagttctgctacttcctagttatattatagctgttttctcatcaatataagcaataatacctacctctcataaagctgttacaaaaattaaatgagataaggtatagaaagcaggtatacggcccagaattaaggataataaatgttaattattatttc

SEQ ID NO: 416172 - DNA, 513 bp, Homo sapiens
tacagatgctgctagaagaccacatagactacatttcaaattaggcactggaaaaattgtttcagtcatgtttatattttagtttagctatgtatcctacctagctaaaaaataagagtatggttattgtgtccaatgattagacagtgaaaatgctgggaagtggtgataaccagggaatatcatagatttgtagcagtgaatggttttatgttcgtaaatattataggatattataggcctgctgcaaactgttaggcttgaaatatagcccaggaagtatatgtttcttttcctgatacagtatgatgtaacattatcaaggatataatctagtgagaaattaataattgtggcatacaggtgagtcctstatatcatctaagtaggtttctcaaaataagcttgaatttgcgaagtggaatccagacatatacttgggaatctggagagctgggatgaggtttggcagaaatgttgaaaaatatacagtatttcgtttctacaggactt

SEQ ID NO: 416173 - DNA, 553 bp, Homo sapiens
  misc_feature (1)...(553): n = A,T,C or G
tgtttaacaaagcacatcttgcatggcccttaatccatttaaccctgagtggacacagcacatgtttcagagagcacggggttgggggtaaggtcaccgatcaacaggataagaatttttcttagtacagagcaaaatgaaaagtctcccatgtctacctctttctacacagacacggcaaccatccgatttctcaatcttttccccgcctttcccccctttctattccacaaaaccgccattgtcatcatggcctgttctcaatgagctgttgggcacacctcccagacggggtggtggccgggcagaggggctcctcacttyccagtaggggcggccgggcagagggcccctcacctccggacggggcggctggccgggnncggctgacccccccacctccctccggacggggcggctggccgggcggggctgatccccccacctccctccggacggggcggctggccgcgggcggctaacccccccacctccctcccagacggggcggctggccgggcggggctgacaccccacctccttctcggacgag

SEQ ID NO: 416174 - DNA, 565 bp, Homo sapiens
taattcttccttccatctttccattttggggccactggtgtggggggtgctaccttgcaaaaagataaggcaacacagactttttgttttcaaaacaaagcaagataggaaggcaacactgtgcagttagagttgctcaggctttggaggtagatacatgtaggtttcaatcctgactctgcgactttccagttctgtgagctctatgttactctatctctctgcgcctcagttttttcacccataaaatgtgaataataccatctactttccaggttgttcggagacttgttaataataactgttctgaatcacgaaagacaacaacaraaactaatcaggaagagcctgaaccaggagaaagagaaggcactgataagtgccaaaaatcaggatagttaagaagtcactttctagttacataaatatggataaaaggattagcagtgattctcaactgggctccaaagagaaattacaaaggacataaaaaacttttgtgggtgatggatctgtttattatcttgattgtggcaatggtttcattgaatatatgtgtatgtca

SEQ ID NO: 416175 - DNA, 592 bp, Homo sapiens
atttgctatttattaagtacaggtggattatcataaasgtattcatctttgtcctcttcactttgagtaggttgaggaggaggaggaagggtagaagccagttttgctgtttcaggggtggcagatgcaggagaaaattcacgtatcagtggacccttgtggtgcagacctgtgtaattcaagggtcagctgtattcagataagttaaagtggcttttttaagactgcgctgggagctagtccagagtcaggaagaacagacttcagtgatgttagggactcactcccttcctcactggccacacgtgcccagggagctttggtaataatccaattaagcctgacaggcaagaaggaagcagccagtactggttctgcaaaggcagctaaagctgagagatgatttatttgattctcaaaaggaatttggttgatataaagaccgttgtggtaagatagtaagaaaaaaatgacttaaatttgaattttcgtaagatatgggttattgaattttttccctagttctatgagaataacagcttttttatggcccagtaaacacttttaaaatcttttatttctaattcaaaat

SEQ ID NO: 416176 - DNA, 511 bp, Homo sapiens
gtgtttgatgtcttctaatctaccaaccttcttcctcttctctatgacatttttgtctcccctccctccagtgttagatatcctgatgacctccctccttccaaataaaaatcttcagatttttttttatttacaccaagatttttgtctttacacttcccaagagtaaaattgcacatcacttttaagcaaaagaaattttaaaactaaatacagaattttaatcaataagtcagacaggcactaggaagttcaggggtatattaggagcctatygtgatttctctgaaatgacattatgtagtggcaccttcttgtttgtatggtgagtctgagagagctccttttttgaggtgaattatagccagagggaccacctatgcagttgcatttcaatctcatacattttgaaagataggtatgtttcaaatgaattcagcaatgcatacccagaaaattacttaatagcaaatgaattattgcttcacttgttacatagtaaaatcattat

SEQ ID NO: 416177 - DNA, 575 bp, Homo sapiens
tagagaaaggtgagcccttactgcaggcaggaggagaagccgacaagagggaaccagtcctcacagcagagccactggtcccctcaggaactgaggcacctagtacctctgcacaggaagtgttcaggtacagctgaaagtaagaggactggttgaaaacctataaaaagcagtcagagcatgaagatctctcctgcttctctcttagaaggtgagcaactctcccccacctatcggagacatgagccttactgtctggggagattgaaacagagaggttccagtctcagggacacccagcscagcataggaaacccaaagggccaaaaacaaaggcactgagtgagaactggaccctcacttggagggttggagttgttgaactccaatggagttcaccaatggagaagttgaaccctcagtttccttcccctgctcaccttgtagaatgctgatagccatccttagactcttataataccgcctttcccatgtctccaattagcagaaaattacagggttcttctctggagaaatgagctggtccactagaaaaggcctccagattttgacat

SEQ ID NO: 416178 - DNA, 494 bp, Homo sapiens
tcggttggtacaaaagtaattggggtgtttgccacacttttaatggcaaaaaccacaattactttcttacaaacctaatggacattttctgtctgataaaatttccaggaaaactaagtataacataatcaagtgaatcctactgcaagtatagggcatatttatgtgtatttacttgtaggagacgtgtgagctgtttggacatgagtgtacagaacaaaaagattctggaaaaatacaaatttaacctatatgggagttgaggtcrcttgtaaactaataaagaatgaacaaggaaacaggttttcatttgtaaacattgatttttatgaaacatactttgaaagggatggagaaagtcccaggccagggtaggttctctccaatctctttcccttttttgtcttccattgtaaaaacactccagtgtttttgcatttctgttcttcttccaactcttcacatggcaacttagagaagtgggaagagttgga

SEQ ID NO: 416179 - DNA, 524 bp, Homo sapiens
gacagtctttctcttcccttcttcattctgtctttacattggagctcagttactgtcttgaaagtgtggtctaaactttaatcctgctgccaacttttgatgactacttgtatctatagctcaaagtccaaattctttcatgtggtgcttgaagccatcttccacctttggaaggcactagtcattctccaataccccactccaawctgtgtgcaagctccaggcaggcttagacccacgtaccccaactctggctatatatcagaatcacccaaggagctctcagaaagtacagatggctagtctctgttccggagattctgatttgataggtcccaaatgagtcctgtattttttaaaagcttcgcaagtgcattaaactaccaacttatgagatgtgggcaagatacagtcaaaggcaagttcataattttgtaatatttcttcataaaagaagaatgaataaaaataaatgaaataggcaataaccttaaaaagttatgaagagaacaataaaagaaaat

SEQ ID NO: 416180 - DNA, 582 bp, Homo sapiens
actaaggtcaacatcacatttcattgtgaaggtatttccatttaaagcagagaaaagaaatgaattctcactgtcaccattgttatttagtattgtctgaaagttccagtaaatacaataaaccatgaaaataagaataactatagaaaagggaagtaaaattatggttctgtgatgacagcatgattagacataccttggcaatccaggagcaccgctaaataatgttttgaattaataagcaagttcatcaaaagtacaatggctgcaggataaatatacaagaaccaatgacatttctatatagcagcaataaacattgtagaatatatagtagcaactacaactatgaattaccaaagaatgtgtgacacctatatgaagaaaaccacaaaattttattgagcaatatgaaagaatatttgactaaatggaaatgtatattgcattmttgcatgggagtactgtaaaataatatgatgttacttttgcccaaattaacaattttcacataattccaagcaaaatatataggggactatctggttggcttgacaaaacctaaataaaaaaataaaaaat

SEQ ID NO: 416181 - DNA, 597 bp, Homo sapiens
ccattgttatttagtattgtctgaaagttccagtaaatacaataaaccatgaaaataagaataactatagaaaagggaagtaaaattatggttctgtgatgacagcatgattagacataccttggcaatccaggagcaccgctaaataatgttttgaattaataagcaagttcatcaaaagtacaatggctgcaggataaatatacaagaaccaatgacatttctatatagcagcaataaacattgtagaatatatagtagcaactacaactatgaattaccaaagaatgtgtgacacctatatgaagaaaaccacaaaattttattgagcaatatgaaagaatatttgactaaatggaaatgtatattgcattcttgmatgggagtactgtaaaataatatgatgttacttttgcccaaattaacaattttcacataattccaagcaaaatatataggggactatctggttggcttgacaaaacctaaataaaaaaataaaaaatttaaatactgtaaaaaatttgaaaagtaaattattagggtgaaggtggaatagaacttaccctaccagataccaaaatgtattgtggtgct

SEQ ID NO: 416182 - DNA, 575 bp, Homo sapiens
gagcactaagttcttcttcttccatcatcttaaaggggttttcatcatagatcagctctactaaggcctttgaaaaaatggaatgtattctacttcttcaatataccccacacccctgcccaagtttctaattcagtagatctgtggcaggcctgataatgtgctttctagtaagttcccaagtgatgctgatgctgctaatctggggatcctgaccttcaggaaattctgaaagccaatagaaagaacagaaaaccttagaagtagaatcatgatttgaaagagctaggagaatggacaaagccaaggtccagtgtggttctggcacacactgagcaccccataaatactgaattaacaagtggatgaataaataacaatgtttttatctgaatgcttccgtgaatggcccaaggaagaagagcaccatagtgaccaaaacataggctttgccattagatatatcaaatttcaaacctttcttctccacttactggctgatayggtttggctctgtgtccccatccaaatatcaccttaatctgtaatccccataatccccatgtgtcaaaggt

SEQ ID NO: 416183 - DNA, 492 bp, Homo sapiens
ccccattccgtcagctatctgtattagctcctattaaaaatattttgcagatttgtttccaattcaaactataaacagaggcttaagtaaatatttctttaaatctctagcctttgaaattgagggcaattaaaaaaccaggccagcctttattaatatttacttacatcctctttagtttgcatggattggggatggctctgaatcagagcctacttaagacaaaactgatgcaattcaacaaatatttattgacagttcatcagtaccaggtgttgtgctagggacaatgagaaatgtaaagatctagaaacattagctaccataaaaaaagtcaccatctagtagacatcagcaaagggaagagagtaattgtattcggcatcktctttgtgcctgtctactttcacagtaataacattttcttagcaccctgatcatgtttacgcaatgtgttctatgtatgtagattaggcatgtgcacacacaaac

SEQ ID NO: 416184 - DNA, 614 bp, Homo sapiens
ggaagcaaatgtgctctcgtgaatctccattataagcaactccatgtgttcacaaattattttggtccagggtagattttgtggaaatgaggcattttcctggtttgcagaaactaaagataaactatttctgaggcccagtccctaaacagccaatttgcaataaaaagaaacaaacctaagaagagagatgtaataatatcacaacgacttcttcaaatttccagattgtttcgagttgactaggttgctggccagatctttagaagccctgattttatctctgtttgttttagstcctgtttcgtctatgtaacttgagggagaatgttctaattccttgattatgtcatttccttgcatattcttctgtcttttaattttgatttggggagaaaacatgaagtttgtttttcccttggtgagctgctccaagtagtagtcccattactgtagccatgaacctctgagccagtaacccggaccccaggatgagattgtctgacagtgttgttttaaggttctagcaaattttatccattcatttaacttagagtatttctcttttcttttcctgttgcttaaaaaataaaataaaacagaacgaaaaaaac

SEQ ID NO: 416185 - DNA, 583 bp, Homo sapiens
tactctcccagggatgtgatgcttctatcatctttctgtcaagaggagtctggcagaagaagcgagggctcttatttcacacacttagggttttttatcaaatggcccacactcgttctgattcagccaaaatgggggcataatttgaagaaggtcatgcacaagtacaaaaatctcatattgatttgtgtgattagaaggcattaaaattgcacatttacgttagttgctgagatgttttgtcagtttatttggtaatacacttttgcagcctagaaaaaaaaaatgacttaaaatttaaaaatagatggctgaaagccgaaatggtttgttttaatgtggctatgtttgaacgtttagcaagtgaacataaaaataatgtaaagcttttagtttaacaatatttgaaattagcttatataatgaaatacttcatgcaacataaaagcaaaattgcacaactgtgcatatcaggtgaaacaaatatatatgtgraattattttttaaatactttaaaaattgatttcatatctttaatatatagataaaaagtgatgacattttcaatataaatttaattat

SEQ ID NO: 416186 - DNA, 627 bp, Homo sapiens
tgcacaactgtgcatatcaggtgaaacaaatatatatgtggaattattttttaaatactttaaaaattgatttcatatctttaatatatagataaaaagtgatgacattttcaatataaatttaattatgaagctgttttacaatggttatcaagtttttaacattttgcactctttgaaattacagtgtcattatatttgtcattttatgccattcttagtatatatgcccttttccagagagggtactaaagaataaataaaagggttwttattattattattattctctgtcaaaattcatcacatttccttctttgctctctgacagtcacaaagccatacaaagaaacattctattttggtaggggcatgtttatagaagttagaagaacaatcttttcctctcaaaataaaacaattgatgaaaataaaaccatgatatcctgggatcatttctatattgaatctttgaaattacttttcctaggaattttcatcaactctctgttgtctccacttcttatgtttttctcctttgctgtgaagtgttttgaaactggatttctcacttttgtgccactttcaaaacaaaggagaggtacatatatactgtgtagttacagt

SEQ ID NO: 416187 - DNA, 572 bp, Homo sapiens
ggttactaagcagttttatatatcattgagattacttcttttttttttattgcagtaaaaaacacataacataaaatttaccctcttaaccattttctcattgtaccgttcagtattgttaaatatattcacatttttggcagggtgctgtggctcacgcctgtaatcccagcagtttgggaggccgaggcgggcgggtcacgaggtcaggagatcaagactgtcctatcctggccaacatggtgaaaccccgtctctactaaaaatacaaaaaattagccggacttggcggcgcttgcctgtagtcccagctactcaggaggctgaggcaggagaattgcttgaacccggcaggcagaggctgcaatgagccaagatcacaccattgcactctagcctgggcgacagagagatactctctctctctctctctmtatatatatataatatatattatataatatatgtaatatatgatgtataaatatcatatattacatatattatataatatatgtaatatatgatgtataaatatcatatattacatatattatataatatatataata

SEQ ID NO: 416188 - DNA, 572 bp, Homo sapiens
ggttactaagcagttttatatatcattgagattacttcttttttttttattgcagtaaaaaacacataacataaaatttaccctcttaaccattttctcattgtaccgttcagtattgttaaatatattcacatttttggcagggtgctgtggctcacgcctgtaatcccagcagtttgggaggccgaggcgggcgggtcacgaggtcaggagatcaagactgtcctatcctggccaacatggtgaaaccccgtctctactaaaaatacaaaaaattagccggacttggcggcgcttgcctgtagtcccagctactcaggaggctgaggcaggagaattgcttgaacccggcaggcagaggctgcaatgagccaagatcacaccattgcactctagcctgggcgacagagagatactctctctctctctctctctatatatatataatatatattatataatatatgtaatatatgatgtataaatatcatatattayatatattatataatatatgtaatatatgatgtataaatatcatatattacatatattatataatatatataata

SEQ ID NO: 416189 - DNA, 572 bp, Homo sapiens
ggttactaagcagttttatatatcattgagattacttcttttttttttattgcagtaaaaaacacataacataaaatttaccctcttaaccattttctcattgtaccgttcagtattgttaaatatattcacatttttggcagggtgctgtggctcacgcctgtaatcccagcagtttgggaggccgaggcgggcgggtcacgaggtcaggagatcaagactgtcctatcctggccaacatggtgaaaccccgtctctactaaaaatacaaaaaattagccggacttggcggcgcttgcctgtagtcccagctactcaggaggctgaggcaggagaattgcttgaacccggcaggcagaggctgcaatgagccaagatcacaccattgcactctagcctgggcgacagagagatactctctctctctctctctctatatatatataatatatattatataatatatgtaatatatgatgtataaatatcatatattacatatattatataatatatgtaatatatgatgtataaatatcatatattayatatattatataatatatataata

SEQ ID NO: 416190 - DNA, 607 bp, Homo sapiens
agtttctgtctctataggtatttgtttcctataaccataaataaaacaatacgtggattcttcttccgaagtccccattgggtctgaatctggaagcatcacatattccatccatctaatttgttatttcagtcattctttaactctcttaaaataattaygtgattcattatttttcttcccaatgaaaaaaaattctctttaatcattttatggcttatatagctttcaggatatatgaacatatataaatacacacacacacacacacacacacacacacacacacacacacctgtttaaagtcgcttcccataaaatgaaggctttctgtgcataaagtaggtcctttatgcacatttagaacctctgtaactttattcagaccattttttcaaactattaatgaaagtagggattattgttattatatgggtccattaaaaatctagttaaaaaattgtgcagtgaatataaatgaaaatttcattatattaatcttagatttaaaaggcgtagttgaaacaatgaaagaaactggctgaggatgagagcagagtttttctcagaggttgtttgagaataatgaaactgaggtcctgaaaga

SEQ ID NO: 416191 - DNA, 607 bp, Homo sapiens
agtttctgtctctataggtatttgtttcctataaccataaataaaacaatacgtggattcttcttccgaagtccccattgggtctgaatctggaagcatcacatattccatccatctaatttgttatttcagtcattctttaactctcttaaaataattacgtgattcattatttttcttcccaatgaaaaaaaattctctttaatcattttatggcttatatagctttcaggatatatgaacatatataaatacacacacacacacacacacacacacacacacacacacacacctgtttaaagtcgcttcccatamaatgaaggctttctgtgcataaagtaggtcctttatgcacatttagaacctctgtaactttattcagaccattttttcaaactattaatgaaagtagggattattgttattatatgggtccattaaaaatctagttaaaaaattgtgcagtgaatataaatgaaaatttcattatattaatcttagatttaaaaggcgtagttgaaacaatgaaagaaactggctgaggatgagagcagagtttttctcagaggttgtttgagaataatgaaactgaggtcctgaaaga

SEQ ID NO: 416192 - DNA, 607 bp, Homo sapiens
agtttctgtctctataggtatttgtttcctataaccataaataaaacaatacgtggattcttcttccgaagtccccattgggtctgaatctggaagcatcacatattccatccatctaatttgttatttcagtcattctttaactctcttaaaataattacgtgattcattatttttcttcccaatgaaaaaaaattctctttaatcattttatggcttatatagctttcaggatatatgaacatatataaatacacacacacacacacacacacacacacacacacacacacacctgtttaaagtcgcttcccataaaatgaaggctttctgtgcataaagtaggtcctttatgcacatttagaacctctgtaactttattcagaccattttttcaaactattaatgaaagtagggattattgttattatatgggtccattaaaaatctagttaaaaaattgtgcagtgartataaatgaaaatttcattatattaatcttagatttaaaaggcgtagttgaaacaatgaaagaaactggctgaggatgagagcagagtttttctcagaggttgtttgagaataatgaaactgaggtcctgaaaga

SEQ ID NO: 416193 - DNA, 627 bp, Homo sapiens
gtggccactgatatgcccttctgcgggcttccattcacacatggatttatctaagtcccttatgccacaatagcctggaaaaatcttaattttatggtaaattatttacaaagaagaggcacctaacaatttcaagtctgtataatggtgacaaagaaaaagaaataggaaatttcattttttcaatgtgccttcttcaaaagtgaatgcagtgtaattggatctgaattccttaaaaaaagatgttcatgaaaagttttgaaatatagaaattcaaagtaaaagcagtatcaatttgtgcgaaacagaagaataatttaaagtaaattcagtagagaaatgcttatattggcaatggtcattcaaaacagccatttgaatctcttgacctaaaaaacaattgctgatgtgtttggcagtgacwtgatggaggtaggctgatattagcctttagctcttttataaaaggaaggcaggtgaattgcggtctggagagatagatagtagccccagagaaataaaaggtgttcataaatttcttctgcttgctaatgagcccaatctgtctctcatcttacctctacttcagtgtcagcttgttaaagttgcaaaacttaaaagttactt

SEQ ID NO: 416194 - DNA, 627 bp, Homo sapiens
gtggccactgatatgcccttctgcgggcttccattcacacatggatttatctaagtcccttatgccacaatagcctggaaaaatcttaattttatggtaaattatttacaaagaagaggcacctaacaatttcaagtctgtataatggtgacaaagaaaaagaaataggaaatttcattttttcaatgtgccttcttcaaaagtgaatgcagtgtaattggatctgaattccttaaaaaaagatgttcatgaaaagttttgaaatatagaaattcaaagtaaaagcagtatcaatttgtgcgaaacagaagaataatttaaagtaaattcagtagagaaatgcttatattggcaatggtcattcaaaacagccatttgaatctcttgacctaaaaaacaattgctgatgtgtttggcagtgacttgatggaggtaggctgatattagcctttagcycttttataaaaggaaggcaggtgaattgcggtctggagagatagatagtagccccagagaaataaaaggtgttcataaatttcttctgcttgctaatgagcccaatctgtctctcatcttacctctacttcagtgtcagcttgttaaagttgcaaaacttaaaagttactt

SEQ ID NO: 416195 - DNA, 585 bp, Homo sapiens
tgataacaataattcaataaaaataacaagtgccattatacaccaaactcagcagcatttatgttaacagcctgtaatctatttgaaatgaaacaaaattattctaaagtatgcttagatatatattaaaaattcagttgctattaggttaatattcttagcacatgaaatggaatatgaaattatgggctcatattcttaatgatgtttcagagggatttttcagtcactgtatttgaaacatctgataaaaattgggttattctataatacattttacaaatttatttcagttattgggaacatatatggatcttaaggcagtattttatacttgataagcattaattcttrttcttgatcttgttctcagtaatctaaatgtgctagtgtggtttaaaaaaattctactacagcttaactgattgctaaatgatgacatttttgaagttgcaatgaattatctattaaatagagtctaatttaggtccttattgaagcacagattaagagatatccttgattaataaaatgtgccccatctgtgaatatcgttcaatgtgaaaaatgttctaaaataaaaat

SEQ ID NO: 416196 - DNA, 600 bp, Homo sapiens
tcttatatggtgcattagtttcctactgctgctgcaacaaattattacaaatttaatggctaaaacaagacaaatttattctctcattctgaaagtctgacttctgaatgtcaaagttccaaataaaattgatagagcttaagtcaaggtgtctacagggctggctggttcattctggaggctctacgaaataatccatttcttacctcttccaacctctagaagccacattccttagctgcgttctttagctcatggccacattattctaacctcttgcttctgtwatcacatctactattcactctgatctgctgcttccctgttgtaaggaccattgtaattagagtgagtccacctggataatccaggctaccctccccatctcaagatccttaacataatcacacctgcaaagtcccttttaaaaaattattgtggcaaaaaaatagcattaaatttatcacctgaaccaatttaaatgtacaattcagtggtgttgattatattcacattgttgttaaacagatctccaggacttttccatcttgcaaatctgaaacactatacccattaaactcccttttcccacctcttcct

SEQ ID NO: 416197 - DNA, 567 bp, Homo sapiens
tcaaaccccctttttaaggtattttgaaatatacaatacattgtcattaactatagtaaacctactctgctactgaacattagaacttactctttctaactgtgtgtttgtacattcgtaccaatctctttttagattccctacttcccagtctctggtaaccatcattctactctctacctccatgagatcaacttttttaactctcatataccagtgagaacatgtgatatttgtcttcctctgcctggcttaagtgaaacaatcattcttattagtgactttcaacctttatttgtttgctctggacaacttttaaattaataaactgttgaattgaaccccattatgtaaagatgctaaagtcargacatctttgcttgttgtagaacagggtgaggagtaatgaaccagattctgatcttctcatccttttagtagttccctagagtgatactgacttcagagcccaattagtgaaccaacagtttgcataatctatacatagattaagtgaattttgaattagaaagatggacatggctacatccacataaaaccaaaata

SEQ ID NO: 416198 - DNA, 618 bp, Homo sapiens
ttttatttatcacattaatgatagcactgatgggagactctactaagccataaccagaatgaggwgtattttggaagatttataaaaaccaaataactacctctattttctagtatcatgcccagcatccattcacctagttagcagtaagtgtgaggtgagaaaaacaaatttatatttctgtaaagtagttgtcaaacagacattcaatcactgggagaatgttaaaatgatggcagttcaaaaacaagaatataacgcagaaaactattttgataaaagacaactttatcaatttaggcagaggtagattatcactaaactttttctatgtatgatttaaaatcacactaggaatgttgcattaatatttattaaaataatgctggaaacataaaataatcatagaacatagtaattcaaagaattgaaggaccctaaagaaagaaatatgaattaaattctgttactctttcaacaggtatagcttagtactatctatctagatctgtatcatctgtatctataaaaaggtttactataatttctaaggaaattaaactgtggtccacgtggtccctgtcaatgtaggaattaacacctatttttggagtcatg

SEQ ID NO: 416199 - DNA, 618 bp, Homo sapiens
ttttatttatcacattaatgatagcactgatgggagactctactaagccataaccagaatgaggtgtattttggaagatttataaaaaccaaatractacctctattttctagtatcatgcccagcatccattcacctagttagcagtaagtgtgaggtgagaaaaacaaatttatatttctgtaaagtagttgtcaaacagacattcaatcactgggagaatgttaaaatgatggcagttcaaaaacaagaatataacgcagaaaactattttgataaaagacaactttatcaatttaggcagaggtagattatcactaaactttttctatgtatgatttaaaatcacactaggaatgttgcattaatatttattaaaataatgctggaaacataaaataatcatagaacatagtaattcaaagaattgaaggaccctaaagaaagaaatatgaattaaattctgttactctttcaacaggtatagcttagtactatctatctagatctgtatcatctgtatctataaaaaggtttactataatttctaaggaaattaaactgtggtccacgtggtccctgtcaatgtaggaattaacacctatttttggagtcatg

SEQ ID NO: 416200 - DNA, 561 bp, Homo sapiens
acactggtttggatcacatagaaggataggactggccaggtgcagtggctcattactgtaatcctagcattttgcgaggccaaggccggtggatcacctgaggtcaggagttcaagaccagcctggccaacatggcgaaaccctgtctctactaaaaatacaaaaattaagtgggtatgagggcgggtacctgtaatcccagctactcaggaggctgaggcaggakaattcacttgaacctgggggcagaggttgcagtgagctgagattgtgccactgcactccagcctaggcgaaagagtgaaactctgtctcaaaaaaagaaaagaagaagagattaagaggagagctggataaaataataataattattattaatgaaaatcaatgggaaattcaaggacaaataagacgtgagaaaagaaaaaatgtcagagactaagaatggcattagatttctctacaacactggaaactgagaaaacggagaaatgcctttgaaattctggaggatttatttttttcaaactaatatcctaaacccaacctgaaagcagaata

SEQ ID NO: 416201 - DNA, 561 bp, Homo sapiens
acactggtttggatcacatagaaggataggactggccaggtgcagtggctcattactgtaatcctagcattttgcgaggccaaggccggtggatcacctgaggtcaggagttcaagaccagcctggccaacatggcgaaaccctgtctctactaaaaatacaaaaattaagtgggtatgagggcgggtacctgtaatcccagctactcaggaggctgaggcaggataattcacttgaacctgggggcagaggttgcagtgagctgagattgtgccactgcactccagcctaggcgaaagagtgaaactctgtctcaaaaaaagaaaagaagawgagattaagaggagagctggataaaataataataattattattaatgaaaatcaatgggaaattcaaggacaaataagacgtgagaaaagaaaaaatgtcagagactaagaatggcattagatttctctacaacactggaaactgagaaaacggagaaatgcctttgaaattctggaggatttatttttttcaaactaatatcctaaacccaacctgaaagcagaata

SEQ ID NO: 416202 - DNA, 571 bp, Homo sapiens
aatcttggcaattttcacatacataatacattgttattagttctcggcaccatattgtaatatagatctcttgaacttattccaccaraaaatgataagtatgtgatgtaatgcatatatatgttcattagcttgatttaggcattccacagtgtatacaaatgtcaaaacatcatgttgtacacccataaatatacataatttttatttgacaatttttaaaataaaaaaattttaaaagaggatcggagaaggggttgaaaatacaatgaaattaacatacaaatcataaaaaatactcaatatatggcaaacagaaccaatcagtaaacaaacagcacttaaaacatgctgtatagaaaaacatggaaatcacaggaagaaagaattcaaacctgttgatcctggagacaaaatttggatgggctatcactgttttttattataattactttttgtattatttaatttattttaaaaaaccatgtgtatgtattaatttaataaaacttttataaattagttgttaagaaatcaaaactctcatatttattaaaccattatccaattt

SEQ ID NO: 416203 - DNA, 571 bp, Homo sapiens
aatcttggcaattttcacatacataatacattgttattagttctcggcaccatattgtaatatagatctcttgaacttattccaccagaaaatgataagtatgtgatgtaatgcatatatatgttcattagcttgatttaggcattccacagtgtatacaartgtcaaaacatcatgttgtacacccataaatatacataatttttatttgacaatttttaaaataaaaaaattttaaaagaggatcggagaaggggttgaaaatacaatgaaattaacatacaaatcataaaaaatactcaatatatggcaaacagaaccaatcagtaaacaaacagcacttaaaacatgctgtatagaaaaacatggaaatcacaggaagaaagaattcaaacctgttgatcctggagacaaaatttggatgggctatcactgttttttattataattactttttgtattatttaatttattttaaaaaaccatgtgtatgtattaatttaataaaacttttataaattagttgttaagaaatcaaaactctcatatttattaaaccattatccaattt

SEQ ID NO: 416204 - DNA, 581 bp, Homo sapiens
tctggcatgtcggtactattatctcagtgtagatttgacttaccatattttcatttttgtgtaaaggtaccttaaaaatgaacgtaaatatgcagagatcccaaaatacttcacccatatgttttctctaagaagcttacytgaagaaggaatcattcatgcatgtgtgcagacacctacaaacacacatgcacacatacaaagcaatattctgttttgtttaatgatccacacattgtattcacttttgctcaatattgatatttctctgttctctttttatttgtatatttctggttgtcctttgtctacccttttattttcaacctatgaattacattgttttagatgtcatctcgtatgcagtatatgaatatgagagcattatttatcaaaacttatgggattttaggaaagatatactcagaggacatatttataactttaggtactttcaatatataaaaaagaaataaaaacaataaatgaagcactcctttgagaggttataaaaagaacaaaataaatctaagaaagcagaagtaaacagtcaaagataaatgcagaagtcaatgaattaa

SEQ ID NO: 416205 - DNA, 581 bp, Homo sapiens
tctggcatgtcggtactattatctcagtgtagatttgacttaccatattttcatttttgtgtaaaggtaccttaaaaatgaacgtaaatatgcagagatcccaaaatacttcacccatatgttttctctaagaagcttacctgaagaaggaatcattcatgcatgtgtgcagacacytacaaacacacatgcacacatacaaagcaatattctgttttgtttaatgatccacacattgtattcacttttgctcaatattgatatttctctgttctctttttatttgtatatttctggttgtcctttgtctacccttttattttcaacctatgaattacattgttttagatgtcatctcgtatgcagtatatgaatatgagagcattatttatcaaaacttatgggattttaggaaagatatactcagaggacatatttataactttaggtactttcaatatataaaaaagaaataaaaacaataaatgaagcactcctttgagaggttataaaaagaacaaaataaatctaagaaagcagaagtaaacagtcaaagataaatgcagaagtcaatgaattaa

SEQ ID NO: 416206 - DNA, 519 bp, Homo sapiens
tgtctgacatcattgcttgttaacttaagaactgataggtttttttttttttttttttcagatattctgatggcaaaacaagtggaagaaaagaggaagcatgactgcagatcagatcagttctctttgtggattatattttcagtaaaatgtatggatctatcttttccttgttcttatatctagatcatgagacttgactgaggctgtatccttatcctccatccatctatggcgaactatagccatgcagctgacaacattttgcaaaatctctcgcctctaacagcctttctgaaactgacttccttgggtttcataataggagtcagcgtggtgggcaacctcctgatctccattttgctagtgaaagataagaccttgcatagagcaccttactacttcctgttggatctttgctgttcagatatcctcagatctgcaatttgtttcccatttgtgttcaactctgtcaaaaatggytctacctggacttatgggactctgacttgcaaagtg

SEQ ID NO: 416207 - DNA, 615 bp, Homo sapiens
ttaagttttgacattgaatattagggaggccaggtaaaattatgataatatataatgatgattttcacgtgaatgtaacagttatctggattgtgagtggttgtacaattcgtactgttcatgcctaaaayagcttaactgacccaggcttaataacacagatcaaatcaatcctatggagtcatttgggtggtcagttctaaattaaatcagctatttgggcaaagaactcattggcaatcaacggtctgacagacttaaatttttaataaagtaactgaatgttctagaaatagggtataaaaattaatcctcatctacaagacccagaagactaagtcacatagtaaactgatagcaaaattatatttcagggcttaaaagttttgattcgtttttttgcatgaatatcaaatcattagttacattagtagttatgttgattcagttattcctatcaaatgcatggtccaactgcttctttcatgtttctatctgttgtaatgggtttatatcaccacaaagccctctatggcagcaaacatgttctgctatgtgttctagtctctagccatatgggcaaataataaactcttagatgatgagagaatgcat

SEQ ID NO: 416208 - DNA, 581 bp, Homo sapiens
aactacaatgtgacctaatatgttgtttttaatgcagattagtttcttcaatgccaaggcaacaaaaacctggagtgaaatcctattactcttgcaagctgatgtgcatattctcttctcatacacaaacagcttggagacttggacctaattttatggcatctgtgtatgctagggccactaataacatagacactgactggcaagagttgaatgaactttgttaatctgttaaccagctgggttcacttaggcctagttgacttttttagaggaattattctgtaattggaaatttctatgccccttacattttagatgattgagggacttggtaggtttattctgccttttgatctttaggtgctttttatgtatctattatatagaatcacagacttgaaaaagacttgagtgaggtcagcaagctactgcatgcagccaaatctgtcttgccacctgcctgtttttgtaaaataatattttattagaacacagaaatgctcattcatttaygtattatctgtgggtgcttttacattaaagtggcagaattgagtagttggaacagagattatatg

SEQ ID NO: 416209 - DNA, 575 bp, Homo sapiens
tatatacttttcattataattttgttaaatataatttttattataattttttgttcagaagcttgctattaactatcaatccccggaatataagatccctgaaggtaggaacagagtctatcttgttcactcttaaattcatttagtcattcaaaacatagttatygcactcctattaaattccaggtactattattctaaaaacaaaacataccagtgagaagacagcaggcaaattctctgtacataagcctcattggtcttattttagtgggaagatgtggaatgaatgagtgaattaattaattcatgaatgtgtgctttgttagatggtgataagaaatgcagagtataaagtagttagggcagagggtgtgcaggttgggagtaagggttactgtttataaaggctggcagagaagatctctctaagaaggtgacatttgagcaaagacattaaagaaattatgagtaatacataaagctatctgggggagagctttccagacaaaaggaacattgagcccacaagttcttaagcaggaaagtgctttgcctgattgaggaacagcaaa

SEQ ID NO: 416210 - DNA, 507 bp, Homo sapiens
gaacacacattttgtgccggctttaaagaacccagcacaaagccagtctgcatggcctagagacatattttgctggctaattattacttgtttttctttttgtttttgttgtatttgcctgtttgcttagttcctgacatacaagaaaatcactgtcaaaacattagcttaacatttrttaaggaaacaaaaagacttcggtggccacaccttataaagcaaacagttttgtaaatcactttggaaaatttcactaaaaaaaaaaaaatccttaacaatataataagtaaataaaatttaaaaccacaaaacattagtgtgtttgtagggggtggtctgatttacagagtaaccacatagtaattataattattataatgtccagttttcaaaaaaagttacaaggcataaaagaaaggaaaagtatggctcattcaaaggaacaaaataaattgacagaaaatatctctaaggaagcccagacatcaaacttactagacaaagact

SEQ ID NO: 416211 - DNA, 507 bp, Homo sapiens
gaacacacattttgtgccggctttaaagaacccagcacaaagccagtctgcatggcctagagacatattttgctggctaattattacttgtttttctttttgtttttgttgtatttgcctgtttgcttagttcctgacatacaagaaaatcactgtcaaaacattagcttaacatttgttaaggaaacaaaaagacttcggtgrccacaccttataaagcaaacagttttgtaaatcactttggaaaatttcactaaaaaaaaaaaaatccttaacaatataataagtaaataaaatttaaaaccacaaaacattagtgtgtttgtagggggtggtctgatttacagagtaaccacatagtaattataattattataatgtccagttttcaaaaaaagttacaaggcataaaagaaaggaaaagtatggctcattcaaaggaacaaaataaattgacagaaaatatctctaaggaagcccagacatcaaacttactagacaaagact

SEQ ID NO: 416212 - DNA, 507 bp, Homo sapiens
gaacacacattttgtgccggctttaaagaacccagcacaaagccagtctgcatggcctagagacatattttgctggctaattattacttgtttttctttttgtttttgttgtatttgcctgtttgcttagttcctgacatacaagaaaatcactgtcaaaacattagcttaacatttgttaaggaaacaaaaagacttcggtggccacaccttataaagcaaacagttttgtaaatcactttggaaaatttcactaaaaawaaaaaaatccttaacaatataataagtaaataaaatttaaaaccacaaaacattagtgtgtttgtagggggtggtctgatttacagagtaaccacatagtaattataattattataatgtccagttttcaaaaaaagttacaaggcataaaagaaaggaaaagtatggctcattcaaaggaacaaaataaattgacagaaaatatctctaaggaagcccagacatcaaacttactagacaaagact

SEQ ID NO: 416213 - DNA, 507 bp, Homo sapiens
gaacacacattttgtgccggctttaaagaacccagcacaaagccagtctgcatggcctagagacatattttgctggctaattattacttgtttttctttttgtttttgttgtatttgcctgtttgcttagttcctgacatacaagaaaatcactgtcaaaacattagcttaacatttgttaaggaaacaaaaagacttcggtggccacaccttataaagcaaacagttttgtaaatcactttggaaaatttcactaaaaaaaaaaaaatccttaacaatataataagtaaataaaatttaaaaccacaaaacattagtgtgtttgtagggggtggtctgatttacagagtaaccacatagtaattataattattataatgtscagttttcaaaaaaagttacaaggcataaaagaaaggaaaagtatggctcattcaaaggaacaaaataaattgacagaaaatatctctaaggaagcccagacatcaaacttactagacaaagact

SEQ ID NO: 416214 - DNA, 554 bp, Homo sapiens
caatctgctttactcagtctgcaaattcaaatgttaatctcatccagaaacatgcaaaataatgcttaacttcccagtcaagttgatccataaaattagccatcacaatgctaaaggtaagacataaatgtacaggatcagggaaacgtgatagaaatgtacaaaactgtaaaatgtaaaagcttttggagtaacactttacaattttctttgaaatccatttgttgcctagaggtgggaccctgagtgtgaagtttaaccttagctaagcccttacrttgacaatacacagattgataattaaagtgtacttttcttttcaaacatgttttttttcagtactttaatatctcaggtaatattaaaaacttgtttagttttcccaaatagccataactccacgaactcatttctttttctcatgctttgtatttgaggagaaggcaaacttctcctgctggagttattttctttaggatttttattagtatgtcttcttcaatgtcatcagcactttgcttctcattgctgctatagcaaattaccacacattt

SEQ ID NO: 416215 - DNA, 554 bp, Homo sapiens
caatctgctttactcagtctgcaaattcaaatgttaatctcatccagaaacatgcaaaataatgcttaacttcccagtcaagttgatccataaaattagccatcacaatgctaaaggtaagacataaatgtacaggatcagggaaacgtgatagaaatgtacaaaactgtaaaatgtaaaagcttttggagtaacactttacaattttctttgaaatccatttgttgcctagaggtgggaccctgagtgtgaagtttaaccttagctaagcccttacattgacaatacacagattgataattaaagtgtacttttcttttcaaacatgttttttttcagtactttaatatctcaggtaatattaaaaacttgtttagttttcccaaatagccataactccacraactcatttctttttctcatgctttgtatttgaggagaaggcaaacttctcctgctggagttattttctttaggatttttattagtatgtcttcttcaatgtcatcagcactttgcttctcattgctgctatagcaaattaccacacattt

SEQ ID NO: 416216 - DNA, 474 bp, Homo sapiens
tacaactattacccccattttacaaatgagaactatgaagcacaggagagaggtaaagtaacttaccaaaagtgatatcaacagtaaggggcagactggagtttaaacccaggcagccactccagactacaagcactagaaacctttatggtaggcagaatggcccccaaagatgtcctggaacctgaaacaggtcacagaccacaaaatagggagaggatgctggattatccaagcggggcccatctaatcccatgagcccataaaaggagagaaacttctcctatttaagtcagaaatatagggcagaaggtgaaatcagagagatgtgaagtgtgagagtgacttgatctgcggctgctgtaaggaccatgtggaaagcatgggcagggctcaggtggcattgaggagctaaggccagccagcagggaagtggggarcactccagcagccacagtgaactggatttggcca

SEQ ID NO: 416217 - DNA, 592 bp, Homo sapiens
tatggaattcagaaatctggaaactattggcaatctgaggatatagccatataaatattgtacatctaaccatattttccttaggaaaaaaaggagacaataagcatttctttaaagagcaaaaaaagtaggttttttttctgtawtccactgaaaatataaaatgtaaacaaatttttcattatcacattttatactctaatacaaataagctatgtctataataatgctaatagctatcattaactcaactcttactattcacctatgtatcagtaactatgtgtacctaggtactaactgtactcagcaccgttctgaatgttttaaatgtattaacctaattagccattataacaatccagtgaggagggggtggttatattacatctacattattaaaagctttagcaaatacgttatattacaactatgttatattaagaacctcagttagcctttcaatttaaccatttacatcaagttgatgaggtaagaaaaccaaggttcagtgtgtggttaaataacttgctcaaagtctacaagtcataaatggcagaaaagtaggagtcaaacacaagactattaaaac

SEQ ID NO: 416218 - DNA, 592 bp, Homo sapiens
tatggaattcagaaatctggaaactattggcaatctgaggatatagccatataaatattgtacatctaaccatattttccttaggaaaaaaaggagacaataagcatttctttaaagagcaaaaaaagtaggttttttttctgtattccactgaaaatataaaatgtaaacaaatttttcattatcacattttatactctaatacaaataagctatgtctataataatgctaatagctatcattaactcaactcttactattcacctatgtatcrgtaactatgtgtacctaggtactaactgtactcagcaccgttctgaatgttttaaatgtattaacctaattagccattataacaatccagtgaggagggggtggttatattacatctacattattaaaagctttagcaaatacgttatattacaactatgttatattaagaacctcagttagcctttcaatttaaccatttacatcaagttgatgaggtaagaaaaccaaggttcagtgtgtggttaaataacttgctcaaagtctacaagtcataaatggcagaaaagtaggagtcaaacacaagactattaaaac

SEQ ID NO: 416219 - DNA, 611 bp, Homo sapiens
ttggtcaggatggtctcgaactccggacctcaggtgatccacccgccttggcctcacaaattgtggagattacaggcatgagccacagygcccagcccatggcaatgttctaaacatgttgcatctattaacttatttaagagacccccctgaggcaggtgctactgtccttactttatagaggaaactgagcacagagaagtaacttgcctacagtcacagaaatggaaatagcagagaagctgagatgtgaacacagagtctgtgtatctagccacagtgcaaacctgcttaactgcagcatgaggttatgagtccaggctctgatgatgaggcaggttacctgggtttggatcttggctcttccactgtggggcaacatggtcttgatcaagttctcttcctttgtttcagtttcctcctctgtaagatggacataataatagtatctcctaggattggagctgtcttcaggcttagactttctgggtttctctgttttcttcacactctgtgcaccatccagacctactttaatgagcttctacccatccccctccagggctctggtgaactaatattttcagggtataaatgactgataacaactt

SEQ ID NO: 416220 - DNA, 611 bp, Homo sapiens
ttggtcaggatggtctcgaactccggacctcaggtgatccacccgccttggcctcacaaattgtggagattacaggcatgagccacagcgcccagcccatggcaatgttctaaacatgttgcatctattaacttatttaagagacccccctgaggcaggtgctactgtccttactttatagaggaaactgagcacagagaagtaacttgcctacagtcacagaaatggaaatagcagagaagctgagatgtgaacacagagtctgtgtatctagccacagtgcaaacctgcttaactgcagcatgaggttatgagtccaggctctgatgatgaggcaggttacctgggtttggatcttggytcttccactgtggggcaacatggtcttgatcaagttctcttcctttgtttcagtttcctcctctgtaagatggacataataatagtatctcctaggattggagctgtcttcaggcttagactttctgggtttctctgttttcttcacactctgtgcaccatccagacctactttaatgagcttctacccatccccctccagggctctggtgaactaatattttcagggtataaatgactgataacaactt

SEQ ID NO: 416221 - DNA, 611 bp, Homo sapiens
ttggtcaggatggtctcgaactccggacctcaggtgatccacccgccttggcctcacaaattgtggagattacaggcatgagccacagcgcccagcccatggcaatgttctaaacatgttgcatctattaacttatttaagagacccccctgaggcaggtgctactgtccttactttatagaggaaactgagcacagagaagtaacttgcctacagtcacagaaatggaaatagcagagaagctgagatgtgaacacagagtctgtgtatctagccacagtgcaaacctgcttaactgcagcatgaggttatgagtccaggctctgatgatgaggcaggttacctgggtttggatcttggctcttcyactgtggggcaacatggtcttgatcaagttctcttcctttgtttcagtttcctcctctgtaagatggacataataatagtatctcctaggattggagctgtcttcaggcttagactttctgggtttctctgttttcttcacactctgtgcaccatccagacctactttaatgagcttctacccatccccctccagggctctggtgaactaatattttcagggtataaatgactgataacaactt

SEQ ID NO: 416222 - DNA, 644 bp, Homo sapiens
taccccagtggcatagagagcagaattctacatagggtacactccctgccccagccttgttcaaatttactgtttttggaggccttatttaggtctggccccacsctggagtcttgcctcacagaactgattagaagagatgagagtactgggtggtgaatcctgcagcctttctagagccagtgctcacggtattctgaaacctaaaagcagataaatggaaaaaataaagtatgtattttagggtcttaatttttagtttttttattaaaaccagtgcttgcagagacattccatttaccaacctgttttctattcttggagatgttgttgctctgcaagtcagaaaaaagtaaatataaacacaataaaaatttctctaagctgcattaaagtttttctttctgtatccctctcctctgtctatatttagctttaattctatacattttttaaaaaaatcagtgacagagaaacaaaagaaataaaaatgctgggccctttttctaaatccagggaattattaaacacttaataccagctcccaaggtgctatgaggattaaatcatgtaatgtgttattcccagcaaagtgctctgtaacagtcccttcagcacatagtacctgcttaataatcattgca

SEQ ID NO: 416223 - DNA, 644 bp, Homo sapiens
taccccagtggcatagagagcagaattctacatagggtacactccctgccccagccttgttcaaatttactgtttttggaggccttatttaggtctggccccaccctggagtcttgcctcacagaactgattagaagagatgagagtactgggtggtgaatcctgcagcctttctagagccagtgctcacrgtattctgaaacctaaaagcagataaatggaaaaaataaagtatgtattttagggtcttaatttttagtttttttattaaaaccagtgcttgcagagacattccatttaccaacctgttttctattcttggagatgttgttgctctgcaagtcagaaaaaagtaaatataaacacaataaaaatttctctaagctgcattaaagtttttctttctgtatccctctcctctgtctatatttagctttaattctatacattttttaaaaaaatcagtgacagagaaacaaaagaaataaaaatgctgggccctttttctaaatccagggaattattaaacacttaataccagctcccaaggtgctatgaggattaaatcatgtaatgtgttattcccagcaaagtgctctgtaacagtcccttcagcacatagtacctgcttaataatcattgca

SEQ ID NO: 416224 - DNA, 644 bp, Homo sapiens
taccccagtggcatagagagcagaattctacatagggtacactccctgccccagccttgttcaaatttactgtttttggaggccttatttaggtctggccccaccctggagtcttgcctcacagaactgattagaagagatgagagtactgggtggtgaatcctgcagcctttctagagccagtgctcacgrtattctgaaacctaaaagcagataaatggaaaaaataaagtatgtattttagggtcttaatttttagtttttttattaaaaccagtgcttgcagagacattccatttaccaacctgttttctattcttggagatgttgttgctctgcaagtcagaaaaaagtaaatataaacacaataaaaatttctctaagctgcattaaagtttttctttctgtatccctctcctctgtctatatttagctttaattctatacattttttaaaaaaatcagtgacagagaaacaaaagaaataaaaatgctgggccctttttctaaatccagggaattattaaacacttaataccagctcccaaggtgctatgaggattaaatcatgtaatgtgttattcccagcaaagtgctctgtaacagtcccttcagcacatagtacctgcttaataatcattgca

SEQ ID NO: 416225 - DNA, 580 bp, Homo sapiens
caagactaagcaaaaagaacaaatctggaagcatcacattatctgactccaaactacactacaagactatagttaccaaagcaacatggtactggtataaaaataggcatgtagaccaatggaacagaatagcaaaaccagatataaagccaaatactttcagctaactgatcttcaacaaagtaaacaaaaacacaaagtggggaaagaacactctattaaatgaatggtgcggaaataattggaaagccacatgtagtagaataaaactgaatttttwtctctcactttataaaaaaattaactcaaggccaggcacgatggttcatgcttgtaatcccagcgctttgggagactgaggcaggcagatcaattgaggtcaggagtttgagaccagcctggccaacatggtgaaaccccgttttctactagaaaacacaaaatttagttgggcatggtgccacatgtctgtaatcttaactattcagaaggctgaggcatgagaattgtttgaaccctggaggcagagattgcagtgaacagagatcctgccactgcacttcagcctgggtgacagagc

SEQ ID NO: 416226 - DNA, 580 bp, Homo sapiens
caagactaagcaaaaagaacaaatctggaagcatcacattatctgactccaaactacactacaagactatagttaccaaagcaacatggtactggtataaaaataggcatgtagaccaatggaacagaatagcaaaaccagatataaagccaaatactttcagctaactgatcttcaacaaagtaaacaaaaacacaaagtggggaaagaacactctattaaatgaatggtgcggaaataattggaaagccacatgtagtagaataaaactgaatttttttctctcactttataaaaaaattaactcaaggccaggcacgatggttcatgcttgtaatcccagcgctttgggagactgaggcaggcagatcarttgaggtcaggagtttgagaccagcctggccaacatggtgaaaccccgttttctactagaaaacacaaaatttagttgggcatggtgccacatgtctgtaatcttaactattcagaaggctgaggcatgagaattgtttgaaccctggaggcagagattgcagtgaacagagatcctgccactgcacttcagcctgggtgacagagc

SEQ ID NO: 416227 - DNA, 602 bp, Homo sapiens
gaaacaggctgcttggttgaaatgaggagaccatttatttagctgataacttggtctatctctcaaaattgagaagataaccaaaaaggagaaattgttaaattatagcctgaagctctctgttttcatgtttaattttggtcagtaggttttttgtttgtttgtttttcttttttttttttttttggtacatastaaactgaaacctaactggatatgtaagtagattataacccattcctgtaccagccactgtgattttgccaataaaaggacatcaactcttcaaaccatgttcaaataaggcaaatcccaagctgtaatcaatttggctgtttctgtacctcaatttcattttctgtatgccactttgctttttctgttgatcaatttttttaccatgttgctgtgctggagtctctctgagcctattctgggcccacaggctgcctgatttgcaaatcattctttgttcatttagactctgttacattcaatttctctgaaggttttgtttttttttttagatgtttacagattttatctatgataaaaaataagtaatgtgttgctgggctttgattttctcaactcatccctca

SEQ ID NO: 416228 - DNA, 668 bp, Homo sapiens
ggagggtcgtcaggggagaatcctgactcggggtgctgggttcatgaatgggaagaggtttcctccgcgggcttccctgtccctcttytcccctattaaaatttatgaaagtcaccgcaaaaaaattaatttaatcaaacagtgattcaagaattgtggagcacccagctgtggtttgcagtagtggtccgtgggaggggtttgaaggaaacacttgtataaggtgtatgataaaaccaaattcagtaattggttagtagagttatgtagtttcttaatttgtacaatgaaggaggaaatttcctggtcatgtaatcagaggttaattggcagtttacagttggttaaacatgaattttatttttcacaaggtagtaatttacaaaaaaatgcatttgagttagatttttttaaaaccagaaaccctgggactggagcgacctcagtctaattgcctgccacttaattattttcacactccacaggggacagatcttccccttcatttttcacatgtgtcccaagcagggtctcaagactcctccccctccccatttcccattccttcagcctaactctggcttgcagtaaaatactaaatttccagttccttctgacattcccaaatgccaacttccccttcctaattcacattatcaactatttgt

SEQ ID NO: 416229 - DNA, 668 bp, Homo sapiens
ggagggtcgtcaggggagaatcctgactcggggtgctgggttcatgaatgggaagaggtttcctccgcgggcttccctgtccctcttttcccctattaaaatttatgaaagtcaccgcaaaaaaattaatttaatcaaacagtgattcaagaattgtggagcacccagctgtggtttgcagtagtggtccgtgggaggggtttgaaggaaacacttgtwtaaggtgtatgataaaaccaaattcagtaattggttagtagagttatgtagtttcttaatttgtacaatgaaggaggaaatttcctggtcatgtaatcagaggttaattggcagtttacagttggttaaacatgaattttatttttcacaaggtagtaatttacaaaaaaatgcatttgagttagatttttttaaaaccagaaaccctgggactggagcgacctcagtctaattgcctgccacttaattattttcacactccacaggggacagatcttccccttcatttttcacatgtgtcccaagcagggtctcaagactcctccccctccccatttcccattccttcagcctaactctggcttgcagtaaaatactaaatttccagttccttctgacattcccaaatgccaacttccccttcctaattcacattatcaactatttgt

SEQ ID NO: 416230 - DNA, 668 bp, Homo sapiens
ggagggtcgtcaggggagaatcctgactcggggtgctgggttcatgaatgggaagaggtttcctccgcgggcttccctgtccctcttttcccctattaaaatttatgaaagtcaccgcaaaaaaattaatttaatcaaacagtgattcaagaattgtggagcacccagctgtggtttgcagtagtggtccgtgggaggggtttgaaggaaacacttgtataaggtgtatgataaaaccaaattcagtaattggttagtagagttatgtagtttcttaatttgtacaatgaaggaggaaatttcctggtcatgtaatcagaggttaattggcagtttacagttggttaaacatgaattttatttttcacaaggtagtaatttacaaaaaaatgcatttgagttagatttttttaaaaccagaaaccctgggactggagcgacctcagtctaattgcctgccacttaattattttcacactccacaggggacagatcttcccctkcatttttcacatgtgtcccaagcagggtctcaagactcctccccctccccatttcccattccttcagcctaactctggcttgcagtaaaatactaaatttccagttccttctgacattcccaaatgccaacttccccttcctaattcacattatcaactatttgt

SEQ ID NO: 416231 - DNA, 593 bp, Homo sapiens
cggtggctcatgcctgaaatcccagcactgtgggaggccaaggcagggagatcacctgaggtcaggagttctagaccagcctggccaacatggtgaaaccccatctctactaaaaatacaaaaattagaaattagccatgaatggtgataggcacctgtaatcccagctattcgggaggctgaggtgggagaatcatttgaaccccataggcagaggttgcagtgagctgagatygtgcggctgcactccaccttgggcgacagagcgagactccatctcaagaaaaaagaaagaaagaaaatgaatacatttccacaagaagatgtggtagataattggtgagttatacagattcatgaaaatatcagttcctcctttttcagggtacatttcagtgaatacctctcttctgtatccagtcatcttgatttctgaggttaatgctaaattttttaagatgaaacttggtctatcctagaagtgttcccatatgactaattgtttactacatcatttttaatggatataataaaataattatttatcgttttaaaagattacatacttttgcatttgagatatgtgacgtaag

SEQ ID NO: 416232 - DNA, 449 bp, Homo sapiens
aagcctacaaatgtgaagaatgtggcaaagcctttaaccagttttcaacccttattacacataagataattcatagcggagagaaaccccacaaatgtgaagaatgtggcagagcttttaaccagtccgcaaagctcactgaacataagttaattcatactggagaaaaaccctacaaatgtaaagaatgtggaaaagcttttcaccgatactcaatccttagtacacataagaaaattcatactggggagaaaccccacaaatgtggagaatgcggaaaagcctttaactggtcctcaactcttattacacataagataattcacagtggagaaaaaccctacaaatrtgaagaatgtggcaaagcttttaaccagtcctcacaccttatgagacataagaaaattcatagtaaagagaaaccctacaaatgtgaacagtgtggcaag

SEQ ID NO: 416233 - DNA, 449 bp, Homo sapiens
aagcctacaaatgtgaagaatgtggcaaagcctttaaccagttttcaacccttattacacataagataattcatagcggagagaaaccccacaaatgtgaagaatgtggcagagcttttaaccagtccgcaaagctcactgaacataagttaattcatactggagaaaaaccctacaaatgtaaagaatgtggaaaagcttttcaccgatactcaatccttagtacacataagaaaattcatactggggagaaaccccacaaatgtggagaatgcggaaaagcctttaactggtcctcaactcttattacacataagataattcacagtggagaaaaaccctacaaatgtgaagaatgtggcaaagcttttaaccagtcctcacaccttatgagacataagaaaattcatagtaaagagaaaccytacaaatgtgaacagtgtggcaag

SEQ ID NO: 416234 - DNA, 578 bp, Homo sapiens
tccgtccttattgctgctcacactctccgacccagaatgaaatcccaagacgatggaggagtgcgtgcctcaccaccttgaagctccttctctgctgggaacagaattcaaagtggattcaaggggccctgcggacaggactcctttgatttggcctagtgttggcctcaggaaaaggatgtcctgggaggtgtctgttcttgtgagtggtttgctcctctgatttctagaagagaagttcctttgaggaaaatttgatttgaactcctgtgggtgtcagccagccccccacttcaccgtggtttcaggaaccacgaggaaaacgaaaaacacgcagccccgccacccaagcggagccacaaagagaggcgtaccagaaggtcagcccactcaaacaagcgcaccagtgggtgagaagcatcctttcaccagaccccaattacacrcacactcagaaacacacacacacactcacacgcagacatccaacactcgcaacagtcccaaagaaacacacagtccagcagctgctgaggctgcgcggttctgttccaccaaaaagaccctcccgggagaga

SEQ ID NO: 416235 - DNA, 496 bp, Homo sapiens
aaataaaaccctgagtcttaaaattctgagttctgcttaaacatttaaaaaaatttgttatgtatttttctttgaacatttggtctctctctgcctgcaaacatacagaattttagttttaatttacataaaattagctatgcacgtatgttactctaaataaaccttaggtgcaagaaaattatagagtatatatgaggatgagtytgtacctattttcagaagaatagagcaatattgtaacaaaacaaatattttaataaggtgacttattaactgaaactgaaaacctcaaaaatgctgaaagcaaatctatactctgctttttttttaaatttattactgtaaaatcttctgacttagggttcagaatctccccatgaaaaatttctgtttttccttgcctagtactcatgctagacctataattttcttgtctcttacgattttttcttttatagtttatgaggtattcattacgtgagctggtcatgac

SEQ ID NO: 416236 - DNA, 496 bp, Homo sapiens
aaataaaaccctgagtcttaaaattctgagttctgcttaaacatttaaaaaaatttgttatgtatttttctttgaacatttggtctctctctgcctgcaaacatacagaattttagttttaatttacataaaattagctatgcacgtatgttactctaaataaaccttaggtgcaagaaaattatagagtatatatgaggatgagtctgtacctattttcrgaagaatagagcaatattgtaacaaaacaaatattttaataaggtgacttattaactgaaactgaaaacctcaaaaatgctgaaagcaaatctatactctgctttttttttaaatttattactgtaaaatcttctgacttagggttcagaatctccccatgaaaaatttctgtttttccttgcctagtactcatgctagacctataattttcttgtctcttacgattttttcttttatagtttatgaggtattcattacgtgagctggtcatgac

SEQ ID NO: 416237 - DNA, 386 bp, Homo sapiens
tggccatcactcaattcccaacagcagttggggtgtcctgtttagagtggggattgagaggtgaagccagctaagcttctgagtcaggtggggacttggagaacttttgtgtctagctaaaggattgtaaacgcaccaatcagcatgctgtaaaaacacaccaatcagcactctgtaaaatggaccaatcagcactccgtaaaatggaccaatcagcactctgtaaaacggaccaatcagcaggatatggatggggccaaataagggaataaaagctggccaccagagccagcagtggcaacctgctgcsgtccccttccacagggtggaagctttgttcttttgctctttacaataaatcttactgctgctcactctttgggtct

SEQ ID NO: 416238 - DNA, 180 bp, Homo sapiens
agatctaaataaagttagtctccttatacagttgtttgaaaaatttctataatcttttgtttgatctggcatccatttttaatctygctctagcaccaccagactttctctttctgtaccttgagatgtaaattttgccatttgattttcacctaagagttgtttccttccacatgcaga

SEQ ID NO: 416239 - DNA, 536 bp, Homo sapiens
tagaagcagttgtaagtgtgtatttttaaaggcaaaaaaggaaggcagagagggtactsatacaaagttatctgtcaaaaattcttattgttttatataaataactggttagcgattgactatacattgttaagctatagggtgtgggttatagagtcaagtgtggcattattaggttgtggcaataccaaccaatttaaaaagataaatagttcaaagaggagagcagaatataactgtggtctcattttaatatatctctggtttaaaagaacttgcatgtctcaaataaaagttcttttcttccctcgaatcccaggacatgaattcagaatttggaactgcacatttaggtcttggaaggctggtgagctatgcacatttgtgagcatttggacaagaggaggagagaggaaggtaaattctcgtgtttaatcaatgcacatgtgcgagactggttggggatctggggccctatgatctttgaatcagtgtgagacctgaagatgccaagagcactgaaaaaggtggagtaa

SEQ ID NO: 416240 - DNA, 536 bp, Homo sapiens
tagaagcagttgtaagtgtgtatttttaaaggcaaaaaaggaaggcagagagggtactgatacaaagttatctgtcaaaaattcttattgttttatataaataactggttagcgattgactatacattgttaagctatagggtgtgggttatagagtcaagtgtggcattattaggttgtggcaataccaaccaatttaaaaagataaatagttcaaagaggagagcagaatataactgtggtctcattttaatatatctctggtttaaaagaacttgcatgtctcaaataaaagttcttttcttccctcgaatcccaggacatgaattcagaatttggaactgcacatttaggtcttggaaggctggtgagctatgcacatttgtgagcatttggacaagaggaggagagaggaaggtaaattctcrtgtttaatcaatgcacatgtgcgagactggttggggatctggggccctatgatctttgaatcagtgtgagacctgaagatgccaagagcactgaaaaaggtggagtaa

SEQ ID NO: 416241 - DNA, 593 bp, Homo sapiens
gatgtatattctttccctggtttttttgaaaattttctttttgtttctcattttctacaatttgaatataataygtataacttcttggacctgtatgttattgtagtttcaatcaataaaacgtgaaacttagaaagtgcttggctattatattttttaatattttctatccatccattctctttttcttttttttctggtactgtgtatatgttgtaattttttatattaccccacggtttttggatattttattccgtattattattatttctaattttctctttgcatctgagttttagatgtttctgttgacctatactcaagttccatgattctttagctatattgagtctcctgatgactccactgaaggtacccttcttttctgttacagttttattattattattattattagcacctcttttcggtacatttttatagtttcaatttctcttctgacattgtctacctggccttgtatattattattattattactactatattattttagctcttaacatggttatttaaaagttcctatctgataattcctacaattgtgtcatatcagagtctgattctga

SEQ ID NO: 416242 - DNA, 650 bp, Homo sapiens
gcttggctattatattttttaatattttctatccatccattctctttttcttttttttctggtactgtgtatatgttgtaattttttatattaccccacggtttttggatattttattccgtattattattatttctaattttctctttgcatctgagttttagatgtttctgttgacctatactcaagttccatgattctttagctatattgagtctcctgatgactccactgaaggtacccttcttttctgttacagttttattattattattattwttagcacctcttttcggtacatttttatagtttcaatttctcttctgacattgtctacctggccttgtatattattattattattactactatattattttagctcttaacatggttatttaaaagttcctatctgataattcctacaattgtgtcatatcagagtctgattctgattattcctctctttttattttgccttttcagattgtgaagctttttttgtttactttgcctttgtcattctttgtaatttcttgttgaaagccagccgtgttgcctaggataatagttattgagataaataggacattaacatgaagatttatggtaaatcttcatttaacatatgttaaataatcattatttaa

SEQ ID NO: 416243 - DNA, 525 bp, Homo sapiens
ttttcaacaaccccactgaccccagagacaaagcatgtcccatgtagagctgggaaaaggtttaatactgatagggagggaaaagttcacatgataattcagccaagaaactgagctggccattctggcctctgttctcttgctgtgaacttgagctcccatagccaagtacaactcagggtggccatgtccagagcgtgttaagggcctttcattccatttcctcgtcagtatcccgggaaacrggcagtaaacaccaaaacaacaggacaaggaaataaaatcttaagcaattaattattataagatttccacacaggttccaagaatgaggaataacaagaataagtaggctggataaacatggttttatatggattttattcttccaaatgtcttctatgtacaaactccaagtggaacctaaaacttaaaaaacagagctgtttaacaacactgtcatactagaagcttatgaaggggctgcagcccagcctggccaaccaggcctggcacccgaggggt

SEQ ID NO: 416244 - DNA, 559 bp, Homo sapiens
attccattgatttatgacttctttatttcagcaatgttttktagttttcagtacgtctttaatttccgattaaattcctacatatctgttctttcagatgctactataaaaagaaagttttaaaaaacttgtcctattgcttatttctagtgtatagaaacacaactgattttgtttattgattttttgtcctacaactttgcttaattcatttattagctctaatagttttgttattaaatccttagagctttctacacataagaccaggtcatctgtgaatggagaacttctctcttttcaatttgtaagattttcatttatttgacttctctaattgctctggctagaatttctactactatattgagtaaaaatagcgacagtaggaatcctgctctcgttcccattgttaagggaaagctttgagtctttcaatattgggtgtgatgttagctgtgggtttttcatatatcacctttatcgtgttatggaagatatcttttattcttcatttactgagtgttttaaaagaatgttgaactttatcaaatgattc

SEQ ID NO: 416245 - DNA, 620 bp, Homo sapiens
tttgtttcatgtgtcttgggggttctgtttgatgttcaggtatgttcatcattgtcatatattcttgatggattaaccttttttgaatacacaattttcttgtcttctatgatacattttaaagtctaggcagcacattcagcagtcctgtggatctgtctcttgcttcaacagtgtttggatggaacagatccaggaactctctttcttccagtctccagctaccttccaatcttctctccattttcaaccttcgggaacatcttctcggtcatctcctgcttctgggaccagccaacaccatttttgtagttagctccttcttgctaaccatgagctcccagatttatcagaattattccattgaggtggaggcagccatcawccacctggtcaatttgtacttgtggatcttctaaacctatttctctctgggcttctattttgaccatgatgatgtggctctggaaggcatgggccacttctgcaaatcagctgaggagaagcatgagagcactgagcatcgctcaaagatacaaaaccagtgtggcagcatgctgtcttccaggacatccagaaaccggctcaagataagtggggtacaactttggatgccatgg

SEQ ID NO: 416246 - DNA, 517 bp, Homo sapiens
agtcataaggtcttaggaatatttaaactcttatattcaaggggagctacaccattccagtgttgttttctgttttttcatatagttattacaascttatttttcagtatttttctagctatttaaaatgtgttttctattatacatgaaatacaaccttttatacattttctaactaatgcattttatgcaggagagatctgatattatatattaatactaagctatttgtctatatggtatgctatattttacaattgaacatgggtataactgaaagttcactaaaattttccaggcatactattataccatgtgcaaataaataaaatttgactccttttccaatttttataactcaatatttattctaatttatttttctcactagcaaccttaggacatttctgaaatagctcaaagtgttttcctggacacataaccctaagcatatcaccattttaaagaaaaacattttttttctaatttaattaaaacttttgcttcctttttagtg

SEQ ID NO: 416247 - DNA, 517 bp, Homo sapiens
agtcataaggtcttaggaatatttaaactcttatattcaaggggagctacaccattccagtgttgttttctgttttttcatatagttattacaagcttatttttcagtatttttctagctatttaaaatgtgttttctattatacatgaaatacaaccttttatacattttctaactaatgyattttatgcaggagagatctgatattatatattaatactaagctatttgtctatatggtatgctatattttacaattgaacatgggtataactgaaagttcactaaaattttccaggcatactattataccatgtgcaaataaataaaatttgactccttttccaatttttataactcaatatttattctaatttatttttctcactagcaaccttaggacatttctgaaatagctcaaagtgttttcctggacacataaccctaagcatatcaccattttaaagaaaaacattttttttctaatttaattaaaacttttgcttcctttttagtg

SEQ ID NO: 416248 - DNA, 522 bp, Homo sapiens
gtctcactctatagcccaggctggagtgcagtggcacaatcctggctcactgcaacctctgcctcccaggttcaagcaattctccggcctcagcctcccaagtagctgggattacaggcacgtgccaccacacccagctaatttttgttatttttagtagagacagggtttcaccatgttggtcaggctggtctcaaactcctgaccttaggtgattcacctgccttggcctcccagagtgctgggatttcaggagcaagccaccacgtctggcctgcaatgttttctggttttcagtgtgcatgccttgcaattctcttattttctaattccttcactgaatttgatgctgtcatgaatacattattttttcaattcctttttcatatgtttcattgctgctgatatatagaaaggtaattggtatttatacrttgattctgtatattataaccttactgaagtagtttattagttccagtagtgtttcaaaagttccttagttcaaccattgtggaaagc

SEQ ID NO: 416249 - DNA, 484 bp, Homo sapiens
atattggcctcatagaatgagttggggagttatcctttctcttcaattttatggcaatttgttcaagactggtggcatttcttctttaaatgtttattagagttaatcagtgcagacatatgaccctgggctttttcttgtgaaaactaattaattactaattcaataattttatttgttatagaaatatttacatttgctttctctttgggggtcagttttagtaatttgtatccttcttggaaatggtcctgttttatctaagttgtttaatttgttagtgtaaagttatraacacctttttattagtattcttttataatgatttgatttcctcctaaagtttgtcatgaagtgccttctttcatacttgattttgatcatttttgtcatccttcattttcttcaggttcattattgataaatagttctcaatttatatctttttaaataaatcagttttagatttactaattattgtttt

SEQ ID NO: 416250 - DNA, 595 bp, Homo sapiens
gttcatgtaaaaaacaccacacctaactagaagtctacacatttaagagcaagcaaacagaaaaatacattgttagtgataacactttgcagcatataaatgatgggaaatgaataratgttgaaaatgacgtggtgcaaaaaacataaagcaatcatgaattaactttgtaccagcaaaactgaaaataacacctattttatgaaatgaaccaaagtgaaaaggcaaaagaaaagaaactgagattgcttaaataatttgatatattaatatattacaaaaaagaaatagatagatcacatcatctggctcttgcaattcaatttaaaggatcaaaaatatgaggcttattccacagaaaaaataaagtaatcttaattattctatataacattagccagaaactactacaatcaatgcatgtttttcattttatacaggacacttggctggttggtaaaaaataaggtaacatgaagttttcagatgaacaaaaactgaaataacttatttattagaatagaatactaaatacaatagaatagaacactaaaaaatgtaaaaaagtatgtacttcaggcagaaggagcattat

SEQ ID NO: 416251 - DNA, 602 bp, Homo sapiens
catcatctggctcttgcaattcaatttaaaggatcaaaaatatgaggcttattccacagaaaaaataaagtaatcttaattattctatataacattagccagaaactactacaatcaatgcatgtttttcattttatacaggacacttggctggttggtaaaaaataaggtaacatgaagttttcagatgaacaaaaactgaaataasttatttattagaatagaatactaaatacaatagaatagaacactaaaaaatgtaaaaaagtatgtacttcaggcagaaggagcattatcacagatgaaaaattgaagatgcagaaagggatcaaaagaattgtgagactatattgaaatgaacactgtattaaaacaagaacactaacatttttaggatgtagactatacaggtgaaattaaaatatatgacaacgagagcatagaaatcaggaaagggacaaacagaactgaaatgtctgagtgtgcttttgcttcacaggactagagtacaattatcaattaatatttgaattttataaattaagaaggcttattgtaatttctaggaaatactacaggatgactaaaaaaaaaaaaaaaca

SEQ ID NO: 416252 - DNA, 602 bp, Homo sapiens
catcatctggctcttgcaattcaatttaaaggatcaaaaatatgaggcttattccacagaaaaaataaagtaatcttaattattctatataacattagccagaaactactacaatcaatgcatgtttttcattttatacaggacacttggctggttggtaaaaaataaggtaacatgaagttttcagatgaacaaaaactgaaataacttatttattagaatagaatactaaatacaatagaatagaacactaaaaaatgtaaaaaagtatgtacttcaggcagaaggagcattatcacagatgaaaaattgaagatgcagaaagggatcaaaagaattgtgagactatattgaaatgaacactgtattaaaacaagaacactaacatttttaggatgtagaytatacaggtgaaattaaaatatatgacaacgagagcatagaaatcaggaaagggacaaacagaactgaaatgtctgagtgtgcttttgcttcacaggactagagtacaattatcaattaatatttgaattttataaattaagaaggcttattgtaatttctaggaaatactacaggatgactaaaaaaaaaaaaaaaca

SEQ ID NO: 416253 - DNA, 602 bp, Homo sapiens
catcatctggctcttgcaattcaatttaaaggatcaaaaatatgaggcttattccacagaaaaaataaagtaatcttaattattctatataacattagccagaaactactacaatcaatgcatgtttttcattttatacaggacacttggctggttggtaaaaaataaggtaacatgaagttttcagatgaacaaaaactgaaataacttatttattagaatagaatactaaatacaatagaatagaacactaaaaaatgtaaaaaagtatgtacttcaggcagaaggagcattatcacagatgaaaaattgaagatgcagaaagggatcaaaagaattgtgagactatattgaaatgaacactgtattaaaacaagaacactaacatttttaggatgtagactatacaggtgaaattaaaatatatgacaacgagagcatagaaatcaggaaagggacaaayagaactgaaatgtctgagtgtgcttttgcttcacaggactagagtacaattatcaattaatatttgaattttataaattaagaaggcttattgtaatttctaggaaatactacaggatgactaaaaaaaaaaaaaaaca

SEQ ID NO: 416254 - DNA, 489 bp, Homo sapiens
ctctgtacctttcattcagtttttgctgtgaactgctctaaaaaaagtccattaaaaatcaattggacatatgtgtgtgcatttatttctggattttcaattctgttccattttatgtgtctctgcctccagcartactatactgtcttgattactgtagctatacagtaagctttaacagcagattgagtgattcctctcagtttattcttgttttatgaaatgtttttgctattgtaggctctgtcctctccatataaatgcaagaacgagcttgtctatatctgtaaaaaaaatttgctgggatttttacaggaattgtattaaactcataggtcaatttgaaagaattgacatatttctatattgagtctcttatccatgggtggtatcttatccattgtatggatgtctctcaatttatgtaggtaatttttaataaaaaaattagtacttaaaattttccacatgattctgtatgttttggta

SEQ ID NO: 416255 - DNA, 623 bp, Homo sapiens
tgtatgttttggtagaattatacctgaatatatacatttggagcaattgtaaatggtattgtgtaatccatctgagattttgcacatggtaggtcctctactctcagaattgttaataaaagccaatataattgcctagaagacaattttctgagaatcacttttccattatgaaagtgcattgagcctttagaattcctgggagttgagaattgtggctttgtggttcctattcaagcctctttctaaaaattacaagctaccgtccttggggaaagctggtgagttggacttcttcctagttgtggaggtcagccastttttcctattggtagatttagcgatttagatataaatatggcttgaatgtaagcctcatgagcgcaaagcccctgagtcactgctgggctttcaacaacaaggggtgtggctaaacacagtagctgcatatgatggactcaatgtttcagcatttccccaaattcaagtgttgaaatcctaacccccaacatgatgtttgttgtttaaataggatgcagtcacctggagtccacactccaggagagctgagggtccctggctgagagccacagagtgggcagcaccctgtcaagctgtgagtg

SEQ ID NO: 416256 - DNA, 560 bp, Homo sapiens
tttctaaataggaaagttacactgaatgggattaaaacatattagacgctgaagaagaaaaaagtttaatgggcttaaaggaatagcaatggaaactatctaaaatgaaacacacaaagagaaaaaaaggcctacaacataaagtaacaatgagctagtgaacawgtcacctaaaaaatgtgtcatacattcccagaaggaaagaagaataacagagaaacaaacaaaaaactgaagaaagagtagttgaaatttttgcagattcagtgaaaactatattccaattccagaaagctcagcaaacatcaagcagaataaagaacaaaaaaattatactaggcagcatcacaatcaacttgctgtaagtcactgataaagagaatgtattaaaggcagccagaggaaagaaggcatattatgtatagagaaacacatataaaaatgaggatgaatatcagaaacaatggaacccacatctttaaagcactgagagaaaaaagctgtcaagcttataatcctatatctacaaaaacattttttccccaaaatgaaggcaaaat

SEQ ID NO: 416257 - DNA, 560 bp, Homo sapiens
tttctaaataggaaagttacactgaatgggattaaaacatattagacgctgaagaagaaaaaagtttaatgggcttaaaggaatagcaatggaaactatctaaaatgaaacacacaaagagaaaaaaaggcctacaacataaagtaacaatgagctagtgaacatgtcacctaaaaaatgtgtcatacattcccagaaggaaagaagaataacagagaaacaaacaaaaaactgaagaaagagtagttgaaatttttgcagattcagtgaaaactatattccaattccagaaagctcagcaaacatcaagcagaataaagaacaaaaaaattatactaggcagcatcacaatcaacttgctgtaagtcactsataaagagaatgtattaaaggcagccagaggaaagaaggcatattatgtatagagaaacacatataaaaatgaggatgaatatcagaaacaatggaacccacatctttaaagcactgagagaaaaaagctgtcaagcttataatcctatatctacaaaaacattttttccccaaaatgaaggcaaaat

SEQ ID NO: 416258 - DNA, 560 bp, Homo sapiens
tttctaaataggaaagttacactgaatgggattaaaacatattagacgctgaagaagaaaaaagtttaatgggcttaaaggaatagcaatggaaactatctaaaatgaaacacacaaagagaaaaaaaggcctacaacataaagtaacaatgagctagtgaacatgtcacctaaaaaatgtgtcatacattcccagaaggaaagaagaataacagagaaacaaacaaaaaactgaagaaagagtagttgaaatttttgcagattcagtgaaaactatattccaattccagaaagctcagcaaacatcaagcagaataaagaacaaaaaaattatactaggcagcatcacaatcaacttgctgtaagtcactgawaaagagaatgtattaaaggcagccagaggaaagaaggcatattatgtatagagaaacacatataaaaatgaggatgaatatcagaaacaatggaacccacatctttaaagcactgagagaaaaaagctgtcaagcttataatcctatatctacaaaaacattttttccccaaaatgaaggcaaaat

SEQ ID NO: 416259 - DNA, 560 bp, Homo sapiens
tttctaaataggaaagttacactgaatgggattaaaacatattagacgctgaagaagaaaaaagtttaatgggcttaaaggaatagcaatggaaactatctaaaatgaaacacacaaagagaaaaaaaggcctacaacataaagtaacaatgagctagtgaacatgtcacctaaaaaatgtgtcatacattcccagaaggaaagaagaataacagagaaacaaacaaaaaactgaagaaagagtagttgaaatttttgcagattcagtgaaaactatattccaattccagaaagctcagcaaacatcaagcagaataaagaacaaaaaaattatactaggcagcatcacaatcaacttgctgtaagtcactgataaagagaatgtattaaaggcagccagaggaaagaaggcatattatgtatagagaaacacatataaaaatgaggatraatatcagaaacaatggaacccacatctttaaagcactgagagaaaaaagctgtcaagcttataatcctatatctacaaaaacattttttccccaaaatgaaggcaaaat

SEQ ID NO: 416260 - DNA, 527 bp, Homo sapiens
aaacaaaactgtattaaaaatcacattaaatataaatgtcctcaacggccctaataaaagacaaagattgtcaaattgtatgcaaaaagcaagacccaactctatgctctctgtaccaactcacttcaaatataacatctcagatagattaaaagtaaagagatgaaaaacatatcaaacaaacactaatcaaargaataccatgttagctatgttaatatcaggtggatattagagaaaggaataccatgagaaatttaaaaaagttatttaatggttataaaggggttgtattagtttgttggtgctgctataacaaaatatgttagactgggtgattcatagagaacagatatttattttctcacagttctggaggttggaaatctgaaatcaaagttccatcaggcttggttgtctggtgagggtggctttcttcttctaagatgacaccttgttgctgcatcctcctgagaggagagatgctgtgtcctcatgtggcagaaggcgcaacagagccaaaaact

SEQ ID NO: 416261 - DNA, 527 bp, Homo sapiens
aaacaaaactgtattaaaaatcacattaaatataaatgtcctcaacggccctaataaaagacaaagattgtcaaattgtatgcaaaaagcaagacccaactctatgctctctgtaccaactcacttcaaatataacatctcagatagattaaaagtaaagagatgaaaaacatatcaaacaaacactaatcaaaagaawaccatgttagctatgttaatatcaggtggatattagagaaaggaataccatgagaaatttaaaaaagttatttaatggttataaaggggttgtattagtttgttggtgctgctataacaaaatatgttagactgggtgattcatagagaacagatatttattttctcacagttctggaggttggaaatctgaaatcaaagttccatcaggcttggttgtctggtgagggtggctttcttcttctaagatgacaccttgttgctgcatcctcctgagaggagagatgctgtgtcctcatgtggcagaaggcgcaacagagccaaaaact

SEQ ID NO: 416262 - DNA, 527 bp, Homo sapiens
aaacaaaactgtattaaaaatcacattaaatataaatgtcctcaacggccctaataaaagacaaagattgtcaaattgtatgcaaaaagcaagacccaactctatgctctctgtaccaactcacttcaaatataacatctcagatagattaaaagtaaagagatgaaaaacatatcaaacaaacactaatcaaaagaataccatgttagctatgttaatatcaggtggatattagagaaaggaataccatgagaaatttaaaaaagttatttaatgrttataaaggggttgtattagtttgttggtgctgctataacaaaatatgttagactgggtgattcatagagaacagatatttattttctcacagttctggaggttggaaatctgaaatcaaagttccatcaggcttggttgtctggtgagggtggctttcttcttctaagatgacaccttgttgctgcatcctcctgagaggagagatgctgtgtcctcatgtggcagaaggcgcaacagagccaaaaact

SEQ ID NO: 416263 - DNA, 527 bp, Homo sapiens
aaacaaaactgtattaaaaatcacattaaatataaatgtcctcaacggccctaataaaagacaaagattgtcaaattgtatgcaaaaagcaagacccaactctatgctctctgtaccaactcacttcaaatataacatctcagatagattaaaagtaaagagatgaaaaacatatcaaacaaacactaatcaaaagaataccatgttagctatgttaatatcaggtggatattagagaaaggaataccatgagaaatttaaaaaagttatttaatggttataaaggggttgtattagtttgttggtgctgctataacaaaatatgttagactgggtgattcataragaacagatatttattttctcacagttctggaggttggaaatctgaaatcaaagttccatcaggcttggttgtctggtgagggtggctttcttcttctaagatgacaccttgttgctgcatcctcctgagaggagagatgctgtgtcctcatgtggcagaaggcgcaacagagccaaaaact

SEQ ID NO: 416264 - DNA, 641 bp, Homo sapiens
tacctgttctcagcagtcttgctgaagttcactgtgcaatcattgagcctctagagtaattgtacaatttctttcatggtcacttgttttctgtatttttctgcatttttggaagttttggtcacgggctttctatatttttctgaatacattttggaagtttgttccctgaaaacgtatctatttcaacaagatgttaaagygtattagtgtagcaggtgtgaacatacactgccaagaaaagatgcaaatcactttgcttttataaccatgtgaacttctccctcccacttgtgttccaacacagcagcaaatagctctaataataatgcaatctagtgacgtcagtgctgtctgttaactttttagtggctttcagttgagaactgtatttcttaggcaaatggttatcccaatgcaagtattgttgttaccaggcactgtccacttgaagtcatttttctgctgtatcctttgagactaagcttctccccatggttcctataaaagcaatgagaaagaagagagaggtttacatccagcctgaagtagcgaggagcctctgcccaggactgtgcccctcctctgcagactgcctgcccactctgcatcactgttgtccagaggactgggcgggtctg

SEQ ID NO: 416265 - DNA, 615 bp, Homo sapiens
acagtgggagggaagcctgacggagtcttccatcttatatataaaaatataagtaaacttacattttatatgaccttgccctagctctttgaggtcccaattcccctgggtcaggaaaagatcatccctgagaaaacagaggtcctcatggttgaccatgctgcaacttggaatgaggctctccttgcaggacagagggggcagcacattaggcctggatcccaaagtgcagagattccttttgggaaagtttagggccagatccagatgtgtggttctaccagcagccggttctagggaggtaatgtcatcctccgtattcagctgtttcccccaagattttatagagtacatattggtagcattaacaaagtgagctgtggagtctacttttygggaacagccatacaatagttggggcaagtcagcgtacaagacaatggcctgcattcaggcaaagggaggccaacccagaaagccccagaaactctgaaacatcgcaaaatataaaggagacccccagatctgcgaagggctgaggagatagcagcacaagtccacacattcttgaaggagaggaggggatctggaagaacaaaattggaaaggagcatc

SEQ ID NO: 416266 - DNA, 616 bp, Homo sapiens
gcagcacaagtccacacattcttgaaggagaggaggggatctggaagaacaaaattggaaaggagcatcrcacacagacagctagcaacatacagagaaatactcaaaccctactagccatcagcaaactgcaggttcacctgacatcccatccagaggttttatatcctcaaaccacaaccaaaacatgtaaacccattgagtcagccgggctgcaccaggacggactctacttcagagatttctgtaacttcctgcttctggtaaagctgaaaacgccctcatgatggattttctgatggttttaacccaatgctaacaaccttccttggaacaggcactgctgaaaacagtgcaaagtcaccgccacttcctgggatcttagggggtgtttggtttttgagcaaaactgttttctgagattcacactcaagacctcatggggatcttacaaaggggacaaagaaccaaaatgtgtcctgtctctaactatgccaggcaggcagaggaaacaggccaggttctaacagcaagaggttgataaaaaggctcagttctatgagacaagacaaggtgtgtaacatcggttttataaaatgatggaattgattcacat

SEQ ID NO: 416267 - DNA, 576 bp, Homo sapiens
tgcacctatctggaagaattgggattagaggtgaaagaggccgggcgcagtggctcatgcctgtaatccctgcactttgggaggccgaggcgggcggatcatgaggtcaggagatcgagaccatcctggctaacaaagtggaaaccctgtctctaccaaaaaaatagaaaatattagccgggtgttgtggcaggcgcctgtagtctcagctactcagctactcctgaggcgggagaatggtgtggacccaggaggtggagcttgcagtgagccgagatctcgccactgcactccagcttgggcgacagagggaggctccgtctcaaaaaaaaaaaaaaaaagtaagacctggtccctgactttgaagaggaaaaacagacataaaatcaattttcttaaaagcagaataagctccattatagaggtcaataatagagcacaagaaaatcatagtaaaaggtaatgaaaaatctggaggcwtcaggcaagacttagagaaacggtgacctttcaactttgatttgaagctctaagaatgtcattgagagcttacacaaaatggcagaaaacagtgta

SEQ ID NO: 416268 - DNA, 566 bp, Homo sapiens
acattagttcaaacagacttacggagagatacatacatgcacccacccccaaccacgccacctactcctgycctcaactcactcacagactttttaaagtaagaagttagtattggtataaaactattagctagactgcagacattatttggatttcacctgttttcccacctggtgccatccaggatcctctcttgcatttagttgtcatgtctcatttgcagggtgaccagctcatcctagtttgctctatttgtctcaattttaaaaataaaagttttgcattccaggaagctcatttgtcctgagtcaactgagacagctggtcactctactccttactcttttgcaatctgtggcaatttttagtctgttctcatctttcatgaccatggttcactgctaaagggtgctttttggtatgttgtagaatgttcccagtttgggtctgtctggtgtattctcatgattagacccagggttatggatctggggaggaatatcacagaggcatcttgtccttcttatcatgtcacgttgggggtgctgatgttaacacaagttat

SEQ ID NO: 416269 - DNA, 490 bp, Homo sapiens
gcattccaggaagctcatttgtcctgagtcaactgagacagctggtcactctactccttactcttttgcaatctgtggcaatttttagtctgttctcatctttcatgaccatggttcactgctaaagggtgctttttggtatgttgtagaatgttcccagtttgggtctgtctggtgtattctcatgattagacccagggttatggatctggggaggaatatcacagaggcatcttgtccttcttatcatgtcacgttgggggtgctgatgttaacacaagttattaccgtgatgttygtttggatcgcttggctcaggccggttggccaggttcctccaccgtcatgtgacctttacccctttctgtagtctgttcattagagccactaagtccagccccactcaagggctgtggaataattccagctcctaggaggaagaaggagctttgaatttgtggacatatgttaaaaccactcagtaattgat

SEQ ID NO: 416270 - DNA, 555 bp, Homo sapiens
ttaatctgcctatcgtaaccattttactacctatatgtatcctataacatcatattgcaaatctcaaatatgcacaataaaaatttcatttttaaaaaaagaatgttcatataagttgtatttatgatgrccattaatagcttagaataggcaaaaactataataattaaaatcagaatagaggttttgtctaggatgttgggggtgagcgttgattggaaagaggcataggagaaatttctagggtgaagaaaatattccatcttgacaggtggtgggttacagttaggtaggtgtacacatttgtcagaatccagcaaagtatatatttaagatctctgcattttcctctatgcacagatctcaaatgcacagatttattatacctcaataaagaggtactttgcaaattttttaaaaagtctcggcaaagagctttaaaactgatatgccttttaataaagtattaatagctctattactaggtatctattggaaaaatacaaaatgtgataaaagctttatgtacaaaggagttgtaaaaatattcttata

SEQ ID NO: 416271 - DNA, 555 bp, Homo sapiens
ttaatctgcctatcgtaaccattttactacctatatgtatcctataacatcatattgcaaatctcaaatatgcacaataaaaatttcatttttaaaaaaagaatgttcatataagttgtatttatgatggccattaatagcttagaataggcaaaaactataataattaaaatcagaatagaggttttgtctaggatgttgggggtgagcgttgattggaaagaggcataggagaaatttctagggtgaagaaaatattccatcttgacaggtggtgggttayagttaggtaggtgtacacatttgtcagaatccagcaaagtatatatttaagatctctgcattttcctctatgcacagatctcaaatgcacagatttattatacctcaataaagaggtactttgcaaattttttaaaaagtctcggcaaagagctttaaaactgatatgccttttaataaagtattaatagctctattactaggtatctattggaaaaatacaaaatgtgataaaagctttatgtacaaaggagttgtaaaaatattcttata

SEQ ID NO: 416272 - DNA, 570 bp, Homo sapiens
ctctgagtctaatgaaacaaaggccagctcttgtgctggtgtttcggggacctcaccccatcagggtggagaagacatcacaattgtttgagaataaggtttgttttgcttcctgtggcaccagcaacatgcaccatgagcatgggctggagtcttcatgactgccactgatccagggaagcaggctggcgggagggtgattccaatgtcaccacagtcttttaccacaacacagtggcttcttattaagtatctctttggttgttataagtttttgactagattccagaattctgcagaattctgacagtttttgtcagttcattagttgcttttgtggaggaaggaagattggggattttctagtctgccatttttcagtgatgtttaatatatttttaacttcgattatrgaaaattaatataaaacatgctttaatgactattgtcatcaatggaatgatatacaatttccatttttgaaaatgtttccaattctatattctttactcatgtatagaccttcatgctaaaatactcaatgtatgtccttcaagtcattaaatatgc

SEQ ID NO: 416273 - DNA, 570 bp, Homo sapiens
ctctgagtctaatgaaacaaaggccagctcttgtgctggtgtttcggggacctcaccccatcagggtggagaagacatcacaattgtttgagaataaggtttgttttgcttcctgtggcaccagcaacatgcaccatgagcatgggctggagtcttcatgactgccactgatccagggaagcaggctggcgggagggtgattccaatgtcaccacagtcttttaccacaacacagtggcttcttattaagtatctctttggttgttataagtttttgactagattccagaattctgcagaattctgacagtttttgtcagttcattagttgcttttgtggaggaaggaagattggggattttctagtctgccatttttcagtgatgtttaatatatttttaacttcgattatagaaaattaatataaaacatgctttaatgactattgtcatcaawggaatgatatacaatttccatttttgaaaatgtttccaattctatattctttactcatgtatagaccttcatgctaaaatactcaatgtatgtccttcaagtcattaaatatgc

SEQ ID NO: 416274 - DNA, 567 bp, Homo sapiens
tttgcaacatcctaatgaaaacattgataataataaaacaacttattttcacatagacctttagatgaaaaaatcctacacgtgatttatcttctttcatcttcaaaaagctgcgaatcacttgacattattatctctatttttcaaacaagaaaatgaagacagtgagaagttaagtaatatgcctgcagtctggaggagggaataaagatacaatcctaggtttggcattccaaacaccatgctttttcctctgttacactgtcccacataaatttatctccagtaatctccaagggtgggtattagagctatccatcctcagaactctgatgtggagaaggaatattacagcaaaaagagcagactttgtcaaaacaatgtstctgtcagtccctgtcattgaaccacatgagaaaaactaactcgtcaactggagcttcgcagaaggtccggccacctgcaggctggggtcttaaagaggaaaagtgcccagcccctggttgacttacctcaccgcaccttaaatgtcttgatattattacaagccgtgtttgggagagaagg

SEQ ID NO: 416275 - DNA, 446 bp, Homo sapiens
aaagcaccttgttctctagctacatcctggttttactgctgctgtgactgagtcaatgaagcacctactgtgtgccaggtgggccataaaagttgaggctaggattcctgcactcaaagaggtctgcatatgttagttgcggaaatgcaaagctaacccatgtagaacaagcaaagagcaatgaaatgctttgccctgattgtaggagcccaagatctgggaaagtgggtaacagactgggctgcaggaaggagggcaggctttacagaggcagatggatgatggagagagaattctggtcagggcaacagyctggacaaaggcacaaaggtaaggatgaggctggcacaggtgttcattcttttgtttaatcatttattaattcaacaaacatgagcatctcctaaaaccaagagacttttcttggtcctggggacatggctctt

SEQ ID NO: 416276 - DNA, 602 bp, Homo sapiens
tgagcaaaggatctgttccaggacactgtccttggcttgtagatggccactgtctccctatgtctttacaacatcctccctctgtctgtgtccaaatttcctctttatataaagataatagtcatattgatttagacccactctgttggcctctttttaacctttgtgaagaccccatctccaaatacagtcacattctgaagtattgggggttaagatttcaacatatgaattttgggggatgagactcagttcagcccggaacaacagccatttcaccatggcctttaatctcatctagttgagcaatattccttctctgctattttgtccttaggcatgaaaaatattcacacagcttcattacagaagtgatgaaggctgtaataaatgagtgattattgcactagctgatgtataataaaccccatgcctgcagggcccctgtttcttgcttccttccaaggtcrtctttcttccttctaagaacagatgacctcaccttggatgttgcttggtttgttttgttttcctccaggggatgcacctcctaccccacagccaaagtgcgctgacttccagagcgccaacctttttgaagg

SEQ ID NO: 416277 - DNA, 557 bp, Homo sapiens
ctgaataaatgttcaagaaaatagaaaacatgaacttacctccaatctatgttccctttacttgaaaatgtaatgttgatctactagaggtaaggcaggaattgtcacatccatattccttgcaactattcaaaatatgcatctgagaccagaacaagacacaggtgaagaagggtgctcactaggccccttctgccaatacagaaggagacagtgcagtggagtcctttcatagcaagttctgccttcatgatttccaaagcttcagtattccaaatctmaggtgaatagggtggtatccactaagctctgccacaaacttgttgctgagatgaaggaagccgccgctgtagtcagtatttctcacccacacggtttgctctctttctggctggtgtgggaaggatggcgtcttttttttttttttttttttgagatggagtcttgctctgttacccaagctggattgtagtgttgtgatctcggctcactgcaacccatgcaaggtgctgtcaggttccacctgtgcaaacaagtacactggtccagcatgggtc

SEQ ID NO: 416278 - DNA, 557 bp, Homo sapiens
ctgaataaatgttcaagaaaatagaaaacatgaacttacctccaatctatgttccctttacttgaaaatgtaatgttgatctactagaggtaaggcaggaattgtcacatccatattccttgcaactattcaaaatatgcatctgagaccagaacaagacacaggtgaagaagggtgctcactaggccccttctgccaatacagaaggagacagtgcagtggagtcctttcatagcaagttctgccttcatgatttccaaagcttcagtattccaaatctcaggtgaatagggtggtatccactaagctctgccacaaacttgttgctgagatgaaggaagccgccgctgyagtcagtatttctcacccacacggtttgctctctttctggctggtgtgggaaggatggcgtcttttttttttttttttttttgagatggagtcttgctctgttacccaagctggattgtagtgttgtgatctcggctcactgcaacccatgcaaggtgctgtcaggttccacctgtgcaaacaagtacactggtccagcatgggtc

SEQ ID NO: 416279 - DNA, 557 bp, Homo sapiens
ctgaataaatgttcaagaaaatagaaaacatgaacttacctccaatctatgttccctttacttgaaaatgtaatgttgatctactagaggtaaggcaggaattgtcacatccatattccttgcaactattcaaaatatgcatctgagaccagaacaagacacaggtgaagaagggtgctcactaggccccttctgccaatacagaaggagacagtgcagtggagtcctttcatagcaagttctgccttcatgatttccaaagcttcagtattccaaatctcaggtgaatagggtggtatccactaagctctgccacaaacttgttgctgagatgaaggaagccgccgctgtagtcagtatttctcacccacacggtttgctctctttctggctggtrtgggaaggatggcgtcttttttttttttttttttttgagatggagtcttgctctgttacccaagctggattgtagtgttgtgatctcggctcactgcaacccatgcaaggtgctgtcaggttccacctgtgcaaacaagtacactggtccagcatgggtc

SEQ ID NO: 416280 - DNA, 579 bp, Homo sapiens
tgccaacactgtcgctacagtaaggacctgaagtgactttgagaaattcaccctcacaaaccttccttcaggagcaggcattggtagtgcagaggcacagattccgtcctttaccagctgcagaatcttgggcaagttacatagcctctgtgagcctcatcggtaaacagtgggggttatgaaacccacctcacagggttgttgtgaggatccaatgagttgatttaggtaagcacctagcacatgccrtggcaccaagtaagcactcaataaatcactcaactcctttccctatgttgtttctttgcattgtctgaaaggatcaatggagtcaaagatccagcttttcactggtggttattttttatttttcaattaagattcaaatttatggaagtggaaatttaaaaacctcgttttcccttaggctgtgacattcaacttacaaatctctttttctgttgatgaacctagtattaaacaatagtttttagagggacttttacaaacttagttaattagattttcttaaacatcttaaagtagatttataaatgtaatatattctattttcctttt

SEQ ID NO: 416281 - DNA, 494 bp, Homo sapiens
tctcatccctcgctaggcacttgagggctggggaagtcttacttattgctgtggccccagcaccccacacaaggccacatgtgtgacatttagttggtaattcttttttttttttttttttttttgagacggagtctcgctctgtcgcccaggctggagtgcagtggcacggtcttggctcactctgcctcccgggttcacaccattctcccgcgtcagcgtctcgagtagctgggactacaaggcgcccgccactacgcccgactaattttttgtatttttagtagagacaggatttcaccatgttagccaggatgtagttggtaattcttaaatgttggttaaactcagctgttacctgctagtaggacaattcatgtgccccrttctggcaagggtaaggttaacacttgtggttttagagacttctagttccactttccagtttacttttgcttctctccctattcaaaccagcaggaaaagagagtagt

SEQ ID NO: 416282 - DNA, 593 bp, Homo sapiens
ttaaaattaactaactgaatccttaacaaccattctaagaggcagatattattatcccactttatgcgtgagggcccagaaccctggcaagggcggcacactcagtacgctcttcaagcatctgggcacacccggtccactacagtcctacaaagtcggacgtgagcacgggcgaaggcgtcagccggggccacacgggagtcactgaccacagccaggcgagagccggctttccggtgccgccacattccgggcaccaggctccgggctcttcagagcatttggggcgggcgacggaggtcccktccactctcgcttgggtgcagaagggcgcggcggtgccaggaagccgccttggaggctccaagattagctcactcagcgcggccaagcgcaggtgcgggggccctcgccgccaccctgcttatctggggacagtcccggaacccggtgacccggctccgccccaacccgcgccctcgtccacccgcagcagccaaggcctcttccccggccccgggagcccgcgccacgcccgtcgctcgcgcgttccagtccaggctacagcaggtatcgcgatcccggccctcggc

SEQ ID NO: 416283 - DNA, 588 bp, Homo sapiens
ttgctgcaaatggcaggatttccttctttttaaaggctgaatagtattcctttgtgtatgtataccacatcttctttttttttattcattcattagttgatgggctcttaggttggttctatatcttggctattgtgaacagtgctgaaataaacgtgagagtgcagatatctctttgatatactgacttcctttcctttcttttggatatatacccagtagtggaattgctggatcatatggaagttctatctttagttttctgaggagcctccatcgtattctccatagtggctayactaatttacactcctaccaacagaaaaacacccttttaaccttttaaggaatgtatgggttaaagaataatcacaatgaaaagtacagaatattaaaaactaaacgacaataaaaccagcacatatcaaaacttgcaaagagtggctaaaacagcacttgggttgttaaaataattctttgggaagccattagactgaggaagctctagtggttgagttcctacagaagctcaccacaccccaactcatagtgaagagctgtgtcctaggaaactgaggcttaagcttt

SEQ ID NO: 416284 - DNA, 514 bp, Homo sapiens
gcaatcccagtactttgggaggcaaggcaggcagaycacttgaggccaggagtttgagactagcctggccaacatgttgaaaccccatctctactaaaaatacacaaaattatctgggcatggtggcacatacctgtaatcccagctacttgggaggctgagacacaagaatcacttgaacccgagaggcagaggttgcagtgagctgagattgtgccactgctctccagcctgggtgacagagcgagactgtctcaaaaaaaaaaaacacgccacaggggacaaaaaaaaataaccatacagaaagagctggcagggtagcacgtgcctatagtcccagctacctgagaggctgatgggggaagattacttgtgcccaggagattgagtccagcctgagcaacacggcaacactccatctctgaaaaaataatttttaaagaaaaaacatggaaaggcttcatcttaggacaacttagtaacactttaagcacagaagagagaaacataagta

SEQ ID NO: 416285 - DNA, 629 bp, Homo sapiens
aatcattcaggagcaggttatttaatttccatgtatttgtattgttttgaaggttacttttggagttgatttccagttttattccactctctcagtggtctaagagagtacttgatataatttaaattttcttaaatttattaagacttgtttcatggcctatcatatggtctatcctggagaaaattccatgcactgatgaacagaatgtatattctgtggttcttgggtagaatgttctgtaaatatctgttaagtccattttttccagggtatagtttaaatccattgtttctttgttgactttcttcttgataacctgtctagtgctgtcagtggaatattgaagtcttccactgttattgtgttgctgtctatctcatttcctaggtctagtagtaattgttttatatattttggagctccagtgttaggtgcatatgtgtttaggattgtgatactttcctattggacaaggccttttatcattatataatgtcyctctttgtcttttttaactgctgttgctttaaagtttgttttgtctgatataagaatagctcctgcttgcttttggtgtccatttgcatggaatgtctttttccacccctttaccttaagtttatgtg

SEQ ID NO: 416286 - DNA, 620 bp, Homo sapiens
tggttgtgtttgtgtaataaaaagtctgtctgggcacagtggtttatgcctgtaatgacaacgttttgggaggttgaggtgagcagattgctttaacccaagagtctgagaccagcctgggcaatatggcaaaactctgtctgtacaaaaaaatacaaaaattagccatgcgtggtggcatgtgcctgtggtcccaggtatttggtaggctgaggcaggaggatcacttcagcccaggaggttgaggctgtagtgaaccatgatcatgtcactgcactctggcctgggagacagagggagaccctgtctcaaaataaaaagaaataaaattaamattaaataaattaataaagattaaaaagtctgactccatgtcttgaagttggactgcggatatttttaaaaccatgcccttccttcttcccttctgccacacatctgaccaaattgattaacaaatcttggcgctcccttctttgataacagagagtggttgaaaccctgcaaacacctttctccatgaaggaacactcaccctgaccccaccccaaccaccttaggccaatctcactttcttactttctccaagccattttcagaccagtgtgggaggcctacca

SEQ ID NO: 416287 - DNA, 619 bp, Homo sapiens
gggaggatagcttgagcccaggagttcaaccctgcagtgagctgtgatcataccactgccctccagcctgggtgatagagcgagaccctgtctctatttwaaaaaaaaaaaaagatttctcttcaaggggattggatgggagcccaacaatgtgattgcaactggctggcatgaagaaaagggctaaccctcttacctgggtgtttcaaaaacacaaatgctagctgtgagtgaggtgtgagcacttgatcactacagtgatctgggctttagctatggttccaggaagctggttttctgcacaggctgatcagtttcttccttggaagggacacctctctctagcaccagccaggtgaaatctggctggcttacctgccagggtaatgaaatgatcaggcttattttgcctgatcagacacaattcattagggcgggacaggcttcagagccaccttcaggagtgaggctcttcatctgttcccagcccggccatttgtttctgacatgtgtgagagcatgtcagtgagcaccagtttctctctcattattttccccagtgtggcccctgtgccacaggctaggttttcacatcttctctgttagctgagcactctcg

SEQ ID NO: 416288 - DNA, 545 bp, Homo sapiens
ttgtaactaattcagttagagataggcacatttactaggctttataaaaatagccttaaaattaaaggtgcaaagattggaggataatggcattgtttttatcttttgaatgagatagcactaaaaagatttggtaactgatgaataccaaggtaatacataagaaatacttgacccatacttgagaaactcaagaagaaagtaataaaaatcaccatcatgtaaaagaaactccatatatgaaatattatgccaaatgcttatggtgcaaatccgtagtagcttccrcagtatccattctttttttcctgagaattcttgatataggtttgaaaatttttgcaattctgaggaggagctaaatatatcaagatatgacaataattacattacaaattcctgaataccaagattatttgaggggtgtccatgggattcaagatgatatttaatgtcaggctctctcctgggaatgtttgaacaaaagtgacctctttgctctgaactatatattatacagatgtgaaacagtggaacaaatgtag

SEQ ID NO: 416289 - DNA, 602 bp, Homo sapiens
aagtcttcaatctgagaggaatgatacttccaccaggggacacaatagaggcagccatgactacaatcagattgagtctcttattccagtacatcagcaaagaaaggaattatcatactagcagaagaayttgacccttgccataattaggaggtagggttcctcctacctactgtagaccaggaggaatgtttgacacccaggtcatacactaaggcagttatctgcactaagtagaacagctttgtgaattgagaatggaaaataactgtgtcaaagattggtccagtgagagcagaacttcttccttagaatgtaccacacctgtatgtacagtgaagatcatagtgacaagatgtatagaaaattagaagtattttccaatttcttttctctggactaggtaaatctcccagaactcttgaatgattctggaaaagaagcagtaactaactaccaataagcatgactgatattctgtttcctagatactaccgaaaatataggagttcaagccagattatttaaatttaggaagcatcaagatataagttatttgtattcattctatgtattgtcatgttatggaacaagttcctgct

SEQ ID NO: 416290 - DNA, 602 bp, Homo sapiens
aagtcttcaatctgagaggaatgatacttccaccaggggacacaatagaggcagccatgactacaatcagattgagtctcttattccagtacatcagcaaagaaaggaattatcatactagcagaagaatttgacccttgccataattaggaggtagggttcctsctacctactgtagaccaggaggaatgtttgacacccaggtcatacactaaggcagttatctgcactaagtagaacagctttgtgaattgagaatggaaaataactgtgtcaaagattggtccagtgagagcagaacttcttccttagaatgtaccacacctgtatgtacagtgaagatcatagtgacaagatgtatagaaaattagaagtattttccaatttcttttctctggactaggtaaatctcccagaactcttgaatgattctggaaaagaagcagtaactaactaccaataagcatgactgatattctgtttcctagatactaccgaaaatataggagttcaagccagattatttaaatttaggaagcatcaagatataagttatttgtattcattctatgtattgtcatgttatggaacaagttcctgct

SEQ ID NO: 416291 - DNA, 554 bp, Homo sapiens
tgggactaaggcaaataaaacaacagtttgtctcttactttaaagcccttaaatagccctgaaaagtgaaatttatattcaaactctgtgagacttaggaatagccccaagagatatttttgaaaaatgtgctgtttcataatgtacattaattcatttatttcagaggaaaatgaaggcacaaatagaaaaataattaacaaaaggaaattaagaaattaataaaaagcagattctgcacttatggaacttaccaaccaacaactgagaagtcagaaataacaaatatagawctatgtgtacagtaatagaaacagataaatgctttcatataaaagcccatggagggaaggggcaggcttcctggaacaggtgaaacttgacaacggtcttcaagtttcaatatgagttctacagaagagagaatgttgaatgtcatgtaaaatagaatatttctttaggtaggtgcccagagaatgaatttcagaaaagaaaataactttagcaaatgttaagaaatatttttaaaaatatgtattatgctgtgaaatagt

SEQ ID NO: 416292 - DNA, 577 bp, Homo sapiens
aaaggcattttccactacattgcattgtttctaaggcagagattttcccctttcagggtgtagcagaatcacttggagattcagagtcaattgatctgcagctggatccaggaatctgtattwcatgcagccccccatcatttcctcactccccatgtcattctaatgcagctgtctatgaagaccctcagagtacactgagaggaacatgattttaacatgtcaatattccagcttcagttaaagaccttgaacttcacctacttactggaagatgttggaatcttaatttactcgttgatttttttggattacattaccaaaaactattgaatagcatctccctttttctttgtggttcaatttcaatttgttaataacctagaaagatagctcaacctgttttcttttttgaaaaacttctcaaaatgaccatcttctctaatttttactcaaatgaacctgtttttgaaggaagaaattatttattttctgggtttaggtgattgattttctgggtttaggtgcttgcagtgatccttattggataaaaagcgctatgcttttgggtgcacat

SEQ ID NO: 416293 - DNA, 577 bp, Homo sapiens
aaaggcattttccactacattgcattgtttctaaggcagagattttcccctttcagggtgtagcagaatcacttggagattcagagtcaattgatctgcagctggatccaggaatctgtatttcatgcagcccccmatcatttcctcactccccatgtcattctaatgcagctgtctatgaagaccctcagagtacactgagaggaacatgattttaacatgtcaatattccagcttcagttaaagaccttgaacttcacctacttactggaagatgttggaatcttaatttactcgttgatttttttggattacattaccaaaaactattgaatagcatctccctttttctttgtggttcaatttcaatttgttaataacctagaaagatagctcaacctgttttcttttttgaaaaacttctcaaaatgaccatcttctctaatttttactcaaatgaacctgtttttgaaggaagaaattatttattttctgggtttaggtgattgattttctgggtttaggtgcttgcagtgatccttattggataaaaagcgctatgcttttgggtgcacat

SEQ ID NO: 416294 - DNA, 577 bp, Homo sapiens
aaaggcattttccactacattgcattgtttctaaggcagagattttcccctttcagggtgtagcagaatcacttggagattcagagtcaattgatctgcagctggatccaggaatctgtatttcatgcagccccccatcatttcctcactccccatgtcattctaatgcagctgtctatgaagaccctcagagtacactgagaggaacatgattttaacatgtcaatattccagcttcagttaaagaccttgaacttcacctacttactggaagatgttggaatcttaatttaytcgttgatttttttggattacattaccaaaaactattgaatagcatctccctttttctttgtggttcaatttcaatttgttaataacctagaaagatagctcaacctgttttcttttttgaaaaacttctcaaaatgaccatcttctctaatttttactcaaatgaacctgtttttgaaggaagaaattatttattttctgggtttaggtgattgattttctgggtttaggtgcttgcagtgatccttattggataaaaagcgctatgcttttgggtgcacat

SEQ ID NO: 416295 - DNA, 538 bp, Homo sapiens
taagaagctggctaaattagcttttaatccaaaatacctaagatggttcttggcataaagtaagttctttataattttggttaaatgatagatactgactaaagttagtcagttattaaagggagctgacacatgtaaggtttatgagatagcagaattaatwtgagcctagagcaatactctaaataaaatttcagatgaggatatttttgttttgttttgttttgcagttgttaatgtgttgcctctggtttgggaatttggaactaattaaacaggtaagaaaatgaaaggcccccattaggagctttagagtgacatattagatttaagagcaagaaatttagaggcactgacaacaccaataaatttagtttactaaagacttaccttcagcagtcagcttttactggcggcccagatatattacagctctgcagttccccgaagcatcttaaagacttttgattcctttatagctcatataatattttgtagactgggtctatagtatgtgtttattctctcctatgtttat

SEQ ID NO: 416296 - DNA, 615 bp, Homo sapiens
ggacacaagtgaaaaatataacaaaataatattagaaaaggacaactcacagaagatataggactgggaccaaaccttgaaataaaattggtaatccagtcagggaacgtagcatcaaccaacccacgaagaaaagggtaagtattagactactggagatcaagaactgtatactgagaggactgaacagttgacagcaagagataaacatggatagtaataattaatggtaaataaaagaaaaatgatgtacagtggtcagagaagaaagtatagaagttgccctaatcaatgtatgtaatttatatattaaatgtcatcatataagttcttataacataaactaagacattgttttatttctgcatcaacatgagtctgtaggaattgaagggttaaattttatttcctttctgtactgactggcagagtgagtcagaarttctggcaagctctgagggcaagacatgttttacttttgcttaaaaacattagcaactattaaaataattctcttcatttcatctgttatacaatagggaggaaatgcatagaaaaaaaacacatatacccaggatccattagtcctttcacagctgggtagaaatgaaatcc

SEQ ID NO: 416297 - DNA, 591 bp, Homo sapiens
acttgtttccactttaccatataagtggtgaatcttccaaacttcctaagtttccctccagtaatgcaacccactgcatgtgcaggcatccattatgggcactttgtgttattccatggacctggaggatgggggaacycatgcaagcatcatgttgccctctgaactactgtttgtgctatgaataatgcagtcctttgtctctgaaccaagagtcatgtgttttctgacagctttgctaaaatagtaacagactaacttattagcttgcagatggtgaaaactcacagaatctttgtagttcctgataattatttgatattatttggcattcttgaaatgccacctctctgaccatgccgttttggtttctcttgcaagcagttccttttctactgggtcaccaaatcctgtagatttttgaagccttaaaataactttttctgttatagtctctcactgagagacttaaacacatccacagttctaattactgtggtggtgttcagatttatttctctagcccagagctcttctctgggctagttgatccaactactgatttgacctatcacttgcatattttcaaga

SEQ ID NO: 416298 - DNA, 577 bp, Homo sapiens
gatgttttcaaaaaactatgcagtgcaactagaaatatacatgcaaaaatataaatgtcaatacacatctcatgactttatatagaattaatttaaatgggtgatatgcctaaatgtaaaattgtaaaacatgtagataaaacataagagaacatttttatgacattgggttagtcaatctgtttttagatgccccaaaggcaagatacttacaaggaaaaaatggataaatttctgtttatcaaaattaaaactttttcactgcaagagacactgactgttaagagattgagaagatcaagaagactggagaacatattttcaaatcacatagtatctgataaaggattagtatctaaaatatataaaaagcattttaaaactaaataataagaaaaaagaaactaaaaataggcaaaagatttggagagacactttaccaaagaagaatcaaaaaagtttgtgaaagatattcaagaacagtartcattagggaaatgcaaattaaaaccacaatgagatactactatgcaaagagcccctggacaggggctggtgcaagccccggtgttcaaag

SEQ ID NO: 416299 - DNA, 577 bp, Homo sapiens
ttcttttggggatttagtaactatagtaacaggttaacctggctctaatttgaaactggatatattgtgtgatcttttaacatttttgaaatgactgtagtcctaaraaggttaacatgtttcataatattgggcagttattgtacattcagttgacaggaaagacaaaaaagtatcacacattttcagcccaaaggtaagatggatggaggtagctgatcagggcatattttggtgacttgaaatatagaagacatcataaactatgagatcatatttggtgacttgttatccatctaagagagggagaaaaaaagcaccaagacaatattgtaccataataatgaatttcttgctgctgtcagttctatttaacatcatttttttctaaaatattacattacatacaaattttatgtaaattagtatattaatgtatatacatagtatatttttgagtggaaaaaatttgcatattttagttctatacttttttaaaaatctagattagatctgagaattttccttttgaaagatttggttcctttattcttaactttagcaaatatttattgaa

SEQ ID NO: 416300 - DNA, 577 bp, Homo sapiens
ttcttttggggatttagtaactatagtaacaggttaacctggctctaatttgaaactggatatattgtgtgatcttttaacatttttgaaatgactgtagtcctaaaaaggttaacatgtttcataatattgggcagttattgtacattcagttgacaggaaagacaaaaaagtatcmcacattttcagcccaaaggtaagatggatggaggtagctgatcagggcatattttggtgacttgaaatatagaagacatcataaactatgagatcatatttggtgacttgttatccatctaagagagggagaaaaaaagcaccaagacaatattgtaccataataatgaatttcttgctgctgtcagttctatttaacatcatttttttctaaaatattacattacatacaaattttatgtaaattagtatattaatgtatatacatagtatatttttgagtggaaaaaatttgcatattttagttctatacttttttaaaaatctagattagatctgagaattttccttttgaaagatttggttcctttattcttaactttagcaaatatttattgaa

SEQ ID NO: 416301 - DNA, 606 bp, Homo sapiens
atagaagtcctgtacaactagactaaggaatttgtatccagaaattgatagaaacctactagacttttaaacagtaaacataaaagtggattttattttctrataacagattagaaaaataacaaacacgtgtactgctccccatatgatagatactttaattagtctccttgaaatccttatagtgtctctctgaggtagaccattaacccaggtaatagtaaacgaaaaaaagggcaccaaagcttatctaacttgctcagtgtcaccatataatctttcataaaaccagaccaagaaacccctgagtatctcttgctgatcaggattttgactttatcaaataataaccattgcatctattttataagcaaatatggtaaatgaaaggaaatcagagataaatatcaggttgaagggtatggtacctgtgggttgggggtctacacctcaatgctaaaagtgtgaatggggaggaaggtacaaatataaggggtcttgtaaagaatgatggttcaatcttggaaactatgcatacaccaatgaaagagaataaaggaaaacaagttcatttaggaagcctggaggataataatgtagttggca

SEQ ID NO: 416302 - DNA, 424 bp, Homo sapiens
attatttaggaaaatgtgggatatataagccagatgaatcacttaagaaagcattactaactatagcaataatctgaaagactctttagctggacttaaatgatgatgagaaagtaattttctgaaaattactgaatctaatctttgaagaaaactatacaacatgttgtaagcctataaaatgaacataaaatataatgttcaakgcattctgaaggatgtatagcagattctggtatcagtctctaatacattatctcagtgaaagtgtggtaatactatttcttcagtagtgtggttagtagaacagtaactgtgttgatcttgtccattttcttatgacttattcttttctcatgacttattcttttctcatgacttattcttttctcatgacaccttgtctatggtaacatgtcttctt

SEQ ID NO: 416303 - DNA, 606 bp, Homo sapiens
atagaagtcctgtacaactagactaaggaatttgtatccagaaattgatagaaacctactagacttttaaacagtaaacataaaagtggattttattttctaataacagattagaaaaataacaaacacgtgtactgctccccatatgatagatactttaattagtctccttgaaatccttatagtgtctctctgaggtagaccattaacccaggtaatagtaaacgaaaaaaagggcaccaaagcttatctaacttgctcagtgtcaccatataatctttcataaaaccagaccaagaaacccctgagtatctcttgctgatcaggattttgactttatcaaataataaccattgcatctattttataagcaaatatggtaaatgaaaggaaatcagagataaatatcaggttgaagggtatggtacctgtgggttgggggtctacacctcaatgcyaaaagtgtgaatggggaggaaggtacaaatataaggggtcttgtaaagaatgatggttcaatcttggaaactatgcatacaccaatgaaagagaataaaggaaaacaagttcatttaggaagcctggaggataataatgtagttggca

SEQ ID NO: 416304 - DNA, 606 bp, Homo sapiens
atagaagtcctgtacaactagactaaggaatttgtatccagaaattgatagaaacctactagacttttaaacagtaaacataaaagtggattttattttctaataacagattagaaaaataacaaacacgtgtactgctccccatatgatagatactttaattagtctccttgaaatccttatagtgtctctctgaggtagaccattaacccaggtaatagtaaacgaaaaaaagggcaccaaagcttatctaacttgctcagtgtcaccatataatctttcataaaaccagaccaagaaacccctgagtatctcttgctgatcaggattttgactttatcaaataataaccattgcatctattttataagcaaatatggtaaatgaaaggaaatcagagataaatatcaggttgaagggtatggtacctgtgggttgggggtctacacctcaatgctaaaagtgtgaatgrggaggaaggtacaaatataaggggtcttgtaaagaatgatggttcaatcttggaaactatgcatacaccaatgaaagagaataaaggaaaacaagttcatttaggaagcctggaggataataatgtagttggca

SEQ ID NO: 416305 - DNA, 626 bp, Homo sapiens
catttcacagacaaggtggctggsaagccaagcctgaagaattcgtttctgttccccttccctctctggacctgattccatggcaagggatatccttgggaattatttcatccacagaaaagcacaatgatcaaaacatttctatggtttttctgatcctgatcatgagaaaaacctttaaaagactaactttttaaaaaatatataacttaccttttctcattgcttcttcatgaatagggaaatcaatattttattcaacctattttttcagttgtaaatataatcacttgatgtgtttttcctggtcactgcatagacaaaagcaattcagtgagccagtagtagtgcagtaaaaaaaaaatttaattaatgcaaagcttgccatgtggaagatggagttcattgttagtcaaattagcctccctgagaactcagaggctaaggtttttatggataaattggtgaggaggggactagagaatgggtgctgctgcttggttggggatgaaatcataggggtatggaaaatggtcctcatgtgctgagttcactttcgggtggggaccacgggactggatgagtcgtgagtcatgagtcatggtccaagcgggattagtctgttg

SEQ ID NO: 416306 - DNA, 535 bp, Homo sapiens
tgttctgatacatagtaggcattggataaaagctggttactgataatgtttctatggttaacctaaataataaacagagacaggctatctaaagcaaaacgctatttatttgggaatggagcattgcagtgggactacatatactctagtaaactatgtgcatattcagsagataaaagaagacaaaagtttttaaaggaaacatgagaagattacataattgctttgagataattaaccttggctacaaatcaataacaaggatgacaccagtatgagtttggacaggcaattgctgggcagatgtccttgcagtagtacttttttgtgtaagattacagtggtctttgtgcaaggttgcagtttttgcagtcttttgtgatggttttcttaacagaaatataaacacgagaaccttctcttcacagacttccctggctgtatttgtcaggatttttgtttgttttgtttttgaacacaaatgactccattttgattctgatgtctttcatactattgatatttttagagcttc

SEQ ID NO: 416307 - DNA, 606 bp, Homo sapiens
ctaggctgacagtgctggtctgggcagcaagaagctagtatacctatgttctgatacatagtaggcattggataaaagctggttactgataatgtttctatggttaacctaaataataaacagagacaggctatctaaagcaaaacgctatttatttgggaatggagcattgcagtgggactacatatactctagtaaactatgtgcatattcaggagataaaagaagacaaaagtttttaaaggaaacatgagaagattacataattgctttgagataattaaccttggctacaaatcaataacaaggatgacaccagtatgagtttggacaggcaattgctgggcagatgtccttgcagtagtacttttttgtgtaagattacagtggtctttgtgcaaggttgcagtttttgcagtcttttgtgatggttttcttaacagaaatataaacacgagaaccttctcttcacagacttccctggctgtatttgtcaggatttttgtttgttttgtttttgaacacaaatgactccattttgattctgatrtctttcatactattgatatttttagagcttctactctaaagttttctctgaaacag

SEQ ID NO: 416308 - DNA, 542 bp, Homo sapiens
tgactcatctgaataacagagagaaaataggcttaaaaaaaaaacccacaaaaaaaaaaccaaaatgaacagagccttcagggacctayggaactataagaaaagctcaaatattcatgtcatcagagtccaaaaggagaagagaaaagaggatgaggctgaaaaagtactcaaataagtaatggctgaaaatgtctcaaatttggcaggagacaaaaaaaaactataaataaaaaagctgaatgaattccaaataaaatatacccaaagaaacccataccaagaaacatcatagtcaaacttctgaaaactaaagacaaagaaaaaaatcttgacagcagggaaagataaattacatggtacctataggtaatttccttataagggaaaaaaaatttgaatgacaatggatatcttatcagatagcattaaggccagaatgtaatggtatgatatttttcaaatgctgaaagaaaataatttttaatccagaattctttatgtagtgaaaatatccttcaggaatgaaggggaatcaagac

SEQ ID NO: 416309 - DNA, 534 bp, Homo sapiens
caacaggtttttattttttaaaggtgagaatagatatgtatactaaagttgccatcttgatgaaatgagaaaaccaacttaaagaggttgactgacttgctcattggtataaaactagtaaataataaagtcagaatccagactgccaacccaacctttacttctccatggagaagtaaaacacaaactttccacatctgaggttatgttctaagattaaagtttttccatgaaaacttgtattagaattactaatgaaaagaaagccaactgcatacatgcatatatttttctacttttcctaactttttcttataagttatgctaatgaaaaggctaaaagtgaacagctataagaacaataaacaatatctgaaaatttaaatagtcaactgttacataagtaagaattaactctgccaagaagtttttctgagttccataaaaagcaaagtaggygggtgagaatgggaatggggggtaaaaatgaaaaaggataaacctcaaaacacattagggtaagaatttaattta

SEQ ID NO: 416310 - DNA, 595 bp, Homo sapiens
gagaggtcatctagagcaatgcttgccagagtttcttgacccttattggcaacaaatagatttattatgtaacayatgcttatatattaattttcatttttttgcccacaagggtaattatattatgttagaatatacaaaagtgctaattaaaattttgatgatcttacgttttcttcccccttccttggattgtcttatatacccctatttgaaaaccactaaacagactaccttcctcaatttagtgaggagaaagcaatggacgaggcaatgcatttaaattgcatcagtcatcaaactagcaaagtgtctgaactgtgaccagatagatcctatgtcttctgactcccagtattgcacgttttttcttacataatttacaaccacatattgaagtttgatcatatcaacaagtaaatagacatagtatatttagtagcactaatgctttctgagggggtccagaagtggaagtcatggagaacagtataaatggtactgtgttaaacaaaaagacttaattgttctctgaaaattgatctctctggaaataatttacttgccagcagaatctttatttttccccaagaag

SEQ ID NO: 416311 - DNA, 570 bp, Homo sapiens
actaggaagacacacacaaacatgcaggttagcttggatgcaggcatggagttttccttggctatggtcaccactcaaaaacattaatgaaatgctcatcttctcaaatccaatgactatactaacaccagacctttattcaaaaaatatctgatgcttaagaggcttctcttggctccctactgcttaaagataaaatttgagctccaaagtacaagtaccctacaatctgcaccttgcttaccytctagcctcatctccctctgccccctttgctgcctttctcaagtcacactgaacttgccataatttcccaaacacactgtgtagtttcttaactacctttgcattttgattccttctactatggcagcaattccttcctcgtccacttgctaccatccttgtattccttaaatacacacacacacacacacacacacacacacacacttcttgctaccaaggactcatttttttcattctttaagaacctttcaactgtccccctcccaacccttcaactgcctcagcagaggcctggctcactcctttctggatcccagcatt

SEQ ID NO: 416312 - DNA, 570 bp, Homo sapiens
actaggaagacacacacaaacatgcaggttagcttggatgcaggcatggagttttccttggctatggtcaccactcaaaaacattaatgaaatgctcatcttctcaaatccaatgactatactaacaccagacctttattcaaaaaatatctgatgcttaagaggcttctcttggctccctactgcttaaagataaaatttgagctccaaagtacaagtaccctacaatctgcaccttgcttaccttctagcctcatctccctctgccccctttgctgcctttctcaagtcacactgaacttgccataatttcccaaacacactgtgtagtttcttaactacctttgcattttgattccttctactatggcagcaattccttcctcgtccacttgctaccatcctygtattccttaaatacacacacacacacacacacacacacacacacacttcttgctaccaaggactcatttttttcattctttaagaacctttcaactgtccccctcccaacccttcaactgcctcagcagaggcctggctcactcctttctggatcccagcatt

SEQ ID NO: 416313 - DNA, 570 bp, Homo sapiens
actaggaagacacacacaaacatgcaggttagcttggatgcaggcatggagttttccttggctatggtcaccactcaaaaacattaatgaaatgctcatcttctcaaatccaatgactatactaacaccagacctttattcaaaaaatatctgatgcttaagaggcttctcttggctccctactgcttaaagataaaatttgagctccaaagtacaagtaccctacaatctgcaccttgcttaccttctagcctcatctccctctgccccctttgctgcctttctcaagtcacactgaacttgccataatttcccaaacacactgtgtagtttcttaactacctttgcattttgattccttctactatggcagcaattccttcctcgtccacttgctaccatccttgtattccttaaatacacacacacacacacacacacacacacacayacttcttgctaccaaggactcatttttttcattctttaagaacctttcaactgtccccctcccaacccttcaactgcctcagcagaggcctggctcactcctttctggatcccagcatt

SEQ ID NO: 416314 - DNA, 483 bp, Homo sapiens
taggtctaatgtgaagacaactgtaaaaatttactgagagccgtaaaataagactcaaataaatggagagtcataacatattcctgggtgggaagacttgatgttataaaaatgccatttctcttcaaattaatctaaaaatttaatgtaccccaattataattccaaaattattttctgtttggaacctgttatttccaagtccatcaggaataataaatacacaggtatagcaaaggaacttttgaatatggggaagaggagtgaaagactgacctactagatattaaaataaaccatgaagctgaaataattgacacagtgaatatcaaacattcggtggaacaatggaaagcccagaacatacagatacacatacacatacatgtatgtgcacatacatagacattttaaataggcaaaagttgatgggtgttaggacargtgacttatcatctgggaagaaaatcaaatcgctactat

SEQ ID NO: 416315 - DNA, 396 bp, Homo sapiens
ttaaaaaagcttctccttcataaaaatataataaatgtaaaccggaagaaaatggaacttgattatcaaattagcagtgattaataagatttggggtggtgaagacgtgagtgaatgagcttgctttcagattgctggtgggagtgcaaggggatacaaatttcctaaaagacaatttggacaaatttgyccaaaaatttaaattttagcctttttattaacccagacattttattttcaggcagttacataaataaaaatttatatctctagctatacagattatcattgcagtaataataagaatattaaaccctgtaaataatcaaaaggttgttacaataaattatggcaagttcatatgatggagtattcaatgttttggaaaacattcac

SEQ ID NO: 416316 - DNA, 636 bp, Homo sapiens
cacagctccaactaagaattaagaggcaatagggagcagtgaagagagcatgttcggcctcttgattctcactctccgggtttacttgctggctgcatgaccttgggcaacagcttaccctttctaagcttcacatccaataaaaatagcatctggtgataggatcattgtgaaggttagatgagacactcatggaaaacacgtcgtaggcagcctgtcatagcataagtactgggtaggtcattttttcttgttggaaaccagcactacctcttctgactgactttatttctgtcaatggagatgccattttacaaggttctcaggatgaaactttggagtagcctttgactgtctccttttctttatctccaatagccagccaatcactaagtcttagagatttttccttytaaatatcagtccccttcctgatgcttcccccgcagttcatcatcacagtttcccttgattctagtctccttcctctgattcatcctttgttccagttcctcatctatattttaaaaacaggactgtcagtgtgtcactctcctgagcagaaacctttggcagctaattgtggactagagaaagaggctcagactctttgaaataccacttcaagatattcca

SEQ ID NO: 416317 - DNA, 572 bp, Homo sapiens
  misc_feature (1)...(572): n = A,T,C or G
ggtataaagtgtgcataaaggtaacagagaggtaatacttacaggaagcaagtgtgaaccctaggagtaggaaaagtaaagggaaatgaatctagaagctcctaagaggcaaccctgggctaggatccagaattctaaggacctgcctggctgccctatctgaggtgtatcantgctgagagnaagctagcaggaagagcaggcaaataggaagaagcaagcccttctctcctccactgggttctagtcaccttctggcacttcatactggcaggatccaacagcactggcaaaggaaagcatggtttrtagggcccctgtgccaggatcacagagccagtaaagatacgtgggtttggagctgagacactggtttgatgactggcacaaaaagcacttctaggccccttgagggtccccctcaccctctttcttacacacaagaatctgaggttcatagagtttaagagaactatctaggacctcacataacagcttcacaattaggactcaggcatgggtatataaaaacatagtgataattaaaatgttctttcataaggtagaaaaca

SEQ ID NO: 416318 - DNA, 557 bp, Homo sapiens
ttcacaattaggactcaggcatgggtatataaaaacatagtgataattaaaatgttcttwcataaggtagaaaacagtcaactttgaatttgtttctgtgttggagaattttatagataatagatgtatttagatgagacattttcaaaatgtgtttggcttgtaaaagtcatactaattacagtaatttgtgtgatttaatttattactaagctatggaattatgattgtgtatgctaatactaagggtcagatcaattttgttgttttattttaattacaacaccaagcctctggtcatgtgggctcattctccactgtttgttgtttatatgacatatccatccacacaagactcaaaagatatttagcaacaacatagcctgttagttttctactggaggcaaggaaatgataaccaatgcagccactagggaaaatattctccaatgataagcccagctagttcagagagaatgtaatctttttcgtaaaatctctggctagttcctgggatatcagaaatattttttagatggcttaagatcaccttaaaa

SEQ ID NO: 416319 - DNA, 612 bp, Homo sapiens
gtttactttcaaggagtgaatgccttgggtgtgtttggcagcaggacagagcacccagcctttccaaagaggcacaggagaaaacaaggtctcctttctcttgcttggcaagtaggagcgttggcaggggcagcaaaacccttgtggatgtcttaggtttgtcactcatgacttttaatactaaattatggtatgacaggaacttctttaggctacccaaagtatacagcggaaagcaaatatctttcagaaaatatgccagtatttagtataaaatccagcaaagtagttggcactggctatgaaaaacccagggttggctatggagtcttttgttcatgttttcaaatataacttttctagctcatgaacagggacccgtttatctccaggaagaatctacttctcatgtttatttagaatctacttcttaatgtttttctttaggtttaatccttcaggaccctgtttaaaccctgtttaaagcaagtgcaagatttacctaggttgcattatcatggtaactactagcagttttaactctactgacaccaagtctattttccaackggaatagccctaacctttgacttggatggaaaagaaaaattg

SEQ ID NO: 416320 - DNA, 611 bp, Homo sapiens
aaatccagcaaagtagttggcactggctatgaaaaacccagggttggctatggagtcttttgttcatgttttcaaatataacttttctagctcatgaacagggacccgtttatctccaggaagaatctacttctcatgtttatttagaatctacttcttaatgtttttctttaggtttaatccttcaggaccctgtttaaaccctgtttaaagcaagtgcaagatttacctaggttgcattatcatggtaactactagcagttttaactctactgacaccaagtctattttccaactggaatagccctaacctttgacttggatggaaaagaaaaattggttttgactgatctgtttttttaatttcagggatagttgctgttctcttctgtggagtcacacaagcacattatacctacaacaatctgtcttcggattccaaaataagaactaaacaggtaaaagaaaaaatttactacagacttsgtctcttttctcagtaaaatggttatgtagcaattctggcagtatagtcagaaagagtttcattagtaaaggaagaatgtaagcttaaggcttcattacgagttggatatttatagatttttttc

SEQ ID NO: 416321 - DNA, 572 bp, Homo sapiens
cctagaaatgttgtgaggatatgagatacatttaaaactcttagatatatcttgtggattaagtcgttccttgagtacttatatgtacactcaaatactcagtgaatgttatttatcctcaccgtcatcatcatcattctgctgagaacttccacaagtctcacaataacaacagsgtggtcagttaccactgtgggcaaatggggtgtgactgccctcagggcacaccaagctctgaggttgctggggctgaactagtcacttttgcataagaacaacagggtgtccaggaaggaaagtaccaggcaggtaccgcagagaaatggccataggagtggggctaaaatgttctcatgtatttcatgcagctcttggctcagtggatcaaggagggaaggagtgccctcagctgtgtgggcaggggtctgctccatggacaagaataggtcaggagactcagcttgagttgcatctcttcaagtttagtggaggatgttctataagcaaagtcctctggcttctagtaagaaatgaggcaaaagaagcagaagccaggctgggcagggtggctc

SEQ ID NO: 416322 - DNA, 598 bp, Homo sapiens
ctctcaccttgttccaagtgcacactacccagttcttgacatcaagtgccatgctctgtcctactaatcctgccccttacctctacctgsaccactgcttcctgcaaagcagtcttctctgtggtcctcatagccctttggttgtgccccactgctgaggcactgagggaagaagggttaaacattgggagggatgtggacctattgctaagtcttgaagagtcttgagtcttgaatgtggtgctaagcagtttggctttccttcggtagacaggaaggaaccaaccaagatttacaagcaatggcatgagcacatctgtgttttagaaagataaaatataagatggactgaagcagggaatctataggaatatcttcattgtatgagacctgacaaattttgacacaatgccactaagcacatactatgtggcacaaagacaactagtcaagtaacgtgaaagacaactcaacctaatgaagttccttcaaccttgtgctactgttatctaatttttactctcctgaaccattagaaaattctaataataaaaaacacaagttgtcaagttttgtcacgtgtcaataaaacacttta

SEQ ID NO: 416323 - DNA, 616 bp, Homo sapiens
tgattgtcccaaacatttgaaacactcaactgatggaattttttatttttatttattttttattaatatatattgatcagtggagtgtgtcttatyatattgaaattctgactcagcactgggtatgtctaggatttcagccacactgcaatacatagaagagtgcttggtgcataataagtattcagtaaatatctcttgaatgaattaataaatcccaagtttgaaggatcacttagaggcatcctttgtcttttgaataattaattcatgctgccatccttgaattgaaattaaagcattttaaaggtcttagggaacttcagaatcctcccaaaccagggtgttttgaaactggattggatcttatttctttctacaaaatgctaaggaggcatcacggcatgtaaagccaactccatcaagaagtccacttgggctctgagatgtgtgagaaatgacactgcacaagagtccaactgaatagttcgggaaataggccaaaggattaaaaacagtatcatgtaaggattaggaatttagcttaagacatggctccctagtataacgtcaacatgactcattcattttgagttggctgaagaaattttagatg

SEQ ID NO: 416324 - DNA, 430 bp, Homo sapiens
ccagacagttacacatgcccatatttccaaagcagtttatactttcttttctcttatcatttatctattctcaytgtcattatgtgtcattactccttcaccctccatcttctttctctccctggaatacagggtatttcttttggactccagatctttttaccacctggaatgctcttcttccagatcatcacatgacctgatccttcttatcattcaagtctcattggtgttgtcacccaataagaaatgcctcctctgaacgccctgttcctttaccctgatttcttagtatttttactgatactatgtcatttgcttgtttacttgattattatctatcttctccctctcccctgtccctgctaccaccactaaaacgtaagctccttagcgcttaagaacagtggcgggggcatgatagaaactc

SEQ ID NO: 416325 - DNA, 430 bp, Homo sapiens
ccagacagttacacatgcccatatttccaaagcagtttatactttcttttctcttatcatttatctattctcattgtcattatgtgtcattactccttcaccctccatcttctttctctccctggaatacagggtatttcttttggactccagatctttttaccacctggaatgctcttcttccagatcatcacatgacctgatccttcttatcattcaagtctcattggtgttgtcacccaataagaaatgcctcctctgaacgccctgttcctttaccctgatttcttagtatttttactgatactatgtcatttgcttgtttacttgattattatctatcttctmcctctcccctgtccctgctaccaccactaaaacgtaagctccttagcgcttaagaacagtggcgggggcatgatagaaactc

SEQ ID NO: 416326 - DNA, 566 bp, Homo sapiens
gaaagggcaacaaaggcaggacagctgcagggactcagatttagggagtggatttgagtctcttaaactttcattgtctgtttcaagttgaaagaggtgaagtgatttacccatggtgtttaaaagtaataaaattatatctttttaaaacaaaatgtatttaattctttgcaacactacaggctagccttcttttcaaggccacaaaaattgtggcttttatatgctgtgaggctcagaaaggttgccaagtattcaactctaaagcttgaggtcctcaaagagartgggcagtttagtgcagaggccaaagccaggagagctggatagacaatctatcacagccctgtcatatcaccgggggaccgagactctctagggaaaaagggttgctgcccttgggaagaactctttagttatattgattatatttaccaaaccaaatattgtgacatgcaatctaagcagatctgtgtacaatacatagaatgtttgaatctaatgccaacttagaaaatctggggctaacatttgcaatattcataggagaacaaattagtttgcat

SEQ ID NO: 416327 - DNA, 531 bp, Homo sapiens
attttgcagttaaacttgcctagtggctgaaattgttcaaagcaatttgtccaaggttgcacctgaattaatgtggtgaatggattatatattacgttactttttaaaattcaggacacaatgcaaccttttcatttattcaggaccagcattaaggtataaaaagagtaaatgatgtgacatatgatttgaggagaaatgctgagagacacccttttccatttactttccttttcttcctcctcagggcctaaactttctctcttagaaaggctttgtgtctagaagtacgagggcagaatgcaaagcaatgattaaactgtgacttatctgggtaaatgtatttatcaaattacctagcaagaacttggggatggtggagaaatrttaccaagtatttatgagatagtggaggaggaaaaagccctaattttcttgctccaattttcttacccataatgtgtatgaggagttggagagctttatagggacacaaggattatttaagtgcctggcaagcttagttggtaa

SEQ ID NO: 416328 - DNA, 631 bp, Homo sapiens
aattgacatatatattttaaataggaaaccaattgaaacatttttgagaggggcaaataaagtgaaaacagatctatatatatgcctcctctctaagagagaaaaaaagttcaaggaaaattaaatcaacctgttctagattgtgactacatggtagaaatgtttcaaaataacacgttttctacattaatgttctctgctgtcaayttttcttgcaaatatgcagtgagaattataaaaatatagaataatggtaatttgaagttgcttcttgttcacaaatgtataacttcaaagactaagatatgttccatagagaaaaatgttaaatgcagtataaaacactataggcttgcctgactcttgagaattattcatgttgctatttaactgttagcatattacaggcactcttttactaagtctgaagaaagaagtaggaaagtcactcagtatttatcaataaggctatttacagtcttggatgaataactgacattttagagttagctgtattttgataaattgatattctacatatagatgatgaaaaagagaaataacgtttaaaagtgaatttaatcaatacaagtaatccattcattcatgaaaatttaaagaagaaaatggt

SEQ ID NO: 416329 - DNA, 350 bp, Homo sapiens
aattgatcaagagctccaggaaccaaaaaactgattgatttaattgttgaatatccaattctaagagcttttaggaataaattgtgagaatacagaattgtcagagtttgagagataatatcaccaatatatttagtactataaagaccacaccataagcatggtatagtgttctggacatcacctttgaagaaggatattatatggtgcagtttgtgtgaacgagagctgcatggataactgagatctcagctcatgccacataattaactaatggactaattagggatattcaccctacacaagaggccaatcagaaarcaaactaacaaacttgatagtggttttca

SEQ ID NO: 416330 - DNA, 516 bp, Homo sapiens
gtgtgtgtgtgtgaaaaattactgggttcaagctattcctgctttcttctggttacaattagcacttgagacaaaagctttggacacaggttcagacttgtcttgtcagggacttttttctctcatagccatgtgttgtgaacatctgctttttgggttctgggcttttctcttctgcatggatttctagtacctactagttctctgctactttgtctgttttctctgaactccaactctggctgtgtcgttaaggtatccattayggctgactagctcataagacttctgggtaacccaacaccatgggtagaacagatatcagctaagttagagtagaatggttttatatagctagctgagaataatatttctctttttagtaaaaaaaacttataaagttatacatttatgcatgcacataataataaaataaaatggatagaaatgctaaaataaaattgacagaaaggctaaaacaaaatctacaaaaaggccaaaataaaaagctagcaa

SEQ ID NO: 416331 - DNA, 590 bp, Homo sapiens
tgtctagcctagggacttggtgccctgtttcccagctgctccagctgtggctaaaaggggccaaggtacagctcaggccatggcttcagaagctgcaagccccaagcctaggcagtttccacatggtgttgagcctgcaggtgcacagaagtcaagaattgaggtttgggaacctctgcctggatttctgagaatgtaaggaaacacctggatgtctaggcagaagtttactgcaggggtggagacctcatggagaacctctgctagtgcagtgcagaagggaaatgtgggatggagcccstacacagagtctttactggggcatagcctagtggtgctatgaaaagacagccaccattctccaaaccccagaataacagatccaccaacagctggcaccatgagcctggaaaagctgcagacactcaatgccagcctgggaaatcagtcaggagggaggccgtaccctgaaaagccacagggacagagctgcccatggctgtgggagaccacttcttgaatcagcatgacctggatgtgagacatggagtcaaaggagataattttagatctttaagatatagttactg

SEQ ID NO: 416332 - DNA, 569 bp, Homo sapiens
atcttctggctacaggcatgtaggagaggatctgggtgttccaactcccatgtttacagtcatctaactaatcttagtcttttcagacctcaacccaccccaccttccttggcatctggtgctcccaatagctgaggctctcaaaggctttgggagattacctgatggtttaagtttaccttcagcacctggatttccttactttgcccaagagagtctgttaccatgactccttctgcactacaaggaccctatttgtcactgtaggttaataacaatttttattttcttcagtatcatttctgcattttactgccaatacctcagactataacaatataagccatctcccttttcttctgattgtgttatcttttcaaartattaggttgctgcaaaagtaattgcagtttttgccattacttttaatggcaaaaaaactcatgttttcatacatcctattgagcagcaaaatattttaaaaatgtgtctggtgtctggagttcataagtgatctctaattctgacttataatactaaaaatattcactttctcttgttctgcagaa

SEQ ID NO: 416333 - DNA, 574 bp, Homo sapiens
agttaatagcaagtaccactggcatatttaatgggatcaaatttgatcttatttataaatgcattaaatggttcatctgcattttctattgagtgtcagggcagcgtataattaagaaaaattgtaattgtagagtattctatcatttgcttaacaatcttcctacactttgtttaacgttctttaaaatgattcattctttggaaagggttatgttccttttcaaagagggctagctatgtctaaggacgggattcaaaattatagtggttggttttatatagatgctataaattagtaaataactattagctggttatccaattaaaggagggtaggttaggataatttatgcagttggagaaagggaaaactgcygagggaaaaaagaaacatattttttctttatgcttcatttgtacaccagaatcatactgctatgggtacgattccatttgtatttggcctcaaaattaaaaaaaaaaaagcatgagtcagttataaatatgatttgaatagatagacaagataatatatttaacctttagtcagggcaactgttaaggactgaatt

SEQ ID NO: 416334 - DNA, 550 bp, Homo sapiens
taaaatttgttaacaatgagtgtattttaatttgatggtgttcctggagaatgatatgaatatattggtactataaacatcaggaaggaaagaattgataacacatacgaaagaaccataaactagaatgcaggcacattacaggtgctcagtaaaattttcaaggttttccttctcatcctttggatcaggctgtgtttattatattttttggaaatccactttaaactataccaaaaaaattaaaagtaattctaatgaggtggagctgtagattggcttctctagaaagcagatgctgacatgaaggtaagtctagaaaaataagtttattattacatgcttttataatcaatacctgtggaagagatggaaaagaggcagaatttgctgagggaagttcaatcccaatgcagcctcagtgaaggttttagcaaacatcacagkttgctctgaagtgggggtcaaattacttagcccatgttgtggtcagaatgagagctaccctaggaaggaaagagaaccctagttgaagcagattcctccagtc

SEQ ID NO: 416335 - DNA, 595 bp, Homo sapiens
acattacatgattgggggctaacatttgtaaaacagctataagacaaagaaattatttggagtcagaataataaggatgatttatagaagagatagattaagagtaaatccttgaaggatagaaatatttatcctgagaatgagggcacaaaccaagtgtgggaacagaactaattagagtacatttcagaaaccatgggaaatttggcttaactctaaattgccttgaggcactgagtcaaaaacagggcctgtctgtatctagctcaccctttcacttctcacatccagcttagggcctatggtaaaatagattctcaagagatattgtacgaatgaatgtaaatcgagtgagtgaacaacagaggtaaggctgtakgggttgtgcttattttctgaccatccttagatacgtatttgactttgtaagggaggcttgtaagtcatttcatccaactgaccacttgcccttttctgcctgacagccagctagatatactagtggcttgatgttcaatccacctttcgtctacaatcttacggcctcaagcagataatgccatattgccatagtgtgactcatgtgcaaactagt

SEQ ID NO: 416336 - DNA, 595 bp, Homo sapiens
acattacatgattgggggctaacatttgtaaaacagctataagacaaagaaattatttggagtcagaataataaggatgatttatagaagagatagattaagagtaaatccttgaaggatagaaatatttatcctgagaatgagggcacaaaccaagtgtgggaacagaactaattagagtacatttcagaaaccatgggaaatttggcttaactctaaattgccttgaggcactgagtcaaaaacagggcctgtctgtatctagctcaccctttcacttctcacatccagcttagggcctatggtaaaatagattctcaagagatattgtacgaatgaatgtaaatcgagtgagtgaacaacagaggtaaggctgtatgggttgtgcttattttctgaccatccttagatacgtatttgactttgtaagggaggcttgtaagtcatttcatccaactgaccacttgcccttttctgcctgacagccagmtagatatactagtggcttgatgttcaatccacctttcgtctacaatcttacggcctcaagcagataatgccatattgccatagtgtgactcatgtgcaaactagt

SEQ ID NO: 416337 - DNA, 695 bp, Homo sapiens
aaatatgtcataaagtcaataacatgaatgtgatcttaagtcattatgaatcactacttaggggaagaacctcatcttcaaataccccaatccaaagtcaccttttkgttttttttaactataccataatacatgtgttttgtgatgcagaaacagaagtaaaatgagtttcatagtttaatttcttattttgctattttagcttttttggaactggtgatggttaatactgtgtgtcaatttgattggattgaaggatgcaatattgatcctgggtgtgtctgtgagggtgttgccaaaagagattaacatttgagtcagtggcctgggaaaagcagattcacccttaatcttatgggcaccatctaatcagctgccagcaaatataaagcaggcagaaaaacatgaagaggagagatgggcctagcctcccagtctacagactgatatccttgatgaacacagatgctaaaatccttaacaaaatactggttaacctaattcaacaatgtatcagaaaaatagtccaccatgatcaagtgggtttcataccagggatacagggatggtttaacatactcaagtcaataaatgtcatacaccacaaaaacagaattaaaaacaaaaatcacgtgatcatctcaatagatgcagaaaaagcatttgaaaaaatccagcatccctttatgattaaa

SEQ ID NO: 416338 - DNA, 695 bp, Homo sapiens
aaatatgtcataaagtcaataacatgaatgtgatcttaagtcattatgaatcactacttaggggaagaacctcatcttcaaataccccaatccaaagtcaccttttggttttttttaactataccataatacatgtgttttgtgatgcagaaacagaagtaaaatgagtttcatagtttaatttcttattttgctattttagcttttttggaactggtgatggttaatactgtgtgtcaatttgattggattgaaggakgcaatattgatcctgggtgtgtctgtgagggtgttgccaaaagagattaacatttgagtcagtggcctgggaaaagcagattcacccttaatcttatgggcaccatctaatcagctgccagcaaatataaagcaggcagaaaaacatgaagaggagagatgggcctagcctcccagtctacagactgatatccttgatgaacacagatgctaaaatccttaacaaaatactggttaacctaattcaacaatgtatcagaaaaatagtccaccatgatcaagtgggtttcataccagggatacagggatggtttaacatactcaagtcaataaatgtcatacaccacaaaaacagaattaaaaacaaaaatcacgtgatcatctcaatagatgcagaaaaagcatttgaaaaaatccagcatccctttatgattaaa

SEQ ID NO: 416339 - DNA, 556 bp, Homo sapiens
attttaacaagatccgaaattgcaaagtttgtaaagcattggctttgagcacagagkaataaattaatttgctacatgaacgaaggtgacaggcggactaactaagagaaaatgcaaggtatgcgccacccaagggccttaatagtaaaggcaacatttgctttgactggagaaactgttttttttttttttttttcaatagaaggaattaggtttatggagagaagaaagtgaatagtgtcaccttggtaggacggagaatatatggctgggaagggcatccggaactttggttgttttttttggaaattagatttataaatcaatatgacagatatgacagtgattaggaagaaaaaccatacatcccattttacttcacatacttgacaattatctgcctccacaatgaaaagaaatgtagagattcttttaacaaagtctattgtttttagatgttatttaaaattttatccaacttaatcaacttagaataattttggtgtggggtatgaggtaagaattgtactagtttttcctccaattcttaatgaaa

SEQ ID NO: 416340 - DNA, 556 bp, Homo sapiens
attttaacaagatccgaaattgcaaagtttgtaaagcattggctttgagcacagaggaataaattaatttgctacatgaacgaargtgacaggcggactaactaagagaaaatgcaaggtatgcgccacccaagggccttaatagtaaaggcaacatttgctttgactggagaaactgttttttttttttttttttcaatagaaggaattaggtttatggagagaagaaagtgaatagtgtcaccttggtaggacggagaatatatggctgggaagggcatccggaactttggttgttttttttggaaattagatttataaatcaatatgacagatatgacagtgattaggaagaaaaaccatacatcccattttacttcacatacttgacaattatctgcctccacaatgaaaagaaatgtagagattcttttaacaaagtctattgtttttagatgttatttaaaattttatccaacttaatcaacttagaataattttggtgtggggtatgaggtaagaattgtactagtttttcctccaattcttaatgaaa

SEQ ID NO: 416341 - DNA, 556 bp, Homo sapiens
attttaacaagatccgaaattgcaaagtttgtaaagcattggctttgagcacagaggaataaattaatttgctacatgaacgaaggtgacaggcggactaactaagagaaaatgcaaggtatgcgccacccaagggccttaatagtaaaggcaacatttgctttgactggagaaactgttttttttttttttttttcaatagaaggaattaggtttatggagagaagaaagtgaatagtgtcaccttggtaggacggagaatatatggctgggaagggcatccgraactttggttgttttttttggaaattagatttataaatcaatatgacagatatgacagtgattaggaagaaaaaccatacatcccattttacttcacatacttgacaattatctgcctccacaatgaaaagaaatgtagagattcttttaacaaagtctattgtttttagatgttatttaaaattttatccaacttaatcaacttagaataattttggtgtggggtatgaggtaagaattgtactagtttttcctccaattcttaatgaaa

SEQ ID NO: 416342 - DNA, 558 bp, Homo sapiens
aacaataccaggcaggattgttgactggtgagggaaagagtgaagaatatttttgttttcatccaatcataatattcttactatagaaactcacaaagcctataatagctcttctcatgactatactttacatacattgctttatttcgtgtgatttgcatgagttttttcatctgtacaataggcaaagtcaagcttgtttagtttattccttctggaagaaaaataggacaaaaatatcgttcatggaatcaaaacgtctcatttaataaaagtagaaataccagtttcttgacccttatcaagcctttttgttgccccctgtggctgttgcctttagaacttgataaggctttgacatttaaaatgatcatattaaacattttcccctttatccctcaaatgtacccagctattagtttttcatgagattccggtaatgtagctagtaaagtagtagttgcattaagagacattagttttggagagraaaaaatactctaattttatttaaactaattaacttttaaagaatcattttatttgtttaggtaattt

SEQ ID NO: 416343 - DNA, 509 bp, Homo sapiens
cattaactacaatgccatatccataacaccaaaagttttgtttaaatcatcccactcaataaattaaaaaaataagcttcactatcagaaaaatattcatygagctactctgttataaaatctaagaacaagagagaagtccacaatctataaggccacagtaagagagctattttagataatggaaagctggaaatacttgcctgccttatgacttctgttctttttcagactgtcttcaaatatttgaactactgaaataaggaatatgtttattttgtatgtccaaaaagaagaaaagtaggataaatagagaaagggagaccagttttaatatattagcagatttcctgtagggtggctattgtcaataagcatggacaagcagagtttaggaaaaatgtcatagaggtgactcaagtaccagatgaaatgttatgccaggtaacctttaaagctcctttagaacttaagatcctcgcattaaaattattgaaaagccttcagtt

SEQ ID NO: 416344 - DNA, 540 bp, Homo sapiens
ccatatacttgcatctcatttattgtgtcattttattatttgataagaggaaacttatgaggaaattcttccctccaaattgctatcctgaagagtattttcagatttccctcttatctgrtaaaggctatttctcaaagctcaaaagtagtgcatatattatctttcttttgtttttccaacaaacaaaaaggcttctttctacttagaacagcgactaaaaaattacttataccttccttccaataacttaaaaagtttctacatattaataatttatcagactcataaaataataaaatgataaaagtaataatgaactaatattattaatagaagggtttatctttggcattaggggccaacggtaattaattgtgcaagattgcagaaatgaatcattgacagtgttgaggcaaaaaagaatgccttgctcataaaaggtttcaaaaatatttattgcctagattagttttgaacatacttgagcccaaattcgtgtcctaatggactttttgttgttaattcatctgactctta

SEQ ID NO: 416345 - DNA, 541 bp, Homo sapiens
ggaactgctttctttttcactcattcaactgccaaggcactattctggtttttttaatattcattgtgyaatttgatttatataacaaatatatggagtatacagtatagttcctatttcatggattgaaaaaaattgaattgtgaaaagataattcaaccaagttacatgtacttatataagtgtatgtaataagtgcataaatagaattgaaacctgggttacatacttgtcaaaattcattcatctcacttcatcactctcctatcattatcactagaaagaatttggtcataatccacttgacctaggtatttccattcccaacaaggcctcccttgctgctgttcctgtttagcactcctgggacctcctcttccaggcattactgctgccagataattgaggcttggaacctccaggtgtcagagagtgatgcacttttgaaaccctccaggtgataaaaatcaggtgtgtttgacctgtgacaaagaaatgttcctcttcattttatcattttatttttccaaattgacaccca

SEQ ID NO: 416346 - DNA, 537 bp, Homo sapiens
atttctcacacaaagatatgctttgatggaaagggaacaggggaaggggagggcatgattggtgcctgtgccttctaactgaaattcccaagtgactcataccctctctcataactcaggagygtgactaaaagaaactcaacctctgaatgaggaaacctaggttttagtcagagccccagcattctttatgtatttattcattcaactaataccaagtgagtgttttctcgggctgcactgggctaggctctacgcttcaagtgttaaagaagacagacaagttctctgacctcctggagcttaaagtttagttgatgtgacaagcattaaacagataaccatcttaacattaatttaatttctgaataacattttttttacccagtgtgctgtgaaaaccttagctatgtgatcctagggagttaacctaacctctatgcctcagtttcagcatctgcaagatggcataattcagacttgacaaatgaccttactagactgatggtagaaagatttagaaataatagttgtaaa

SEQ ID NO: 416347 - DNA, 518 bp, Homo sapiens
ttcatgacatagtatgaaagaccagtttttactattttaaaaagcaagtttattcacaatttaataggtactgtgtttagcactgacctgataatattctcatgttttctaattatattaattgtagctcacttaacaacaaattaacttccaaaaccataayattttcactaggatcccaaatgtcaataacttttatattatttctaactatattaccctctttgtactattgccaggcattaacacattttcacacatctaccttttgaaaatatgcttacaaattatcttttaattttacactcattcgtgcaaatgcagctacttatttaaaatttcacaactttgaatagtatgtaataatatactctatgtgacattaaagcaccaaatatgaacataaatttcaaagattaaaaaatgcatatacacacacatgggcgcacacacacacacacacacacacacagttggcccttcatatccatgggtttcacatacacagattcaaacaa

SEQ ID NO: 416348 - DNA, 576 bp, Homo sapiens
ctttttggtgcaggcatttaatgctatgaaccttcctattagcacggcttttgctgaatcccagaggttttgataggttgtgtcactattatctttcagttcaaagtatttttttaatttccatcttgatttcattgttgactcaatgatcatacaagagcaggttatttaatttycaagaatttgtatggttttgaggcttccttttagggttggtttccaattttatcccactgtggtctgaaagagtactttatgtaacttcgattttcttaaatttactgatacttgttttgtggcctatcatgtggtctatcttggagaatgatccatgggctgatgaatagaatgtatattctgcagttattgggtagaatgttctataaatatctgttaagtccttttgttgtagggaatattttaggtccattgtttctttgttgactttctgtcttgatgacctgtctagtgctgtcagtggagtattgaaatcccccactattattgtgttgctgcctatctcattttttaggtctagcagtcattgttttacaaatttgggagctccagtgttag

SEQ ID NO: 416349 - DNA, 605 bp, Homo sapiens
agattgtttcttctccgctggtcatctaaggtttgtttgcttacttttctcagcaaagaaagaaaattgggaacaaaaataaatattgtacttaagttatgaaactgctttaaacaaatctctctctctctcttctctttctcatttgaaggtaattyttattgtgccatttgcttattcctaaatcctgtcatgggcagaatattcttactacaactatcatattaaattctttccacattttctgttgagaaatgtaattatcatttatagggatatgtcacaagaaagcatggaatgtatattatatatgtaaagactagacgtgataatattcataaataagtaactctccgcaaatccattaattaaaatcatcctaatatttctattgtggaggataatgaaggatagcaatttagcttctgttcttactctgtgtcttaataagattgttattggagtgattgctacacagggataccaggaaatttgcaattgatttttatttacatgactgttctttttctcattcaagaatattgtctcagataagcagtaattactggaatcaagaaactctttattacaagaaactaaataat

SEQ ID NO: 416350 - DNA, 605 bp, Homo sapiens
agattgtttcttctccgctggtcatctaaggtttgtttgcttacttttctcagcaaagaaagaaaattgggaacaaaaataaatattgtacttaagttatgaaactgctttaaacaaatctctctctctctcttctctttctcatttgaaggtaattcttattgtgccatttgcttattcctaaatcctgtcatgggcagaatattcttactacaactatcatattaaattctttccacattttctgttgagaaatgtaattatcatttatagggatatgtcacaagaaagcatggaatgtatattatatatgtaaagactagacgtgataatattcataaataagtaactctccgcaaatccattaattaaaatcatcctaatatttctattgtggaggataatgaaggatagcaatttagcttctgttcttactctgtgtcttaataagattgttattggagtgattgctacacagggataccaggamatttgcaattgatttttatttacatgactgttctttttctcattcaagaatattgtctcagataagcagtaattactggaatcaagaaactctttattacaagaaactaaataat

SEQ ID NO: 416351 - DNA, 633 bp, Homo sapiens
ttaataatggagaccactcaattatattccaaaacctagtgtttagcttatattgtttttataatatgtgtggagtaaagaggagggtgaaactattttcaaactacatgtaaaataggacaaaaattctaccattttaacacacgttaataactattgctcataccttcaaaatttttcatagaatggaatactattgwttatattttcatgaactatcatatgtaaaaagagtatatataacatgtatgttcagtttttaaaggttaataataaaacctgaggtaccactgctttccttcaatggtggtgcaaacattgctactgcctcacctttcattttggaattgatcactgtcccgaagtttgtgtctatccttctctcatatttcttttaattttattatagtacatataggatatgttaggtatttatgaatttagaaagatcatacttctttatgtaatgacgcatttttgtcataaccacaactttaaggattctgtacagctaaacgagcttaagtttaatctaggtatttccccttatttaatttatttttcatctctttttgtccttatgttttatgtgtaccttgcatatgacatatgactgaattttgttttaataag

SEQ ID NO: 416352 - DNA, 633 bp, Homo sapiens
ttaataatggagaccactcaattatattccaaaacctagtgtttagcttatattgtttttataatatgtgtggagtaaagaggagggtgaaactattttcaaactacatgtaaaataggacaaaaattctaccattttaacacacgttaataactattgctcataccttcaaaatttttcatagaatggaatactattgattatattttcatgaactatcatatgtaaaaagagtatatataacatgtatgttcagtttttaaaggttaataataaaacctgaggtaccactgctttccttcaatggtggtgcaaacattgctactgcctcacctttcattttggaattgatcactgtcccgaagtttgtgtctatccttctctcatatttcttttaattttattatartacatataggatatgttaggtatttatgaatttagaaagatcatacttctttatgtaatgacgcatttttgtcataaccacaactttaaggattctgtacagctaaacgagcttaagtttaatctaggtatttccccttatttaatttatttttcatctctttttgtccttatgttttatgtgtaccttgcatatgacatatgactgaattttgttttaataag

SEQ ID NO: 416353 - DNA, 530 bp, Homo sapiens
gacaccactaccttaagtgaactaacagaagcaaaaaatcagctatcacatgttcttgcttgtaagtgggagctaaacaaaagatatacgtggacataaaaatggggaaattagactctgaggactccaaagagggagggttctcgcttaagtggaagctaaacaaaggatacatgtggacataaaaatggggaaattagactctgaggactccaaagagggagggttctcgcytaagtggaagctaaacaaaggatacatgtggacataaagatgaggaaattagactcaggactccaaagagggagggcagagggcggggggcagggaggattgaaaaatcatctactgggtacaatgtccaatatttgggtgatggatacactagaagcccaacctccaccattatgcatgtactcatgtaacaaataagcccacgtaccctctgactctgaactaaatatatatatctactgctatcttgtcatccaaaggaattagtatcaattttgactgcaactggcaatcta

SEQ ID NO: 416354 - DNA, 583 bp, Homo sapiens
ctatttgtctggagacccagttgttcgtacagggaaattatactggatcacctgccttattttatcttccccagaagtgtccatcactatcccaactctctactcccttagtaattggggaagaaatgtatcacatcagctttaattctttccttcccagattctttctatgatgtgtttggctaagcttaacctgaggacactcctccacaggaatgacaaaagaatgggggaaccatgcattctgctgcttctagctgtgtaaatttccccagtggtccttacattctatattgctagtaaccattgtgttaaggccctattgtacttcttgtttatatgtaggctgtctgtttacactgggatcgtcacttttttatgagcttaattttatttgtttactgactggctgccagatgaaaaatgattacttacatattacaactcrgaataatattataaatgataatagtatttattattccagtatacatatagaatgtaaagtttcatgtgctaagacaagtatatctggaagcataaagcgaaaaaagtgaacacaagaaaacctcatgaataactg

SEQ ID NO: 416355 - DNA, 488 bp, Homo sapiens
aatagaaaaaaacactttgattcaaaatctctaacctcttagctttctttctctgcttgtattagagaaacttgctaattgactttccacatctttctgtaataagatatatcaactccactcatcactgggtattatttatgaagactygctattgtttccccaagaagagaagtgattataaaatgatcacaccttatccatgcaagacccaagagaaaaaagctccaactcatgtctggtgattagcagagtgcttcgtatacataggtactcattaagtaattattgaggaaatgaattgctggcacacaaagcaattggaaactctcactacagcaacttgactatggctggcacatgtcctaattcttcttacaaaaaaatccacggtcctttcactattcttaggaaatgatcatctctcatattcttagtcttctcctctacatggttgtcactcggactcattatacaaagaaacaaag

SEQ ID NO: 416356 - DNA, 553 bp, Homo sapiens
agttttgtttctactaggtgtggacaaaatacaaatttgacaaatacgctttctattatttcattaaagtatttggtaaaattgaaatacatttccaagtcaaatatatgacctgagaatactctaatagtgcttctgcctgagacactgaccatcagtcagtcatattaagggtagttttcagtcagaaatgactcagcatgaacattactctccgaaattatagtatttctttaaatattcctcagagtaagtagccttttttaaagtatttggattttttaaaatttaaagtatatacaaaaaattaaaattaygccaagaatgtaaacagatttgaatctagagatagcaaatgtctaagatattaacaaagtatcaactgaatagaccaggtattgccaaacatctggaaaacaagatgcattagttataatgtcctagatttttatagtgtttttacatttacctagcaccaccttctctaatttactagacccacataacaactctgcaaagaaaagggcaaatccaaccaactccatgggaaaaa

SEQ ID NO: 416357 - DNA, 570 bp, Homo sapiens
tgacctgagaatactctaatagtgcttctgcctgagacactgaccatcagtcagtcatattaagggtagttttcagtcagaaatgactcagcatgaacattactctccgaaattatagtatttctttaaatattcctcagagtaagtagccttttttaaagtatttggattttttaaaatttaaagtatatacaaaaaattaaaattatgccaagaatgtaaacagatttgaatctaragatagcaaatgtctaagatattaacaaagtatcaactgaatagaccaggtattgccaaacatctggaaaacaagatgcattagttataatgtcctagatttttatagtgtttttacatttacctagcaccaccttctctaatttactagacccacataacaactctgcaaagaaaagggcaaatccaaccaactccatgggaaaaatctaactcagaaaggaacagctttctgtagtggatatattaatacagttagttaactgatgggcaaattttgctactcatgtattctaatttcatgacaaatatcacaaatacaaataagggcaa

SEQ ID NO: 416358 - DNA, 553 bp, Homo sapiens
agttttgtttctactaggtgtggacaaaatacaaatttgacaaatacgctttctattatttcattaaagtatttggtaaaattgaaatacatttccaagtcaaatatatgacctgagaatactctaatagtgcttctgcctgagacactgaccatcagtcagtcatattaagggtagttttcagtcagaaatgactcagcatgaacattactctccgaaattatagtatttctttaaatattcctcagagtaagtagccttttttaaagtatttggattttttaaaatttaaagtatatacaaaaaattaaaattatgccaagaatgtaaacagatttgaatctagagatagcaaatgtctaagatattaacaaagtatcaactgaatagaccaggtattgccaaacatctggaaaacaagatgcattagttataatgtcctagatttttatagtgtttttacatttacctagcaccaccttctstaatttactagacccacataacaactctgcaaagaaaagggcaaatccaaccaactccatgggaaaaa

SEQ ID NO: 416359 - DNA, 577 bp, Homo sapiens
gttagaggtagtaactgtatgtagtaatcatcattctcttatgtttagatgtctaataaatataaataaaatataataatacaaataaataataaatacagaaataacttatgcttcacatggcaagtttcaatagacttgaatttaattttttgacttgttaatatgataccatattttgtcagagggaaaattttctgctaagaagtttggttgcatgatcctcaaacagagggaatcttaatgcacgggactactacagttaaattcaaatttcattcaackgtccttaacctggcttatattgatgtatccttggaatgtgtaacctgacaaagagattcttggcgattcccaatgtgtagagaagcagggattaaatccacatggcttttgtcacctaaaaatgaataaagttagaaatagttgagtgtcaaatatttttgagtgtctaagaagccactggagttttcggagcaaccatacaggataaattctaaatgtcagagcatgtgattttccaaattcatttatttatgcaaataatttaactctgtgtcttgttttacttatgttt

SEQ ID NO: 416360 - DNA, 576 bp, Homo sapiens
atttatttgtattgtatatatttaatrtgtataacatgatgttttgatacacatatatgcaataaaatgattaccacagtcaagcaattaacatatccatcaccgcacatagttacctttttttgtagtaaaagcacctaaaatctactcccttagctacattttagcatataatataatactataactatattcctcatgctgtgcattcagcctctagacttactcatcctacataactacaagttcgtaccctttgacattcatctctccatttttcccttcctgaacccctggtaagcactgttatgctgtttctatatatttgacattgaaaaaacattccatctgtatgtgagatcgtgccgcatttttctttctgtttctagcttatttcactcttaatagtgtcctccaggttcatctatgttgttgcaaatgccaacgcaaattctttgtgaatgcttcaatttgaagattataaagtatcagcaaatggagaaatcagtgaaataccaaatattggatcccaagtttctgtttctctatagttaatattaatttgatggatagaaa

SEQ ID NO: 416361 - DNA, 586 bp, Homo sapiens
tgtgagcagtctgatggtcaatgataagttctgcagaccattttacccaattattatttcttcctacctctgtaattatagcatatatacctgccacagtagttccttctaattgtggataaatagttcttcaaaggtacaaatagctaatcataatttgtaaccacattgactgtgtttgagctggaaatatagttattttaatgttttatccagaaggacccttggagtataatttagattttgaatatcttaaatgttgcctgtaatacaacctattataatggcttattttgttattatctcagaatgaygctagaatattatactatttagaattttagttttataattactcacattttatattacttttaatattatgtgtatttttcataataattcatttttgtttacgtttttatgaaatactttcatagatttaaaataaaaacagtttcttattgttttcaaatttatcttttactttagtttttaagatttggttcaatttcttaatgatagcaacttataaatatttctggaaatttgtttcaaagttgcaatatggcctggtctatacagc

SEQ ID NO: 416362 - DNA, 586 bp, Homo sapiens
tgtgagcagtctgatggtcaatgataagttctgcagaccattttacccaattattatttcttcctacctctgtaattatagcatatatacctgccacagtagttccttctaattgtggataaatagttcttcaaaggtacaaatagctaatcataatttgtaaccacattgactgtgtttgagctggaaatatagttattttaatgttttatccagaaggacccttggagtataatttagattttgaatatcttaaatgttgcctgtaatacaacctattataatggcttattttgttattatctcagaatgatgctagaatattatactatttagaattttagttttataattactcacattttatattacttttaatattatgtgtatttttcataataattcatttttgtttacgtttttatgaawtactttcatagatttaaaataaaaacagtttcttattgttttcaaatttatcttttactttagtttttaagatttggttcaatttcttaatgatagcaacttataaatatttctggaaatttgtttcaaagttgcaatatggcctggtctatacagc

SEQ ID NO: 416363 - DNA, 621 bp, Homo sapiens
tactcagacatattggaattttagaaatctcatacaattttggaacatatattaatattattcactaaaatataacctgaagaagattaaatttttttctttttgacaatgcttcccatgtaattaaacatgtcaaataattctgtttacctctcttttggatgcttcaggggccctctgcagcatctcaaagttagaggttagaaaagacaattttgaagctgaaatttgattttgggaagcctattaaatatgttaaagatttaaaacacttgacattatgaaatggaattccaggttaccatagtcattcatttagcaaaatgatgactcaaaaatgttttaaaaggcaaaaacctttccwtgttgatagatggaagacttactttacaaacaatctgtctcttgtctttcccttccttttttttggtgggggggtagtttattcaaaaggcaaacaaagatctttcattatcttttaatactgcatgaaaatcttgttcaagagagaaagccaaatttcacccttgcattagtgtgctattaatgtcaaccccaatttttaagaaaaccttgtagacatatctttccaatcttaatccgtttgaccataaggtgaga

SEQ ID NO: 416364 - DNA, 536 bp, Homo sapiens
atggaagacataaaactatttttaaaattttttcaaaaaacatrggaaagtatctttgggacttagggcttagtaaagagttcttagacatggcaccaaaaggcacaattcataaaagaaaatatcagtaaattagacttcatcaaactcaaaaacttttgctttgaaagagaccttgttaaattgctcggagtggtggctcatgcctgtaatcccagcacttagggaggctgaggtggtagggttgcttgaggccaggagttcaagaccagcttgggtaacatagcaagaccttgtctttataaaaacaaaatttaaaaattagctgggtgtgctggcgcacctctgtggtcatagctacttaagaggctgaggcagaaggatcacttgagcccaggagtttgaggttgcagtgggccatgattgtgccactgcactccagcagagtgggaaaaaatatttgtaaatcacatatctgacaaagaactagtatctagaatacataaagaactctcaaaacttaacagtaaagaaaa

SEQ ID NO: 416365 - DNA, 612 bp, Homo sapiens
taattcagatgattcctcaggtggtcaagggacgctgcaggaagcccacactgcttgctggagtccatggcctgtcactttatctgcccaagtcagggtcatgtaaaatgagtggacaatgtacacacatggcacctcagttctccctgtgcatggagggcagcatggaggagcctcttcagagaaagcttcatgccagacgcagccacaaaccaggctaagcaggctacggccataggtttgtggtctgaatgctctgcatgctcacacctagggcccagggcattcacagccccacgcacattggtgcagacacttcacaggcacagacagttcacagtgcacacgctggggcctagaggactgctgtgtctggggcagggctgtggccatggcagggccttagaccatgcactgctgggtcaagccaggtgcacastgctctgtgtagacagcaaacggagaagtgccccgcccctgcctggtggtggaagaccgggcttcacagatgagatacccatggatgagagtctaccaggtgtcctcaaagctcctagtgtctcaagggaccttttccggatgcatggtcagaagcacagacacaccacccat

SEQ ID NO: 416366 - DNA, 507 bp, Homo sapiens
cgttttgaaccctcccctaacccagagaaggcagcctgttcaggtcaattggtgcacccccstgctcacgggtcagctcatgatctgctttaagttttgaaaccccaccctctaaaggcctgatgacttttgctccctgcccttcctgttcttctgcataggcagtgcccactggacgttactgagcaccaccttggtattcctttgccagtgtagctggtgcatggagtaatcctaattttgcagcatcaatgattacagcatttttcagtcaccacccttggcctctttgagcagtgccaggttgtctgtgagttcagggtgggtaaggagagctgccccctcatcttggtgctcagcagaggtggctcttctgcctgaagcagctggcccagagaaaaactggtttggaaggctgggccacaaacaacacagcccagctttgacctcttccagcctcctctggtccctctgtttcccccaaccctggggcaggcaggaggagga

SEQ ID NO: 416367 - DNA, 588 bp, Homo sapiens
tcagtcaccacccttggcctctttgagcagtgccaggttgtctgtgagttcagggtgggtaaggagagctgccccctcatcttggtgctcagcagaggtggctcttctgcctgaagcagctggcccagagaaaaactggtttggaaggctgggccacaaacaacacagcccagctttgacctcttccagcctcctctggtccctctgtttcccccaaccctggggcaggcaggaggaggaccattttggctcaggattggagagctgcaactttggcctgtgcaccagrgacaagtccctagagataaggaaaacctttctctctgggagtggctgtgctaattctgagaaaggaagagaaaatgttcttttctgaccctgtctgtgagtggggggaataaacactgcatagactaaacagtaagtgaggcacttagaacacatttcttgtttctttcccctgttcagtaaaagaggagggctaagagggcaaacaggggaagcaaggggcactggggaagagagatccatagaagtgctgagaccgaagggagaggctcacagacactgcttcctaccagacacaga

SEQ ID NO: 416368 - DNA, 619 bp, Homo sapiens
cagcctcaaatcagctcagtctctggaattggattaaagcaataccaatttgctaggattccctggtgcctggcctaaacaaacrtaaatcctccctagggaaggaaaacatcttcctaggcctcaagttatttctatacaaacaatttttcaaatgcaatattcctcagataataaaaataatcagacacttgaggaaacaggaaaacataaatgaaaaggaagaaaaaacacccccaaaacaaaaaccccaaaccaacccacaaaggaaacagaccaataaggattcaagatagtcaaggtactggatacacactttaaaataatgcttgctaaatttaatgagattaaaaaaaaagttagaaaatttttgagataaaagaaaacaattaaaagggtatatttttaaaagaatacagtagacttaaaaacaaatatacagacatactagaccttacaatataattaggagctcattggatgaatttttaaaagattaaacatagctaaagaaaaaaattagtagattggaaggttaatcagaaaatattcataacggagcataaaatcacaaaagaatggaaaataagagatatatggaatacagtaaggtctaaca

SEQ ID NO: 416369 - DNA, 619 bp, Homo sapiens
cagcctcaaatcagctcagtctctggaattggattaaagcaataccaatttgctaggattccctggtgcctggcctaaacaaacataaatcctccctagrgaaggaaaacatcttcctaggcctcaagttatttctatacaaacaatttttcaaatgcaatattcctcagataataaaaataatcagacacttgaggaaacaggaaaacataaatgaaaaggaagaaaaaacacccccaaaacaaaaaccccaaaccaacccacaaaggaaacagaccaataaggattcaagatagtcaaggtactggatacacactttaaaataatgcttgctaaatttaatgagattaaaaaaaaagttagaaaatttttgagataaaagaaaacaattaaaagggtatatttttaaaagaatacagtagacttaaaaacaaatatacagacatactagaccttacaatataattaggagctcattggatgaatttttaaaagattaaacatagctaaagaaaaaaattagtagattggaaggttaatcagaaaatattcataacggagcataaaatcacaaaagaatggaaaataagagatatatggaatacagtaaggtctaaca

SEQ ID NO: 416370 - DNA, 608 bp, Homo sapiens
ttggcaacaggagatccttcaaattggttcttgtatgctttgagtgtcccatcactgttkgagcacttcagtgtgttgttctaggctcagcatctatttttcctgccccagccctgaagtcagctatttttccaaggagttctggttccttttagtaaagaagagtacttacaagccaatatcttggtgcttactcctgctggtatgccattgcctctaggccttctcaatggacacaacccagaagtacagtaaatagctataaaaggcattactgggataactgacaacagttaaatgtggactgtggacgtgacgagtattaaatccacataatgtaaaagatcctgatcttggtaatcatactgtgggtatgcaagagattgtcttattcttaggaaataggcactgaagtatttaggggaaaggagcacaaggcttgcagctgtgggagtgtgtgttggggaggatttagggccattgggggccccataatcctgatcattctgtgcactcaggtgaacatgtctctcttcactgagcagacagactgagaatcagagctttgaagtctgacagtgtacataatacttccacaaaggcatccc

SEQ ID NO: 416371 - DNA, 608 bp, Homo sapiens
ttggcaacaggagatccttcaaattggttcttgtatgctttgagtgtcccatcactgtttgagcacttcagtgtgttgttctaggctcagcatctatttttcctgccccagccctgaagtcagctatttttccaaggagttctggttccttttagtaaagaagagtacttacaagccaatatcttggtgcttactcctgctggtatgccattgcctctaggccttctcaatggacacaacccagaagtacagtaaatagctataaaaggcattactgggataactgacaacagttaaatgtggactgtggacgtgacgagtattaaatccacataatgtaaaagatcctgatcttggtaatcatactgtgggtatgcaagagattgtcttattcttaggaaataggcactgaagtatttaggggaaaggagcacaaggcttgcagctgtgggagtgtgtgttggggaggatttagggccattgggggccccataatcctgatcattctgygcactcaggtgaacatgtctctcttcactgagcagacagactgagaatcagagctttgaagtctgacagtgtacataatacttccacaaaggcatccc

SEQ ID NO: 416372 - DNA, 599 bp, Homo sapiens
ctgggtttctcatgaccataccagccatgcactgctcacctctggtctttctcctgagagataaatgtatattcactcatgctaatatgttcaacctaaatgaaccgtcccaactcagcaacccagttccagcccttccagcccttgttgctatgtccttgaggacagcaaattctactgttctttgaccaaattctacttctctagaaccagagsccacagcaccttatgccacactcctcttccctaaggcaggaccctgctttctggcatggccctcaccagccctccttcccaatattcactcaccaaatctgcagtggttgatcttattgtagagcaggcccatggggatgttccagccagcggttctgccaactgccgtatggcaggacttcttgcctttcagattgtcccaggtgaggtcagaagctgatttcttcaccactgctacagcaaaataccctacaagaaagacaccagaaaaggatgtattaacacctctggggcttccagagtgtctgcttccaatcaatttccctagggaagcaaagatatcctcaatcagtcattgtgtcttgagaggatcttcccagtat

SEQ ID NO: 416373 - DNA, 593 bp, Homo sapiens
ggaagcaaagatatcctcaatcagtcattgtgtcttgagaggatcttcccagtatctgactgaggggaagtacaaggaactctgtcaggagaagattaatctgaactttaaaaacaaaatattgtgaaaacaccatcattagatcaatggctgggtgtataacccttccctaagtgcataaagtcactgaagttataagccagcaattcaccatccaatgagtcctatcagaggaatggatactgaaacagctaatgtaaccacaaactttcataaattaacatatgttgagatatagtagtaaaagatcaataagcaaaagagaaaaaaytgagccaaacattttctgataaggagaatatagttttataccaaaataaatatgcaaaatggaaaatgtcaatatcaagtcagcttccattttcagcagcaaatatatactggtccttaaaatgggaaatagaacatcaacctatgatttcagtttgccagtttaattcagattacagtttccaacagaaaacagaatctttattatccatagaataagaatggctttttctatatctgctgaagggcttagctccccaagt

SEQ ID NO: 416374 - DNA, 599 bp, Homo sapiens
caattattttttatggatatgttttagtttgttatctaaacactgcccccttcttttttgagagcagcagttttgtattgattagactactgtatgttatgtcataagaaatctaccacatatcagaggtttattaaataaaagctcatttgttgacaacaatacaagtagaacatgaaacaccagaaagctgcgctcccaacaatagtgcacagcaatgaagacttcatctcaaaatgcagtaggaagtgataatgaggaattatgcaccgtcattcataagtgacacgtgtcacatccacttattttgagttggccaaagcaartcatagagaaatccattctggcaattagaagtctttcacactttaattctaagtcaatcctcaggctctagaatacactcaaatatgcattgcatgctaagactggacagacctcagcagaggaatctcttccaacattccttttagggccaaacacaaaggacaatggataaagtagaacctactagggggcaaaacctatgacctctaggaagcctggcattaatgcatttgtttccttatatgcctgtccaatagctcagcaagcaattt

SEQ ID NO: 416375 - DNA, 529 bp, Homo sapiens
ttaggtggttgtgcgtcacatcctgctcataggtatacatagtgttacataatatatggcacaggctcttgcattacttttctaagatccctctaactcttaattccaagacacatctggccccaaattttagatattatgtatctacagtgcattccgtatcactgttaatataagaattatacattaacagagttaagtgtttagcaaactgtcaggatactctaaaataggctatcattgaggctgtagggagaaagggttcaraactccaggttcctgattgctggcagagcacaccagaaaccctggctgcttaccttccatctacatgttctactcacatctactccaatttttttttaattatccacactgcaggtaaaattatcctttgaaagacaagtttaatattccctctcctgtttaaaatccttcaaaggcttcctattgatattatagcaaacattaaaacccttattatgagttataaagactatgcaaggccattctctccagtactgggtgc

SEQ ID NO: 416376 - DNA, 507 bp, Homo sapiens
agttattatcctatagttgcaaatatatctttaaaatcttctttacattttgataaatcatgatccttccactgccactaagcttcttgaaagacaattctggtctatcacctgttttttatcttccattcacttttgacctcctgtaacttgaatctaaatctaagcggagctgtggtttcatggccatgatgtcatagaggaattcagcttcctttggaggtgttagtggctacggccatggctttctagttgaggcagatccagcttgtggtgtgcagcagtttcctcactaggtgagttttcagtagtgttcctatttctagaagtttgtcttaaagtctggttcccaacctctcaacatttttgtgracttcccaaaatcatttaaattaatttctcattgtttaaatagccagagtcaacttttatgtcttaaaattagggcactttgctcataacattatttctaaaaaactattttaaaataatattttgtaagaacca

SEQ ID NO: 416377 - DNA, 506 bp, Homo sapiens
gtactaagagtaaagtttagtttatagtaatgaatgcctatgttaaaagtaagagagcgttcaaataaataactacatttcaagggaatagaaaagatgaagaaactcaacccaaaattattagaaagaatgaartaataaatattagaagaaataaatgaaacagaggctagaaaaacaaataagaaaaaccaacaaacctgtttatttttcaaaaagatacacaaaattgtactgacagaatattagctagactaaaaaaaaagggaaagagtcaaataaaattagatatgaaagaggggacttaacaacagaaatacaaaggatcataagggactacatgagtgaattggacaacctagaaaaaacaaatttctagaaacttacaacctaccaagactgaatcaaaaagaaagaaaagcaataatgaacaataatcagtaaggtgattgaagaagtaataattataataaagaaaagctaagaactaaatggcttcactgctg

SEQ ID NO: 416378 - DNA, 577 bp, Homo sapiens
gtaaggtgattgaagaagtaataattataataaagaaaagcyaagaactaaatggcttcactgctgaattcatcaaacatttaaataataattaataccaaaatttgaaaactttttcaaaaacacataaaaagagggaacacatccaaactccttttatgaggtcagtatcagcctgctcccaaacctagacaaaggcactgccagaaaagaaaatgacaggccaacagctctgatcaacatagatgcaaaaattttcagcaaaacactggcaagtcaaatacaacatgaaaataaaagaatcatacaccatgaccaagtaggtaagatttacccttcgaatgcaagcatggctcaacatatgaaaatcaatcaatgtgatataccacattaatagaatgaaggacaaaaaaatcatgtaatcatttcaatagatacagaaaacgcatttgacaaattgtgaccacccttaatagtaacaaactctcaacaatttaggcatagaaggaacttatctcaacaaaataaaggccatatatgataagctcacaacttagattatactcaatggtgaaaa

SEQ ID NO: 416379 - DNA, 568 bp, Homo sapiens
tttattttgttaaaagcataacatgaaatctatcttatatctttaagtatacattatagtattaattatatgtgcttttatgtacagcagatctctagggatttttcattttgtatgactgaaactctacacccactgaacaacaactctctgtttctccctcccccccaagctccttgcagtcatcattttactttctgcttctatgaatttgaccactttagatacctcataaatgaggaatcatgcagcatttttccttctgtgataggtttattgcattacgttctcaaagttcaaccatattgtaccatatgacaggatttccttcttgaaaaactgaatagtatttcrtcatgtgtatatatcacattttctttatccagtcatctgttgatgaacatttaggttgctttgatctcttggctattgtgaataatgctgcgataaacatgggtgtacaaatatccctttgagatactgttttcaattattttggatatacacccagaagtgagatggctcaatcatatggtaattctaatgagttaattttaagtgaacaata

SEQ ID NO: 416380 - DNA, 568 bp, Homo sapiens
tttattttgttaaaagcataacatgaaatctatcttatatctttaagtatacattatagtattaattatatgtgcttttatgtacagcagatctctagggatttttcattttgtatgactgaaactctacacccactgaacaacaactctctgtttctccctcccccccaagctccttgcagtcatcattttactttctgcttctatgaatttgaccactttagatacctcataaatgaggaatcatgcagcatttttccttctgtgataggtttattgcattacgttctcaaagttcaaccatattgtaccatatgacaggatttccttcttgaaaaactgaatagtatttcatcatgtgtatatatcacattttctttatccagtcatctgttgatgaacatttakgttgctttgatctcttggctattgtgaataatgctgcgataaacatgggtgtacaaatatccctttgagatactgttttcaattattttggatatacacccagaagtgagatggctcaatcatatggtaattctaatgagttaattttaagtgaacaata

SEQ ID NO: 416381 - DNA, 577 bp, Homo sapiens
gtaaggtgattgaagaagtaataattataataaagaaaagctaagaactaaatggcttcactgctgaattcatcaaacatttaaataataattaataccaaaatttgaaaactttttcaaaaacacataaaaagagggaacacatccaaactccttttatgaggtcagtatcagcctgctcccaaacctagacaaaggcactgccagaaaagaaaatgacaggccaacagctctgatcaacatagatgcaaaaattttcagcaaaacactggcaagtcaaatacaacatgaaaataaaagaatcatacaccatgaccaagtaggtaagatttacccttcgaatgcaagcatggctcaacatatgaaaatcaatcaatgtgatataccacattaatagaatgaaggacaaaaaaatcatgtaatcatttcaatagatacagaaaamgcatttgacaaattgtgaccacccttaatagtaacaaactctcaacaatttaggcatagaaggaacttatctcaacaaaataaaggccatatatgataagctcacaacttagattatactcaatggtgaaaa

SEQ ID NO: 416382 - DNA, 577 bp, Homo sapiens
gtaaggtgattgaagaagtaataattataataaagaaaagctaagaactaaatggcttcactgctgaattcatcaaacatttaaataataattaataccaaaatttgaaaactttttcaaaaacacataaaaagagggaacacatccaaactccttttatgaggtcagtatcagcctgctcccaaacctagacaaaggcactgccagaaaagaaaatgacaggccaacagctctgatcaacatagatgcaaaaattttcagcaaaacactggcaagtcaaatacaacatgaaaataaaagaatcatacaccatgaccaagtaggtaagatttacccttcgaatgcaagcatggctcaacatatgaaaatcaatcaatgtgatataccacattaatagaatgaaggacaaaaaaatcatgtaatcatttcaatagatacagaaaacgcatttgacaaattgygaccacccttaatagtaacaaactctcaacaatttaggcatagaaggaacttatctcaacaaaataaaggccatatatgataagctcacaacttagattatactcaatggtgaaaa

SEQ ID NO: 416383 - DNA, 577 bp, Homo sapiens
gtaaggtgattgaagaagtaataattataataaagaaaagctaagaactaaatggcttcactgctgaattcatcaaacatttaaataataattaataccaaaatttgaaaactttttcaaaaacacataaaaagagggaacacatccaaactccttttatgaggtcagtatcagcctgctcccaaacctagacaaaggcactgccagaaaagaaaatgacaggccaacagctctgatcaacatagatgcaaaaattttcagcaaaacactggcaagtcaaatacaacatgaaaataaaagaatcatacaccatgaccaagtaggtaagatttacccttcgaatgcaagcatggctcaacatatgaaaatcaatcaatgtgatataccacattaatagaatgaaggacaaaaaaatcatgtaatcatttcaatagatacagaaaacgcatttgacaaattgtgaccacccytaatagtaacaaactctcaacaatttaggcatagaaggaacttatctcaacaaaataaaggccatatatgataagctcacaacttagattatactcaatggtgaaaa

SEQ ID NO: 416384 - DNA, 502 bp, Homo sapiens
atgtgtgggactgattccatgtggaaaatcaaaagcctttttatttattcatatattcaactcatgggcatctactctgtttcagccttgtactgtatgctaggtatagaatatatttttcttttttatgatttctactttcattttagattcagagaatacacttatagacttgttacatgagtatattgggtgatgctgagaatttggagtacgaatgctgctatcacccaggtagtgaacatagtatccaacagttagttttttagtccttgtcccctgccctctctcccccttctgatagaacagaaaaccaaatactgcatgttctcacttatacatgggagttaaacattggayactcataaacataaagatggcaacaatagacactgggaattatcataggtatagaatattaaagaaaacacagttccttatctgaattattatgtgttgctgaatgtagacaagcaacaaaaaggtaggatatgttgttata

SEQ ID NO: 416385 - DNA, 510 bp, Homo sapiens
tttatagaactaacactaatcattatcaaactattctgaaaaatagaggaggagggaattcctccaaactcattctatgaagcctgatacaaaaaccagataaagacacatcaaaaaaaaaaaaaaagtggaaactcctggccagtatctctgatgaatattgatgcaaaaatcctcaacagaatacaagcaaaccaatttcagcaatacattaaaaagataattcatcttgaccaagttggatttattctaggaaaacaaggatggtttaacatacacaaatcaatcgatgtgatacatcatrtcaacataatgaaggacaaaaatcgtgatcatttgaatttatgctgcaaaaaatttgataaagttaattatcctttatagtaaaaactctcaaaaattggttattagaaagaacaatacctcaacataataaaagccatatatgacagacccacaggcagtatcatactgaatagggaaaacagaaagcctgtgctcatagatctg

SEQ ID NO: 416386 - DNA, 534 bp, Homo sapiens
cctacaaaagctgaggctgtttatcaagactagacttaacttttaagaaacgctaaagaaagttcatgttgaaatgaaaggacgctaaggagcaacacaaaagcataaaatagtataaaacttgctagtaaaagtaagtatgtagacaaaaagcaggatcttgtattattataatagtgatgagtaaattgattttattctattataaaaattaaaagakaaaagtattaaaaatcactataactaaattatgttaatgaatacataacacaaatacatgtaaattgtgaaataaatgtcacattaagtgggaagacaggacataaaagtggggtttttgcatacagggaaattaagttatcagcttaaaatagaccattataactataagatactttatgtaagccccttggtaatcaggaataaaatacctaaaagagttataaaataagaaaaagaaaggaatcaaaaccaatctctacaaaaactcaaacacaaaagaagacagtaagacagaaagagaaaaaaactgta

SEQ ID NO: 416387 - DNA, 534 bp, Homo sapiens
cctacaaaagctgaggctgtttatcaagactagacttaacttttaagaaacgctaaagaaagttcatgttgaaatgaaaggacgctaaggagcaacacaaaagcataaaatagtataaaacttgctagtaaaagtaagtatgtagacaaaaagcaggatcttgtattattataatagtgatgagtaaattgattttattctattataaaaattaaaagagaaaagtattaaaaatcactataactaaattatgttaatgaatacataacacaaatacatgtaaattgtgaaataaatgtcacattaagtgrgaagacaggacataaaagtggggtttttgcatacagggaaattaagttatcagcttaaaatagaccattataactataagatactttatgtaagccccttggtaatcaggaataaaatacctaaaagagttataaaataagaaaaagaaaggaatcaaaaccaatctctacaaaaactcaaacacaaaagaagacagtaagacagaaagagaaaaaaactgta

SEQ ID NO: 416388 - DNA, 549 bp, Homo sapiens
tcagtgtggcattggtttgcatttccctcatgattagagatatgggacattttttgacatacctgttcgccattggtaggtcttcttttaagaaatgyctatttaggtttttgcttattttttaattgtgttatttggtttttactatcgagttgtttgacttccttacatattatgaatgttaaccccttctcagatgcatagattgcaaatattaacactttcacccattttttaaagttctctcttcactctattgattgtttcctttgctatgctgaaggtttttagtttgataatcccatttgactatttctgctttggttgcttgtgcttttgaagtcttcttaaaaaaatcttgcccagtccaatttcatgaagcgtttccccagtgtttaatattttgttgttccttttttgagacgaagtctcactcttgttgcccaggctggagtgcaatggcatgatctcagctcactgcaacctctgcctctggggttcaagcgattctcctgtctcagcctcctgagtagctggcattacaggcac

SEQ ID NO: 416389 - DNA, 569 bp, Homo sapiens
gtgagccaccatgcccggcctagtattttgtttttatcctacttattaccttgtattttgtacataataggcttcattctctcctctatggaggaagagtgacttttataacctccatggctggcactgactttttataaccttcagtgcttgtgttaccttgaagctgtggatcccctaactgatctcttactagaatcagaggaaaggaaaatattgtgttgcttaccaggtacaatttctctcagaatcccaaatcaaacagatattatttgctcagttacatttctcaagaatctctctaatcgtttttttgagaaatgtacaacatattccaaagcatgtgaggataactcaggcactttaatatgaagtttgactttgctttcagttcatatatttaatttctgtaacttaaaagcaatattcacacaagtataatgtttaggccagagaaatttcaayggtttatacaatccccaaattctttcagacttgttctaaagaggcacagggacttggagtttctcaaaaactacacaaaaaatgagtcaagaaacattttgggg

SEQ ID NO: 416390 - DNA, 645 bp, Homo sapiens
tgagttttgtatatgattactttggccacaaagactggcccatttgatttaagttttattgcctctgtgctaattttacctttaaaaggcttcagtgtaagtaggatgtcttmtgtgtgtgtaagttaattacgatctcaacctatgggaatgtttgctagcatttggatatattgtatattccagagaaagaagtttattctcctaatatagtcatctaaatctatatttaagtacttaagtattatcataagacacggtagaggtaattttttactagtagaatgaggagtattaaacacaggtcattgagtataaacactaaataggctctacctcccttgtataaacaagatataggatattgagtaaatatggcagcctaatcttgaggaacaacatgcaaggtatggagcttgctggtcgtgtgtccctccaatttacggagggctctttcactcaaacctgtttcatgactggctcttcttgctgctgcgacatgttaaggatagctcagagtgaacttttcattgaaatttctaattgaagtgcctgaagacagaagggaacatcttctaacaataagagtaactgatatgacccccattttgtgcctctctgctggtaaataactatatgtttgac

SEQ ID NO: 416391 - DNA, 645 bp, Homo sapiens
tgagttttgtatatgattactttggccacaaagactggcccatttgatttaagttttattgcctctgtgctaattttacctttaaaaggcttcagtgtaagtaggatgtcttctgtgtgtgtaagttaattacgatctcaacctatgggaatgtttgctagcatttggatatattgtatattccagagaaagaagtttattctcctaatatagtcatctaaatctatatttaagtacttaagtattatcataagacacggtagaggtaattttttactagtagaatgaggagtattaaacacaggtcattgagtataaacactaaataggctctacctcccttgtataaacaagatataggatattgagtaaatatggcagcctaatcttgaggaacaacatgcaaggtatggagcttgctggtcgtgtgtccctccaatttayggagggctctttcactcaaacctgtttcatgactggctcttcttgctgctgcgacatgttaaggatagctcagagtgaacttttcattgaaatttctaattgaagtgcctgaagacagaagggaacatcttctaacaataagagtaactgatatgacccccattttgtgcctctctgctggtaaataactatatgtttgac

SEQ ID NO: 416392 - DNA, 551 bp, Homo sapiens
  misc_feature (1)...(551): n = A,T,C or G
catgccttacatcactgcagacaagagagaataagagccaagagaaaagggaaacctyttatgaaaccatcagatgtcataagacttattcactaccgtgagaatagtatgggggaaactgcccccatgattcaattctctctccctaggtcattcccacaacatatgggaattatgggagctacaatcaagatgagatttgggtggggacacagccaaaccatatcacaggctgaagggactactgttgtctcagataagattttggactttggagttttgagtttatgttggaataaattaagacttccaggactattgagtagtgatgattatactttancatgtgagaacatgagatttgataggggccagggatgtaatgatatagtttggatctttttccttgtgtcatgtcaaattataatccccagtattggaggtggggcctggtgggtggtgattggatcatgggggcagtttctaatgctttagtaccatccccctagtgacattttgtgataaagttctcatgatatattgttatttaa

SEQ ID NO: 416393 - DNA, 551 bp, Homo sapiens
  misc_feature (1)...(551): n = A,T,C or G
catgccttacatcactgcagacaagagagaataagagccaagagaaaagggaaacctcttatgaaaccatcagatgtcataagacttattcactaccgtgagaatagtatgggggaaactgcccccatgattcaattctctctccctaggtcattcccacaacatatgggaattatgggagctacaatcaagatgagatttgggtggggacacagccaaaccatatcacaggctgaagggactactgttgtctcagataagattttggactttggagttttgagtttatgttggaataaattaagacttccaggactattgagtagtgatgattatactttancatgtgagaacatgagatttgataggggccagggatgtaatgatatagtttggatctttttccttgtgtcatgtcaaattataatccccagtrttggaggtggggcctggtgggtggtgattggatcatgggggcagtttctaatgctttagtaccatccccctagtgacattttgtgataaagttctcatgatatattgttatttaa

SEQ ID NO: 416394 - DNA, 500 bp, Homo sapiens
agtttgatgggttttgatgaatacatatgttcatgtaacccttataataattaagatatagaatatttccaccatcccaaaagattttctcttgatcctctgcagctaatcctctctcctctcacccttcccccaggcaatcattaggaagatattttaaccaaaatattaaatgtataaataattgtatgtcaaaaatcttaagataaaagttaataaacaactttttaacatgcaaaaaaacccacactaaccaaaaaaagacaaagtggacagatatgatattcacaaaaatatataatcaaatgggmagaagatattcagactttttttctttttttctattattattattacactttaagttttagggtacatgtgcacaacgtgcaggtttgttacatatgtacacatgtagttgtgaaaatacaaatttaaacgtaatgaagtatcactgttttcctattatactgtaaacatgtaaaataagatgtagtatt

SEQ ID NO: 416395 - DNA, 563 bp, Homo sapiens
tgtgttcagcttcccaaacttttatcaacttttccaccctaatccctggcttcacccacatcccacaatgtaacaccaatatagagctgttctccaggactatagcaatatagaactgttttatcagtatgtaaatttgttcatcagatattttattagaaaattcataagtcaaactttcagatacttcatgattagtaaaatatttactacmacagattctcaaatattttccactatgatgccttctaaagttctatggcatgactttcaaatatttatactcttctaaaatgttcagttctataaggtatattttagcttgtttcatgactaacaaattgccatgagggatatgctcactaattctttgttaaatttattctttcaatacatggtacaattttcattttgggctagtgaaatatatatatttttaaaaatttctgttctggttaattactgtcatttaaacctttttaaaaagcaagaacaacacaaactgcttctgagacaaggtagctgtatcgtagtctttgaattataaactccgtaaagagagg

SEQ ID NO: 416396 - DNA, 554 bp, Homo sapiens
aaggtttttatatattctgaattccagccttttatcagatatatgttttgcaaatatttcctcctaacctgtgacttgtcttttgattttctcatcagtatcttccaaacagaagatgaaaaaaaatttgatacaattcagtttaattattttcttttatggtctatagttttgtgtcccatctatgaaacattttcctaccctaaagtcacaaaagatattctatgatttcttctaggtgatttacaagtatagatcatacttttagctcaaagacccatttcaagttaatttttatatatgatgtgaggtaaagtcaaggttattttttttataaatcactgagttttgaggtggtttcttatatatcattactgtaacagtaagttttcaatatcctatatttacatattactgtgtccccgtatttatctttctctcctygtatctataatttctatgtaggcaggaaaaggctccctgatgaaaaactgtaatgatgataatcgattagcacttatgcctcagaatacataagtatgtgagaaccatca

SEQ ID NO: 416397 - DNA, 482 bp, Homo sapiens
  misc_feature (1)...(482): n = A,T,C or G
caatgtgttattgtgttagtttatctcctrttctttatttcttatatattcactgtgcaaagagtgagccaattttcatctttcatttcaataaccacagttcatatgtaatcagaattaaaagataaaattatcgtactccttttgtttgtttggtatctagttttgtagcaagaaaagaaacatttaagaaaatgaaatanaagcagatttacctttttatgggcaaagatatatttcaaagggctcagtggtctagtcagacatctggtgaattgaattcgtcaaacaattgcttccaaacacaaagtagcaatagtcattttgcaagaacatgaccaaatacaaagataaatattattaaaattagaatcattgtctatagtggcaacaaggataagcatgaagaagggagatagaagaaaattaggcaagagagggcactttcccaatctaaagacaaatatgtgccatgaactgag

SEQ ID NO: 416398 - DNA, 508 bp, Homo sapiens
cactaataagccaacagacattgcaattatgctataatgaatctgaagcaaaactagaaaaagtggactatttgctgaaactagcctccaacaacatatgttgaatgaccagtgcagagtttgacagacatcgctttttctttgtgatttcaataagcatakataggaatgggtctgaaacaggcagtaaaaaatgttttctgtgtccacagggacacagggaggggaacatcacacgccagggcctgtcagggtagggggctaggggagggatagcattaggagaaatacctaatgtagacgacaggttgatgggtgcagcaaaccaccatggcacatgtatacctatgtaacaaacctgcacgttctgtacatgtatctcagaactttaagtatatgtatatatatgaatgccttcagaaatgctaggaaatcagtggtgcctggagacaggcaattggtgataacatagtttctggagatttccttcttatgcctaatttaacaa

SEQ ID NO: 416399 - DNA, 508 bp, Homo sapiens
cactaataagccaacagacattgcaattatgctataatgaatctgaagcaaaactagaaaaagtggactatttgctgaaactagcctccaacaacatatgttgaatgaccagtgcagagtttgacagacatcgctttttctttgtgatttcaataagcatatataggaatgggtctgaaacaggcagtaaaaaatgttttctgtgtccacagggacacagggaggggaacatcacacrccagggcctgtcagggtagggggctaggggagggatagcattaggagaaatacctaatgtagacgacaggttgatgggtgcagcaaaccaccatggcacatgtatacctatgtaacaaacctgcacgttctgtacatgtatctcagaactttaagtatatgtatatatatgaatgccttcagaaatgctaggaaatcagtggtgcctggagacaggcaattggtgataacatagtttctggagatttccttcttatgcctaatttaacaa

SEQ ID NO: 416400 - DNA, 508 bp, Homo sapiens
cactaataagccaacagacattgcaattatgctataatgaatctgaagcaaaactagaaaaagtggactatttgctgaaactagcctccaacaacatatgttgaatgaccagtgcagagtttgacagacatcgctttttctttgtgatttcaataagcatatataggaatgggtctgaaacaggcagtaaaaaatgttttctgtgtccacagggacacagggaggggaacatcacacgccagggcctgtcagggtagggggctaggggagggatagcattaggagaaatacctaatgtagaygacaggttgatgggtgcagcaaaccaccatggcacatgtatacctatgtaacaaacctgcacgttctgtacatgtatctcagaactttaagtatatgtatatatatgaatgccttcagaaatgctaggaaatcagtggtgcctggagacaggcaattggtgataacatagtttctggagatttccttcttatgcctaatttaacaa

SEQ ID NO: 416401 - DNA, 494 bp, Homo sapiens
cagcctccgttttgtctgcaaagagctatgtagaatatcagagctctaagcaaatagatctgctatttgtgtaagtttttgactactgcaaataaagcagtcatgaacgtttgtgtacagacctttttgtaagcttggaatggttgggttctatgttaggtgcctgattgttcaatttttcagtatttgagttatttaaactatattttattactgatttctaattttaaaaattattttgtagttagataatatactrctctgtatgacttcaattcttttaggtctattgagatgtattttatgtcctagaatatgttatatcttcttaaatataccatatgcacttgaaaaacatgtttattctgcagttgttggatgtagcgtgctctagtgtcaattagaccaaggtgattgaaggtgtggctcagatctgtatttactgttatatttcctattttatctgttttttttaaatcaattgatgagaggta

SEQ ID NO: 416402 - DNA, 494 bp, Homo sapiens
cagcctccgttttgtctgcaaagagctatgtagaatatcagagctctaagcaaatagatctgctatttgtgtaagtttttgactactgcaaataaagcagtcatgaacgtttgtgtacagacctttttgtaagcttggaatggttgggttctatgttaggtgcctgattgttcaatttttcagtatttgagttatttaaactatattttattactgatttctaattttaaaaattattttgtagttagataatatactactctgtatgacttcaattcttttaggtytattgagatgtattttatgtcctagaatatgttatatcttcttaaatataccatatgcacttgaaaaacatgtttattctgcagttgttggatgtagcgtgctctagtgtcaattagaccaaggtgattgaaggtgtggctcagatctgtatttactgttatatttcctattttatctgttttttttaaatcaattgatgagaggta

SEQ ID NO: 416403 - DNA, 522 bp, Homo sapiens
gccctttgttgattatgtttttataactgagttttaagtgttgtctatatattttggatacaagccctttatcaaatacatgaattgcaaatattttcttcttgtctgtggcttgtcttttaattttcctaacaatgtctactaaagagcagaagttttaatgctcaatgaagtccaattcatcaattattttttatggatatgttttagtttgttatctaaacactgcccccttcttttttgagagcagcagttttgtattgattagactactgtatgttatgtcataagaaatctaccacatatcagaggtttattaaataaaagctcatttgttgacaacaatacaagtagaacatgaaacaccagaaagstgcgctcccaacaatagtgcacagcaatgaagacttcatctcaaaatgcagtaggaagtgataatgaggaattatgcaccgtcattcataagtgacacgtgtcacatccacttattttgagttggccaaagcaaatcatagagaaatc

SEQ ID NO: 416404 - DNA, 556 bp, Homo sapiens
taaacaaaacaatgaaatatcatgctggctatgctggaattttctgaaataaatgaaattgagttttgaaattaaatcagaggaaataaacttctaataccatatatgaaaactccagtaagacattacttaataccctacagattttaggatcaaatggaaagacacattagtctaaatatgccctctaaggctcataaaygcagtccaacaaaatatcttattcttattcttctttgactcaaaatcatcttaaacagttaatatcagtatgcagaataaaactgaactttaaagttctgcaaaattaaagcaaactttccttactgagcctaaagaggatctaatgtgtcatatttcatctttaaagcctgaaacactgttttcccctaggaaaaatcaaatgaatcaatcctcccatcaagtaaactaatatctcattatgacttagattcttgttaaaaatttggcagagtattccgatttgttttcatatatcaccataactatatagcacatccagaaatctccagaatgaataaatattctccaagca

SEQ ID NO: 416405 - DNA, 568 bp, Homo sapiens
gtactaagtgcaacctcgctagatcttggctggatgcctgttcagtaccactctatctaggctgctgaataatacatgaaaatatatatccacataaagacacacacatcctacacacctcaaacttctcaaatcagatatatgaaataggcaaccaggttatttaaaatctttaaaattattgtataatggtttattatctctaaaaaatgttttaatatatattttaaatacgtcaaacayattgaagaaaaatccttgcaagttcactgtttagcctgtctaaagtaaacctccataatattttagaactaaaccacgttgccttcttaatgccttttgaaagtgttgtcagaagaatgcagaggtatgatttaagagattgtttattatacactgggaaatattaaccaggaaagataaattcgagatacagtgtaaactgggtgaaggtattaacattggaactaaacttgctgaattcaaatcctgggtctattatttaatatctttaaggccatggactaattatttaaccttcctgtgcctcaatttactcatcttcaaa

SEQ ID NO: 416406 - DNA, 656 bp, Homo sapiens
tgcaacctcgctagatcttggctggatgcctgttcagtaccactctatctaggctgctgaataatacatgaaaatatatatccacataaagacacacacatcctacacacctcaaacttctcaaatcagatatatgaaataggcaaccaggttatttaaaatctttaaaattattgtataatggtttattatctctaaaaaatgttttaatatatattttaaatacgtcaaacacattgaaraaaaatccttgcaagttcactgtttagcctgtctaaagtaaacctccataatattttagaactaaaccacgttgccttcttaatgccttttgaaagtgttgtcagaagaatgcagaggtatgatttaagagattgtttattatacactgggaaatattaaccaggaaagataaattcgagatacagtgtaaactgggtgaaggtattaacattggaactaaacttgctgaattcaaatcctgggtctattatttaatatctttaaggccatggactaattatttaaccttcctgtgcctcaatttactcatcttcaaaatagaaatgattacagtaccttttatagggttatcacaagacttaactgagtacaattttgaaaattttcatagctgtactgaacatttagaaggt

SEQ ID NO: 416407 - DNA, 562 bp, Homo sapiens
tgtttattatacactgggaaatattaaccaggaaagataaattcgagatacagtgtaaactgggtgaaggtattaacattggaactaaacttgctgaattcaaatcctgggtctattatttaatatctttaaggccatggactaattatttaaccttcctgtgcctcaatttactcatcttcaaaatagaaatgattacagtaccttttatagggttatcacaagacttaactgagtacaattttgaaaattttcatagctgtactgaacatttagaaggtgttcagtaaacagttactattatctgatatgtccccaagtcatagattaagaaataatgcttgacacgtaggtgaccattttattttccaaatccttcattccaaatatgtagttcttctttatgcttcatggtagtatgccctagaaaatgctaatccatatgagtatacatttataatttataccttatttagctggtggctaaaaacagtgcttaatcaaaccagagacatataagaaactmcactgcaattcattaagaatatggacaaatctatac

SEQ ID NO: 416408 - DNA, 559 bp, Homo sapiens
gttgggtcatataataactctgtgtttaatcttttgagaaactgccagactgtcttacaaaatgcctgcaccattttacattctcactagcagtgtataagagttcccatttctcacctacgtgtgttattatcwgtcttttttaatatagcctttgcagcgggtgggaggtggtatcttcttgtgattttaatttgcatttccttgatggctaatggtgttgagtacatttcacattgctattgactgtctgtctatctatctatctatctatctatctatctatctatctatctatctatctgttttcagatcatttgcaccctttcaattaggttatatgtctttttattactgagttataagagttctttatatattctagatacaaatttcttatcagatatgtggttttcaaaattttctcccattctgtggattgatttttcacttgattgtgtcctttgaagcacaaaagtttttaattatgatgaaattcaacatatcgattcttcttttgttggttgtgctttagatgttatatccatgaaaccactgc

SEQ ID NO: 416409 - DNA, 566 bp, Homo sapiens
aagctagatattttgtagtgaaacgtcttttaaattattaagaactatttgaggaaaaatttaaaatccctaatgaatgaaaatgcccttgtccaccctttctaagttattctttgttcagttaatattacacatttaaaatataatttacaataaataaaagatcttattataaagaatttcatttcagttttcttgctctcagattttttgctaagttgttgattggctgattttggtttgcattgttggcttgtgtttttgtgaaagcattctttaaatgattaaagctttcaactcagtgtagaagaatcaggatacttttctctccatgtactttcatttattgcgtctgtaactgaatgtcgatttagtgaggctacaaatatagatgcaagaaccagggaaccacttatttgtgtcacttatctgcactaactccaagatattactagttctcaggtttwatttctataaaatctaatggctggagatggtgatgatatatcaacatccctgtcagcatcgtccatctaactttaaaaaaaattgaaaaattataaatt

SEQ ID NO: 416410 - DNA, 567 bp, Homo sapiens
tctggcctcagcctcctaaagtgctgggattacaggccttagccaccgcatccaaactgttttgttattgttttactgaaaataactatactactttattgaaagaatgaaattagtaataaaaagaaatcatttttagacatttactaaaaattattgaagcatacctggctttttgagttattttattaatacgctattttctttctcccaacttaaaaaatagaagacaggtttggatgtctattctataactagatggctagatatacttttggtttatctaaaccttaaaattttgagcttccgaatagccccttgtcacatctattctgtgaaatcataaaagggccaacmaggaggtgtcatttgaattcttcctgtgagatataatagaatattaaccagctcctcagtagggtgttcccagatgcaggcatgccagggaacattgtgattcactgatagtaacgggatctgattacgatcccaggatttgcagtgcagtgagacaggaataccatggttatttctctatattctttctcaaatacagtgcacagccat

SEQ ID NO: 416411 - DNA, 591 bp, Homo sapiens
atctacagaatcacaagccaaataaacctcttttctttataaatgcccaacctcaggtatttgtttttagcaacatcaaatgggctgctacacttaattattggcaaaaagaaagaaatacgtaaatctcagtacacactcacagctcatcatatagtatctttgatttcatttgtcaggaagaaaaacaagaatcacaatttggaaaaactcaaaaccaattrgagaaaactgactacaaattggaaaaaaaaagtcttacaaaatgttttatcaataaaatgctacaaaacacaatgaagggggtggagagatattcgacgagaatcgacagtggccactacatgcatgaagttaggagctttaaaaggcaaccatcccatttcctgcttgacaatgtttaactgactccatgcacagtattatctttaaaattagaaagtaagcatgtgttccaccagtaggtgagaaagttgtgtgaccatagaaaggtcacttaacctctgtacatcaatttactcatccataaaatgagaaattgttaaaagaataactgatgatctttatgatttaagtcctttaatgaagatt

SEQ ID NO: 416412 - DNA, 520 bp, Homo sapiens
tccctggtgttttgtttcttcatatgtaacatgagctttgaattagattatcctgaatggcttgtctggctctgaaatcttaagattttaggattatcttcatgtttgaagtgtcttgtggtcggcattctccagcaatcatttttgagctgcctggaaagccatgttcattccaggtctacttctctgggtgatcattygagaaagaccagggagttgtaacccagtgaggttgaccagtgtcaaactcccctccatgaacagagattcttaaaaggcaagaaggtatttggcttcatgggaatgcctgcgttaagctttcttcacccacactttcattaatattctacatttaaatagtgctcccttaggaagatgacgattgattcggattcggatttgggatttggatttacaactgaaatgagactttcattcttaaggtggctgaaacgttagcacaccaagcacagtcagtcctctggctgacagctttttccatccccattgccactgccta

SEQ ID NO: 416413 - DNA, 580 bp, Homo sapiens
catctgtacaatgaggacaataagaatagctaattcatagagtagttgtgaggattaaatgttaatatatataaagtgcttagaccattattgcctacaacaaataatcattaactattgtcaggtattttctctaaaattgtttatgtggcaaaacttaacaaaaaagttttttttgtttgtttttggttttgttttgagatggagtttcgctcttgttgttcaggctggagtgcaatggcgtgatctakgctcaccgcaacctccgcctcccgggttcaagcgattctcctgcctcagcctctcgagtagctgggattacagacatgcgccaccacacccggctaattttgtatttttagtagagacggcgattctccatgttggtcaggctggtctcgaactcccaacctcaggtgatctgcccacctcagcttcccaaagtgctaggattacagatgtgagctactgcacctggcctgttacgtttttttaaaagaactggccaagaaaagatttcattaacactggcataggaaaccagttgtgactgctgaagatatcagtaataactggaaat

SEQ ID NO: 416414 - DNA, 580 bp, Homo sapiens
catctgtacaatgaggacaataagaatagctaattcatagagtagttgtgaggattaaatgttaatatatataaagtgcttagaccattattgcctacaacaaataatcattaactattgtcaggtattttctctaaaattgtttatgtggcaaaacttaacaaaaaagttttttttgtttgtttttggttttgttttgagatggagtttcgctcttgttgttcaggctggagtgcaatggcgtgatctaggctcaccgcaacctccgcctcccgggttcaagcgattctcctgcctcakcctctcgagtagctgggattacagacatgcgccaccacacccggctaattttgtatttttagtagagacggcgattctccatgttggtcaggctggtctcgaactcccaacctcaggtgatctgcccacctcagcttcccaaagtgctaggattacagatgtgagctactgcacctggcctgttacgtttttttaaaagaactggccaagaaaagatttcattaacactggcataggaaaccagttgtgactgctgaagatatcagtaataactggaaat

SEQ ID NO: 416415 - DNA, 600 bp, Homo sapiens
  misc_feature (1)...(600): n = A,T,C or G
atcaaggcctttcctttggcctcctgtgtcccccacccatacaaggttaatttcagtatgtggactaatccccattccatcatctgtggtaagagtagcagttagttttgytcaagatacataacaccttggggatctgctttcttcagaaaagtaagcaggaaatatattaaaaagaaagcattttgaggcctgtttatctagtatagattttcatgaaaagagagaataaacaaaccatggttctgaaatttggtaatacacatctctttgtgaaacccatggattccccacccgaagcacatgggcaaggcacacacaattttatgcacattcttgggggcaggancttataaagctatccatggacactaggtgagaatctgtgtcttctggcccttaaagggcagaagtatactactgggtggaagggtcagagacacagatttcctttgcatgtacagaaacatcttctgacatttcaattgtccaataatgaatctttcccatcttgaggttgtgaactcccatcacaggaagcactcaagtaggagctggatgacgactttgcacagatgtccattcatttatttattatta

SEQ ID NO: 416416 - DNA, 600 bp, Homo sapiens
  misc_feature (1)...(600): n = A,T,C or G
atcaaggcctttcctttggcctcctgtgtcccccacccatacaaggttaatttcagtatgtggactaatccccattccatcatctgtggtaagagtagcagttagttttgctcaagatacataacaccttggggatctgctttcttcagaaaagtaagcaggaaatatattaaaaagaaagcattttgaggcctgtttatctagtatagattttcatgaaaagagagaataaacaaaccatggttctgaaatttggtaatacacrtctctttgtgaaacccatggattccccacccgaagcacatgggcaaggcacacacaattttatgcacattcttgggggcaggancttataaagctatccatggacactaggtgagaatctgtgtcttctggcccttaaagggcagaagtatactactgggtggaagggtcagagacacagatttcctttgcatgtacagaaacatcttctgacatttcaattgtccaataatgaatctttcccatcttgaggttgtgaactcccatcacaggaagcactcaagtaggagctggatgacgactttgcacagatgtccattcatttatttattatta

SEQ ID NO: 416417 - DNA, 600 bp, Homo sapiens
  misc_feature (1)...(600): n = A,T,C or G
atcaaggcctttcctttggcctcctgtgtcccccacccatacaaggttaatttcagtatgtggactaatccccattccatcatctgtggtaagagtagcagttagttttgctcaagatacataacaccttggggatctgctttcttcagaaaagtaagcaggaaatatattaaaaagaaagcattttgaggcctgtttatctagtatagattttcatgaaaagagagaataaacaaaccatggttctgaaatttggtaatacacatctctttgtgaaacccatggattccccacccgaagcacatgggcaaggcacacacaattttatgcacattcttgggggcaggancttataaagctatccatggacactaggtgagaatctgtgtcttctggcccttaaagggcagaagtatactactgggtggaagggtcagagacacagatttcctttgcatgtacagaaacatcttctgacatttcaattgtccaataatgaatctttcccatcttgaggttgtgaactcccatcacaggaagcacycaagtaggagctggatgacgactttgcacagatgtccattcatttatttattatta

SEQ ID NO: 416418 - DNA, 502 bp, Homo sapiens
ccaggactgggatgtggcctgagattctgcttttccagcaaactaacaagatgatgccaatgcttctttgagaccacattttaagtagcaaggatctagagttgtgctgcctaattggtagccagcagcatttgtggctacttaaattaattaaaattaaatwtaaatcacttcttcagtttccttagccacatttcaaatgtttatggccatatgtggccagctaccctgttgaacaacgcattgtcacagaaagtttcatgatggcactggtttagataattgactcataatacctttcccacaggtgctctttagaccggaacaactattaattcacaacaaaagaagatctgggcaagataaatagcaacaggttatttagtgagtatgtatttccatttgctggaatggaccaactcaatattcctaaatgcaatttgagaggttgtttggttagctcagcacttgagcaaaagcagctggatgtgtctcccagttt

SEQ ID NO: 416419 - DNA, 625 bp, Homo sapiens
atttttatatggctccctctggcacttgagtggtggatcagaacagggaaggggccaaaggcaaaagagctcaatcagcaattggtctaaccactcttgaggcagtaagaaaggtggagagtccccaccaggtcccagagtttgcacttgggagctcccaggctggcccgataatcccaaatgcacttttgcccctgggttccagatttgattattctcatccaaaccatgatttaagaactggtgtcacagygctaattcttgtctccaaagccctgtagaactcaatcctcctcagtattaatggtaacttattccctagctgaattctgtactgagagcacattaattaagttattcacacaccatttggtatgtggattgtctaatttaaaatctcttctgcaatagtgcactaaatgccccctacaagtctttatgatttgagaaattgactgcacctgtccacattcctaatttatacccaggaggccttaggcactggcctagtgaagcaagatagtatttccactagactgtaacaggggaaactgaggacctgagcaagtgacttttcaaggtcacaaagtaagtctaacctagggccatattctggcacaccaaa

SEQ ID NO: 416420 - DNA, 600 bp, Homo sapiens
gttcaaatgacttattcttacataagtacagacagcaaacttgcaaataagtacaaaaaattttaccatgtgatgtatttttcttactagcctatcttcaagcagcagctacaaagtttaaaaaaaaaaaaaacagtatccctgaccagtatttgtcagttggtacaagttattactcaccaaaggcgggctgttatttacaagcctggcagcaaaggcagctgaggggagaatatcctttaactaygtccacctcctgccatgatgctcccacacaaagtcaattaggaaacaatgcatgctttatatataggcaaagccaaaaaaaaaaggaagacactgtcagcactactgaccagagcctctttaaaactgcaatgattggacagctaaactccaagccccagcaagttctaactgggaattctacccacaattactcccaagagccacatctaatattgacacaggtacctgcagtatagcccaggcagctagataatcactaaacaaggaactcaagcatcctggtaaaaaggagataatgccaattattacctgtgtctccactctggctttatcaattaaagtcttagcatc

SEQ ID NO: 416421 - DNA, 548 bp, Homo sapiens
agaatccggaacagacagagtgacaccagatggaatgttttatcgggtaatacygtggagctgaatgaggcatgtgaaggagcgtggctcaggtggaccagttgccattcggaggccatgaatccaggctcctcaatttctaatatttagaatggaaggggaaggatggtgatatccacagaaatacagaatttataaggcgatgctaatttgagggtaaaataataggtccacaaaaataaaagtcccctggtaacttcctggtgtcccattctgtcctgaaacactctgctcagtgaataatttagaatagactttgatcagtctttatgatatgtcctcatgccccagattaaagggctagttcataccttaactcaaatggtaaatagaatgagaaaattccttggctggcagtagaattaattgccttttctccccttccgggaggtcttggtatgaaggaagctgggtatgatgaaaagtgcacaggctttaaagccacagccttgagtttgaatattgggtgttccttagttagggtgtgg

SEQ ID NO: 416422 - DNA, 622 bp, Homo sapiens
cactagtgtttcaatgattaaatgacatgcccttggtctatggcatgaaaggattgttccacatttattttctaaattaaagttaagacctgaatatcagaagaataaccaaacaaggaaacaggaaagaatagtaatatagttcagaaaaaggacttatcttctgagggtacagtcatgtttttataattttatttttctatagatagaattattgtggatattggtattaacttatatgcataattgaagaggtaatagataagaaatggctgtattctgcaacattaaaataatattttcctccacttttttcttatctagctattccactttagaagttatttgaaagtacaaaggaagatgaaccaacwttagtaagtgatcacaatgaaggttaagataggcaacttgagaaaagagtattttgtcagtaagttaggaatttgattttatctaaggtagaaaatttttacaagaggaaagacagaaaagattatcttttagcatcaacctctctaacagtaagaatgaggaaatacagaacaaaaccacccacatggatgatacaagaaacatctccaaaactcctacacagaaatctaaacatctgagtttttgt

SEQ ID NO: 416423 - DNA, 593 bp, Homo sapiens
caggtcatacaatattaaagataataattaatctgattgagaattggaagagactaaatacaatgttcattacttttttaagaacataatttaggcagttttcaaactataaaaacttatcaaggagaccaataaggtggttggtacaaaggcatcatcattgttcataagaaattaccgagcactggctaggtgctggatgctactgaagttgatctccatgaattgatccattttatcctctgasgaactgagagctttttctagccaacaattgacaggaaaatgagaacttcaatcctataattccaaggaaatgaattctgtaaacaacctaaataatcttgagaaaacttgtaggtgatttgacttaaggaatcagagctagaatggcctttgaaaacttaaaaccatcgcttatttaacagaggacaaagccaagattgagacatgtacggccaccaatcggcagcaggtggaatggagagccaggcaacatattccacactgtggggctttcattgttttgtacttttggcatcattgtggcatagactcctactttcatagttataaaacaaaaggaaagagat

SEQ ID NO: 416424 - DNA, 564 bp, Homo sapiens
aacatatcaaattgttctgtttttatataatttaatttaagagaaccataacttaattttaagttctgtgatcaaattaacaagattctttttatctaatgtcttcgattttattaaggtaaaagttatataacaaaaaattaactgttttaaagttaacagttcagtggcatctagtacactcacaatattgtccaacawccacctctatctagttctaatatgtttttattaccccagaaggaaatgaaacagagtaactgcttatcatctttgaattttaaagaacatacgtataattttgagacaaggtctcactccattgcccaggctagagtgcagtggtatgatcatggcttactgcagcctcaaccttctgggctcaggtgatcatctcacctcagcctcccaagcagccaggactatgggcgtgcaccaccatgcctggctctttttttttttttaagagatggggtttcaccatgttgcccaggctggtctcaaactcctgtgctcaagagatcctcctgcctcagcctcccaaagtgctaggatttataggca

SEQ ID NO: 416425 - DNA, 564 bp, Homo sapiens
aacatatcaaattgttctgtttttatataatttaatttaagagaaccataacttaattttaagttctgtgatcaaattaacaagattctttttatctaatgtcttcgattttattaaggtaaaagttatataacaaaaaattaactgttttaaagttaacagttcagtggcatctagtacactcacaatattgtccaacaaccacctctatctagttctaatatgtttttattaccccagaagraaatgaaacagagtaactgcttatcatctttgaattttaaagaacatacgtataattttgagacaaggtctcactccattgcccaggctagagtgcagtggtatgatcatggcttactgcagcctcaaccttctgggctcaggtgatcatctcacctcagcctcccaagcagccaggactatgggcgtgcaccaccatgcctggctctttttttttttttaagagatggggtttcaccatgttgcccaggctggtctcaaactcctgtgctcaagagatcctcctgcctcagcctcccaaagtgctaggatttataggca

SEQ ID NO: 416426 - DNA, 590 bp, Homo sapiens
ataaaatatacaacaaagcaacaaataatactaaaagaatacacttatttgcaagtttattgggtataatcactaagaagacatacaagtgaccacacaaagtgctcaacatcactaatcatcagagaaatgcaagttcaaaccacaacgaagtaccgtctcacaccagtcagaatagctattattaaaatgtcaaaaaacaaaaaacagctgttggtgaggatatggagaaaaggaaatgctyatgcattgttggtgggaatgtaaattggtacaacctctgtggaaaactggatggagacttctcaaggaactaaaaatagaactatcattaaatcatcaatctcactattgggtacacacccatcatcaatcccactattgggtacccacccaaaggaaaagaaatcattgtatcaaaaagacacctgcagaaagaggaggcagagcaagatgtccaaatagaagccttcactaatcatcctgactgcaggaatattaaactgaacaactagtcacacgcacacacaaaatcaccttcataagaaccataaatcaggtgagtaatcacagaacctggttttaacatg

SEQ ID NO: 416427 - DNA, 585 bp, Homo sapiens
tttgccagctattataggtcttatatttccacttttttcaagaataaattatttgaataataaaagagtgaattttctaaatgttgaggcttatttaaaacattatgatatttgatgaaacactttaaccagtaatataacttgatccttattgcagtaattctgctaggcagtaataggggttattgctcctcattgagtacatccacgatttaaaaagtgaaataacttggattccatagctgttaaatgtgtaattgttaatccattacaggcattctgacttttgattcaatgctcctaataacaaatacactatacacacacatacacacacacatatacacatgatttagttctattatgagctttaatgctggctgtatttgcacataaataaygatatataatttatttatgtgttcatatgtataaaaccactatgaacatctttccacatataaaaaagtccttcaaagtaagtgttatgaattgacttaatctaatgtacccaattaattggacacaattttatctgccagtcagtccaaatactggaattttttcaagaattttcctgagtta

SEQ ID NO: 416428 - DNA, 578 bp, Homo sapiens
agaaggctatctatattgtcaaccaactcttgacaatttttgccattcaactgagttgagatagattgtagagaatctttggtccagcattctaaaagtgcccttcccattgccaggaaagcctgcctcccagatgttcccctattcctgtgttacctcttcagggagatctctttttcttgactaacaaatctacagcagcacaacagctcactccattcccttgcattaacttattttttatcatattgttacatatctattacatgttcatttgtagttaccaacttcactagactattaaaattattttattttaactgttattataaaatattttattttaaagttatgcacaatgtgactaaaccattatgatgaatatcttttttttctttttattattattattatactttaagttttagggtacttgtgcacaatgtgyaggttaacatatgccatgctggtgcgctgcatccattaactgtgccatgctggtgtgctgcacccattaactcgtcattttgcattaggtatatctcctaatgctatccctcccccctccccccacccca

SEQ ID NO: 416429 - DNA, 504 bp, Homo sapiens
cagtgcttggccaagtgccctgtgtgtaataatgtgtttttcattaaagtaaaaaaggatactaatccataaaataaaagcaaatagcatctttgaaaacagctgctttgatgacaagtaacatggaagatttgcactgcattgcactagggagatcattaggaagatactgaagatctagctaaatgacaattcaragaaattaaccacctacatggggctgtaatggatttcatttcctgctgctggccacatggaaagaaaatgcctcacacataaagcaggcagcttgttgaaatgctgaaaaaactgtcattaaggacctgggctgaggccacataaggaattgagatcaattatattctctgtagttgatgacatcatttgtctttgttgttcacaaaagcaaaaacaaatttaatcattctattcgtagtttgtatattactttttgtaagctacagaacatttcaacatccattatttgatttgtttatatcaaca

SEQ ID NO: 416430 - DNA, 623 bp, Homo sapiens
tttctgtaataatctagggagatcccatggaatgcctcccagtactcacatatcccaagattaaagtcaattaaaaaaaattacaatggcctgaagtaagcagacctgataatggwccagatccttgaagaatgatgatgtgggacatcctacacagcaagaaaccataaacagctgaggtatttgctgagggtaaaggggttatagaatgactggtggaaaaaggtagttataaatcctaattaagttgatatgaccagttgtagaaatgaacactgcattggtcatgcaaaactttccttactttgatatgaatagatttgtgtatatagtagcaattttttatcctcacttctcccatttccttactgtctacaatacagtgtattaatagcagtcagtttcatattttagtacttacatttcagaatatcaaaaggggaatgtgactcaactagaagagaaatgaacatcagtccaaaatagttgaagaaaatttgtatactcttttggggagagggctagcatgtttttggttttgtgagggatagttgcattatgttaggtgaaagtgtgggtttgctactgtctttatttagaagttcagtatggctaaaagacgt

SEQ ID NO: 416431 - DNA, 623 bp, Homo sapiens
tttctgtaataatctagggagatcccatggaatgcctcccagtactcacatatcccaagattaaagtcaattaaaaaaaattacaatggcctgaagtaagcagacctgataatggtccagatccttsaagaatgatgatgtgggacatcctacacagcaagaaaccataaacagctgaggtatttgctgagggtaaaggggttatagaatgactggtggaaaaaggtagttataaatcctaattaagttgatatgaccagttgtagaaatgaacactgcattggtcatgcaaaactttccttactttgatatgaatagatttgtgtatatagtagcaattttttatcctcacttctcccatttccttactgtctacaatacagtgtattaatagcagtcagtttcatattttagtacttacatttcagaatatcaaaaggggaatgtgactcaactagaagagaaatgaacatcagtccaaaatagttgaagaaaatttgtatactcttttggggagagggctagcatgtttttggttttgtgagggatagttgcattatgttaggtgaaagtgtgggtttgctactgtctttatttagaagttcagtatggctaaaagacgt

SEQ ID NO: 416432 - DNA, 623 bp, Homo sapiens
tttctgtaataatctagggagatcccatggaatgcctcccagtactcacatatcccaagattaaagtcaattaaaaaaaattacaatggcctgaagtaagcagacctgataatggtccagatccttgaagaatgatgatgtgggacatcctacacagcaagaaaccataaacagctgaggtatttgctgagggtaaaggggttatagaatgactggtggaaaaaggtagttataaatcctaattaagttgataygaccagttgtagaaatgaacactgcattggtcatgcaaaactttccttactttgatatgaatagatttgtgtatatagtagcaattttttatcctcacttctcccatttccttactgtctacaatacagtgtattaatagcagtcagtttcatattttagtacttacatttcagaatatcaaaaggggaatgtgactcaactagaagagaaatgaacatcagtccaaaatagttgaagaaaatttgtatactcttttggggagagggctagcatgtttttggttttgtgagggatagttgcattatgttaggtgaaagtgtgggtttgctactgtctttatttagaagttcagtatggctaaaagacgt

SEQ ID NO: 416433 - DNA, 519 bp, Homo sapiens
ttctgacctgaacaatcagaggatagggattagcatatttacgaatccggatagtgagcatagaatcccagaaaatataaagacagagaggaggacctctaactcagtatataaacttcgctcaaatttctggttaacctctgaatcacacatgtgtgggaagactataagccctgttgagacaaaagaaaacamtacagaaaacaaaaactgggttaagttgagctactgtttaggagacaaagtttgcagtttatgtccaaccaagtaatcaccatagaagaatattatcattcttttgaagaataagtctgacccatttttaagagaataaataatcaatggaggctaaacctaagatggcccaaatgttagaataagcagataaatacttcaaggcaattaatacactatgcttaatgagatacaggaaaatgcaatcataataaatgaaagataggacataatagtggagaaataaaagctataatatagaaccgatggaaattctaggactca

SEQ ID NO: 416434 - DNA, 519 bp, Homo sapiens
ttctgacctgaacaatcagaggatagggattagcatatttacgaatccggatagtgagcatagaatcccagaaaatataaagacagagaggaggacctctaactcagtatataaacttcgctcaaatttctggttaacctctgaatcacacatgtgtgggaagactataagccctgttgagacaaaagaaaacacwacagaaaacaaaaactgggttaagttgagctactgtttaggagacaaagtttgcagtttatgtccaaccaagtaatcaccatagaagaatattatcattcttttgaagaataagtctgacccatttttaagagaataaataatcaatggaggctaaacctaagatggcccaaatgttagaataagcagataaatacttcaaggcaattaatacactatgcttaatgagatacaggaaaatgcaatcataataaatgaaagataggacataatagtggagaaataaaagctataatatagaaccgatggaaattctaggactca

SEQ ID NO: 416435 - DNA, 612 bp, Homo sapiens
cagccattatagaagcaaagataaatgtcagttttaatctcccaatccgtgatttctcaaaatgaatctggcaaactgttcaacatctatcttccagcgtgcctgtgaggaagaaactggagcaaaaaagatggaaaccccagcaaggacgatgagtaatgaagattgcacctttgcaatttatcttctctctcacaaaattaatgctggaattcgagattactgtggggctgtttattagtgatgacaactgtatgggcttggtttggaaaatgtgttctctcctgagttgttgagtcatgtgaggccatttgcagttcttttttttttyccccctaaaaatgacaaagagtgataatttaatttctgaagtctaatggccacacagctatttttgcctagattcctttctttttcaaacaaaataagcaattctccctagataccctttgtttcagatacaaatctcaagatataatttcaaagaatatgatgtgttgagaggaaaaatgttaaacatagaacaagaattcaaatttacagaaaatagtttattcaaaatacttattaaacatattttgtgtgaagtatcatgctaaaaatgtggaggtg

SEQ ID NO: 416436 - DNA, 625 bp, Homo sapiens
gaatgcaagttttcctagaatagtttaaacttaataggtgcttccttatttctcagacataactgatagtatattaaagatccctagttagtcaacctataaaacaggagtttccttagcaataacagcacrgtgttttttttttgttgttgttgttttctttttatgatgatgtttggttctagattttcacctatccagcctgagaataccattgtggtgttctgtctcttttgcataggattcttgtgttcccattgaaaaggaagaaatgttgatgatttatctaggtagccattgaaagcctgaatcgtcctaaatttatcttggatgacttatcactccctattattaaaaatatcctaaagtgtgacatgcagagaaaatgatacctgtaagaagctcattaaaaaagcttcttggacatagaaagtttccaaacttctccatacaatatcttctttagagattcataattcacattctgcaaagactactgtttgtgaaaatctgatctaaatctattcagagcggacagtataaacatactgactatactaagaatactgacttgaactggttaagcataagaaattgtgagaagaaagacaaaaaaaattacatc

SEQ ID NO: 416437 - DNA, 561 bp, Homo sapiens
atcagtaggttcttggaaactgtgactgttaaaggaaacaatgtataaaacaaaaccaattttaccatagactaattgatataagtaataaagtttctgtgtcataattctggtcataagatcaccaaaattctaaataaagacccaaaatacttctaatattaatcactgatattaatatgagttatatgtatatttaagaaaggttaagaaaaacaaggtaattatttactcaagctgaatgctttcatggcacattgtttattgtcatgcatttgcatgattatctttatgaaatttactttcacaataattaacattcattcattcaccttccagtctgcttattcaagttgaaggagcccatcctgggaggctgtcccagcagctcagggcacagggcaggmgcccatcctggacgggatgccatcccattgcatgctcacacacccctcctcccgattcactcagactgggaccacattcatatgccagttcgcttcacacacacatctttgggatgtgtaaggcaagtggaatacccagagaaaatccacacag

SEQ ID NO: 416438 - DNA, 568 bp, Homo sapiens
aattttaccatagactaattgatataagtaataaagtttctgtgtcataattctggtcataagatcaccaaaattctaaataaagacccaaaatacttctaatattaatcactgatattaatatgagttatatgtatatttaagaaaggttaagaaaaacaaggtaattatttactcaagctgaatgctttcatggcacattgtttattgtcatgcatttgcatgattatctttatgaaatttactttcacaataattaacattcattcattcaccttccagtctgcttattcaagttgaaggagcccatcctgggaggctgtcccagcagctcagggcacagggcaggcgcccatcctggacgggatgccatcccattgcatgctcacacacccctcctcccgattcactcagactgggaccacattcatatgccagttcgcttcacacacacatctttgggatgtgtaaggcaagtggaatacccagagaaaatccacacagacatgaagckaacatgcaaaccacacagacaggggccagtgctggaaatcattcctatttttct

SEQ ID NO: 416439 - DNA, 573 bp, Homo sapiens
taaacactggttgggacatcttgccaatgaagaggagctatccactgtgggtctcctctgaggtgttctattgttcaataaagctcctcttcatcttgctcaccctccagttgtctatgtacctcattcttcctggactggacacaggacaagaactggggacccaccaaatggcagggctaaaagagctgtaacacaaacagggctgaaacacgcctcttgcacatcaccttgcagatgacaagaaagaagagaagagttgcagccctttggggagctcagacctaggagctccctgagtgagggctgtgacacacactctctttagggctctgtggttcctggcatctccaagcttccaggtgccaccagattctgcagagtcaatagaagctgttcatggttaactctggtccagccacagccttgcagggagctgacacccatgttggtgcctggagctgcccgccccaccacagctgatgtgtctggctgtgtgcagtggccagagcccatgcttgttcacacaccccttgctgctctgcrtctggcttgcccttggcaggcatggga

SEQ ID NO: 416440 - DNA, 595 bp, Homo sapiens
ggcatctccaagcttccaggtgccaccagattctgcagagtcaatagaagctgttcatggttaactctggtccagccacagccttgcagggagctgacacccatgttggtgcctggagctgcccgccccaccacagctgatgtgtctggctgtgtgcagtggccagagcccatgcttgttcacacaccccttgctgctctgcayctggcttgcccttggcaggcatgggatcctggccagtattgcgagctgagcacagcctgatagcccaagtgggcagaatgagcccagcatgccagagcaaaactcaagcaaaggtgccactggccacagaggtttccatctggtgagaagacaccccaggaatcccgtaacagtaacataccagaagtaaaattatttcattaataatgctggaataattcataatttatatgcatatgtgctttacacagtatacaaaaataatctacacacatattaagtatctaattataagaagcaaacttttaaaaacacttttctaaatatataaaagcaattttaatgaccagaacattgagaacaaattggacagtaaaagcatagaatgtag

SEQ ID NO: 416441 - DNA, 512 bp, Homo sapiens
gcagacagaaaatatactgtgatattactcatacaaaatgtaatatggagattataatagagtatgatatattgtatataatatacattcatgcatatagtttgcttcttacagctgcatatatatcactggcaagtgttaaaaatatttatgaggacagtaaactacacatccaaaatagtggttacctytggaataaaggatggaatgagattgggaaagcatcaaaggcataaccaactgtagctgtaaaaagagcaataacaggagaaaaaaatgtaatctaaatataaaacagaaaatataaggatttgttaaaattagatggcagatacagatgttggtagtattctccatattttccttatatttaaactaaaattatgcaaatgttaagtttactcgaattaagaatttctagcctaaaacgtttaagtttgaacgactcaacggggagtccttgaatgttttgaaatcatataatagtaaaataaagaccactttcttcagct

SEQ ID NO: 416442 - DNA, 568 bp, Homo sapiens
tctcattccttttcatggctgcatagtattccatggtgtatatgttccacattttctttatccagtctatgattgatgagcatttgggttgattccacatgtattggtccgttttcatgcttctgataaagacatacccaagactgggcaatttacaaagaaagaagtttaatttgacttaaagttccatatggctggggagtcctcacaatcatggcggaaggcaaggaggaggaagtcacatcttacatggatggcgtcagacaaaaagagcatttgtgcagggaaactgcttttttttttttttaaaccatcagatctcataagactcattcactatcatgagaacagtgcaggaaagacccacccccatgactcaatcacctcccactggtttcttcccatgatacgtgagaattgtgggaggaacaatgtgatttgtgtggggacacagccaaacctcctaacactctactcctggaccctcccaaatctcacgtcctcacattttgaaaccaatcrtgccttcccaacagtccccccaaagccttaactcatttcagcatta

SEQ ID NO: 416443 - DNA, 626 bp, Homo sapiens
gagaactaaaacctgactgcccagaaatttactgggactctaaattgtcttgtagttgacctttctccccaagatctaaagaagcctttaaaggtgaagctgaacagcttaatataagctttaagagctcatcactacaacagattgggcaaatttcatctctgctattgtgcaggctgctcagaagtttaccaaacacctgcattttccatgctcttctcccagaaataactactctgtcactgatgtctatgacatgaaagacattaaaacttccaaccaagaaatctcaccgtcctcacctgaccacttaaagaagctttgggcctaaaatccagacatcttcaccagctgctcttcagaatcagaaactgggttgtggttggctacaatcwttcatttttgtttttattttgtcatcatagaaatgtcagtcattgagtacctgatggctcacaccatccagcaaatatcctctaataccacgtctcaacagatagttcagctgttccttaatagataagagaggaccaaaaggaccaggtgcaggcactcatacctgtaatcccagcattttgggaggggaaggtggatgggccacctgagcccaggagtttgagaccaga

SEQ ID NO: 416444 - DNA, 493 bp, Homo sapiens
ccaccctgacctattcaaaattgggctgatttgggggtatgctattgtagcatacaaatgcactaagtcacagatactcaaggaaacaaggaggcctttttcctcttaaacacagagatgagcaactacagtctgtaataccagccatggatgagggtgaaccagccttaccacactaaaagatcttggaactatcagcacatgttagtaagagggcaaaattattggtgcagaaatgatgaaggaaatagagtattgtttccattgcaactaataaggkggtatttttcttcattaaaaagccttgacttccttagcaatgaacttgtctcttaagctaaccctcaccaagtcattagtatacaaattaaaaatatgtcttggcagtaataatgattctaaactctattgtccaaggaaacttagccaaaacccattgtcctccaatcctcccacttctatagtaccaagtatccagattttctctgttcta

SEQ ID NO: 416445 - DNA, 632 bp, Homo sapiens
attggggagttattttttgggctttgacttttatctagaatgagatcaagaaaattattgcttttaagctatgagatagatgagatcaactagggagtaactagaagtaacgctatgaagagatctgaggacaatggaatgtacgtttcaagagagcaggaattaggtgggggcgcggtggctcatgcctgtaatcccagcactttgggaggcagtggctcaggcctgcaatcacagcattttgggaggacgaagcagktgggtcacttaagctcaggaatttgagaccagcctggccaacatggtgaaaccccatctgtactaaaaatacaaaaattagccaggtgtggtggtgcacacctgcagtcccagctactcaggaggctgaggtagaagaattgcttgaacctgggaggtggaggttgcagtgagccaagatcatgccactgatctcaagcctgggtgacagagtgagacacatctaaaaaagaaaaaacaacaaaacaggagagcaagaataataccattttcaatgtctgtccaatgatatccacagtaaataacattgaactgttttggagaatacattaaaatttgtatatggataaaaaggtgcactggagatttgtttt

SEQ ID NO: 416446 - DNA, 632 bp, Homo sapiens
attggggagttattttttgggctttgacttttatctagaatgagatcaagaaaattattgcttttaagctatgagatagatgagatcaactagggagtaactagaagtaacgctatgaagagatctgaggacaatggaatgtacgtttcaagagagcaggaattaggtgggggcgcggtggctcatgcctgtaatcccagcactttgggaggcagtggctcaggcctgcaatcacagcattttgggaggacgaagcaggtgggtcacttaagctcaggaatttgagaccagcctggccaacwtggtgaaaccccatctgtactaaaaatacaaaaattagccaggtgtggtggtgcacacctgcagtcccagctactcaggaggctgaggtagaagaattgcttgaacctgggaggtggaggttgcagtgagccaagatcatgccactgatctcaagcctgggtgacagagtgagacacatctaaaaaagaaaaaacaacaaaacaggagagcaagaataataccattttcaatgtctgtccaatgatatccacagtaaataacattgaactgttttggagaatacattaaaatttgtatatggataaaaaggtgcactggagatttgtttt

SEQ ID NO: 416447 - DNA, 570 bp, Homo sapiens
gatgactaatgtcttcagtgttttaccaacctcagcaactaacagatgttttttcactaaatgggtttactatttgccatgcaatgtacagactgaaaatacaattaaccaacctgaaaactatagagtaatgaaagaacccaagaaatgggggaagaaacagaattattagactttcaaaggctatttgtgctcttggagcatcgtgtcttgccaagtaagaggaaagaatatatatatatatatatcaccatacacacacatacacagacatatatatattatgtatatagcagtacatttaactatacataacacatacatttaagaaaaacaaagtgttttccccagtgctgaggttattatatttgtttttacatgggttagatkgtgctgtgagagagcaagtttgcaatgaaaggacaactttctcagctcatttccaatgggttgcctcagagtcaccagcttagccactaataactcctagtctagttgcttttccacaaatcaccaattcaaagtagtctctcattgctctaagtacagcagaagaaaacaaaacagatt

SEQ ID NO: 416448 - DNA, 570 bp, Homo sapiens
gatgactaatgtcttcagtgttttaccaacctcagcaactaacagatgttttttcactaaatgggtttactatttgccatgcaatgtacagactgaaaatacaattaaccaacctgaaaactatagagtaatgaaagaacccaagaaatgggggaagaaacagaattattagactttcaaaggctatttgtgctcttggagcatcgtgtcttgccaagtaagaggaaagaatatatatatatatatatcaccatacacacacatacacagacatatatatattatgtatatagcagtacatttaactatacataacacatacatttaagaaaaacaaagtgttttccccagtgctgaggttattatatttgtttttacatgggttagattgtgctgtgagagagcaagtttgcaatgaaaggacaactttctcagcycatttccaatgggttgcctcagagtcaccagcttagccactaataactcctagtctagttgcttttccacaaatcaccaattcaaagtagtctctcattgctctaagtacagcagaagaaaacaaaacagatt

SEQ ID NO: 416449 - DNA, 518 bp, Homo sapiens
tgtttattttgcttattttytctctgtctctcctcttttttattctttttatcacttctccccacggcctcccaactgcatacaaatacttccagatattttctcttctttctcccttgcttattggtcaagtacactggcagagcacagttacattaagctcagagtgaatggattcacaaatatcaaagcaaaagctcctccttgaaatgaaattatgttggtaaaggttccatcatgccttcctgagaaattatgctgaagtactgtgttcgcaatagaaggaactgcctgaatctacaaggctgatttccacacacactcctctttctcctcctcctcttttctctccttctcctattttcttcctcttatttttcctttatattcttcttcttgtaactgtctttagttctggtcaatactatataacaaataaatatctgtgattcatgttaaaataagatacagaagcacacaagcatcttatcaatatatgttcaacttcttcttcatcc

SEQ ID NO: 416450 - DNA, 507 bp, Homo sapiens
gtattttgcaaaatatatattaattaaatttcctgtatctttccagcatgatctataccatatagactatatcaagattttctcagtcattacaaaatataatgttgcaaaatttcaatttttaaaatgtattcatccaaccatcctctcatccttaaacaattactaaatgcccttaatgaggagtaaaagaacctgtttgtgtttcaataagatgcagagatgagtacaataaccttaaagaggaagaaaactataaatggttataatataaatgagtctgtgctaaatgtcataataaakgtagcaataacaagatttctgagttgaatattgaagaaattgctaggtacatgatcaagaaaaactgcatgaggaaataggcatttgggatgctcctcaaggaagaggtaggaaattaaggggattaagggatattaggcaaggacgaagagactataggcaagagcaatggtacactgaagacggaagcgtaaaacactgggg

SEQ ID NO: 416451 - DNA, 605 bp, Homo sapiens
gtgttaaagtcattaaaaagaagtttttataaatatatggcacagagctgtcaaattgaaaataacttctgaaataaaaaataaaaggaaaatagttgctttaagagttttatggcaaattgcataattcaaagcaaggctctcaaaagccactgttcccagtgaaagtattagctgaattagcttcctagtcagagtatcccgttggaaattcacttcatcagcatggctttatgtgtaactaaaacaaggcagcttaygaacaaacatttaaagaaagggtctagttatggacttcaaccagaaaggtatttcctctgcccattcaatctggattcctgtgcaagtctggcctttattcagagttatgtggacaaagcagatgctatttcacaaatatttctctcctaaaaaaaggagacaagattctctctagagaagtccctgtcacatatcattctcttcaagctaagttctaaatatatttgctatgtgcaaaaaaggactaactagatttaaccaacaagcacaactttatggccctaatcacacagcactcacttggtaaaaagagtcaagtaagtctcatttgaatgtaaaacttc

SEQ ID NO: 416452 - DNA, 538 bp, Homo sapiens
tacagtttcagccttcatgctcggtgtgtgtgtcttaatgagtcatctctccttataatagaccttcagtatcctttgccatactttttaatatacaggtggattttaggttgttaatatctaaatatctaccttgcataactagacattgctatctcaattctgtacttatgcaacgtcttttgtttcccacaaaaaaagtcacatttattcctttattacaacatgctagagtcattaatattcattaactcaatgccttgtactcaaatcacttggataacttgtcctcaccacyatatagaagattccttggaccggccatggtgactcacgcctgtaatcccagcactttgggaggcagaggcaggtgcagtggctcacgcctgtatcccagcactttgggaggacaaagagggcagatcacttgaggtcagtagttcaagatcagtctggccaatatggtgaaatgctgtctctaccaaaaaaaaaaaaaaaaaaaaaaatagccgggcatggtggtgcacacctggtagta

SEQ ID NO: 416453 - DNA, 585 bp, Homo sapiens
tcaattccccaatactccatgattcttctatggatatcccgaaccatagtcatctatccctttattaaactattaaattcaatgttacctcccattttcacaactatagaaagctatttcccagttcaactgcttcatataagcaatcctatccttccagtcagaaatgaaagttggagacaagaagacctgatttttaaacctttttgttactcacagtaagcccaatgccatgacatccacaaagcattgtgcaargataattatcaattaaatgtccatattaataagtatttttgatgttcagtgctctcagaaatatagtatgacatggccatagtaccataagacagccataaataaaaattggaaattaatacaagtctacataactgtgccatcaaaatcaggaatacagtaaatctgtgttcctggatcccaacctacaaggcaaggcagaaaggatgactacacacacacacacacacacacacacacacacacacacagaggaaacaggaaaatgagccataagttgaatatctctcaagaagcactttcaacaccaaataacaaaaaacatga

SEQ ID NO: 416454 - DNA, 445 bp, Homo sapiens
cctgtcagtgaaccaattaccacagccaggggcatgagatattctgattgaccaggctaagaagcatgtctgctcctggagtgatggcttagctgactccacagaaaacctgtaagctgaaggcaagagaaagagggggttcccccaggggaaagctgaacygctattatcacaaaaagggtgaataacttctagacaatataaacagcacaaacatttgtgttcctggtaaaaatgactagttgattgatatttaaatccatagatatggaaatcatctaactttcccacctcatacacgtttttttctaattcctgaagaatatatccacgagtgcattgtgtaaaaccaagagcgattctttggagaactatagttcactgtctgagtctcctcactacacagcttgttgatttccacagatcattcagtggtaaaactgga

SEQ ID NO: 416455 - DNA, 462 bp, Homo sapiens
ttgggaagttaaataatgtccccaagattacaaaactagtaactggctaaacttggaattcaaattcaaacaatattagcccagaacaagtcctcttgcctaatccactctgatctatacattacacattctttagaagaagaaccctcttcccatttatttttgtattattcaaagtctgtgaaatgcttggctcatatgtatttaatatttgctgaaagaataaacagaataattagagcaatctgaaatgctaaccaaatctgtctcatgccagtgtttttcacrctacacaccctctaaaatcaattttaaaacagactttaaaaagggtacatgctattcaaatataaggtattagcagaagttagaacattcacgtaaagggatgctcctgagtttggttacgattggatctctttttagagagctatattcagttaggggttgctttagcaagtt

SEQ ID NO: 416456 - DNA, 550 bp, Homo sapiens
acattccaatgtttattagagctggagtctattattcaatttataaaggaaagacttccaaaatatgacacatttgtgttcttgacaaacactgggttaagggatttttaaggaacttgcacaaacaattagcaagttccttaaaagccacagactcttctaaagcaaaatagatcctaaataaccattcttctttctctcactggaactgcacaattattgctgcattcaacttgattagttgatacttcattaacttgaaattttctacaatccagggagactggactgcaatataccattattgctttttttaaaaaaaaggatttgttgaagatgaacatagtgaraaaatggttatgggaaagtatttcaccctacaaactgaacctccttaaaatatgaattaagttggtaatgacaatgtttccccccaaattttctgtttgctgttgaaacagattccaaaatattcccccttcccccatgaaaacctcagtttgccatttgagttgaagacttaatggtctattatttagattgaaacgat

SEQ ID NO: 416457 - DNA, 550 bp, Homo sapiens
acattccaatgtttattagagctggagtctattattcaatttataaaggaaagacttccaaaatatgacacatttgtgttcttgacaaacactgggttaagggatttttaaggaacttgcacaaacaattagcaagttccttaaaagccacagactcttctaaagcaaaatagatcctaaataaccattcttctttctctcactggaactgcacaattattgctgcattcaacttgattagttgatacttcattaacttgaaattttctacaatccagggagactggactgcaatataccattattgctttttttaaaaaaaaggatttgttgaagatgaacatagtgagaaaatggttatgggaaagtatttcaccctacaaactgaacctccttaaaatatgaattaagttggtaatgacaatgtttccccccaaattttctgtttgctgttgaaacagattccaaaatattcccccytcccccatgaaaacctcagtttgccatttgagttgaagacttaatggtctattatttagattgaaacgat

SEQ ID NO: 416458 - DNA, 560 bp, Homo sapiens
gcccctgtgcctctctggatgtgcagtggtagtgttgaacagttgctggaaaccacccagcactcacacatgtgcaacctagaagtgagaaggagttagtatgccaaagagtaaccctcgatcagtttggtggcatgaagggagatgtccatagatacattcttcttctgtccctctgtgggtaatcctgtggcacattcaatttgctactcagaccacaggtgatcactacaaaaacagaccatagggcacatctatatataagctcttcttctttccctgattccccctcttcagccccttgcttctgttccctgagatcacttttcaaaataaactaccgtgcatgcaaacccttcagtgaaattctgttatccaagactcaaattatccaagtggtattcaaattataatgtaccccaaagtatggaaaagaattawgaaagcaactaatatttattgaacataagctatgtacctggtgatcagcatgtgctaccttgtttaatcttcatcccaggcttttgttggctattttgatccccttgttccacattaga

SEQ ID NO: 416459 - DNA, 522 bp, Homo sapiens
aaataatagtaacatattattttcccttactaaagacttgtgaaggaagtgtaatgagcgaaattccttaagttcctaattttagagtagcttggataaggtcccagaattttaggtgaatatttgttattataactcacaggttactttttaatgcttgataaagacattaaacctaatattttagctatgccatttattccttttttgcttttctttgttttctctctcttcctttttacaaaattgttcagtttccatttctctgtttatttgttcttctaatttctattgcatttctcctagcctgagagttttctttctctttccaaaacttatcacggatagaatctttctaaaatatattgtcgcctaagactctaaaaatgcttttattttgttctttytcatggagtctttaaataaatcaacaaaaaatgatgaaaaccgctatcattgcctttttccagggagagtttgtctcaatatctttttcattagcattgcttgtccacataggtt

SEQ ID NO: 416460 - DNA, 433 bp, Homo sapiens
ggatggaactggagatcattatgttaagttaaataagccaggcacagaaaggcaagcatcgcatgttctcacttatctgtgggatctaaaaatcaaaataattaaactcatggacatagagagtagaaagatggttactagagtctgggaagggtagtagagtgatggaggggaggtggggatggttaatggatacaaaaaaacaggaagaataagatcatctatatggttgcacaacagggtgactataatcaataatcaaatgtgcaactttgtacatttgcagaacttggcaaaaagtataactgcattataaatatatgaaacaattcactgatacaataataaatgtacaacttaattgtacattttaaaataaatataattgrattatttgtaacacaaaggataaatgcttgagggaatggctact

SEQ ID NO: 416461 - DNA, 585 bp, Homo sapiens
catattagaccattccttctaatggaactcatgtggataggcagggataacattaaagaacaagattcctaatagattagttgaagcttgtctgaacaaatatcaagatgggctgtttggtttraacagtaaagcctacgctattgttttgaggttttgatatagatgagaggatctgtgtgagatatattgatgcttaataccaacttactgggtaacaacagtgctttactaagtttggaattaaggtataatttcatctttactcttaagtgatccaatgaacaactcatgagtaagcattttctctacgcctcatgatagcatcacttttaagccacatatattgaggagggacacctggcagccaatgtgtaataccgtgtgcctcatctcttcaaaccttcacctactcaccacctgtcaacaacttatctgcttactatttctataattttctagaatgtcacttaaatcaattcatccagtatgtaactcttcagactagcttattttatttaacaatgacgtttaagattcgtctgtgttttcagtggcttgatagcgtatttctttttatcatta

SEQ ID NO: 416462 - DNA, 578 bp, Homo sapiens
tttaaagtttaaaaacatatccttgaaataagacagacattttctgggactcgttttgtgctgcaataactaaagggcattgcttccttcaagaacatcactgcaataacaaccagacaattggggctgaaaggctggagctctacaagcaagttcatcatcaacaccccattggttwtatccataaacctcacatcaaaagcccctgcaataagaatacaaatgcaaccctagacagaggccaatttaaagagacaaaccacaagctgcattataatctcccacgaaagggggtagtatgcatccttacacctttgtattctgagacatactttattttgcttctaaaacttgtaggctcagcctttggttccttgaggacccaattaattgaaggtcaaagcatagaatttcctctttatttcttttttttcaactgcaattgtctgaagttaaaaactcatgtatctatgatattctagagatgagtggacctgtgtttgtcacctgtgcatatctgtaaggagacaacagtgcccttcaggtgcttggttcactttaaaaaaaaaaatagatac

SEQ ID NO: 416463 - DNA, 475 bp, Homo sapiens
tgtctctcaaacttaaaaaataaaaaacttgttttggttttttaaaacatttaaaatatatacagaagtagagagaatatatartaagctaccaatacccattacctactttcaacaattattaacacatggccaatctgctattggcaccctgggttcttgcaatctcccagaacagaaatcaggaaaggtctccagacatagcagcaaagaaaaagagaaagattcatttagcttgtgcacaagagacgtcagcaacaggaaaggaaaaatgtgaactcctctcagaggccagtgtgggttactttcataaaactttcctataggaagggatcatgtcagggcatgtatagaaggggtttctctagaatttatatagtggctttacatgcttcaacatacaccgcatgtaacattagcattttaaatttctatacttgggcgtggtttttattattaaaataaggaaaagttc

SEQ ID NO: 416464 - DNA, 475 bp, Homo sapiens
tgtctctcaaacttaaaaaataaaaaacttgttttggttttttaaaacatttaaaatatatacagaagtagagagaatatatagtaagctaccaatacccattacctactttcaacaattattaacacatggccaatctgctattggcaccctgggttcttgcaatctcccagaacagaaatcaggaaaggtctccagacatagcagcaaagaaaaagagaaagattcatttagcttgtgcacaagagacgtcagcaacargaaaggaaaaatgtgaactcctctcagaggccagtgtgggttactttcataaaactttcctataggaagggatcatgtcagggcatgtatagaaggggtttctctagaatttatatagtggctttacatgcttcaacatacaccgcatgtaacattagcattttaaatttctatacttgggcgtggtttttattattaaaataaggaaaagttc

SEQ ID NO: 416465 - DNA, 475 bp, Homo sapiens
tgtctctcaaacttaaaaaataaaaaacttgttttggttttttaaaacatttaaaatatatacagaagtagagagaatatatagtaagctaccaatacccattacctactttcaacaattattaacacatggccaatctgctattggcaccctgggttcttgcaatctcccagaacagaaatcaggaaaggtctccagacatagcagcaaagaaaaagagaaagattcatttagcttgtgcacaagagacgtcagcaacaggaaaggaaaaatgtgaactcctctcagaggccagtgtgggttactttcataaaactttcctataggaagggatcatgtcagggcatgtatagaaggggtttctctagmatttatatagtggctttacatgcttcaacatacaccgcatgtaacattagcattttaaatttctatacttgggcgtggtttttattattaaaataaggaaaagttc

SEQ ID NO: 416466 - DNA, 650 bp, Homo sapiens
caatgggaagactccaacctgtctataatgacatccaattgtattttatcttgtgctcaatatggaattgaatctcagtctctacaaaaaaaaaggttaaatgaaccaaactattctattttatagaaataagtatgatctatatgatctcgtttcattcatgtgaaatatataatgtttttgcattccttttctacacagtcttaccactattatagtgagcaaaatatacagygcagtaattaaaagcactggtttaaaagtcagaaaaacataagtttgatgctaaaatcacctattagctatgtgatcttaggaagactatttggcttttttatgtcttagtttattatttgtaaaatgatggtaaaagtatccatctataggatatttgtgggtattaagtgagataatgtagatagctcctggaatatatgtattcaatattacttattatggtgatattgataagattgtcagcattgtttttaaaaatcatttattatttcccaaagtaagttgactccgctccctgggctatttaaagaaaatagatacatacttagcttcaggcttgtacaccacgactaccttaatatttttctcttccatcttggaaaagagaatattcatggtttggggaagtgtac

SEQ ID NO: 416467 - DNA, 528 bp, Homo sapiens
ctctgctcattgagtcttcatgcaatggctggagacactgcagccctcttgcagtggtgaggggaaacatcattaacaccctgagaatggcagagccaaatctgaagtctagttgagttgctcaattaaccaactctgcctctggacttctatgaagtaggagaatgcatttccctgattattatgttttctgaaaactgcagctgaaaaaacttcaattgataaaggttctctgggcctcagtttgagacatatgtgaccatgctcagtttgagatatatgtgataatgctgagatatatgtgaccatgtgacaaaacttcacaatccctctgcaaatgttagataatatatgactagaaactcagctccagggtacatgaaatctatgtctagtaaagcttccttccttcacatcaggtagacagtcaactaacattgcagtcaggaagttcttcttggcatctggcttacatttctattgctgctttgtggatkatttgtgctgatttgtggatgtgaaggaagg

SEQ ID NO: 416468 - DNA, 599 bp, Homo sapiens
gtaggttagggtagcaagttaataaactatgtaatttcagaaggtaacagggtgcatgagcagttgccaacagagaaggcaagaaggaactgctgttgtctgaggtgtcaggctgagagcaaaaaattaaaacaaacacagctggagtgagtgggtggaggggaaatgcttgagsgggggaattcaagccctgggaagcttcagggagttactaaaatccccttactacccatgttgactagaggaaatgaggcagcaggctcagatttgtaggcagcccccatctgccgaacacccattatttcaacccgggggatggttgacgtgtctttgattaggatttgattgttcacattgcacaaaggatttggggctcaactttttaaagcctccattaaatatttaagtagctggcccccagagcatttgaattagaatttgatttatgacacattgatttacacatcacgtttaccgatcagatcctctctgcagggaaggtggcattgtggcaaggagattcagtctgtcagctttggggagcagaccaggaaggttatgaagggttggggaccatacctgtcattctggagcagttc

SEQ ID NO: 416469 - DNA, 599 bp, Homo sapiens
gtaggttagggtagcaagttaataaactatgtaatttcagaaggtaacagggtgcatgagcagttgccaacagagaaggcaagaaggaactgctgttgtctgaggtgtcaggctgagagcaaaaaattaaaacaaacacagctggagtgagtgggtggaggggaaatgcttgagggggggaattcaagccctgggaagcttcagggagttactaaaatccccttactacccatgttgactagaggaaatgaggcagcaggctcagatttgtaggcagcccccatctgccgaacacccattatttcaacccgggggatggttgacgtgtctttgattaggatttgattgttcacattgcacaaaggatttggggctcaactttttaaagcctccattaaatatttaagtagctggcccccagagcatttgaattagaatttgatttatgacacattgatttacacatcacgtttaccgatcagatcctctctgcagggaaggtggcattgtggcaaggagattcagtctgtcagctttggrgagcagaccaggaaggttatgaagggttggggaccatacctgtcattctggagcagttc

SEQ ID NO: 416470 - DNA, 522 bp, Homo sapiens
tgaaaaggtaatcatagcaaaatataagattatcaacaaacatgcaaagacgtgtggcctcactcattaaagaaaggaagaaaaacaagtatacactactttctaactctcagaatggatagatgaaagagcttgataattctccaacttatcaagtaatgatcaagtaatggtcaagtactttgaccatcaagtaatggtcaaataaaatgattcttataccctgggttgggaagaaggggagggtagcatgcacactttggggtgggcaatgagacagtatcattttctggaaatttctaacaattccgtttctaggaatttatagtatagatataccctccaaggtaggccaaaataaatgtaccaaaatgtttacagtagtactgtttgttacagcaaaaatcctgaaaacaacctgattataaatcaataggatattgattaaataaatgayacatctatacaatcaaatataatgcagccattaaaaaaataacagggtagttctaaatgcagtca

SEQ ID NO: 416471 - DNA, 623 bp, Homo sapiens
gtatcaatagagacaagaaaagcggaaatgcacaagtgagaagtatctgaccacataaaaataaaggaacattgtagggtctttgcagagaaatatcaaagaatcatgggttaaagaacaaggatagagaccacatgtggctgaaggaagaatttggctcagagagcaggagtgcccttgaagaaagagagcgggactcagtggtagacaaagatcatcttgggggagtctgttagttgagaaagaaaagaacagacaggtagaagaatgagaacaacaagagaaaactgtgttcttataattgttataaatttgccctacarttccaaagtggggaaaggctgagtatgggggcagggaatgtggccaggagagaagaattcacagagttcacagaaagctttgtctctgaggaatgttgctaagtcaggggatatcctctcgggagatatatcatggcaaccttgatgaaaaagacccccaggtgagtccagttcagatgccaggtcatgatgcagcgtttccatccccccatggggaggactcattcatctctatcttaaggaagtggcccttggtcagcaaattataaacccttgctgcacgaatgaatgaatggtgcc

SEQ ID NO: 416472 - DNA, 623 bp, Homo sapiens
gtatcaatagagacaagaaaagcggaaatgcacaagtgagaagtatctgaccacataaaaataaaggaacattgtagggtctttgcagagaaatatcaaagaatcatgggttaaagaacaaggatagagaccacatgtggctgaaggaagaatttggctcagagagcaggagtgcccttgaagaaagagagcgggactcagtggtagacaaagatcatcttgggggagtctgttagttgagaaagaaaagaacagacaggtagaagaatgagaacaacaagagaaaactgtgttcttataattgttataaatttgccctacagttccaaagtggggaaaggctgagtatgggggcagggaatgtggccaggagagaagaattcacagagttcacagaaagctttgtctctgaggaatgttgctaagtcaggggatatcctctcgggagatatatcatggcaaccttgatgaaaaagacmcccaggtgagtccagttcagatgccaggtcatgatgcagcgtttccatccccccatggggaggactcattcatctctatcttaaggaagtggcccttggtcagcaaattataaacccttgctgcacgaatgaatgaatggtgcc

SEQ ID NO: 416473 - DNA, 561 bp, Homo sapiens
tctgtctacaacaaaaccaaacagaacctgtccaggaaatgcctcccccagaggaaaaccatgactgggagtgaaggatgaaggarggagtgcctaggaaagtcttggactgaaaagagaatagcaggcaggctgggttactttaaatgctgatgatgaagttgagagaagtggaaatggcatcagtgacgtagacttggagttgaagataaaattgcatctgttagtattcctgtggaaatattaggctgtaactagaatgtgtgagatggtctctcttagacatgaaagcattaatcataaactgacaataaaatgagtaaatgtggacacataataagaaatacttggagtttttccctaaacagaaatctttcaccaaagcagaactcttcctcctcaaatccatctccactctgcaactcttaacatcagggttcttacttcaaggcaatttcaccattttctggcccttgcttacctacactaaccttcttcctttgcacttctgttctgctttttaccttccagcgtttgttacaccttgggaaacactggatt

SEQ ID NO: 416474 - DNA, 540 bp, Homo sapiens
cctagttttttccatctctgcaggtccagcatttaacacagggcttgacacataggaggagctggatatttcctaaatgaacatgttatcaagccattaacaccttggcataaattatctatgatggcagtttctaaatgatagtccgtggtgcaaaaaaataaagccaatgtaagggagtttcttacaaagctaaaattattatatttaaaggattgccttttatttgagactattcttatttgtttagagttttttyaaaaaccacgtcatttatggaacaatttttaaaggtatttgaaagaataaagagttggcaatctctacaatgagctatatccatatctctgtatctgtccctatacactgtctctgtatatttcaacgtggaagtttcaacacgaaaaatgcgctagtacttgaaattcacaagtctgagagccactgctttatgaaatgagtaaaaagcagaattgcagggaatgtaatccagggttggtaaattttcactggaagaagaagacaggaaagaattacagt

SEQ ID NO: 416475 - DNA, 557 bp, Homo sapiens
tggctcacgcctgtaatcccagcactttgggaggccaaggcaggtggatccacctgaggtctggagtttgagaccagcctggccaacatggtgaaacctcatctctactaaaaatacaaaaattagcccagcgtggtggtgggcagctgtaatcccggctactcgggaggctgagacaggagaatcgcttgaacccaggaggcgaaggttgcagtgagccaagatcgcaccactgcattccagcctgggcaacaaagagcaaaactctgtctcaaataaataaagaaataaatatttttaaaaactggcatcattcaccttgcctccttcaacttgatcatctcctgcccatttttcagatttcaattcagatgtcacctctttcaggaagcctcccctgactattcagcctgttgtgtcccttctttgtgtgcacaatccccctccattgcaattctctattttsccccaccggactatgagaattttgaggcatagcctgagacttctgctccattttatcctcagcacctaagaaaatgatgggccctccatcc

SEQ ID NO: 416476 - DNA, 569 bp, Homo sapiens
ccctcagttgtgttctgttatgctttcttaagcaggaaagaaaggtgcggattggggcttgtgtgctcagaatgttaacatcatgtgaccttgggtttatgcatggggctatgttatgtatgtaaacatcacctgttatacgtctggactcttgaaaaaagaragattgaagactaacgaatgagtagatttagggcacttcacagcctttgttgctgtgtggctttgaagctgttgcctgctctcgctctgagagatagctgagaaataatgcaatggtaattgctcccagaatgactttggttcaggtcctggctctgccacccctagctgagtgattttgactaaggaacttaacttcagaaacttctgtttttcccacgtgcaacatgggaagaaggagccacatggtgggagagatgacacacatgagtgtgagctttggaattaacatcaggacttgagtcgagccacttactatctgtgagtttctctttcataaccttaaatgtttataacctaagaccattgttgtgaggattaaatgagttatcacatagacaatggtg

SEQ ID NO: 416477 - DNA, 569 bp, Homo sapiens
ccctcagttgtgttctgttatgctttcttaagcaggaaagaaaggtgcggattggggcttgtgtgctcagaatgttaacatcatgtgaccttgggtttatgcatggggctatgttatgtatgtaaacatcacctgttatacgtctggactcttgaaaaaagagagattgaagactaaygaatgagtagatttagggcacttcacagcctttgttgctgtgtggctttgaagctgttgcctgctctcgctctgagagatagctgagaaataatgcaatggtaattgctcccagaatgactttggttcaggtcctggctctgccacccctagctgagtgattttgactaaggaacttaacttcagaaacttctgtttttcccacgtgcaacatgggaagaaggagccacatggtgggagagatgacacacatgagtgtgagctttggaattaacatcaggacttgagtcgagccacttactatctgtgagtttctctttcataaccttaaatgtttataacctaagaccattgttgtgaggattaaatgagttatcacatagacaatggtg

SEQ ID NO: 416478 - DNA, 569 bp, Homo sapiens
ccctcagttgtgttctgttatgctttcttaagcaggaaagaaaggtgcggattggggcttgtgtgctcagaatgttaacatcatgtgaccttgggtttatgcatggggctatgttatgtatgtaaacatcacctgttatacgtctggactcttgaaaaaagagagattgaagactaacgaatgagtagatttagggcacttcacagcctttgttsctgtgtggctttgaagctgttgcctgctctcgctctgagagatagctgagaaataatgcaatggtaattgctcccagaatgactttggttcaggtcctggctctgccacccctagctgagtgattttgactaaggaacttaacttcagaaacttctgtttttcccacgtgcaacatgggaagaaggagccacatggtgggagagatgacacacatgagtgtgagctttggaattaacatcaggacttgagtcgagccacttactatctgtgagtttctctttcataaccttaaatgtttataacctaagaccattgttgtgaggattaaatgagttatcacatagacaatggtg

SEQ ID NO: 416479 - DNA, 605 bp, Homo sapiens
tgataacgtgcttaacatattggaaccatagtgcgcatgtgtaatttgtaaataaatacacatatattggggttttgttctcagcatttctcactgagagagatatgagataaaagaaactttggggtccattgatctaattcagctcctcttttagcagaaagagacactgaagcctgcaaaaagagagagatttgcctaaggtctgtagtctgcaggtgagctctgggttcagagaagtgatgtttgcccaacgtcagggctcttgtttgaacttctctgctgcaaccaggtgagcagacaccagttctctctggtgaccccacccacgctgtgagacatgacatcccgccccctcagggtctcctgtggcacctgctgcccacccactcgtctgggtatcctgacaagatgtccatccgcacccagcctgtgcctagcagagcaggtgagcagctctgggtgtttctggaatcagatttcagaacttccagctgataaagggcttttgtttggccagtgttttgccccagcckcctgtccacagccaggtggcaggtgattctgggacccaacccacatccggaaggggcaggtatctgagc

SEQ ID NO: 416480 - DNA, 578 bp, Homo sapiens
atatcagaaacaaaggatcacaacaaatgctatgaccctttttcacttgtgcaaaaagatttcacatatgcaaaaaacaaaaaataaaattttctctattctcaagttgcttacattttagtataggagacatgtttatgaataactagtgactagaaagcagggcaggagttaatagtatcaaaaagaaaattaaggccaaggcaggtaaagtgacttgcccaaggtcatgcaagttaatacaaatgctgtgtaattactttgattcctaaacgaagctctgtgttaggcaatttatagacagatttcactgaattctcacctcaactctgtgtaataggtatcattgtctccattttatggatggcagatgtgagactcakagagtctaagacaacttggtcaaggttatcacttggtaagggccagagttagtccaggcatgcttgcttccacagttttctctttcataaaacttttcccagagtcaaggtatggagcaaaaaatgtcacttgtgaggtccaactgttttcctgcttctcagtttctaggtgattacttcagtggaagtccattc

SEQ ID NO: 416481 - DNA, 550 bp, Homo sapiens
ggtacctgtatctggttgtcacagcacctgtcacacaaacaaaatgaacaaatgaacaaatgaatgaatgaatgaatgaatgaataaaagcagcattctgagtcttttcaatatagttgtcaaggggttgaatgtcaagtagaaagggacagggtgggtagggaaggggatgtttaattggtagaatcaatatttcttaatccaagacccaaacagaagtggttacagggctgaggactgctccggaggccctgaattgctgctctattgttcacagaycttgagcttgctgggcacagaggagggctgggcagaggtgtctccagctaaatagctgcaatctaaggagaggtaattgcaggatttgaaggcaactttttctgtctggctctgctgcgggtggggtggtgatcacagacctcttcactgcaggactcacacacaccattgcaagatggggtggaagacaccaaatatagctgctattggcaggggaagccttagagggaaggcaaaacatgttaagagaacaatggctctgaaagaaaaa

SEQ ID NO: 416482 - DNA, 580 bp, Homo sapiens
caaacagacccagctgtgtagacttggccaagtcctttagcctccctgagcctcattttctgcaaaatgtggattgagacaattcctaggtcatagggctgctgggaggaaccggggggataaaaatatatggaaaatatctagaaaaaaaagcctggcacatacaaagtgcttgatatattatgatttttactattaataaaagaaggcacctgagacccccaacagagttgtagggggtttctcctcagccaaaatttgagaagggcaatgggggcatagtgggtatgaatgtgaactctatgcatcagaatgcctgggtttggttcccagctctgccactgagtgaccttgaacaagttaattactttgctgtgcctcagtttcttcaactgtgaaatgcagctaattcctacctcattggattgttcacgagaatcaattaatacaagtacttagaacagggtctgacccgtagaaggtgttagagacatggtagctctcattgttagtrtcatcgctgggctcagctatacggatgtggggactgagatccaaaaggtggacacacccacagtca

SEQ ID NO: 416483 - DNA, 565 bp, Homo sapiens
gataatgccttggctgccaaaaaaaaaaaacgacaaaaaaaccctgaaaatctaaaaagagacttaactcaatttcaaggagagagtgtttgaccatgacccwtaggcacaagttggatcttacagatgggtaaactttgcttcagcttgtgtccttcaaaaaccttgatgttattctactcagtagcaactggattataaaggggtttagaagctgaggaacttacgaagagctttcaatctagggaaggagagataaatagattctaggttccatgcttagatcctagcggtgcctagctactctatccccagtagctagctcagtgcctggcacacggtacatgctcaaaaaatagttgagtgcatgaaggaagatatctataaaatatgctatctatctctattacaatattgtgtgttaatctgctttactgcgaaagtaatacatagtgaataatgtatatctagtatatctgcattactttcatgtttctaacagataacgtttagtctataacctataataagaggtacataatcagaagagagatacttgtgtggg

SEQ ID NO: 416484 - DNA, 565 bp, Homo sapiens
gataatgccttggctgccaaaaaaaaaaaacgacaaaaaaaccctgaaaatctaaaaagagacttaactcaatttcaaggagagagtgtttgaccatgacccataggcacaagttggatcttacagatgggtaaactttgcttcagcttgtgtccttcaaaaaccttgatgttattctactcagtagcaactggattataaaggggtttagaagctgaggaacttacgaagagctttcaatctagggaaggagagataaatagattctaggttccatgcttagatcctagcggtgcctagctactctatccccagtagctagctcagtgcctggcacacggtacatgctcaaaaaatagttgagtgcatgaaggaagatatcyataaaatatgctatctatctctattacaatattgtgtgttaatctgctttactgcgaaagtaatacatagtgaataatgtatatctagtatatctgcattactttcatgtttctaacagataacgtttagtctataacctataataagaggtacataatcagaagagagatacttgtgtggg

SEQ ID NO: 416485 - DNA, 565 bp, Homo sapiens
gataatgccttggctgccaaaaaaaaaaaacgacaaaaaaaccctgaaaatctaaaaagagacttaactcaatttcaaggagagagtgtttgaccatgacccataggcacaagttggatcttacagatgggtaaactttgcttcagcttgtgtccttcaaaaaccttgatgttattctactcagtagcaactggattataaaggggtttagaagctgaggaacttacgaagagctttcaatctagggaaggagagataaatagattctaggttccatgcttagatcctagcggtgcctagctactctatccccagtagctagctcagtgcctggcacacggtacatgctcaaaaaatagttgagtgcatgaaggaagatatctataaaatatgctatctatctctattacaatattgtgtgttaatctgctttactgcgaaagtaatacatartgaataatgtatatctagtatatctgcattactttcatgtttctaacagataacgtttagtctataacctataataagaggtacataatcagaagagagatacttgtgtggg

SEQ ID NO: 416486 - DNA, 530 bp, Homo sapiens
gcaacatcaatcaactcagagagagcagcttcaccctcccttccccaacagcctggggaaaaaaatagatcttccctccctgctccctttcttcatccttccctcaaatgagagatcaggactaatagtgcctgggcaaatggctgcctggggagaaggtagggaaggaaggagagaggaaggggctatttttaggtcagctacctccgaggttctatgacagctgccacacccccttccccttataagtctggcttctacttgagtttggagtgaataagtagggggaaaggaatcycatttattaaaataggatggccagacagaacagcaatacccaatattcacagtcatctttcactgaattcttactattgtatctgcaaaggcattatctccttttgtcctcatgacagcactatgaggaaggtagtactattattagtacctattacacagatgaagaaactgagccttggagaagctgacagcgtcccatttggtaagtggcagaggcaatgatcaaatgc

SEQ ID NO: 416487 - DNA, 586 bp, Homo sapiens
tttcaattctccagctctggttctcggctatttgatactgagcaagtgacttagcatctctgagccttgatttcttcttccaaaagacatgttgtcatctggggctgtcttcaagatgtaattagataatacaacaatatgtttttcaaattgtagtaaaatacacgtaacataaaattatcatcttaaccatttttaagtgtacagtttagggtattaagtacattcacattgtgcaaccatcactactgtctatctgcaggaagcttttcagcttgcaaaactgaaactctatacccattaaayactaacaataatatttttgcttagtgcctggagcattgtgttagtccattttgcattgctataaagaagtacctaagactaggtaaattataaaagaaagaggtttatttggcccacagttctgcagactgtacaagaagcatggtgccagaagccactcctggtgagggcctcaggaagcttccaatcatggtggaaggcgaaggggaagtaggtgtgtcacatggggagagagggagcaacagagagacaagggaggtgccacactcttttaaataac

SEQ ID NO: 416488 - DNA, 580 bp, Homo sapiens
ttggaagtggatcctccagccccagtcaaaccttcagatgatggcaacctaatgagacagcctgagctagaatcactcagtgaaatcactcctgaattcctgaccaacagaaacyatatatgaggcactgcatatttattgcaatttttaagttgctaaattttggttacttagttactcagcaataaatacttggtagacacacctcatatggccactgtgaagttcgaatgcatgtgaagggtctgtcttgtatgatgcctggcccatagtaacagctcaggaactatcacctattattcttattttgagccacaaaaataagatcatttgctttttcctctgattcaagaactcaggaaatatctacaaaaatattccctggaagaggcatcaaaaacatctgcgtatataaataataacacagatgatgcaggtccaagaataaaacttttttattacccacattagatggaggggagatgaagcaaataaaagtctaaaagactaaatgttcttttcagaattgcaaggatttaggtaaaccaatggcaggagctgtggaacccaaattaaacac

SEQ ID NO: 416489 - DNA, 580 bp, Homo sapiens
ttggaagtggatcctccagccccagtcaaaccttcagatgatggcaacctaatgagacagcctgagctagaatcactcagtgaaatcactcctgaattcctgaccaacagaaaccatatatgaggcactgcatatttattgcaatttttaagttgctaaattttggttacttagttactcagcaataaatacttggtagacacacctcatatggccactgtgaagttcgaatgcatgtgaagggtctgtcttgtatgatgcctggcccatagtaacagctcaggaactatcacctattattcttattttgagccacaaaaataagatcatttgctttttcctctgattcaagaactcaggaaatatctacaaaaatattccctggaagaggcatcaaaaacatctgcgtatataaataataacacagatgatgcaggtccaagaataaaacttttttattacccacattagatggaggggagatgaagcaaataaaagtctaaaagactaaatgttcttttcagrattgcaaggatttaggtaaaccaatggcaggagctgtggaacccaaattaaacac

SEQ ID NO: 416490 - DNA, 524 bp, Homo sapiens
tgactctcggaatgagggttcatctgtgactggagcagagtgtcaggctgagtgattctccctgagcagtggccccggatggctgtgagacccacatcatttgggggtatgagctctggatcttgggagggcagcttccatcactcctgacgttccagggaagggaggcaagggaatcaaggttaagtacttccactaacatcttgtctgccagatgtataaattaggtctctgtttccctggggaatcctgcctgctgctgggaagatgtggctgcttttgcagaggaaagcgacttccttcaaatcatcccaaatcaacaggcaggtttctctgggtgttctctccttgrggtccccagtccatcacatctgtggctttagatgacatagtacaaactcacatgagctctgaggacctcccttcttgggttcaaatcccattcacgaattggcgcaactgagattagaagtgaagcccttgtgtcttattcaaaatgctcttgatcactcctgtgcttataa

SEQ ID NO: 416491 - DNA, 569 bp, Homo sapiens
tttctccacatggcagggcatatgccacctgaaagctctggataacatcccttgagttccatgaccttagccaataggctatttctcctgcagctccaagtaaaaagtcctagggaaaagctcgattgacttttcttggtcacatgactctcatgggtacttttcagtgaccagaggagtgtggtcctatgattggacaggtttggatcatcagtagtgttctgtgactgacagtttcatcagaaccacagtagtagagaggatggcaagagagacttccactaccccaagatggagaggatatttatcaatgctttgttttggaaaaagctcttagaaataatctagcctagtgttgcccacacctggatgagtttgttaaagttcagattcccagtcatcacccaaagtcagggactagagcccagagaaaatatatttttaaccagctttgcagatgatgccagtgatcagctaggtatgggaatcactggcctatcccaatcctgtcattttaccraggaaaaactgaggcccacagaggaaagcaattcaccccaagtcacata

SEQ ID NO: 416492 - DNA, 620 bp, Homo sapiens
tttgcaaactgaaatgaataaactggatttgaccttcagacatgttttatttggccttcgatgtgattaaaaaatgtttcaattcttagcttacatttaaatgttgggagatttttatctagaattccagatttggggcttttcctagagaagtggggaattggccagggctggagctggtacctgccaccccctttagatgaggtgtgtgctctcctgtttccccaaagcctcgccaagctcatttcaacttcactctatggcattttccttttgattcctgcaggtatttgagtttgcaatccctcaaaatgtttttggagaatttttttccaaggccctcagagttggtgactgttatccaagtttttctatttctttctttaaagctgagccacttgtgaggtaagggtacgtcattttcgatgctccacctaacctcaatgttcctttgactttctgactcttgacagtgagccaagatgggaccatctccaaaccatyctgtcagtctggggtgctgtgcaggggtccgaggatctgccacccccatcctgttatctgttcccatttgcctgacccacgtcctcccccagtccaatcttccccagcgaaaccag

SEQ ID NO: 416493 - DNA, 586 bp, Homo sapiens
aggaacatttctaaacctttctgcttgcagtaactctatattgttgagtctctttctttatccccttcttctgtactttgagtcttttcatatggctaaatgtctttatctgctggcccctggcttacagagtgaagtacttgcttctaataaattggaggcctacatatgttctaagaggggcttagtcgatctctgattggatatttcaggccacatgaagggaaaagggaaaattcttattgtcattttccttttccttttccttttcaaagagtcaggtgcttggagagataagagatagatggagccaatgatatctttgacaaggagttttgcctgcatggaaaaatttctttttcttgtttttggggaagctagaagtggtgtcagacttcagtcagcaaaatttcagcagtgtcccacgtcttcacacttcaagtactctatgaaccagtgccacaggctccacttggtgtggccrttgcctccgctttgctttccaaagataccgctggattccaaaatttgatctcaatgtctttgatagcccgctctggcttccaggcaggtgtttgtaaggctc

SEQ ID NO: 416494 - DNA, 586 bp, Homo sapiens
aggaacatttctaaacctttctgcttgcagtaactctatattgttgagtctctttctttatccccttcttctgtactttgagtcttttcatatggctaaatgtctttatctgctggcccctggcttacagagtgaagtacttgcttctaataaattggaggcctacatatgttctaagaggggcttagtcgatctctgattggatatttcaggccacatgaagggaaaagggaaaattcttattgtcattttccttttccttttccttttcaaagagtcaggtgcttggagagataagagatagatggagccaatgatatctttgacaaggagttttgcctgcatggaaaaatttctttttcttgtttttggggaagctagaagtggtgtcagacttcagtcagcaaaatttcagcagtgtcccacgtcttcacacttcaagtactctatgaaccagtgccacaggctccacttggtgtggccattgcctccgctttgctttccaaagataccgstggattccaaaatttgatctcaatgtctttgatagcccgctctggcttccaggcaggtgtttgtaaggctc

SEQ ID NO: 416495 - DNA, 629 bp, Homo sapiens
ttctattggtcaaatgcgaccataagcaagaaagagtttgcagcttctattgcctgaaatgccaatgctcctgctggagatgggcayggtggtgggttgaatctgccaggctgatctctcctggctggagaccgaggccaaggcagaggcatctgggctgctccgagctgtgtgggctgggaggagcccgtgagaaggcagggcctgcttgggattggcagctgcgggcctgctggcagatggtctcctaagtgggccacctcagggtcagctttatggatttgcacattaacccttccctccccagcagccccttagcagctggttctttttgactttggcctaactgagctgtagactagaccctggcccacatcttatcacttcccagccctctctgaagacacgaaccatccattgcacatggagtgcaatttaaaaatgtgcagagtcaaattctgaaacctcatgacactcagagctgggcaagattgaggagagaatatccttttaatattcatcacttgtattaataccagttttataaatactgatgtacaaaaaataaaatattactgcgcaggagaacaaacaaatattttggagtttatccttctagactcactaac

SEQ ID NO: 416496 - DNA, 661 bp, Homo sapiens
cttgtctgggccaatcgtgcactcttcatacctgagcaatacctccaggacggtgacagcaaccctctcccacaatctttagtcaacaattatttattaagcacatactctgtgccaggtactgagaaargacagcaaggacactcacttgttctaggcataacatggttttcaacaccttcaccatctttaacagagttctggatctgttctggatttgtttgatctcctttcaagaagtagttgtgatcacctacatgtgccaggttctagtgatgataatgatgaacaagacagggctctgctttcaagggcctcttggggattttgctcagcatagctaatcgcataaacaaattcatcctgatgcatcagtaggtgttcataaattttcctcttgaggtaatacgtgtgcttttagagaccttgcagttcaatggggtgcatatggtggaacttgcagcagagtgtaagacctttaggggagttatcttttgtcatgaaagctcaaagcacacattgccttgtatcctagcttactttttagtatctaacagtttggtaagaacaagagccatgtctgccattttccactatatatccagtgtgtgacatcttggttggcacctaacaggtattcaacaaatatttgttgactgaa

SEQ ID NO: 416497 - DNA, 661 bp, Homo sapiens
cttgtctgggccaatcgtgcactcttcatacctgagcaatacctccaggacggtgacagcaaccctctcccacaatctttagtcaacaattatttattaagcacatactctgtgccaggtactgagaaaggacagcaaggacactcacttgttctaggcataacatggttttcaacaccttcaccatctttaacagagttctggatctgttctggatttgtttgatctcctttcaagaagtagttgtgatcacctacatgtgccaggttctagtgatgataatgatgaacaagacagggctctgctttcaagggcctcttggggattttgctcagcatagctaatcgcataaacaaattcatcctgatgcatcagtaggtgttcataaattttcctcttgaggtaatacgtgtgcttttagagaccttgcagttcaatggggtgcatatggtggaacttgcagcagagtgtaagacctttaggggagttatcttttgtcatgaaagctcaaagcacacattgccttgtatcctagcttactttttagtatctaacagtttggtragaacaagagccatgtctgccattttccactatatatccagtgtgtgacatcttggttggcacctaacaggtattcaacaaatatttgttgactgaa

SEQ ID NO: 416498 - DNA, 499 bp, Homo sapiens
catttacaacattataagaatctgagaaatgcagaatgtttgaagacactgatgactggtctgttagcaacataccttgaaatgtcaaaacttatattcagagaagtcartgcttgaattcttcccttacttgttactgcttctaccttttcattatatagtgtgggttgttatggtgatgggaaactggaatattgagaggctcttggagaaaatatctatgtgaaatgatccatttctaagtcaagttggggatggcaaatattctactatggcctaatcagtcaagcatcataaggttaaaaatatacctaaatgttacttgacgtatacggctttgtcttctttaaagtgcttgagactcaaagggtttgatgctgtaggacagggagggtccttcatgtacacagggatttatttagtacgggttggcaaactgcaaccatttatcaaaaaagccagccacttttttggtaaataaatttctattggaacacag

SEQ ID NO: 416499 - DNA, 499 bp, Homo sapiens
catttacaacattataagaatctgagaaatgcagaatgtttgaagacactgatgactggtctgttagcaacataccttgaaatgtcaaaacttatattcagagaagtcagtgcttgaattcttcccttacttgttactgcttctaccttttcattatatagtgtgggttgttatggtgatgggaaactggamtattgagaggctcttggagaaaatatctatgtgaaatgatccatttctaagtcaagttggggatggcaaatattctactatggcctaatcagtcaagcatcataaggttaaaaatatacctaaatgttacttgacgtatacggctttgtcttctttaaagtgcttgagactcaaagggtttgatgctgtaggacagggagggtccttcatgtacacagggatttatttagtacgggttggcaaactgcaaccatttatcaaaaaagccagccacttttttggtaaataaatttctattggaacacag

SEQ ID NO: 416500 - DNA, 536 bp, Homo sapiens
cagatccatttctggcttgaaagctagggtcagaggaaatagggattagttcacatgttctcctcgacctttgtggctgaatttcctttgtttcagttgggttctttcagttgcaagacagagactccttcaagttacctttttaaaaagcagtttattattaggagctgtgaactgtaattagaactggaaagttktcagcacctacagctgttttaggaatcagtctctctttcattctctctctcttgtcctctctaattatttgttcaattctcctttctctcgattatgttttccctcatattcttcttcttttttgctcatgtagaaatttggtttattcatgattttgcctgccatgtctcaaggtgtcttttcatcctcagtccttatgctatctcaatttcccagcttgataatgctcagtactccagaggaatctgattggccaaagagatctttttatcccagatgatacaggtcccaagtcactggccacaggttggatccatcatacttgtgtcgcagagtcc

SEQ ID NO: 416501 - DNA, 609 bp, Homo sapiens
acatattcttgtcaactggcaatactctctgtaaaccactcctgaaggcaaagaacactcaacactaaaacagagaatgagttatgattaataacaagttaccataatagtggggtaatctgctaaaacaaaatcttatttgcttctgttatatatgtgtccgcatgtgtgtgtacatttttatgtatatgtctatgtgtgtgtwcatgtgtttctttatggtgagccatgtgccataaaatcactaatcttggttttggaaatttgacttctctacccacatgagtttcttaaaatgttcataattggacggatattatggaaactgtataggtagcacttcagggatgtcccgctaactctttagcctaaggatatcattatattataattctttctccctgaatctcatagtatcttcattctcccacattcatggagataaaatgtcaggctttgctctttcgtggatcagtcatgaccttctgtggaagcctataccatccattcctttgtaattactagtttaatctctaaacaacatggattctgagtagaaattcaccatttcttaatacaatattcagaatttttaaatttccctaagtc

SEQ ID NO: 416502 - DNA, 609 bp, Homo sapiens
acatattcttgtcaactggcaatactctctgtaaaccactcctgaaggcaaagaacactcaacactaaaacagagaatgagttatgattaataacaagttaccataatagtggggtaatctgctaaaacaaaatcttatttgcttctgttatatatgtgtccgcatgtgtgtgtacatttttatgtatatgtctatgtgtgtgtacatgtgtttctttatggtgagccatgtgccataaaatcactaatcttggttttggaaatttgacttctctacccacatgagtttcttaaaatgttcataattggacggatattatggaaactgtataggtagcacttcagggatgtcccgctaactctttagcctaaggatatcattatattataattctttctccctgaatctcatagtatcttcattctcccacattcatggagataaaatgtcaggctttgctctttcgtggatcagtcatgaccttctgtggaagcctataccatccattcctttgtaattactagtttaatctctaaacaacatggattctragtagaaattcaccatttcttaatacaatattcagaatttttaaatttccctaagtc

SEQ ID NO: 416503 - DNA, 534 bp, Homo sapiens
tttaacctcatgacacatcatgccctggggttcattctgtcccagccacagtgtcaactttcagggmcccctactgagctcaattgctcctgtgacacagagctttgcaaattgaatttcctctctcttgaaatcttttgccttcttgtattatttagcttatgcctattcctccttgtatttatgtttgtctttgccatgagaatgttttcttggacaaaatcctcagttaaaatcagcctatcatacaatcccttagcaatattcatgtctttttcagacccctatcatagattcaattttaaaatatggctatttttacttaatgtttatctcctgacctgcccaagagggtaagctccacaaatacagagagggaagaaatctgtatttgttcaacattgtatcacaactactcaactgtctaaaaataaaaattcaaaggaaaataatattaactaaaagttcaaacgtgtttggggactattgggaggagggacaagttgacatatatcagtatgatatgtgttttat

SEQ ID NO: 416504 - DNA, 594 bp, Homo sapiens
tatagcatcatgaaagtaatttaagaatagcaaaacaataaatatgctctatgacaccaaaactagatttatagtgttcctgaaaattaaaaatattggaaactgaaaacatagtgtattagtttgttttcacactggtttaaacatactacctgagaatgggtaatttataaacaaaagaggtttaattgattcataattccacatggctggggaggcctcaagaaacttacaatcatggcaaaagkggaagcaaggtatgtcttacatggcgggaggagagagcacgcacaggggaaactgccacttttaaaccatcagacctggtgagaactccctcactatcatgagaataatatgggggaaaccttccccattatctaatcacttccaaccaactccctccctcaacatgtggaaattgcacttcgcgataagatttgggtggggacacgaaccaaaccatatcccataggtgggcttgtttatcaaagtgttcccttcatctagtacatagtcaaattaaacttgtttttaatttaattgtgtttatgttgagggttatgaggactttaagtagagagtgacaaaata

SEQ ID NO: 416505 - DNA, 549 bp, Homo sapiens
agataaaaatcaagtcttttttttttttttttttttgatggagtctccctctgtcgctcaggctggagtgcagtagcctgatcttggctcactgcaaactccgcctcatggattcacamcattcttctgcctcagcctcccaagtagctgggattacaggcgcccgccaccatgcctggctaattttttgtatttttagtagagatggggtttcaccttgttagtcaggatggtctcaatctcctgacctcatgatccaccctcctcggcctcccaaagtgctgggattacaggcgtgagccaccacgctcagccaaaaatcaagtctcttgatgccacactgaattaaaaaaaaaagcccactttcaggaaataattttaaaacagtagttcgtaatattgtaatgtatatacacaacatatacagtagctagtatatacatgtgtttatatgtattgcaatgttggaatgcgtaatatatgtatataaggatacaaatcagataacagaaataatgatctagaagaaaatattatgcagtcaagttt

SEQ ID NO: 416506 - DNA, 570 bp, Homo sapiens
agtctatgagttatacacattctaattacatggatatttttatgctctgtcttcacttgactctctcaaaacagaagaaacaaacacaatgaagtcctttaactgccatctctcctcaaatgaaaaactgtagcaccttgcaaaggcttttaattaaataaacagaaatgaagctaagttaaattgatagaacactctcttggatcaggggtaccatatattctaactttaacattttgctattttagctgtgtgattcataggaaaacaaactgagggacataaatttwaaaaataacagaatacaatctaaacatgcacacgtgaaaaagtactatcaagagtgtacactttcatataattactactatcttatggaagatcagaatagaattaatggttgttacacattcttcatgaattttttggcaatcaaatggtttgcataacatcaggctaaaacactatgttccaaaattgggcttgttaacatatctccttctttgtataccttcaaaatataccattcaatctttatattatgtgaaaggtactctctgtgtctgtgca

SEQ ID NO: 416507 - DNA, 533 bp, Homo sapiens
tactgtgagatatttggcaatttctttagttattttgtatgaatgtgacaacaaatcatcctcataaatgatataatatttctacaggactgaaacacaggatgacatttttcaggacatttaaataacatttaagaatccacattttagtgaatacccatatttcaggggtttgtcaagataaataattcagctgttgtgaaaatcatgaacaacttctttgaatatgttrcacatgtgctagaaataataaatgcatcaaaatgtattcctttggcttagagctgctgacttacttgatattatcagtaacaattatctacatttaaagaaagttagatatgattaaatgcaattatagaatcaagaaaatacattaactgtatgatacaacctctctatagtgaaattctattactggaataactcaccactttgaagtgagctgacatatatttgtgtagctaaggcatgtaatgtatttattcatttaggaggcataagatctagagcatgcaagacatcccctgggt

SEQ ID NO: 416508 - DNA, 558 bp, Homo sapiens
ttctatttgtcacagagaacaaatctagtccaacattacaggaaactatacaaagctataaaatccaggagaccgggaatcactggaggctatcttggaagctgaccaccacactcgttctcttttatttcatctgcccaagtcctagcaatggtgaagttactctctgatttccactactacttttttcagtttagaccttctcttctgaattgttaaattaaaatatgtttggcctaaatctgttttggaatatagcaaactataacctaactaatttaatatgcaaacaaattgtaaccacacttgagaatatgttcttataataagtaaccaagtctcaaccaatcatagcaactgagctttcagtcaattacaggctgcaaactgttcaaacacgcccaaataagacaaacacygaactgcaatcaattaaggtatttctgaatgtcactttgtttttctgtctataaatactgtgtgctcacattgctgggtggaactctgaaactttatctatttagggtgctgcccaatttatgaattttttcttggtca

SEQ ID NO: 416509 - DNA, 595 bp, Homo sapiens
ttattttttacctctatagagtgtaagctcctcaaggtcatggatcatattttagctatatatttttctataggctgctgcacatgtcttgtatagggtggcagagaatagaatactgggagaagcaccagagttggatacataatgccttccatatggtcatgactctactccagttggctatttggcctagaaccagctatttgtcctagaaccgattcagaaattaatatctctgaattttacttttctcatttctaaagcagagataataatgtatttgcgtttaagttatataatgtttctgtgaaaatcaaatatgcttcaagtttccttgtaaactaaataatacatattttattacaataaatgcttattgaaatgcattgtattcataaaattgtattcactawggtgaaatctcttatttttttaagaatcattttgaatgtgatgttagtttcagttcggtgcttattaaatgaaagagcagtctaattgttctctccactttctattccatacaaccctagtgaaatctacttgtatcatgtttcataagatcagacaaaataaaatgttaagaacagaagtt

SEQ ID NO: 416510 - DNA, 551 bp, Homo sapiens
ctggtgactcagcttgctgcactatcatggtggggccaagttgcatcaaaaggaaaaattatccttttttgttctggccacagaacatagacattagccactctgattagcacccaatatcaaactgtcaaggctcaagcttgcccctggttgggccccatcatcgttaatccaatctccaaccaggagtttcaacrtgtggtctctgggcaagatggtcaccttgagtaatagaaaagataagaaagggaaaggagagagagaaaagcattgcctgtgacaggatggggaaggcaaaatgatcagggaggccagagaaagacccactcattgcagcaacactgaaaagttcaggcagctgcttctcagtagcaaagggatcttttccagcaatcccatcatctctcaagtttccccttctagggaggaaaaagctccccatatcccacaatctgtcacctacagccattagtaaagagtgcaaggtagactactccaaaaagaatagcagttgacatgctgtagtgtcaaacccaatcttagccaaaagg

SEQ ID NO: 416511 - DNA, 649 bp, Homo sapiens
tggtcatattttttttcaaatgaataaaaagatggtacaaaatgtgttcctgattttcactgaagtgaataatgacaccacttgagccatggaaataattcaggcctgactctactcactgaacaagggttgttagggataatagaattgccctggatttcctccttgtaagccaaagcggagtcacacattcattaacatatcctgttacatgtgaattaaytccttagaccaagaggtaatttcaatatagagagacagccacctggcatttgcaagtagaccttgctggattatgagatttgattagcgggcttatgctgggtccctaggccatggctgagatcaatgctgcagattaacctcatcttgctgattatagtcctatttgttttaaacttagttactgtatgagaaaaaatgaatagttatggtcccagcttttgttggtcagataagagtggtcaacagattgatataatcatggaaaacttcatcaaaagtcaaatgagtgttgaaactaaggatggatattattaagagacaattttccatgtttgtttttatctttttggtgcatctagcaagttaggcactaattgctctttgttaaggactatctttccaatgttgtttgtaagtataacag

SEQ ID NO: 416512 - DNA, 581 bp, Homo sapiens
ggaagttgttttgtcaaattcaaaagaacataggctttggaatcagaaggatcagaaaagaaaatacaagctcactatttgaacattataataatatctataatgtaaatatattatgatgaataaatgtaattgtattaataataaagctattatttagcacctggcctaataaaataaattgatgattttttaatatttcttaaagagttggaaactaaattgagaggcayataaagaaaatgaacacaaataaaaacataatatagaatacatgtaaaagtcacatacttatttaagaaataaattgaaaataaaccaaaagtaaaaacagaaaaaagctataattacatcacatagaacaaataattgttaatattttaatgtattacatttttaatataatttttaaaggaaggttttagaaaatacagtgttttgcatcctaaagtagaagcagcttgatattggttctggtgaatttattttaaagaaagaaaatatgttaatatcacaattcagaaagcttggctgttgaatttttgttaaatctactggttaagaacataaatggaacatcc

SEQ ID NO: 416513 - DNA, 581 bp, Homo sapiens
ggaagttgttttgtcaaattcaaaagaacataggctttggaatcagaaggatcagaaaagaaaatacaagctcactatttgaacattataataatatctataatgtaaatatattatgatgaataaatgtaattgtattaataataaagctattatttagcacctggcctaataaaataaattgatgattttttaatatttcttaaagagttggaaactaaattgagaggcacataaagaaaatgaacacaaataaaaacataatatagaatacatgtaaaagtcacatacttatttaagaaataaattgaaaataaaccaaaagtaaaaacagaaaaaagctataattacatcacatagaacaaataattgttaatattttaatgtattayatttttaatataatttttaaaggaaggttttagaaaatacagtgttttgcatcctaaagtagaagcagcttgatattggttctggtgaatttattttaaagaaagaaaatatgttaatatcacaattcagaaagcttggctgttgaatttttgttaaatctactggttaagaacataaatggaacatcc

SEQ ID NO: 416514 - DNA, 602 bp, Homo sapiens
aagtgacctatctaggtggtggaaggtacaaataaaaaggctgaaagtcagatgcgtctccaaaaggttctgacaataacaaattggactctatggctgttgagcagtgcaagggataagggagagtagcaggagatggggtcagaaagggaacagggcagattgggtgatgagagatccgaggggtaaggaagcattgagctttaggagcaactgcgagtcttaaggagaccttgatttcattcagtgatatgggaaaccacagcaaattttgatcagaagagtaatatcaactaactccacttggaccgcatggaaacgaggaaggagaatactacagcaacctggaagccagtgaaaaatgatggcaacactatctaagatggtaaaaaattgaygaagaaaagctcatttcgaactgttgaggagagaaatgtatttgcagagagagcatgaaaaatcatgaaccactccatgggttttgccttgtgcaagtggaagcaagggaagaagataaagagtaagttacagattttttttttctttaaaccaacacttttaaacacaactgtaaaatgaataaaaatacgtaacttctcctg

SEQ ID NO: 416515 - DNA, 572 bp, Homo sapiens
aaacgaggaaggagaatactacagcaacctggaagccagtgaaaaatgatggcaacactatctaagatggtaaaaaattgacgaagaaaagctcatttcgaactgttgaggagagaaatgtatttgcagagagagcatgaaaaatcatgaaccactccatgggttttgccttgtgcaagtggaagcaagggaagaagataaagagtaagttacagattttttttttctttaaaccaacacttttaaacacaactgtaaaatgaataaaaatacgtaacttctcctgccatacctcatgcatcatgttgggacaagcagtcaaagttcctgaatcaataatcattttgattatactgttccagagaaacaatgtayaaaaacatattccagtgcaatttctatgtaatctgttccccctgtcccatcaagtgtgacagtgtattattatgtattgacagaaaacatcaatatggatgatgttagacagtgggaggaacgcatttttgtgtgctagttttgtctttataataacagcattgatctgtatttcagctaaccggttttcagcaact

SEQ ID NO: 416516 - DNA, 617 bp, Homo sapiens
ccctctgttggactaggcctgaccttggtctttcattattgtccttgtagaattcagtttgagcaagaatcctgcttagtcaagttagaaaaaaaaaattcccctttctttgtatttgaccaccttctatacctgatcaaattccttatcctctagactcaatatcttctcaccctggcttcccttcagcaagaattctgttcagttggcctagcaagaatctcccttacctctgatattttctcttagtaaatattcatcctgtgaccgcccccaccccccaaacctgctccttagctgtaaatccccacttgttcttgttggagttaaaattgatcccaatctctctcctctacctagagactctattgcagtggtccccatatctactgagataaaagtcctctgtatcctctttaataagtgtcataaatatttgtttttctttaacattacttcacaggcttataatgagcatttaacaagataacatatatagaattcccagcagaggacctggccttagtttctgccaactgttttgtcartgtgcctgttaggttggaatgggaggcagactgtgtgccctttgaatcaaatcatttcccttcagagat

SEQ ID NO: 416517 - DNA, 617 bp, Homo sapiens
ccctctgttggactaggcctgaccttggtctttcattattgtccttgtagaattcagtttgagcaagaatcctgcttagtcaagttagaaaaaaaaaattcccctttctttgtatttgaccaccttctatacctgatcaaattccttatcctctagactcaatatcttctcaccctggcttcccttcagcaagaattctgttcagttggcctagcaagaatctcccttacctctgatattttctcttagtaaatattcatcctgtgaccgcccccaccccccaaacctgctccttagctgtaaatccccacttgttcttgttggagttaaaattgatcccaatctctctcctctacctagagactctattgcagtggtccccatatctactgagataaaagtcctctgtatcctctttaataagtgtcataaatatttgtttttctttaacattacttcacaggcttataatgagcatttaacaagataacatatatagaattcccagcagaggacctggccttagtttctgccaactgttttgtcagtgtgcctgttaggytggaatgggaggcagactgtgtgccctttgaatcaaatcatttcccttcagagat

SEQ ID NO: 416518 - DNA, 581 bp, Homo sapiens
tggttcagggatcctagaaaccacagcaaaggctaccagtctctttgaattttaggtctagatctgtatagctttactttagccatattccattgatcaaaatagtcataagtcaacccagattcaaggcaaggaaaaatagactgtatcacaaggggctgagtataaagaatttgtgaccattttcaatctgcaatatatgaaggaaaaaaagaataaacaagctatatatttaacctcattckctgtgcctgcatcaggtctatacccaaaaaaaacttgaagagaaaaaatacttttcagaaaggcaacatatttgttcatatttcttaagcaatttttagcagagatttccctggccttgactactttacttgtttaagttctttcaatgtctaagttattttgatgtattcttttcactatctctgtcatttatattttttcatttttattctgactgctatcagcccccaaaacctgaccaggtccttagttgtacatgtactgtatcaattcctttctaaataggagccaggaagacggcaggcaaggctcctagaatcctcctccactgaccc

SEQ ID NO: 416519 - DNA, 412 bp, Homo sapiens
tttatagaagctttgaaaatatgcagtgcttaattttcttcattaatgcttaatcaaaatctatactctttcagttaattatgtcaatgcttttacttcattttaccttattaaaatttttaatgtttaattttcatgggtacataataggtgtatatatttatgggatacatgacatattttgacacaagtatataaaatgtaataatcatatcagggtaaatggaatatccatcacctcaagcatttatcatttatttgtattgcaaacaatccaattatatgcttttagttatttttaaatgtacagtaaattatagttgactgtagtcactctattgtgctatcaagtagtggatcttattcattgtatctaactatatttttawactcattaaccattctcatttct

SEQ ID NO: 416520 - DNA, 533 bp, Homo sapiens
acttgaaaaccaaacacacttctaaataacacatgggtcaaagaaaaactcaaaagggatgttagaaaatatttttaactaaatgaaagcaaaaaaaataacaaaagaatttgtgagcggcaggtagcrcagtacataagggtagagttatagcactaaatatcaatattagaaagagatttaagtcagtgaccttgcctttcattctaagaaactaagacaataagagtagtcaaaacccaaaataagcagaaaaaaaaagatcaaaacaagcatctgagaagtaggaaacagaggaaaattaagaaaaactaataaaattaagagctagttatttgagaagtgcaataaaattgataaatttttagtcagactgatcaggaagaaagaaaggacaccaattcttaatatcaggaagaagattagtatcattaaacaatttctacaaatattaaatggagtataagggaatgttataaacaactttatttcgacaagttagataaaattgattaattctttgaatgacacaa

SEQ ID NO: 416521 - DNA, 606 bp, Homo sapiens
tgcctttcattctaagaaactaagacaataagagtagtcaaaacccaaaataagcagaaaaaaaaagatcaaaacaagcatctgagaagtaggaaacagaggaaaattaagaaaaactaataaaattaagagctagttatttgagaagtgcaataaaattgataaatttttagtcagactgatcaggaagaaagaaaggacaccaattcttaatatcaggaagaagattagtatcattaaacaawttctacaaatattaaatggagtataagggaatgttataaacaactttatttcgacaagttagataaaattgattaattctttgaatgacacaaactaacaaaattattcaagaagaaatacataaacttaatagctcaatcttcaaaataatttgaatttatagttaaaaacctactcagaaaaaatttctagattcagatgtgttcactgctgatttgtaccaagaatgtataaaataaataatagcaattctattcaatctcttccagaagctaaaagaggaagaaacactttcaatatattccatgaagtcaatattaccatgactacaaaaccagacaaccattgcaagaaaacccc

SEQ ID NO: 416522 - DNA, 414 bp, Homo sapiens
aataagaactttagcctaattaaatttaaaagagtttaattgaayaatgaatgattcgcaaatcaggcagaccccagaatcacagaagattcacagagactccaggggtgcctcatggtcagaacaaatttatagacaaaaaagataaagtgatgtacaggaatcagaagtgaggtacagaaacagtgagattggttacagcttggcatttgccttatttgaaggcggtttgaacattcagcagtctatgagtggttgaagtatggccactgggtttggccaacacacagccagtgttacaggtgcatattattaagttagatttcctattttgtctgactattaagctaggttacagttcatccacaatgactcaaatatagaaacacagagtcattcttaagccatgttttg

SEQ ID NO: 416523 - DNA, 521 bp, Homo sapiens
acacacctagtgataggttagaacaggcatttaggaaccctgatttcacagttcatgctcttaattataatgcagtaccacctcactgtaaaacaagtgggtagagacaggttttaatgtagaatctataaaatttagaaatgggttggctataaagttaagtgagagaatgagggtcagagaatcaaaaattgctgaatttctataaattattgttaaaatcactgtgtgtgtattgggacaagatagtttatgagtagtataagaatactcatgttactcaacttcatactatagtacaaggcttcagtgaccaaaacaacatggtacttgcacaaaaacaggcacatagaccaatgtggcagaatagagagcccagaaatagggccacacatatatgaccayctgagctaacaaaaacaagcagtggggaaaagactacctattcaataaatggtgctgggtagccatatgcagaagattgaagctggacccctttcttatatcatatacaaaaatca

SEQ ID NO: 416524 - DNA, 631 bp, Homo sapiens
gaattaaaaacagaacaaaacatggacagacaaacaaaaacttaacatggatattagggagtacaaactatggaggagacagatttcatagatttagctcaggtaaatctgaaccctaaaacaaacaaacaaaaaatacaaccaaccaacaaacaatcctagcaaatttataaaaaggtaaaaacaaaacatcaatttataaggagaaaaatagaattcagagttgctatgatatgctgtctataaaaaaattgagacatccaaagatacaggacagttaaggagggagaaacagtcagtagatatttattttatcaaataaagacttcagaaaagctatgaaaaataagtttaaaaatagaagaaaatcatgcctaaagagttaatagtgtaataacaatgaatcaacaaacacaaaacaaaataaggacagataaattatttgaagaggaccaaatggaaattatggagtttaaaaaaaatgcaattgaaatttagaaaattcagaagaactcagcagcagatttgaggtggcagaataattagtgagtttgaaggtagatcaatacaaactattcaactgaagaaaaaaaacacagaagataaatamattaaagaaaaacgagcaaag

SEQ ID NO: 416525 - DNA, 552 bp, Homo sapiens
attaaccagcccaaacactcagtgactttccagtgcaattagaataacacacaaacttcttactatgcyttatgggagtttatatgatctggctcctccctaacttctgacctatttcttccaatctctccaagatttactacactctagttgcttttatttttaatgcttatttctttcacttgattattttcaaaacaatagatttcccagaatcttccaaatgtcaatttcttccagtatcatttacagactcacacatttaaaaaatttgcatattttctatccacctgataattattttattgatattcccattgcctcttctttagtgtgtgcctctccacatttctgagtccttttgacacattgacacattcatggtattctttgatagcttctttgcttctgatttgacaagatgttcaggtgtgtgcagccccagccaggggaacatacatttatttagagaggtttggttccttttagcagaaaaatatggtagaaactacatttgtttgctaagagtgcttattggtactgtggtaataa

SEQ ID NO: 416526 - DNA, 558 bp, Homo sapiens
tgaatattaaatgagataagacaartatgtgccatattgcctgatattaaaatgacctaaaaagcaaatataatctaatttaaaactcaagtatagttagaaaatagaacactgtatacaaaattagttagtatccttgatcaaggaaaagctgtttatagtaaagatagagtaaaatgcttcaaccccacaaaattataagattttttacccattcaaatacttactgtaagtacttatgtaaacataattatggataaaatctcatctcttatgctcctcacaatttgcagtaaataatttaactttatgtaagtttcataaaagatagaaataaacctgttcctgaggccttatagacactgacacatgttagtttcagaataggcagagagaagatggagcaattaaatggtctcccaagccttaaccacaagaatcaagtaaggaatgagaccttcggacttgaccaggaacagtgacaaaaacagagccagagtcaagcagcgagggtaaaagtggaggacaggaaaggagaaaagagcccagttaaaaggt

SEQ ID NO: 416527 - DNA, 469 bp, Homo sapiens
ttcaaagtttgattcctcagaattgtagctataaggctgaactttggagctgccaaacagactggggctagagaactaattacatcattttatccttatgaaactataaatgagtaatttggtcagtgacagctcagaagctttccattaaaaataagtatttgtttatgcatttattaaaaaagattggcatctgctgtgtgctgagtaccataacactgaatatgaattgaacacaatgaacatgatttctactctgatggtgcttacatatagtctagtggaatttaatgatgctatcatcaagaaaatagtagctatccatgggcttattttaagaattaagtgagataatttatgtaaagctcttatcctagtgcctgaaataatgtcaaaagttattacttgttgtatygctaaatattaagggaacgattgagttaaaaacagctgtagcaggtagagctat

SEQ ID NO: 416528 - DNA, 469 bp, Homo sapiens
ttcaaagtttgattcctcagaattgtagctataaggctgaactttggagctgccaaacagactggggctagagaactaattacatcattttatccttatgaaactataaatgagtaatttggtcagtgacagctcagaagctttccattaaaaataagtatttgtttatgcatttattaaaaaagattggcatctgctgtgtgctgagtaccataacactgaatatgaattgaacacaatgaacatgatttctactctgatggtgcttacatatagtctagtggaatttaatgatgctatcatcaagaaaatagtagctatccatgggcttattttaagaattaagtgagataatttatgtaaagctcttatcctagtgcctgaaataatgtcaaaagttattacttgttgtatcgctaaatattaagkgaacgattgagttaaaaacagctgtagcaggtagagctat

SEQ ID NO: 416529 - DNA, 560 bp, Homo sapiens
tggtgtctcattggataatgtgcaccccaagtcaactggctttgaacccagcaaagcaccaggacttgctcaggaattgcagtctttgtggcctggactgcctttcaagttatgtaagaccacagagcattttaacctgtggtggtatggcttgctggaactcaggttttgactcctgacayggataatttgcctctggctagggctggtcttaatcttccctccataggctctggctgaattcttcccatgttgctttctgtagcagtgcagcactgattcccacaatcactttcttcccccttccccaagtacacagcttctctctccatgccatactgtgctgctgggagatgggggagggatggtattggcaattcaagactgtctttcctaccttcttcagtgcctctttcctttttatgatgttaaaagcaagtactgtgatagcttgcctgatttttgattcttacgaaggtgctttcttgtgtagatagttgttcaatttgtattcctcttggggctatggccattggagggttctatgtggccatcttgct

SEQ ID NO: 416530 - DNA, 476 bp, Homo sapiens
gctatgctttatacaagtctctgggtacatrgtgattaataaaatagtcacggaccctgccttcatggagttatgtgcaaaataagcaatataaaagtaaaacacagttcagtatacaattagaaagtataatgtgtgccagggaggaacagaataaattttttgatagtcataaaaaaacttcagccaaattaaatttaaatgagtttaattgagcaatgaatgatttgtgaatcaggcagacaccagaatcacagaaggttcacagagattccaggagtgccttgtggttagaacaaatttatagacaaaaaagatcaagtgaagcacaggaatcagaagtgaggtacagaaacagtgagattggttatagctcagtgtttgccttatttgcatgcagtttgaacattcagcagtctatgagtagttgaagtatggcagatggaattggccaacactcagccattgttacaggt

SEQ ID NO: 416531 - DNA, 560 bp, Homo sapiens
  misc_feature (1)...(560): n = A,T,C or G
aggtacagaaacagtgagattggttatagctcagtgtttgccttatttgcatgcagtttgaacattcagcagtctatgagtagttgaagtatggcagatggaattggccaacactcagccattgttacaggtgcatactattaagttaggttttcaattttgtctgactattaagctaggttacagttcatctacaaggattcaagtatagaagtatggagtccttcacaggccatatttacttcactttaacaattccccccttgtggtcattttctcaattttgagagattgcccaaaacyttaggcattgatgccactgtcgctgtcataaatgtaccaatatggttttgaaattcactgggaagcagtagaacagtgagttttgcaaagagaataaggactgaatagggggtacctccttatgctggaccatcctttttacaggagaaaaacaaaacctgatctgttctagtacttatgtgttttcttaaagccttagtttgattatgtcacatttagcatgagtgactccattntagtttggtttgggtttgtta

SEQ ID NO: 416532 - DNA, 599 bp, Homo sapiens
  misc_feature (1)...(599): n = A,T,C or G
tgtcataaatgtaccaatatggttttgaaattcactgggaagcagtagaacagtgagttttgcaaagagaataaggactgaatagggggtacctccttatgctggaccatcctttttacaggagaaaaacaaaacctgatctgttctagtacttatgtgttttcttaaagccttagtttgattatgtcacatttagcatgagtgactccattntagtttggtttgggtttgttaggacctantacatgagttcaatccaaaataatggcctcttgtaattttgtttttaaaaagtccccccttttggccaggttctcacttaggtgagaaagtaataaaaacttagagccttagcaccattctcagttaccatcgttttgggtttctggtctcagcatgtcattcataggtcacagtgtcctcatggtcrcacatttctttctgcttttgtcattccagttgaagagagaccatttgatgttctagagatggctgcatgtgaacatttaaaatctttgagagaatacagtgtaccaggaagaccattatgactattgggaggataatgccaagagtttggagtattctccttactcagg

SEQ ID NO: 416533 - DNA, 598 bp, Homo sapiens
tcacatctatttagtctgcttccagaataggcacattttggcatgaaatgacattgtccaagaagaagatcaaataaatttataaagcaaataaactggtagatcttcaacattttgggttatatataaatataccacttctcaactattttactaaatcagaggtctcagtttagcctggtctcaaggaaggaaattctgcaagtttgcaatggtaaagaagggcatttctttcagacacaaacacacagcagctaatgaaattcagataatcttatatgaccataataaaaatacttctgtgccatacttttgtgttccggttggtatgcttcttgaataatacatatggcctgcagtcaaaaccagaacaaaatagcatgttgygatagttttttttttttaattttattttgcaggacttttaaaaaagacaagaagataacaataaacagaaaccatgtagagaatctccatgtcaaaggaaatccataaatcttattaaactggaaaataatttcaaagtaaacataactgaataacatatgacttagatgcaacagcttgttggccaactatagaaaatcatcaggttcat

SEQ ID NO: 416534 - DNA, 625 bp, Homo sapiens
ttgatgagtgctggaaggcaaaccacctctgcttataacatgtgctttaccaaaggaaagataacatgcctgcagctctgcagaattgtgctattgtcatatatgtagaagtcgcctgctcttaaagaaaacgtgatgatttacacttaaaacactggggcttatcctgtaaaattgtgtggtacttagcacatcttactgtctcaagggtccctataatgatggttaagcttaatgattcactggtagatctcacaggacttagaagctcttatactcacagatatggtttattgcagtaaaaggatacagatcaaaatcagcaaaggagataggctcaaggtccagggggaatcaggtgcaagtgtccaggtgttctctcscagtggagttgcataggatgtgcttaattgtcccagcagtgatgtgggacaacacatgtgaagtaatgccaatagggaaagctcactcaagccttgttgttcagatatttttattgaagattagtcacatagacatgcagcacccaaatcacttaattattcagatgctagccctccagccccaaaactcaccccttatacaagcaaaaataagccttcaccgtaaatcacattattaggat

SEQ ID NO: 416535 - DNA, 595 bp, Homo sapiens
atgcatgttaagcctttactacatagaatgacaagaaccatggctactgttgctgctactaatgccacatcacccaatcatccaatttcttcattatgtgccataaacatgaggtaagcatttaggcttggaaaggtaaaagttgttctcaagcattagttataaattacccaaygtctaattagaaaatatacttgaagttgtttgaattttgtaggcaatataaacagatttatttttcttcttcaggctctatcctgtgtgtctcattattttgaggcaatcatgctacttaccattttttaacaaatgattgttcttgattacgttactggcattttgcagcactcacctcagtaaatccagtctggggtgcattcaatatcacttacatattctcctcccctcaaattgcaaaattgatcatcaactctttgaatttgtttgtcagtaagattttctcaaatatctaaggatgtaaagaaaatttactaaataatctttttcccagctgacttaaaatatacattgttgatgaagagtatactaacaggtaagaatcagaaacacatatgtttgtatgcataccagtgta

SEQ ID NO: 416536 - DNA, 607 bp, Homo sapiens
ttttgtaaagtacttaacttgttttgatttcacaggttcatagctgaagaaaatttgcctcaggattaatcatgccttaagcacacccatatctgatttagatgaaactctggactttgggcttttgagttggtgctggatcgagttaagactggagttgttgggatggattaatgtattttgcacatgaaaggagatgaattttgggggccaagkgtagaatgctatggtttgaatgtgtcccccaaactttatgtgttggaaacttaatctctaaattaatatgttgactggaatttcagtctttgagaggtaattagaattagataaagtcattgggatgggacactcatgatgcgacttggggctttataaaaagaagaagagacctaaggtgacaaacacactttttcttcttaatatgtgatacccttttgccatgctatggtgcagtaagaagactttcaccaggtgctggtgccatgttcttggacttctcagtctcccaaaccataagccaagtaagtttatttataagttatccagtctgtggtattcttttatagtaacagaaaacagactaaggcagaatactacagcatgtagt

SEQ ID NO: 416537 - DNA, 607 bp, Homo sapiens
ttttgtaaagtacttaacttgttttgatttcacaggttcatagctgaagaaaatttgcctcaggattaatcatgccttaagcacacccatatctgatttagatgaaactctggactttgggcttttgagttggtgctggatcgagttaagactggagttgttgggatggattaatgtattttgcacatgaaaggagatgaattttgggggccaagtgtagaatgctatggtttgaatgtgtcccccaaactttatgtgttggaaacttaatctctaaattaatatgttgactggaatttcagtctttgagaggtaattagaattagataaagtcattgggatgggacactcatgatgcgacttggggctttataaaaagaagaagagacctaaggtgacaaacacactttttcttcttaatatgtgatacccttttgccatgctatggtgcagtaagaagactttcaccaggtgctggtgscatgttcttggacttctcagtctcccaaaccataagccaagtaagtttatttataagttatccagtctgtggtattcttttatagtaacagaaaacagactaaggcagaatactacagcatgtagt

SEQ ID NO: 416538 - DNA, 648 bp, Homo sapiens
taatgattttgctttttctcaaatctattagaattgttaggtatgactttcttatagcaattttgcactcatgtgaaagctgtattttccactatgaaatgaaaggcattttgcaaaaagtgcaaggttatcatgcctgctggcataagctacaatgatgatttcacaaattttcttttttttaaaaaaatggtctttaggcttggtatgttttaacctgaaatggtgaaaaacctcagctgcagacctcactctgtggtacatatcaaggaattgaattttttcttgtaatgtcatgatttttctctgtttcttgggggtacatccagcatcacaagtggcacttcatatgggtctcatcctgttattggcaatttaccatattgcactaaacacaataaraaatatgtgagaaacttgagggatcacttttactgtgatatgcattttactaaagagaggaactatgaacatgaagagaattaccttcacaaaatgttttaaccagattcaacacttgaactcaccacaatagcaatagaaggtggctacaaatttagtataatagcatagtatgtattaaagctacttttatgcagttatgatttaacagtgcatctttacatctctttggactgaaataacacc

SEQ ID NO: 416539 - DNA, 620 bp, Homo sapiens
gattttattaacaggagaaactaaattatttgcttattatttagtgttcagaaatctctacatttttgcagtgttgctcaacttcaatttgtctatgaaattctcaaagtttccactgaagttaattacaatggcattcaaaatgctaaacacaaaatgcctacaagcwatgaagtgttatataattttaaaaccaggttactcacacaatatacaattagttttactaacccttttggttttgagagatcttattgtgcagcaataaagttttggtggtaaaaatgagtcccagtgtaatggatcataataataattgtgttcagctaaaatattgaaaaccctaagcaatagaactgcagtctgctcatgtgttaacagttctctaaatatctggaaaatatgatttccttttcatgccaatttctatataaatttcattgattccctcattcaacagtgttcattagccccccagaactgttccaaattctctatatatgtacaatgggagaaactgttaatcatttccctatatccattattcgtattttctttttaaggagtgaaatacatcaccgctttccctgctcccgccgccattaaaattgtgtttggca

SEQ ID NO: 416540 - DNA, 581 bp, Homo sapiens
tgtagtttcagccacacaaaagacatactgtgttataatgttgaggaaattgttgctatatcattttctccactgaactacctaaatgttaaaagaggactgtttctactacttcctctttttttcacgtttttcacatcataatcatgtactaccattaaatgtcaactgagatagcatcctgagtcctargttttgtgggttagctaggctcctctaaatttgaaaactgagtctgcagccagagggaatttaataatatatggaattaatgattgtcaatcaatgagaaactgaaataaatcagggaataagctcgatggtataatacaagttagtcaaatcaatgagttttcatagttggaaatttaattgactattaagccaactttttcaaaactgtctcagtatcaaagataatatcaagcacagcaaagctgtacatgaaggccagactgcaatctcagacacagtaattggcaaatagtgcaaggcagctgtctatgcattcttgatatgtttctgcttctttgtggtataactttacaattgttgaaagaactaacagccctataggtcac

SEQ ID NO: 416541 - DNA, 577 bp, Homo sapiens
aattcctggcaatagattacagtacataagaaacacaccctgtagaatctctacggtttgatttagtcctaccaaaaccacttgcagattcaattatgcagcacgcggatacagtaccaggaagagcagtcctgagagataatctcattcacatcccattaaagcaatgaagaaggctcttgaggagcaactaacatttcaagagctagggtctggggcccaaggcgtgcatatgattaaaccaacccagctagaagcaattatctacagattacctcaggcatcctctgaggatgagttgtttctgagaggacacagtgtcattcaatctgaattcagtaattacaacaattcatktggaagatagaaatttaccctctgctttacagattaaagaaaacgagcttgcaaatgccaccacttcaaaaatattccaagtctcatctatcatttttttttagagactttccaaacttcaaaagtaccctaagtctgaaatatgcatactgcttagatatatgaaggcttataacttttgatctagaaacaacttgtatgaactgaacacaatttaggt

SEQ ID NO: 416542 - DNA, 578 bp, Homo sapiens
acatctctaaataaccacattttgttccttgaaataaccctgtgaagtaggaaaatatatataatttgatagtttgcaatgtttctcaggcttactttccaacagactatttttcctcaaggaacatctcaggggactaggtctctgaggaatatactgtagaaaaatgctgccagtgtactcatttttctttccttgatagaagacttttctgtactttcttttcaaacaagactaaattggatgtaatatgaacatgagactatacatgtttttagagacaacatartcataaattttggtcagcatgcagagaactagcagcagcagcagaaattcaggcccatgatgatccttcctaatattctacccaaatcttgctcctcccatccctggtctgaggaatccaggcctgaccttcagcatgttgctttcctttaattttcttcttcagactccagtgagaattgtcaccattttccattccagcttcatctcccataattctttctacaccccttatattctagaaagcattgatatagtgatagaggtagaagtagcagctagcactttta

SEQ ID NO: 416543 - DNA, 537 bp, Homo sapiens
ataacaatgatttgttattgctgataaccctaatcacctggctaaagtagtatttctcytgtttattcactgtaaaactactcttttcctccattttcttttggaaggaagtgcaatgcacacttcaacaagataactaattttccacatccttgagcatggagtagctacgtaaattatttaaaattattctgcagagaaaataggcctattcttacccatttgtatattgagtgtccttgtatcagtatggactcatagatatgtattttatactccagattttaatcaaattatgcgttattttgttgctcaaattgttccaactttgttcatttagagatctttcagttagctcctgtgggttttttttttttttacattaatcagttgcttatatttgtattaatctattcctaggctatctattctatacctatgatctatataagtttattctttcaacaaaatctcaatcttaattactatagctttatagtaagtcttgaaattgggtaatgtgagtatagcaacttt

SEQ ID NO: 416544 - DNA, 643 bp, Homo sapiens
aatgcacacttcaacaagataactaattttccacatccttgagcatggagtagctacgtaaattatttaaaattattctgcagagaaaataggcctattcttacccatttgtatattgagtstccttgtatcagtatggactcatagatatgtattttatactccagattttaatcaaattatgcgttattttgttgctcaaattgttccaactttgttcatttagagatctttcagttagctcctgtgggttttttttttttttacattaatcagttgcttatatttgtattaatctattcctaggctatctattctatacctatgatctatataagtttattctttcaacaaaatctcaatcttaattactatagctttatagtaagtcttgaaattgggtaatgtgagtatagcaactttgtttttttatcttcaatattatgtttactgttttatgtcttttaactttctgtagaaactttagagtcagtttgtcaatatctacaaatagcttgctattttgattgagaacatgatgatctataaatcaagatgaaaagaactgaaatcttcacagtaattagtcttcggattcataaatgcaaaatttctctccatttatttaaatcttctttgatca

SEQ ID NO: 416545 - DNA, 482 bp, Homo sapiens
caatgtaatgtgattcctagtagcttcagaataaattgtttttaaaatttcaatgtcaatgtaaagagaaaactttctccacattttaattaatatttcatttctaaattcaatcaaaagtccaccatcaracaaaaatttccctctgcaatccctgtgacctatcttttggggtctctagtactctattagagaacagaacacacagaaagaaaaggaggggattgaagacagaggacaaaaatgacctcagtaactctgtaccaaattattatggaaaatgacacctcaatgaaattttctcaccagatgacttaagtcttttcaaaatgccatcaagccagtgatcggaagcacagtctatgacaacatgtttcatcaatggttatttttacagtacttgcactatcattttggtggctctatatgaatgagatttaatatactaactatagcatatattaatgaccagttttctcaaa

SEQ ID NO: 416546 - DNA, 585 bp, Homo sapiens
ttgtgtcagccctgggacaacagcaggaaccaagaagcccaaatttccattgacataaaagtcatttgggccaccacatggtaaatgacagatgtgccacaagtactatagargcaccaaagagggccatctagcccagccaaaggtggagagggagacaccaagctaagtgttaaaagatgaggcattagtcagctggaggggagaggcatcctaatcagaaggtacacatcagcaaaggcatgaagctgggaaacattttggctgggaaaagacaagctgttcaggtgacagaagaataaagggcaagcgggagaggaggatggagagataggcaggggccagaacacacagaaccttctcagtcaggagctggagctttaacctgaaacagtagggagccatgggagccactgaaggattttgagcagggtcaggcccatgtgttggattattcattctgacagcagaggccagaagctggggaacaggtagaggctatcctaggagtccttgtgtggaagaatgaaagaaacctgaaccaggattgtgctgaaaagagaagggggtaggggtaagggttag

SEQ ID NO: 416547 - DNA, 599 bp, Homo sapiens
ctaagggctgcccactcctgccagggttattgcctgggcagagcacagcatgctgaggggctccacccaggtgtgcctagtccacgtcaagcatgttgagtgaggtggtaccatccacccacacccaagggggtggtgggccaggaaggcggcacccaagagctgtctttggtgctgaacaggacgagcttggcaaagatcccgggagaggcaggggagaatcacccagctcaggaagttgaagacttctaggtctacatctatgccatctccaccctgaagcctacaggaaacrttgcctgccatgagtgccctcaatacagcatccgggccattcctaggacatctactgtctatgaccttgcatcatagttattcgatgagctcagcatccaaatactgaaacccttcttcatcctctacagttcctgtaggatgctgtgctgtgccacccatgtccctccttcaggaatgaggcctccccacaccatccccaccagctactggtagtactgggggctgccgggtaatttattggctgagtccctctctgggaatcactctctggaagagagagctgcctcacccagagtctcttg

SEQ ID NO: 416548 - DNA, 598 bp, Homo sapiens
aacattttagttaagacctcgtccccagagatgcttagtcaactctctgggctgaggagcgggcttatttaaaattaaaaacaataacaacaacaacaaagaaaccaactcctttggtgattctaatgctcagccaggattgggaatcgggggtccaggcaatgcyttggctggagggtggcgatcttttgtgtcccaagtcccatggagcacccagagtgagcatgagtaccccaagatgccaagtctgattcctccaactggggaaattgtgggtgtgcatgggtattcttcagctcacccaaaagttaactgttcacacagacacaccccaaactagctctcacagttgacacagtttaagccaggatttgcaaactcaaatgatgactagaatcacacagaaaatgtaccagtttgcagcaggtgcattgttaagacgtggatactatgggtggagaatccatgcccttctcatgggggcaggttttaccctgttacaacctgttgttaccaagaagggatgcagatcttgtggtgcctgattttgccctttgctctccccaggagaaatcaggattcaggaattttaaatgaa

SEQ ID NO: 416549 - DNA, 598 bp, Homo sapiens
gacattcaaggggggatggaaggagatgaattttatctttacatatggagttttgctgtaatggggagataggcagagattttcttaggcagagaatcaaataagttggtagaagtgatggttagaacttgtggaaatatgccccaattctwcctaatttttcagtgaaccacaaaggaaaatatttggatgtgaataaaggcagaaaaagatgtgttggtggtgtcaggaaaaatttaacaaaagtaaaatatgagcatagctgcatcgggaaaatatacaaatgtttgctaacactgaatgctccgcaaaacccaagtcatacatttaaagaaaatcagtcagcatggttatgtatttcatttcaaacaagttaaactccattgtcaaaagtgtggattaaatttttctttacttttctaggggattatttaaagcaatgatgggcaaatggtttgaggtagagtcagaggaaaaatgataattatttaagttaaggtgaattagaacagagtaaagactgtgatgaaagttatgtacaaaaagagttcatggattgtagctcaaaatggaatcaaagggtttttgagagggcggg

SEQ ID NO: 416550 - DNA, 551 bp, Homo sapiens
gaggactttcttggcaaggctacttaaaatagcagtccctcaaatttgttactttgcacttgctccttctatggcattttggtttaaaataacacyattttatttctcatttattatctgtgtcctctactagaatagaaattgtgtatttttcacggctgtactggagattagtaatattaccagttatatcaagagtagttgtccaaaatttttgtgtgatgaaacattgtgcctggttcctcaagaaaattatactaaacagccctacgttttatattttatatttctcttaaaatactctaaaccattgttttttacactgtatataaataggcatatcttttgttttccttaaccaccttaacataaatggttaaacaaagtgttcaatgtctgtaaacaattttgtccgcctaggtaaaatttctttcgaaattgtgttcatgttattaatccaaatgtgcataatttgcattcctttatactgattaagcaaaagcaaaaatatgtactaaatactctcttaaacttaatttttactaattatg

SEQ ID NO: 416551 - DNA, 525 bp, Homo sapiens
ttttgtagaatccagagagaaactgattatggcaaagttaatggytgtggagtttgatgaaatagcaatgctggaagaaatgtggcagaaaaatcagacgagctccatggtgataagtgtaattcacttcctgttgaaatgcatgtttcctttgatgcaatttttggtacctaaactctctcaaagtttgaaaaatacaaataatttggtataattttcatttttcaaggcagtgatttaattaagtacaagatattcaattatttaaaactcaaataatgtacctttaacttcacacattttttgtttattaagatagcagaaggcttcacctaaaagagaaaagaattttttttaggaatgaaatctctaaattagagttagttgtatatagccttctttacccttcctttcctactcctctgaccaagaagaaatagtgggcaaaggcagaattgttaccattacattgatagtatcttacattaataaatcctaaatcttttgcttttctatatttccttc

SEQ ID NO: 416552 - DNA, 600 bp, Homo sapiens
gtttttcttatttacattttaaaaataaacatgtgtttttaatttaatctaattactttcaacgaatgagtcaattgtagtcaataatagaggttagcattttcccaccttgcttccagttgccaggttttgtagaatccagagagaaactgattatggcaaagttaatggttgtggagtttgatgaaatagcaatgctggaagaaatgtggcagaaaaatcagacgagctccatggtgataagtgtaattcayttcctgttgaaatgcatgtttcctttgatgcaatttttggtacctaaactctctcaaagtttgaaaaatacaaataatttggtataattttcatttttcaaggcagtgatttaattaagtacaagatattcaattatttaaaactcaaataatgtacctttaacttcacacattttttgtttattaagatagcagaaggcttcacctaaaagagaaaagaattttttttaggaatgaaatctctaaattagagttagttgtatatagccttctttacccttcctttcctactcctctgaccaagaagaaatagtgggcaaaggcagaattgttaccattacattga

SEQ ID NO: 416553 - DNA, 543 bp, Homo sapiens
caaatgtaaaataaaagactatatggtaaatttccattttaacttcatatgctttatttgaattttagatattttgaaaagttaatatgaaatatgaatatgattcgcaaggcacaagtggttctctttccagatccagtgtctgataatacttggtaggttttgattccctagacatatcctaaaattttccttagttttatttttacttttgcaatttatgcaaactgaaatgtatacttggatgaaaatatcccaagcatgttataaaatgagctcaaattctttcattctcatgaaaacttaatagattattacagttgatattgtacttagtagaattatttgrcatctgtttacataaattacattctctgcaaaattttcagtgtgctgagggagataactacttttttacatggttttccctcctcaaatgtacacatattaatttgattaaaatagaccaattaaatgaatggaaaataaactttcctcctaattttttgggaataaactatttcaaacttagtcgtcaatcaa

SEQ ID NO: 416554 - DNA, 595 bp, Homo sapiens
gtttaattaacttgatgattgttagagactatgtaatctgaataacagagacaaagattgatgaaaatgaacagagcctcagcaaaatgcagatcattattaatcacaacatatgaatgatgtaaatagcagagaggaagaaaaggtgtacaaaatatatttgatgaatcactaaaatctttccaaatgtgaggaacagcattaatgtaattctccaataagctacaaatcaataaatgcaaaaagattcacacaaattcaaattatattaaaaatgatgaaaagctaagaaagtcttgaaggcagcaagagaaaaataacatcacttaaaacgaaatgcagataagattaatggcagacctctcatcaaaacaatggaggcctgcaggcagtgggatgacatattcaaagggctaaaaggaaatarataaataaataattgtcaaacaagaatcttaagttcagcaaaataagttttacaaatcaagatgagaaaataaagacattcacaggtaaacaattgaaaaacatgtgttattagcaaacttttcttataagaagtatgaaagaaagattttctaactgaaaggaagtg

SEQ ID NO: 416555 - DNA, 539 bp, Homo sapiens
cacaaattcaaattatattaaaaatgatgaaaagctaagaaagtcttgaaggcagcaagagaaaaataacatcacttaaaacgaaatgcagataagattaatggcagacctctcatcaaaacaatggaggcctgcaggcagtgggatgacatattcaaagggctaaaaggaaataaataaataaataattgtcaaacaagaatcttaagttcagcaaaataagttttacaaatcaagatgagaaaataaagacattcacaggtaaacaattgaaaaacatgtgttattagcaaacttttcttataagaagtatgaaagaaagattttytaactgaaaggaagtgactccaaacagcaatttggacacacacaaaaaaatgttttaacgaactaactcaaaaaaaaaaaatagaaaacattaacagatttggaatgttaaattaaaaatattaatgaatgcaaaagaaagcagcaaaagggggatacaggaagaaaatacatgaggcatataaattggaagatataaatccaactatatc

SEQ ID NO: 416556 - DNA, 578 bp, Homo sapiens
tatctccctcttaaaataattaatatggtgttatctctccttgcctggacttagattaatcaagatctactccagtgtagctctagagcccttctgagaatcagtatgtccagtgttagraacagatgggagcatgagaggtgacttctgtaaaatttttgtaattacagatgcctgaaaaacaaacacatatagtaaatatatagatcttatataagttgaattatgcatatctggaacttttttctcacttagcacataactttttttaacttaccacctttttgataaacaattcaacagattaaaaaaaacaagaacagaaaatgggtgttctacaatcagagagagctaaatttctttatgctcatgaggtgctttttatacttttattttctgaattcttgttttatctcataattgcattttttaggattctcacttactggatgtgagaaacttaaggataatgatttatctttgtatctttatgcctagcataacacatatacaatttaggggctcaaaacatgttgagaaacataaattaaatttagtttagcacattataagttgtt

SEQ ID NO: 416557 - DNA, 591 bp, Homo sapiens
ggcccactgggataattttcattcacacttgtctttcaaggacatacttctgattgagcatctaatgctgcagtagtcccttgtaagtcggatttatcatattgacaaaagacctaagatatttcttcttctatcaatttgttataaggtactgtgcaaaaaaggtcataggaaaaggaatggcaatgcatcaagagatggtatcaaaggaatctgagccacctgctcattcaatttacttgtattttatttacctgcctgagcttgatctcttatgcatcatctgcagtgaygatttatggcttctgggcatgccctgccttataatttggttggtaaaaaaaacactcaactcaaatagtttggtcaagccacatgatctcttgatgtcttataatcaaatttttaaatttatatagggcccaatagcaagtcagaaagtgtttctcataaggaaataaaaaagtatattatccgtgaaaaagggaaagctgtttcttcaaaacacaaggagtctcctgtgtcttattagacttcagcagatttgtcacataccttttatatatcaatgtaactgctgtaaggaagttt

SEQ ID NO: 416558 - DNA, 533 bp, Homo sapiens
ctgactagtgccgctaggaagtgctgctcccaccgaaacacactgagatttagattaaaccaacataatttgaacataacttcggagagaaaatgccaaatgtgggcatggaaaagactcacatgctgaagctgaagcgggatgaagctgagaactctgcatgggataattgaacactagagctggttccagggcccaaagggtgcctggaaaaggggctacggtaaagaaaacagcgtggtactggtacaaaaacagatacataggccaattaacagaataaaaaagctcaaaaataaagccatctgatttttgacaaggccaacaaaaaagcaatggggaagggactctcttttcaataaatgatgctgggatagctggctagccatatgcagaagattaaacctggaccctacctttcagcataaacaaaaaataatccaaagccacgaaagatttaaatggaagatctcaaactataaaaattgtagaggacaacytaagaattattctttttgacatcaatgcattag

SEQ ID NO: 416559 - DNA, 608 bp, Homo sapiens
aaaatcctggactgacttctaccaaatcacaaataaattacatatacagttttatttgtctgcatcccccacaaaactttaaactttatgtgggtaagaattgcatctttgatttctgtttcctactcacttaggaatacaacttggaacatataagtctcagtgtctgtgatgagtatataaaggaatacttaggtagttatattgaatcatgtakgttatagaaaaaatagcaagtaatatatctaaatgttaagtttagaaaatgatgtttagcaagatatttctgttgttaccatgtagatggaggcattttatgaataatttttcctcatgcatttgttcatgcaagatttgttttctctctctctttcctgcatgtggattttctaagccaattataagtgccactacttttgttgagctatcactatggccagttggaaagagctgatgctttcctgcatccctttattattttatttgtgtttgtgttatatcatagtttctatcatgattgttttatagcttaccagaggatagcatagtggttcagaggcagttgagcatgaatgattagatactaccactccgaagtcaaactaacc

SEQ ID NO: 416560 - DNA, 535 bp, Homo sapiens
aattactgtttgacagagatcattaatttgatttgccaatttttgatctatttggctttgggaattccaaagcttagaagaatttttctgccaactatccacaaagcctgcagtttgaatagaagagtgcaaagcaacagcagcagcagcagtagctgtaacagctataaggcccaggatcacagctattaaagtaaatatgaatctctttgatctattaagtattccttttagtacttcagtgataatatgtatggaaggagaggcctcccaaggtctattgagggaaacaggtatccaaattccttctcaggacttaaccagtaaaatgttattatctttattaaaggtagaattaatgcaggtaaaaaagatgaccattgaggcatgatatggtttgagagtcaggtaggatattaattttttccactgccaacctaaaaggaggtttaacacaactctgmaatgggactgtccgattagaggtcatggctacaacaaatcgaagttttttactatgggtttctgttttatt

SEQ ID NO: 416561 - DNA, 535 bp, Homo sapiens
aattactgtttgacagagatcattaatttgatttgccaatttttgatctatttggctttgggaattccaaagcttagaagaatttttctgccaactatccacaaagcctgcagtttgaatagaagagtgcaaagcaacagcagcagcagcagtagctgtaacagctataaggcccaggatcacagctattaaagtaaatatgaatctctttgatctattaagtattccttttagtacttcagtgataatatgtatggaaggagaggcctcccaaggtctattgagggaaacaggtatccaaattccttctcaggacttaaccagtaaaatgttattatctttattaaaggtagaattaatgcaggtaaaaaagatgaccattgaggcatgatatggtttgagagtcaggtaggatattaattttttccactgccaacctaaaaggaggtttaacacaactctgcaatgggactgtccgattagaggtcatggctmcaacaaatcgaagttttttactatgggtttctgttttatt

SEQ ID NO: 416562 - DNA, 535 bp, Homo sapiens
aattactgtttgacagagatcattaatttgatttgccaatttttgatctatttggctttgggaattccaaagcttagaagaatttttctgccaactatccacaaagcctgcagtttgaatagaagagtgcaaagcaacagcagcagcagcagtagctgtaacagctataaggcccaggatcacagctattaaagtaaatatgaatctctttgatctattaagtattccttttagtacttcagtgataatatgtatggaaggagaggcctcccaaggtctattgagggaaacaggtatccaaattccttctcaggacttaaccagtaaaatgttattatctttattaaaggtagaattaatgcaggtaaaaaagatgaccattgaggcatgatatggtttgagagtcaggtaggatattaattttttccactgccaacctaaaaggaggtttaacacaactctgcaatgggactgtccgattagaggtcatggctacaacaaatygaagttttttactatgggtttctgttttatt

SEQ ID NO: 416563 - DNA, 502 bp, Homo sapiens
ttttacttgttaggatgaaatagctacttccaagcctcttaaatactggaccagaaattgcctacattagactttggaattgctggcctccatagtcacatgagccaattccttataatacatttttttctgggttggtgtggtggctcatgcctgtaatttcagcgttttgggaggctgaagcaggtggatcacttgaggtcaagagttcaagaccagcctggtcaacatgactaaaccctatctctactaaaaatacaaagaaattagctgggcgtgatggtgcacacctgtagtcctagctattygggaggctgaggcaggagaattgtttgaacccagtaggcagaggttgcagtgagccgagatcacaccactgcactccagcccaggcaacagaagagtgagactccatctcaaaataaataaataaatttatataaatatgttatatgtaaaacaaataaatatattttatatatatgttatgtttgttcagttt

SEQ ID NO: 416564 - DNA, 632 bp, Homo sapiens
taaatgcttataaataaatttgtcatattatttagaatctaaaattatattaaactaaataaaagatggtcattaaatgtctgggtcatttccaatgttttaaaaattatrggaaatcattttttaaatgtgttcttatttaaaggaaaataatttttgcctaattcaaaagttatttaaagattacttatgaaacaaagtaaaaggaaccaataaataagagagatgcaaagaaagttataaatataaagaggcgtttcagctagtaaaggttaaaaggaaaataattgtgtatgggaaataatcttgtaagataatttttgtcctaaagtaaaataattggttatttaggagagagggatgcttaggataaaacaggaagtctgagtataatgcaaatggtttgtgtaagtcatgatcagatttgtacaaagagaatttatgagaaagaaaactttaaatgaacacattggctataataaaaggaaattatttataaaagtgtttctaaatattgggctttgatattaaaaatacactaacacactaaagaattggtaggaacaccaaaattgtcttatttatttgctcgtaataaaattacaagagatttaatttattttaaccccaaa

SEQ ID NO: 416565 - DNA, 632 bp, Homo sapiens
taaatgcttataaataaatttgtcatattatttagaatctaaaattatattaaactaaataaaagatggtcattaaatgtctgggtcatttccaatgttttaaaaattataggaaatcattttttaaatrtgttcttatttaaaggaaaataatttttgcctaattcaaaagttatttaaagattacttatgaaacaaagtaaaaggaaccaataaataagagagatgcaaagaaagttataaatataaagaggcgtttcagctagtaaaggttaaaaggaaaataattgtgtatgggaaataatcttgtaagataatttttgtcctaaagtaaaataattggttatttaggagagagggatgcttaggataaaacaggaagtctgagtataatgcaaatggtttgtgtaagtcatgatcagatttgtacaaagagaatttatgagaaagaaaactttaaatgaacacattggctataataaaaggaaattatttataaaagtgtttctaaatattgggctttgatattaaaaatacactaacacactaaagaattggtaggaacaccaaaattgtcttatttatttgctcgtaataaaattacaagagatttaatttattttaaccccaaa

SEQ ID NO: 416566 - DNA, 632 bp, Homo sapiens
taaatgcttataaataaatttgtcatattatttagaatctaaaattatattaaactaaataaaagatggtcattaaatgtctgggtcatttccaatgttttaaaaattataggaaatcattttttaaatgtgttcttatttaaaggaaaataatttttgcctaattcaaaagttatttaaagattacttatgaaacaaagtaaaaggaaccaataaataagagagatgcaaagaaagttataaatataaagaggcgtttcagctagtaaaggttaaaaggaaaataattgtgtatgggaaataatcttgtaagataatttttgtcctaaagtaaaataattggttatttaggagagagggatgcttaggataaaacaggaagtctgagtataatgcaaatggtttgtgtaagtcatgatcagatttgtacaaagagaatttatgagaaagaaaactttaaatgawcacattggctataataaaaggaaattatttataaaagtgtttctaaatattgggctttgatattaaaaatacactaacacactaaagaattggtaggaacaccaaaattgtcttatttatttgctcgtaataaaattacaagagatttaatttattttaaccccaaa

SEQ ID NO: 416567 - DNA, 632 bp, Homo sapiens
taaatgcttataaataaatttgtcatattatttagaatctaaaattatattaaactaaataaaagatggtcattaaatgtctgggtcatttccaatgttttaaaaattataggaaatcattttttaaatgtgttcttatttaaaggaaaataatttttgcctaattcaaaagttatttaaagattacttatgaaacaaagtaaaaggaaccaataaataagagagatgcaaagaaagttataaatataaagaggcgtttcagctagtaaaggttaaaaggaaaataattgtgtatgggaaataatcttgtaagataatttttgtcctaaagtaaaataattggttatttaggagagagggatgcttaggataaaacaggaagtctgagtataatgcaaatggtttgtgtaagtcatgatcagatttgtacaaagagaatttatgagaaagaaaactttaaatgaacacattggctataataaaaggaaattatttataaaagtgtttctaaatattgggctttgatattaaaaatacactaacacactaaagaattggtaggaacaccaaaattgtcttatttatttgctcrtaataaaattacaagagatttaatttattttaaccccaaa

SEQ ID NO: 416568 - DNA, 540 bp, Homo sapiens
tattggggaatccaaataaagcaaatgaattatgatcacttgctcttctttggagcaatgcctaccagaacatatttcagtaattcagaaacatattgattatgtcattatgcaatatgtttttttctggtgtgaataagttaatgggtcattaacaatctgtcattgatgcattcttattcattcaaccaaattcagctccattgtatctttcctgacycactcaggcagagatcaatgaaccttccatttgctctaattgcacctcatatatgataccctttagcagaggtaaatctgttgaaatgtccacctccaaaatcagaggtgggcagctcatttgaatcttctgtggctgataagggaggaggagcaccatcattgatagagtatattaccataaaaaattaaaatatagtaatcttccatgttgctctgtatggtaacttttgttcaattagtttcatggcttccctagagcttccaatcaaatgtggcataaactaatagtgtaagctcatatgttcaaaatataagact

SEQ ID NO: 416569 - DNA, 636 bp, Homo sapiens
gtatttgagtgactgagctatcaagatagatggtggttgccagacgaagccatgattaaaagtaagacccaagagttggttcaattattgttaatttaaaatctagttgtggccattagattgggatgactggggtgcggtggaagacaaatgtgttagagaggagaaagttgcacagaactatggagaacagatcatctttttatactaaawgatcttgagtaatgaaaatgttaccaaaacaccaggggcagtctaggtcctgctgatcactgtgcataaagccaattactgagatgaagagtattgccaaggacgaaggccttaattgggtgctgcttctaaggagatgggagctcagtctcaaatccatctccctgaccaactaaaagtaggggtttatataatagaaaagaaatgtaacaatgtgtaagaaaacagtaactagggaggaacaaggaagcaatcaggatgaataagggatcctggcatcttattatctggaaatggttatctggtgagtttcagttctttgctacttttttttttttgagaggcctgaggtgatttcctgatgaaagaactcagataaaacaaatacaagtttcatgctttaagaccagaagggtcaattcc

SEQ ID NO: 416570 - DNA, 579 bp, Homo sapiens
attacctcttcccaggtccctcccacaacatgtggggattatagaagctacaattcaagatgagatttgggtggggacacagtcaaactatattgcatactaaagaagaaactatgtatatcctttaagttgccaatatattgayatacctgtttgtttattgacttgtcactgttcacatattcaagatgcttggaaataacactcctttaaccatctgaggtatttacaagtttggcttaataaaaagatcacacagcagagtaaagaggaagggaacatgtacaatggcattcatcagaagaattgtagatttcatattccctttcttggtagcatgaggtattagctatagaaacaaaattctgtgtggaaaatcacccatagaaatataaggaacatacaataatgttttagctcttgagccagactgaggtcagttgacctaaattttgtgataatgtgcatctctactggtatgaattgggctcatatttgtttgtgtctagctatggttcatttatctagcttgagctcagctgtgggtggctctgcttcaagggtccctaatccacacct

SEQ ID NO: 416571 - DNA, 579 bp, Homo sapiens
attacctcttcccaggtccctcccacaacatgtggggattatagaagctacaattcaagatgagatttgggtggggacacagtcaaactatattgcatactaaagaagaaactatgtatatcctttaagttgccaatatattgacatacctgtttgtttattgacttgtcactgttcacatattcaagatgcttggaaataacactcctttaaccatctgaggtatttacaagtttggcttaataaaaagatcacacagcagagtaaagaggaagggaacatgtacaatggcattcatcagaagaattgtagatttcatattccctttcttggtagcatgaggtattagctatagaaacaaaattctgtgtggaaaatcacccatagaaatataaggaacatacaataatgttttagctcttgagycagactgaggtcagttgacctaaattttgtgataatgtgcatctctactggtatgaattgggctcatatttgtttgtgtctagctatggttcatttatctagcttgagctcagctgtgggtggctctgcttcaagggtccctaatccacacct

SEQ ID NO: 416572 - DNA, 573 bp, Homo sapiens
ataaactcttaactctccttgtccttattataaatcaatgcttcctcaygatgcagaacaacgtctggcacatagaaggcattcagaaaaattttgctcaatgaattgaccccaggtttgaataatttcaggaatgtgcaatatgtaagtgtgtttctaactctactcccctcttttttcaaaataaggaaaatagaaaataagatgggaaaagaatccgtcttcgtacaacacattcctggcaaaagatgtggctcagaactcaagacacctcactcccagttcattgctgtattcttcccaatttcctagttgtctgagcaaccttatgtattttctcccagacaactttgagccttatttaatgaacttccttccactacaatagttgaagaaagatgtgtatcaagaaatatttcaatttttaatttataaacagaactacccccaattttaagacacttatatggtataagccatgcagacagattcattgtaataacagatttatttatatatgcaaatcattaaaataacgtaatttttctcaactgagagatgattgagcagact

SEQ ID NO: 416573 - DNA, 573 bp, Homo sapiens
ataaactcttaactctccttgtccttattataaatcaatgcttcctcacgatgcagaacaacgtctggcacatagaaggcattcagaaaaattttgctcaatgaattgaccccakgtttgaataatttcaggaatgtgcaatatgtaagtgtgtttctaactctactcccctcttttttcaaaataaggaaaatagaaaataagatgggaaaagaatccgtcttcgtacaacacattcctggcaaaagatgtggctcagaactcaagacacctcactcccagttcattgctgtattcttcccaatttcctagttgtctgagcaaccttatgtattttctcccagacaactttgagccttatttaatgaacttccttccactacaatagttgaagaaagatgtgtatcaagaaatatttcaatttttaatttataaacagaactacccccaattttaagacacttatatggtataagccatgcagacagattcattgtaataacagatttatttatatatgcaaatcattaaaataacgtaatttttctcaactgagagatgattgagcagact

SEQ ID NO: 416574 - DNA, 573 bp, Homo sapiens
ataaactcttaactctccttgtccttattataaatcaatgcttcctcacgatgcagaacaacgtctggcacatagaaggcattcagaaaaattttgctcaatgaattgaccccaggtttgaataatttcaggaatgtgcaatatgtaagtgtgtttctaactctactcccctcttttttcaaaataaggaaaatagaaaataagatgggaaaagaatccgtcttcgtacaacacattcctggcaaaagatgtggctcagaactcaagmcacctcactcccagttcattgctgtattcttcccaatttcctagttgtctgagcaaccttatgtattttctcccagacaactttgagccttatttaatgaacttccttccactacaatagttgaagaaagatgtgtatcaagaaatatttcaatttttaatttataaacagaactacccccaattttaagacacttatatggtataagccatgcagacagattcattgtaataacagatttatttatatatgcaaatcattaaaataacgtaatttttctcaactgagagatgattgagcagact

SEQ ID NO: 416575 - DNA, 573 bp, Homo sapiens
ataaactcttaactctccttgtccttattataaatcaatgcttcctcacgatgcagaacaacgtctggcacatagaaggcattcagaaaaattttgctcaatgaattgaccccaggtttgaataatttcaggaatgtgcaatatgtaagtgtgtttctaactctactcccctcttttttcaaaataaggaaaatagaaaataagatgggaaaagaatccgtcttcgtacaacacattcctggcaaaagatgtggctcagaactcaagacacctcactcccagttcattgctgtattcttcccaatttcctagttgtctgagcaaccttatgtattttctcccagacaactttgagccttatttaatgaacttccttccactacaatagttgaagaaagatgtgtatcaagaaatatttcaatttttaatttataaacagaactacccccaattttaagacacttatatggtataagccatgcagacagattcattgtaataacagatttatttatatatgcaaatcattaaaataaygtaatttttctcaactgagagatgattgagcagact

SEQ ID NO: 416576 - DNA, 502 bp, Homo sapiens
aagtcgctaaattgacaccttctctccttgaaagggaggacgctatgatgagaaacatactttccaaatcttaccatcagggcctcctcccatgtggtgctaccccactgcatatctatgtaatacatggcctgttctctgatccagagacatcatcctttctgttagaatttctgtctatctatgattaacaaacatgttaatttaccataactcacttatatggaagaaaacagctttttcttagatatacctggctttatatatgaaagcttttactattttgtatctttgtttgctgtttctaaaattctctgttatatatctaaataatacttatttatataagtgactatggtcaagaaccttcatgatctgaggtctttgstctttctatttgtcctacttcttgaaagtatgccaacaattttttttctatccagtctatcctgtctttggcttaatttttcttcaaaactactgttcttccttcttgtttcca

SEQ ID NO: 416577 - DNA, 555 bp, Homo sapiens
gtaattctaatatgatttaatgtatattataaataattataattgttatgtaaaattattgtatgccacaaaagtaccagattcctagtcaattacagctttaacagtggctatcctaagacttttgtcatccacaggcaattttgtctttttttgatctgtctcaaaaggcagtttttaatcagagatagggatctgatggggtattcttgaatgcacctctctgataactttaaaattgttgttactggaatagaggaaaaaaacaaacttctggggctctcatggrgagttgatgtattaaccattgctaatccttttgtttccagagtcaaaaaaacttagttctttttagctatttacatattttagcaagtgagtaaagtctcctgggagataaatttggagcatattgctttcattctactttatttctccagcatttagaacctatttgggagtaatctcaacttacggcagtatagttattagcatcagtgcaataagaatacattttcattcataacaggacacaattggagaaactgttttctt

SEQ ID NO: 416578 - DNA, 555 bp, Homo sapiens
gtaattctaatatgatttaatgtatattataaataattataattgttatgtaaaattattgtatgccacaaaagtaccagattcctagtcaattacagctttaacagtggctatcctaagacttttgtcatccacaggcaattttgtctttttttgatctgtctcaaaaggcagtttttaatcagagatagggatctgatggggtattcttgaatgcacctctctgataactttaaaattgttgttactggaatagaggaaaaaaacaaacttctggggctctcatggggagttgatgtattaaccattgctaatccttttgtttycagagtcaaaaaaacttagttctttttagctatttacatattttagcaagtgagtaaagtctcctgggagataaatttggagcatattgctttcattctactttatttctccagcatttagaacctatttgggagtaatctcaacttacggcagtatagttattagcatcagtgcaataagaatacattttcattcataacaggacacaattggagaaactgttttctt

SEQ ID NO: 416579 - DNA, 643 bp, Homo sapiens
atacatgtacatatgcatgttacatatcaaaaaagttgtaatgtaggtaataagataacccataatcactcaaataataacttgawtttagctttagttattaaaaatcaaatatagtatatgatgctagtaactttgcataaggataaataacttacaactaaggagataaggaagatttttctcattctaatttggattagacactagatagacattaaagacataattaattctatgtttagaaggtagggaaaacagagttctaggtagacaaattgagcaaagccatatacaacagtgaaaatataaaaaagttttttggaacacagtgagtatactttcttcattgccggctcttctaacatcagcagaggatggggtgtgatgtttttaaataaaaatagtatgaatgagactaaaaaattgttttgtttctgtctttttaagttgtattttattttcttttagattcagggggttcagatgcaggtttgctacatgagtacattgtgcaatggtgaggtttgggcttccggtgtacccatcatccaaatagtgaacattgttcccgatggttttcaaactgattatagaatgtttgaaatgcagcctaaaattttggctttatttctagaattat

SEQ ID NO: 416580 - DNA, 526 bp, Homo sapiens
ttacaccaaaattcctgtggagatacagaaaaagtcacaaaacccatgaagttatgtaccattatgtaaaggggatgaagttcttagagtattcactgtgaaatgaaatgttaatgaggctagctggccttatccagtttttccttaamtcattttataactgagcttttaagtttgaaactgactgcctgatttctgtggaaattaatttcttccattcctgtgctgctgtataggttatttctatttcccttgaatttattctttcttctctgcagtagcgttagtttggtttgtatctatatcactaatggactcctttaagttgaggaagtatatattacttgtattttctgaagcactcataaacacttgaaaatgattgttcaattattgaataaaattttcttatcagaatggcataataatagagaacaattaaataatgttttgcaatgcttagtgattagtgagctgcttcatgtaatagaataaaataaaataggcaatgaatggaaactgcatt

SEQ ID NO: 416581 - DNA, 627 bp, Homo sapiens
tctcttagattataacttatcacatactaatttctcacagttttaaagacctgtatttctctctaaactgaaagcacattaaggaaatgaaaaagttattacttctcagctacctaattatgacaaatttcacaaatagaatatatatctgtattttactatcaagtatgctgtccagtattcaagaataataataattatttagaaaaaagaaatctgtgtgtacagtactgaacatatttacatttcattacctttatttaaaaaatctcatatgatataatctcatcaaattagtttgaaataatgtaacatataaacctttagtattttgtatgatttttgatatttaatatgaaatgtaatataaatgtatatataatattttgatgaggtgatctataaaatttgtttgacacataccactatcttagtagtcctattttaaagagaaatatttttaaaatctattttagattgactagtcaattataaacctaagtataaatttttattataacaaaagtttaagaatgaccaaacrgtgaatggttttcatatgagagtatatctgtctatatatatataacatctgtctatatatatatagatagtacatttgtctat

SEQ ID NO: 416582 - DNA, 606 bp, Homo sapiens
tagcgcaatctaatgttggaacaatgaactaccttgagctaatagttcagttgatatccaacagatgtcaagtgccactatacttccttgatatttaaactatgccacagcccccctctaagtttgctgcaaagtcttgggtgcctaggacacagtttgggartcatgactctattcttttcccatttttaattccattttctcttgtgcaaaataaaagcatgttctttaagtatctagtaactacctctgttaaacctaaggttatgtagaatataacacttactgttatgtcataactctgagctttcactgctagcaatcacaaggttgtgtattctcttttcattctttatctgcggtgaatatagtagacgagatgacctccagtggccaggtatctcaaacatatgcctaagagagcacaataaaatattttgctttgtgttatatttaaaccagaatacagttcttaactatgttactttttaacagataattagatcaagactgaaagaagcacaaaaatacgtgtaatttggtatacttcttactaatggttaaccattttcaatcgtgtcttaatctaatactgatttttctgac

SEQ ID NO: 416583 - DNA, 522 bp, Homo sapiens
gcaaatcttcaagaacagacccggtgtgcactagtgttctaggctggagtccagcagcagttcagctgcagatgaagcaaatcagctggttggtgctgacagccagagacccaaggactttcctggtgctacacctctctggaagtttgaagatgttgggacaggtttgccttctgaaatgtgcaaatgtcaccagccgggagtggcagatgccaggaggcatctgcaaacagatctccatctggccatgggctaggcttcctgggacacagattagartagtttgaaacaaaggggcggaagcaccggctaagcttttcacatattgttatggtctctgggtcacttcctgcctttggaatttatttcctttccaggttcagcaaaattcaatgaatgacaagaaagagtttggggtttgtctttgcctctggcccagtcgaggggcggctctgcctctgtgaacttgtacctctgcagtggttgcattctcccgcgctgtttgttcacactgagcccagc

SEQ ID NO: 416584 - DNA, 605 bp, Homo sapiens
tatgcttaaatatttcagaaatgtcaaattgttataaagtttctaaatgcttgcttccattttctatatttagctttagcttgtctatgattggtaataaaaggtttgtggaacacactttaagtagcactgatctcataaaaatggaaatatatgcatatacctatctatatttatatctatgtacatacatttatttacttttaacttgaaactaattttaaattgatagaaaagttgcaaaactagtacagagtattcccatatattgycttcctcaagttccccagttttaatatctgtataactatagtataattttcaaaactaagaaacttaacgttagtataatactattaactaaactaaaatcctgtattaatctgttctcacattgctataaagaactacctgagactaggtataaaggaaagaggtttaattgattcacagttctgcatgctatataggaagcatggctggggaggcctcaggaaacttaacaatcatgtcagaaggtgaaggggaagcaggcacatcttacatggctggagaagggggggaagaaagagtggagggggaggtgctacacacttttaaacaaa

SEQ ID NO: 416585 - DNA, 549 bp, Homo sapiens
tgaacaacttgtagcgttctgcaagtatgctgtatgtttatgtgtataagtgccaacaggtctgagaaaaagaagatactgataaaagaaactgcttaactattctcatctctatgattgcatagaaatcagttatttgtaatggagttttgcctactcagtataaacaaggaaggaaaagtcttcctgtattggcctactgggtctaggcttctgaagaccaccagtggccattttatcacctgtaaatgttatcaagatagcatgtgagggctgcaaccatggggatttgtaagctgctggctattttttttttttttaacaatagtgatggtttaccaacattyattctttctgaaagttagctatacaaggctgttatttatttataagtgtaagataggaaaagagatggaaacagtgccttaaaccagatggagcatggacagatgctggccaagatatccttccactagtggcccttgcaggctaagcattcagcctccagggcaaaggcaggcaattatgttaaatcacgcaaaacagatt

SEQ ID NO: 416586 - DNA, 579 bp, Homo sapiens
ctgtggtcctcaggaagctgggccctaggaaataactttaacattcaccagcagaggaagctgtcaatattgcactgtttgcttaacttgtaacattgatcttctgtggctctgggcataacataataaggaaaataccacaacttactacagcaagtcaatgggctgataagataaacgctgttatgtttcaaaattgtgccaagtttatgttgataaagtgactttcttctgggaatctaaaaaacagtgcctatggttctaatcctgtatgactttaactttgtcttatatttacataagacaggaaattggcccaagatgacctcattcatctttataactcttctcctgaaggaatttatagtgagggtagtgttattattttttcactacagaggtgtagagagcttaagctttcagtcaaactaacaaattcagtattggttytagaaccaagagaaaaggaataggtctgcggctacggctacattaataataacaacaaacaaactttaaaaactgctattgtatggtaagaatgaggacatttttaaaatcaaagacagttgagtctca

SEQ ID NO: 416587 - DNA, 619 bp, Homo sapiens
tttgtgaaaggtataaatatttttccttctctagtacacagttaccttggtggatggatgctggtccttttggggaaggggtagaggaagattttcataggttcttgtgatgtccttcctcaaaggtcctccctttcattcactgaattgagagtgtgggtattgggagataggtcctgactctctagtgataatggaagtcaagtataatgatttaattctagattcactaggcctagaattttttcaattatacaggtcagctatgtcttttgcaggctgctcatctagttcatttttaggcatactgtgatcaattagctaccaccaaaagatccctgcaagtcaagttattttgctattacaataatcatagctactaggtttctggcagttaaatcccgctatttggtgtctgcccctctgggaacccataaactccactgaaaacagggaactaattccaatagcagtatctcccaccttcctctccagagtacagaataaattcatcaaagcattattcaaggattcttgttctcgccrcatcagtgtttttcttgatgacttggaaaaggcagtgttctctaggcttactttgggtatatgtgagatgttg

SEQ ID NO: 416588 - DNA, 469 bp, Homo sapiens
ctagattgaaccaggaagaaatagaaaacctgaacacaccaataacaagcaacaaaattgaaacagtaataaaaagtcccccaacaacaacaaaaaagcccaggaccagagtccaccaaacttatgctggtgaggatgtggagaaaagggaactcttatacattgtatggggatgtaaactagtataatgcaaccactgtggaaaacagtattgagagttctcaaaaaactaaaaatagctgggtgtggtggctcacacatgtaatcttaacatgagggggccgaggcaggaggattgctcgagcacaggagtttaagaccagcctggacaatatagtgagacctcayctctacacaaagtttttaaaaattagccaggcatggtggcatgtgcctatagtcccagctattcgggaggctgaggagggtggatcccttgagcccaggatgtcaaggctggagtgggcca

SEQ ID NO: 416589 - DNA, 550 bp, Homo sapiens
tctggtgactctttgcaacattttatggtggaacttcctggctctctctaggagatccatgatataaaataggactttgcttcaattgccattaacccaagagtcagtcactgcactgaaacaactctgaacaagaaccatctttcatatctatttgtgtatacttttctaactcacatgttccaggatacagacaggcctaaagaattccgaagacatttccagccaactgagcagaacatttcccagattgccaagtgaagctgagagatattaggataatttgaacaaataatcatggacagatcattcctggctccctgagccatgatggtagaacatgatcattctgctttctccccagctcctcgtggcattcactcagtccagagtcccagcagttagataccaggctgataatgttgcgaatgctcccttttgtttaagttggaaataaattttggcaacttagtgagggtagttttcatgaaagagaaagcagaagctgtcttaaaagagtmtggggggaaaaaatgtcagtaagaaagat

SEQ ID NO: 416590 - DNA, 566 bp, Homo sapiens
gcagagaggtagactgagcagaaggtctcagttaacatggaaacatctcagacagtagctttctgttagaactgcctgagaagctgtaaaaactaccttattcctgagcctttttccagatcaattaaattaaaatctcttgggtggtgggaagtagcggagtcaaaacacaggtattttaaatgctctatcaggcgattctgaagcgtgaccttgatcaagaaccctgttctgggttgttcagttagttctttatttgaatagagtgagatggattcaacctgtgaaaaccaattcagtggataacagtggtttccaaacttctctacacattggaaccatctggggagcttcaaaagccacctatgcctgggccccaccccagagactgcaattaagtgggtctggggtgtagcctgggctacagaattttaaaaacatccctagatgattctartatatagacaggaaaggataaggtaaacatgatgcatgatggatgcactggataacaataagttaacttaagcataccatgagaatgaccctacggtctaagaagaatg

SEQ ID NO: 416591 - DNA, 609 bp, Homo sapiens
aatgaagagtaagaaatcatcttcaggacatggcagaaatgaactctaaaaggtttagtactatttagattttgtagtatagtaggatgtattgataaacacaaacagggtaacctgtttttaactctgaagtttgtggttgaacctgctttcctgtcatctagctgccagtctttgtaattctggacccttccttgagccatttttatcactttcaccttcatatgagggtttgcattaaaaacagaaccatattgcactaaataaaatccacccatagctcctggcatcaacctttcaatggaatgtgtgttttaatggttgtcagttttccctccattgggattcctatggcgttaattcccaaacacagaacggtatttaaatgctctcytaaggtccagaggaaaaaaagtgaaggagctattctcaggcacttgtggggcaagtaaggaggatgaagagtggaggaagaaggtgttttagttttgtttttaattccagttcaatcttactttgtatattcctctatagtcagaaacaatggaatgtcctagagccctttagtgaagaatgaagcaagataagaaattagtaaatgagtatagt

SEQ ID NO: 416592 - DNA, 609 bp, Homo sapiens
aatgaagagtaagaaatcatcttcaggacatggcagaaatgaactctaaaaggtttagtactatttagattttgtagtatagtaggatgtattgataaacacaaacagggtaacctgtttttaactctgaagtttgtggttgaacctgctttcctgtcatctagctgccagtctttgtaattctggacccttccttgagccatttttatcactttcaccttcatatgagggtttgcattaaaaacagaaccatattgcactaaataaaatccacccatagctcctggcatcaacctttcaatggaatgtgtgttttaatggttgtcagttttccctccattgggattcctatggcgttaattcccaaacacagaacggtatttaaatgctctcctaaggtccagaggaaaaaaagtgaaggagctattctcaggcacttgtggggcaagtaaggaggatgaagagtggaggaagaaggtgttttagttttgtttttaattccagttcaatcttactttgtatattcctctatagtcagaaacaayggaatgtcctagagccctttagtgaagaatgaagcaagataagaaattagtaaatgagtatagt

SEQ ID NO: 416593 - DNA, 566 bp, Homo sapiens
ggcttcaaaatgattacagaaattcagatctctagaagtatctatgcttctatagatgcagacttagatgtcaggttttgtttttttctggaaggcatgtcttatcattgattccaattaatttactaaaactttygagtcctcataaatattgtggctaagtcaattctctacagttctatatctgtatgatcatttgtttgtgtatgtatgagttttttgaggaatattaggaaaacacaagtccattagattttatttgtccttcatgacagagactgtgctttataataaaattggtcatcttttctcagttaccttctcttataaagttataatatctcagcttcatgcaaattctattacattagaagaatgaagagtattagcctgaaacttactacctatactagtgacctccttccagcttaataccaattcattacttgataccaggtaaattgtttcacaaacctacacaataccaatgataatacatttatctagctggtcatgaagtcataatataaaagatactgtcaaatgccttctgaaattaggatatt

SEQ ID NO: 416594 - DNA, 566 bp, Homo sapiens
ggcttcaaaatgattacagaaattcagatctctagaagtatctatgcttctatagatgcagacttagatgtcaggttttgtttttttctggaaggcatgtcttatcattgattccaattaatttactaaaacttttgagtcctcataaatattgtggctaagtcaattctctacagttctatatctgtatgatcatttgtttgtgtatrtatgagttttttgaggaatattaggaaaacacaagtccattagattttatttgtccttcatgacagagactgtgctttataataaaattggtcatcttttctcagttaccttctcttataaagttataatatctcagcttcatgcaaattctattacattagaagaatgaagagtattagcctgaaacttactacctatactagtgacctccttccagcttaataccaattcattacttgataccaggtaaattgtttcacaaacctacacaataccaatgataatacatttatctagctggtcatgaagtcataatataaaagatactgtcaaatgccttctgaaattaggatatt

SEQ ID NO: 416595 - DNA, 566 bp, Homo sapiens
ggcttcaaaatgattacagaaattcagatctctagaagtatctatgcttctatagatgcagacttagatgtcaggttttgtttttttctggaaggcatgtcttatcattgattccaattaatttactaaaacttttgagtcctcataaatattgtggctaagtcaattctctacagttctatatctgtatgatcatttgtttgtgtatgtatgagttttttgaggaatattaggaaaacacaagtccattagattttattygtccttcatgacagagactgtgctttataataaaattggtcatcttttctcagttaccttctcttataaagttataatatctcagcttcatgcaaattctattacattagaagaatgaagagtattagcctgaaacttactacctatactagtgacctccttccagcttaataccaattcattacttgataccaggtaaattgtttcacaaacctacacaataccaatgataatacatttatctagctggtcatgaagtcataatataaaagatactgtcaaatgccttctgaaattaggatatt

SEQ ID NO: 416596 - DNA, 566 bp, Homo sapiens
ggcttcaaaatgattacagaaattcagatctctagaagtatctatgcttctatagatgcagacttagatgtcaggttttgtttttttctggaaggcatgtcttatcattgattccaattaatttactaaaacttttgagtcctcataaatattgtggctaagtcaattctctacagttctatatctgtatgatcatttgtttgtgtatgtatgagttttttgaggaatattaggaaaacacaagtccattagattttatttgtccttcatgacagagactgtgctttataataaaattggtcatcttttctcagttaccttctcttataaagttataatatctcagcttcatgcaaattctattacattagaagaatgaagagtattagcctgaaacttactacctatactagtgacctccttccagcttaataccaattcattacttgataccargtaaattgtttcacaaacctacacaataccaatgataatacatttatctagctggtcatgaagtcataatataaaagatactgtcaaatgccttctgaaattaggatatt

SEQ ID NO: 416597 - DNA, 437 bp, Homo sapiens
tctaatttcttctaagtgatttacacaatttctggtggtcttacagaaatcagtcaacaccaggcagagaggggaccttgagtgtctgacggtgaagttatcataagctagttcccagagcagaacatgggtggtccctgtagcttggtcctcccaggagtctcggatgtaaggttagcagtcctgctgttaattctgtcacaaattttggacatattttcctttctcatatctggagaaagaatacatagtcaaggtcagtcctataaaaacaaataaccatgaggtaactctcaatatgtgggtttccctggttctggaattctgcttgcttcactgttaatgtyagcatttgtcagtcatttcccctccggttccctggttggaggtcaaagaaggtgaagccataggtttaacatacctcaaatttttgtggt

SEQ ID NO: 416598 - DNA, 494 bp, Homo sapiens
agatattggtttaaccaatcatttgttattattttaggtgagcttcatcattgcacctgggtcttagcttctctatttatmatgtgaagtggtagaatagagtagctgcaattccagtcattattttccctcagtcctggattatattcatatttcgtctttcctatggataaaggcccaaagacagaaggcaaacacgcatgctggacagactgaagtaaggaggttccccagggagctgggcatatggatcaactccgtattgcccagaattgttactatgctacgggctggctcaaaacaataacagtagtctcttgctctacttggtgagagcagccgagatttctaggcaaaaccaacaagctctgagtaaactaagacttttaatgaccccagagggagcttcgaaatttgcttgggaaccaaagtttaactttatcccagagacagatgtaggaagagggggagcaatgctttggggatctctagga

SEQ ID NO: 416599 - DNA, 494 bp, Homo sapiens
agatattggtttaaccaatcatttgttattattttaggtgagcttcatcattgcacctgggtcttagcttctctatttataatgtgaagtggtagaatagagtagctgcaattccagtcattattttccctcagtcctggattatattcatatttcgtctttcctatggataaaggcccaaagacagaaggcraacacgcatgctggacagactgaagtaaggaggttccccagggagctgggcatatggatcaactccgtattgcccagaattgttactatgctacgggctggctcaaaacaataacagtagtctcttgctctacttggtgagagcagccgagatttctaggcaaaaccaacaagctctgagtaaactaagacttttaatgaccccagagggagcttcgaaatttgcttgggaaccaaagtttaactttatcccagagacagatgtaggaagagggggagcaatgctttggggatctctagga

SEQ ID NO: 416600 - DNA, 494 bp, Homo sapiens
agatattggtttaaccaatcatttgttattattttaggtgagcttcatcattgcacctgggtcttagcttctctatttataatgtgaagtggtagaatagagtagctgcaattccagtcattattttccctcagtcctggattatattcatatttcgtctttcctatggataaaggcccaaagacagaaggcaaacacgcatgctggacagactgaagtaaggaggttccccagggagctgggcatatggatcaactccgtattgcccagaattgttactatgctacgggctggctcaaaacaataacagtagtctcttgctctactkggtgagagcagccgagatttctaggcaaaaccaacaagctctgagtaaactaagacttttaatgaccccagagggagcttcgaaatttgcttgggaaccaaagtttaactttatcccagagacagatgtaggaagagggggagcaatgctttggggatctctagga

SEQ ID NO: 416601 - DNA, 541 bp, Homo sapiens
agattttgagtgactaattctttgtttttattttgtttggggtgtatgagggaaatacttagtaaaaggggtatggaggtcatgcaaggatttgtctctttgcttctgtggaagaaacatggagctcaagttcctgggtacatgaagactgcttgataattcatattcctcccacttcttccttctcctttctcttccttcactttttatttagtaaatatttcttgaatgccttgagtctgaaagatggattagactcaaatcatgtctgcaaaaggtatgaatctgatagtagagacatctacaaaaatacacaaataataggtaaatgtaagaataargctgggtgtggtggctcacacctgtaatcccagcactttgggaggccaaggcaggaggattacttgagcccaagagtttgagaccaggctgggcaacaaaacaagaccccatctctacaaaaaaaaaaaaaagaaagaaaattaaaaaagaataaactacatgtgaatgtagtggagagaattattgtccatccagcgac

SEQ ID NO: 416602 - DNA, 620 bp, Homo sapiens
tgagttcataaacttgagactcgtaggcagagtgaagcatgtcttcattttagcttcagagtttaaaagttatcaatattcttttgagagtgggaggacctgagtcacagttttaaatgtcaactgtactagctgaggtcattaattccccttaccttcacgtttggccaaaaatgaagagaaaaatattttctgttttttttttaaataccacagtgttcaggttcttsatatgagtaaatcacttttgacggagaaaaaaagaatcattaatgttgactgtttccactagtcaaattacttgtttatcagactttagattataggaatctaaagaaaagagtaacatttcaaaataattttgataactgttcaagccttagtgagctcttctcaaacaagaaaagccacatccacttgaacacattgtaggaaaaattaggaagagtttttttatttattgcctttttgaaaaaaaaatcattgatttgtttagaactttgagcagtaacttactaatggatgaaaagatccataaagttttgaaagtgtctgtttttgcaaccagagattgcctaaacataaacttaatatatacttaaataaaataataacagagc

SEQ ID NO: 416603 - DNA, 542 bp, Homo sapiens
gtaaaatggtggctcttgggtatccagccctcaggatctccatttacctgttaaagtgaggatttggtgcctttcttctttagttgggccatcaagaaaacttcagaaatcaggcattctgtcttcctatacaataaatattttcagatcatattttcagataagagtcttcagcttccctcagctattcaacccaatgcatggaaagcctcagttgaataaacttttccaccatcccaggtgcctgaaactagtgtccttcttcacttctacattcaggacaaaatgaagtcaggtttttaaaacctcagtataaaagaccccctcacactggtccaatatgaagacttctcagcgtgaacactggggaattccttcctttcatctttcctaatagattgttgttttctaatcccatcccattctgctgtacctctccagcaagtcccttttcaccttagccaagctccctgcaatgctctycagttgtgaagccttgtattcactaaggaactacgtactcttagtctgctttgaaaggg

SEQ ID NO: 416604 - DNA, 580 bp, Homo sapiens
cctactcttcatattgagaaaacattcttgaatttccagttacatgaacaatagagttaatatacaaaatgcctgacaatgagttagtaattaaattattatacaaattatwagcttcaaaaacttaaatctatgtggaaaatgtaactcaaattgctataacaagcaatgcatgattataaatgatcaatgactcaactcagaaatatttaactttggccgggcgcagtggttcatgcctgtaatcccagcactttgggaggccaaggtgggtggatcacgaggtcaggagatcgagaccatcctggctaacatggtgaaatcccatctctactaaaaaaaatacaacaaattggctaggcatggtggcaggagcctgtagtcccagctacttgggaggctgaggcaggagaatggcctgaacccaggaggcggagcttgcagtgagctgagatatagccactgcactccagcctgggtgacagagcaagactctgtctcaaaaaaaaaagaaatatttaactttgtactaagatccctgttaaaacaagaatcaatccattcatatctcaaaaatcaa

SEQ ID NO: 416605 - DNA, 580 bp, Homo sapiens
cctactcttcatattgagaaaacattcttgaatttccagttacatgaacaatagagttaatatacaaaatgcctgacaatgagttagtaattaaattattatacaaattataagcttcaaaaacttaaatctatgtggaaaatgtaactcaaattgctataacaagcaatgcatgattataaatgatcaatgactyaactcagaaatatttaactttggccgggcgcagtggttcatgcctgtaatcccagcactttgggaggccaaggtgggtggatcacgaggtcaggagatcgagaccatcctggctaacatggtgaaatcccatctctactaaaaaaaatacaacaaattggctaggcatggtggcaggagcctgtagtcccagctacttgggaggctgaggcaggagaatggcctgaacccaggaggcggagcttgcagtgagctgagatatagccactgcactccagcctgggtgacagagcaagactctgtctcaaaaaaaaaagaaatatttaactttgtactaagatccctgttaaaacaagaatcaatccattcatatctcaaaaatcaa

SEQ ID NO: 416606 - DNA, 580 bp, Homo sapiens
cctactcttcatattgagaaaacattcttgaatttccagttacatgaacaatagagttaatatacaaaatgcctgacaatgagttagtaattaaattattatacaaattataagcttcaaaaacttaaatctatgtggaaaatgtaactcaaattgctataacaagcaatgcatgattataaatgatcaatgactcaactcagaaatatttaactttggccgggcgcagtggttcatgcctgtaatcccagcactttgggaggccraggtgggtggatcacgaggtcaggagatcgagaccatcctggctaacatggtgaaatcccatctctactaaaaaaaatacaacaaattggctaggcatggtggcaggagcctgtagtcccagctacttgggaggctgaggcaggagaatggcctgaacccaggaggcggagcttgcagtgagctgagatatagccactgcactccagcctgggtgacagagcaagactctgtctcaaaaaaaaaagaaatatttaactttgtactaagatccctgttaaaacaagaatcaatccattcatatctcaaaaatcaa

SEQ ID NO: 416607 - DNA, 580 bp, Homo sapiens
cctactcttcatattgagaaaacattcttgaatttccagttacatgaacaatagagttaatatacaaaatgcctgacaatgagttagtaattaaattattatacaaattataagcttcaaaaacttaaatctatgtggaaaatgtaactcaaattgctataacaagcaatgcatgattataaatgatcaatgactcaactcagaaatatttaactttggccgggcgcagtggttcatgcctgtaatcccagcactttgggaggccaaggtgggtggatcacgaggtcaggagatcgagaccatcctggctaacatggtgaaatcccatctctactaaaaaaaatacaacaaattggctaggcatggtggcaggagcctgtagtcccagctacttgggaggctgaggcaggagaatggcctgaacccaggaggcggagcttgcagtgagctgagatatagccactgcactccagcctgggygacagagcaagactctgtctcaaaaaaaaaagaaatatttaactttgtactaagatccctgttaaaacaagaatcaatccattcatatctcaaaaatcaa

SEQ ID NO: 416608 - DNA, 492 bp, Homo sapiens
ctggacccaagccaggggttcccagtctagtgatgagcagtgcgggatatgtgggacccatgggaggcacactggcctcctctccttgggtcaactgcagcttgttggaggtgtggataaggcgcttcaggtctttgttctggcattagycttaagctagtgaggaaagttccactacagtggcagtggtggagaggctttcagttgtccatggaggctctgcacagggagttactgagttgctattggttcaatagctctggcagggggtggttagagacccaggcctggaggtcctgcccagttagaagatacgggaatgggcatccatttaacagtctagccacctttccgtagggctgctgcagtatgctgggggtctgccccagtccctagtagcctcggaggtatcaccagcgaaggctgtgaaacaccagaggtggcagccttcccctctctctgggtgctctgtcccagcgaggtacaaacctg

SEQ ID NO: 416609 - DNA, 492 bp, Homo sapiens
ctggacccaagccaggggttcccagtctagtgatgagcagtgcgggatatgtgggacccatgggaggcacactggcctcctctccttgggtcaactgcagcttgttggaggtgtggataaggcgcttcaggtctttgttctggcattagtcttaagctartgaggaaagttccactacagtggcagtggtggagaggctttcagttgtccatggaggctctgcacagggagttactgagttgctattggttcaatagctctggcagggggtggttagagacccaggcctggaggtcctgcccagttagaagatacgggaatgggcatccatttaacagtctagccacctttccgtagggctgctgcagtatgctgggggtctgccccagtccctagtagcctcggaggtatcaccagcgaaggctgtgaaacaccagaggtggcagccttcccctctctctgggtgctctgtcccagcgaggtacaaacctg

SEQ ID NO: 416610 - DNA, 492 bp, Homo sapiens
ctggacccaagccaggggttcccagtctagtgatgagcagtgcgggatatgtgggacccatgggaggcacactggcctcctctccttgggtcaactgcagcttgttggaggtgtggataaggcgcttcaggtctttgttctggcattagtcttaagctagtgaggaaagttccactacagtggcagtggtggagaggctttcagttgtccatggaggctctgcacagggagttactgagttgctattggttcaatagctctggcagggggtggttagagacccaggcctggaggtcctgcccagttagaagatacgggaatgggcatccatttaacagtctagccacytttccgtagggctgctgcagtatgctgggggtctgccccagtccctagtagcctcggaggtatcaccagcgaaggctgtgaaacaccagaggtggcagccttcccctctctctgggtgctctgtcccagcgaggtacaaacctg

SEQ ID NO: 416611 - DNA, 543 bp, Homo sapiens
accaacaactcttatcaaataaattcagtcagggctcaataattcattctaagataaatactatactctagtactcaagtgatctcatctaccaagtcctctgcctactttccaactttggcaagcgtcaactttaagatctgcgtctctccttcatggtttcattcatgttaacatcgggcaaggcaaaacatatttatttcaaccattggatgtgaatcttacacagttagttaacctctttgcctctctgtgacttagtgtggtccttttaaaatggaggaaatgacaccccaggaggctttgtgataattaaatgaagaaatgtatataaaacacattccycagaaccttatacgtcgtaagcagagaatcgatatcttctcttagtggaagtattaaattaggtgattatgtggtaagaaattggcctcatcttttcataataatgtagtatgtatacaagaatgttgtggaaagtagctaggcagccttggaacacggtgaaggtcaagtatatgaccaatttagctgtgagcgatg

SEQ ID NO: 416612 - DNA, 543 bp, Homo sapiens
accaacaactcttatcaaataaattcagtcagggctcaataattcattctaagataaatactatactctagtactcaagtgatctcatctaccaagtcctctgcctactttccaactttggcaagcgtcaactttaagatctgcgtctctccttcatggtttcattcatgttaacatcgggcaaggcaaaacatatttatttcaaccattggatgtgaatcttacacagttagttaacctctttgcctctctgtgacttagtgtggtccttttaaaatggaggaaatgacaccccaggaggctttgtgataattaaatgaagaaatgtatataaaacacattccccagaaccttatacgtsgtaagcagagaatcgatatcttctcttagtggaagtattaaattaggtgattatgtggtaagaaattggcctcatcttttcataataatgtagtatgtatacaagaatgttgtggaaagtagctaggcagccttggaacacggtgaaggtcaagtatatgaccaatttagctgtgagcgatg

SEQ ID NO: 416613 - DNA, 523 bp, Homo sapiens
gtacatttattatcactcagttataaatagtttctgatttttattgaggttttaactttatcccatgggttacttaagagaagattaattaattttcattgtctctatcctccattgtttctgctaagtcaactgccagcattattggtgatttttgagaataatgttttagttttgtttggtttgttccagtaatcttttaaggtttttttcctttaggttttaatatgttttccatgawagatgtacgtaatttcttgtttctttgtcttgatcaattttggaaaatgtctatttgtattacttcatgattctagaaaatatcataggacactattataaacttgtgttaagaaacaattttggatatgatagatgtctgggttacacgtcttggatcaatttaccatatcttgaatttatgcttttttttctgttttaatgcttttattttctatcttgtttcaatctcaatactgcaatttatcttttagttaactactcttttctttagcactttgta

SEQ ID NO: 416614 - DNA, 613 bp, Homo sapiens
ctttgttaactttgtctccaactttgttgtgtcatcaacatccccttcttcaaagtattgagcattatgattaaacggagccccaaagtgcaacaattccrtattgccaataaaggcctcttttcccgaacacatctcccctgtaacttctggttaaagcctgaaatgtcaggcacaaaattcttctttccacattgaggaggacagtgcagggaatcaccggggacaggagtttgaaagggtgcagtggtgtgctagtaagtatttaagagtcagttctcaatcaaacaaccaatcagtcaatcaatattttttttttaaataatccctgactgaagaaaagccctgtctgtatgtgagtactcccacttgtctgattccaagctaccaatgtaccctcacagagactggagttgggaagcatgctttctgggagccctcagagctggctccagcaacagaggctggctgcacctcttctcaagcatgttccagtatcatttcacgtaactcctctgagccttagtcttactacttttaaaaatgaggaaaatgccagatcattaagtcacttgtttaaggtgacacagaaaatatgtagtgtctggtatta

SEQ ID NO: 416615 - DNA, 634 bp, Homo sapiens
tcaatttctctgcatttaggtttcatcacttccaaaatgggacaatcatagagcccactttaaatgattcttgtgagggccaaatgagtgattttatgtaaactctgagctcagcccaagataaatactagtcagaggaaacacttgtattgcacttacatgttctaggaactgtgctaagtgctttacttatattatttctttcataaaacaaggcactgaattaatgcatgccatgaattcaataaaaattatatatagaagtaaacctattaggatatggaccaatgaattatatttgggattgttgttagtagttgtgtgtgtgtgtgtgtctgtgtgtgtgtgtgtatatatatatgtttactttcttaactttgctactatattttgtgagaaaggtattttataatctgaaaagactccatatttttgtttattcttggttttcatacgatagtcaagtcttcgtccctgattttgtgtcattttctatacccatctaccttgccactcaagtttctgctttttctcgaactgactactcattggcagtgaaaggtacctgggtggcagaatattctgaatrcgacttttcctgaatgcactctgttttatttgaaagcttactact

SEQ ID NO: 416616 - DNA, 584 bp, Homo sapiens
aaataaattttatttaatatctcaacattggtttgttttacaaaagtaaaattatatttttaaaatattttaaatttattttcaacaccaaatactagagataaaaacaaatccatttgattctaccaatattaagtaatcttaaactcatttgaatccagattctttagattsgttttaaactaacaataaattggcacaagcttaaactggcaataaataagtacaagcaggtgacctaggaaatattctgatattatctccagtaatccttgaattataaacatattatctactgattgataaataatgggttatatccttcatgtaatagttgtctccatccacttcctccctatgtcttcagaagaatttagaattagaccaagtgcagattttttttttcagctgtagctcacaggaggagtttctgttccttccctgaattctaagataatggagtaaattaaccagcaatgtgatgcataattgtccaagtacttaaaaaaaataggtcagacaaattgttattcaaaggtcaatagaatatatgtaatattggctctttgatttacaaatacgag

SEQ ID NO: 416617 - DNA, 579 bp, Homo sapiens
tagttgaactctaacatatatttagaactgactatgtgcaaacaattgtaaataattgtttaaaattgtttaaaaattatttacacttatataaaaatatgacgtaattgtcataatttatacaacgtattgatgctcttttatattagaagaaaattctagttttagaaattattttatagaacatcaactaggcagttaagaataggggtaagagttaaccccaggactatatgattcccaagtccatctatattcttcgcgccaatcctgcatattcactgtggtcttttcaccatttttttctaatgcccagtgaccacatttaaggagttataagagaaatattgtgtgtgtgtgtgtgtgtgtatgtgtgtgtgtgtttatcgaagacaatgaagaaaatgtaagaaaatggtagcgaagttccaaaaaaggcatagaacaaaggaacttaagattcrtatgtaagtggtatttctacatatacctgacttttcttgttaagaaaacttgcaaaaactttctccttccctgcctcagttcatttatcatgcagtataaagagttaacaatctc

SEQ ID NO: 416618 - DNA, 593 bp, Homo sapiens
gcaaagcaagtcagaaaacctaaaaagatcattcattctctgacctcctccctcctttgcagatccttgtgtgataggtgtcctgccgcataaccagggaaaaggaatgtcttacagagacatagaaaaggatgggaacaaacaggccttgctatgttctccccagtttattacctttggatcatacacatgtttgtccaactatgtttcttcacaactatccatttctttcaccagactcagcatacaaatacaatgtttcttgggtctctcaatatccatttccttgtgaaagctcttctgtcatgtaacttttattagataaatgcatatgcttttgttctgttaacctgtctttgtcagttttattttccagcttagcaaagaaccttaggtggttgaggaaactttctccctaacatgagtaatactagtctcatgagagttaggaagtattccctcacttctattttctggaaaagattgtgtaaaattagcattaattcttttgtaaatatttggtagmattttctaatgaagccatctggacttgaaaattatgggggaagtatttttttaatcatgaatttaat

SEQ ID NO: 416619 - DNA, 570 bp, Homo sapiens
tgcaatgcttgggttcaagtaaccctcgtttttagtgaataaggaccccaaaatgctagagtagtaaagccagcaattcagatatgccaaagagaagctgtaaagagcttgctttaaatgaaaacgtggaagtttggacttaaamaaataaaattttaaaaaaccctttatttcagtattttattatatatcctgttttattatgagatgttgatctgtcactgtgactaatttataaattaaagtctttaataggtatgtatgaataagaataaacatagtatgtacagggattggtactctgtggttttaggcatccactggggtcttagaacctatcctccgtgcacagagtgacactgtgttacttccactgccctcagacagaaaagtgctacatcagatggttgtgagttatgaagagaattaacaacattagaaagcaccatatttggccttataattttaagaattatattcttaaaaatgttcaccaagtaaagaatacataaataagacatgcatgtcctttctcacttggtaggataaaaattagtagtatacctcacc

SEQ ID NO: 416620 - DNA, 535 bp, Homo sapiens
tattgttacataataattgtacatatttatgggatacatgtgatattttgatacatgcacataatgtgtaatgattaaatcagggtatttaggatatctatcatctaaaatattgaccattttcttgttgggaaacatttcaaatttcctcgtctagctattttcaaatatacaacacactgttgttcactatagtcaccctactgtgctatgagtcagtagaactgattcagtccmtctaagtctatgtttgtacccattaactaacctttcttcacacaacccttcccccactgctcttcccatcctctggtaaccattgttttactctctacttccacgagacaaaccattttagcttccacacgtgagtgagagtaggtgatatttgcctttctacctggtctattcacttgacgtaatgatctccagtttcatacatgttgcagcacatgaaagaatttctgcttttatggttgaatagtgctcctctgtgtatgtgtatcacattttctttattccttcatcttttgat

SEQ ID NO: 416621 - DNA, 606 bp, Homo sapiens
aaacactgagctgagtctaggcaatgcacaaacttgtgaaagatgttaataaattgtagttttaagattctgtgttttgagggtagtttgctaggtagcagcagataactgcaactgaatcactggccacaaaatctttgctacgactcctaccaagaggttgagtctatttcctctctccttggacctgtgctggcctgtgattgctttgcccaaaagagtacatcagaagtgacccaatgccagtgctgaggcctgtctttaagagtactggcagcttccactttgtctcagcacagtgagccactgtgtaagaagtccaacaaccttgctggagaaaccacatggagaggtcctgaggctgtaaggaggggcagaacatccckgttgaaccccagcatgtgaggctggaccctccagaccagactgagtgtcacctgaataccacagagtgaccctgttgacaccataggggcagaattggacccccaagccctgcttaaattccttacctacaaaatcgcgaggtataataatatggttagcattttaagttgctaaatttaggggtaatgtattatataaaaataaataattgagacaagg

SEQ ID NO: 416622 - DNA, 524 bp, Homo sapiens
caacctgggcaatgtggcgagcagcctgggaaaaatttctgcaaaaaaataaaaaaattacctggcattgtggaacatacctgtagttccactactcaagaggctgagctgggagggtcacctaagtccaggaggttgaggttgcagtgagctgtgaccattatcttrtcactccagcctgggagacagagttagaccctgtctcagaaagaaaaaaaaaagaaaaaaaaaaggtaggaaaaaatgtattatagagctatttgcatattataaggcagttaattagtataaactatataatatttttcaggattttgtgaaggaggcttgtggtatatatcaccatatcatttgttttgaaaatttttaatttgctgttttttaaatgtaaatattcacttttgtaccaaattttgtattttgtactttgtattctttttctaaaagagcttgagcaaattttcagagctctgcaatcgaagtcaagattctacaaacttccaaagggaaagaaaaaaaataaa

SEQ ID NO: 416623 - DNA, 524 bp, Homo sapiens
caacctgggcaatgtggcgagcagcctgggaaaaatttctgcaaaaaaataaaaaaattacctggcattgtggaacatacctgtagttccactactcaagaggctgagctgggagggtcacctaagtccaggaggttgaggttgcagtgagctgtgaccattatcttgtcactccagcctgggagacagagttagaccctgtctcagaaagaaaaaaaaaagaaaaaaaaaaggtaggaaaaaatgtattatagagctatttgcatattataaggcagttaattagtataaactatataatatttttcaggattttgtgaaggaggcttgtggtatatatcaccatatcatttgttttgaaaatttttaatttgctgttttttaaatgtaaatattcacttttgtaccaaattttgtattttgtactttgtattcttttyctaaaagagcttgagcaaattttcagagctctgcaatcgaagtcaagattctacaaacttccaaagggaaagaaaaaaaataaa

SEQ ID NO: 416624 - DNA, 634 bp, Homo sapiens
atgggaccattttgaatattaaatgacttttccctgtattgccacatggtttttccctctgtacctgtctgtgtcatttttttccttttcttataaggacaccagtcatattgtatttgggtcctgcctaatgacctactttaacttaattacctctgtaaagatcctattctgaagtcctggggattaagacttcaacatatgaatttttgggggggacacaattcagcccataacatttgataaaagtagctaatgcaggctggcttaagacctagktgttgggttgatcagtgcagcaaaccaccatggcacacgtttactgatggaacaaacctgcacatcctacacacatactccggaacttaaaaaaaaaagtctttgatttgttacagttaattatagtgatataattattctatactcatgtgcctaatctcatgtcaggaaaaacccagagtttgtcatagtggctgacggatggcaaggaggaggtaattattagcagatatcctacacatgctattgaggctgtggaatctttggcacatctgtcttggtgtgaggtaactagggttctgtagatggtacatatagtatgctttgagacaagcaaaggaggggtttttgtttt

SEQ ID NO: 416625 - DNA, 634 bp, Homo sapiens
atgggaccattttgaatattaaatgacttttccctgtattgccacatggtttttccctctgtacctgtctgtgtcatttttttccttttcttataaggacaccagtcatattgtatttgggtcctgcctaatgacctactttaacttaattacctctgtaaagatcctattctgaagtcctggggattaagacttcaacatatgaatttttgggggggacacaattcagcccataacatttgataaaagtagctaatgcaggctggcttaagacctaggtgttgggttgatcagtgcagcaaaccaccatggcacacgtttactgatggaacaaacctgcacatcctacacacatactccggaacttaaaaaaaaaagtctttgatttgttacagttaattatagtgatataattattctatactcatgtgcctaatctcatgtcaggaaaaacccagagtttgtcatagtggctgacggatggcaaggaggaggtaattattagcagatatcctacacatgctattgaggctgtggaatctttggcayatctgtcttggtgtgaggtaactagggttctgtagatggtacatatagtatgctttgagacaagcaaaggaggggtttttgtttt

SEQ ID NO: 416626 - DNA, 551 bp, Homo sapiens
tgtacggcaaaaacatagaaacaaaaaaaagccccacacaaacaaaaaaaaaaaacaggaaagagtcgaagttaagcttttgacatttaatatatactttwctgagctcacggaatacaacagtcttcaaaacaagactgttgagggagaaaggggttttctaggttcttgatgtttttttggtaaacttttagattctcttgccccagaggcagggaactaaaaaagtagcaaccctagaaaatttgaatgtaagctcaaagcaaataaaacgaaaaacccacttcctgtattaaattctaagagtagtcagccctgtggatgcccttctctctcctgactctcctctgctttgtgctttgactacattctactgttactttctccatttcagcagttattaggcttgccatggaaattcctcaggggccactatcaccacaggggccttgctgattttccattattttgcgccaatgcaaaattcactggcattgatagagacttaagtgtctccaccctgatgacatgattattccactaactgtgta

SEQ ID NO: 416627 - DNA, 613 bp, Homo sapiens
ggaggagcggggagagtaagtaagtagggaagaagtaagtatatgttatggttacttttttcacttggttttttactttagatagttatctaaaattggaagcaatgacaaagtaacaaacaaatctgaaacaagtaaaggtagtgggtgccatatataaatacaggagttacaaattggaagagggaacatgcaattactcaaaagaggacatctttaaggagatgctactgtggatttcactgatgagaaagagtattgagaattacacctatatactctatctccaaagaggtgcttttattccctttgctaaactgcatacaattaaagaattttgctgaacattagctgctgtgctacrttctttcataggctttaactacttaaatcactttatctagttttcattttaatctctgcaaggtcagaggttatagcccgtaaaactattcttactgaacaaagcacactgtcttacattaaatattaatggaaaaagtccagaataatcacatatttcttcctatagctattagctaatgatctttcatacttatttaccaaacatgtattaaaaactcactatgtgtttcacatacatgttattaca

SEQ ID NO: 416628 - DNA, 613 bp, Homo sapiens
ggaggagcggggagagtaagtaagtagggaagaagtaagtatatgttatggttacttttttcacttggttttttactttagatagttatctaaaattggaagcaatgacaaagtaacaaacaaatctgaaacaagtaaaggtagtgggtgccatatataaatacaggagttacaaattggaagagggaacatgcaattactcaaaagaggacatctttaaggagatgctactgtggatttcactgatgagaaagagtattgagaattacacctatatactctatctccaaagaggtgcttttattccctttgctaaactgcatacaattaaagaattttgctgaacattagctgctgtgctacgttcttycataggctttaactacttaaatcactttatctagttttcattttaatctctgcaaggtcagaggttatagcccgtaaaactattcttactgaacaaagcacactgtcttacattaaatattaatggaaaaagtccagaataatcacatatttcttcctatagctattagctaatgatctttcatacttatttaccaaacatgtattaaaaactcactatgtgtttcacatacatgttattaca

SEQ ID NO: 416629 - DNA, 592 bp, Homo sapiens
aaacaagtcactgatccaactagtcttttcccatgacaggaattcaaacttttttcaaataaaaagcctgttacatattcatacagagtgatgaacaaaaaatccagtgttaattccaaacactagacaaatgcttaatcaggttagataacctgcaacaaaattttaaaactaccatataatgggctatactgatagtggatggtcaaatctctttgacagatgaaatattytgaaaatcatagcagcctggtaaaataagtcagttgtgtggaaatcactattaatttctggaccatcctagagtgttaacaaaaatggaggattctaaatcaatactttgaagctgagttaatttaaatggtaggaataagtggataaagtttacagcaataagcataggacagacttgttaaggaaagcctttgctacacagcccatgtaattcctctcattcatgtgtattgaggtgatgtctgcccgtggtctcccacctccttgatcgggcattcctgagaaagacgctcctggagctccttctgcagttccttcctggtgcccagggactgctggactcggaggaagtcggaaa

SEQ ID NO: 416630 - DNA, 592 bp, Homo sapiens
aaacaagtcactgatccaactagtcttttcccatgacaggaattcaaacttttttcaaataaaaagcctgttacatattcatacagagtgatgaacaaaaaatccagtgttaattccaaacactagacaaatgcttaatcaggttagataacctgcaacaaaattttaaaactaccatataatgggctatactgatagtggatggtcaaatctctttgacagatgaaatattctgaaaatcatagcagcctggtaaaataagtcagttgtgtggaaatcactattaatttctggaccatcctagagtgttaacaaaaatggaggattctaaatcaatactttgaagctgagttaatttaaatggtaggaataagtggayaaagtttacagcaataagcataggacagacttgttaaggaaagcctttgctacacagcccatgtaattcctctcattcatgtgtattgaggtgatgtctgcccgtggtctcccacctccttgatcgggcattcctgagaaagacgctcctggagctccttctgcagttccttcctggtgcccagggactgctggactcggaggaagtcggaaa

SEQ ID NO: 416631 - DNA, 541 bp, Homo sapiens
tgaaaggcctggccacagacagttcaccaaaagtgaaattattcttttggttgaactgacacggaaagatgacatgatggggttgtatttgcctggtgagttcttcctgctcactgcacagacaaaatcaattcactgagaatggggcatttcagcagagaaagagtttaatagacacaaggccacccaacgcagaagaattggagtcatcactcaaatcagtctgcccaaaggcttagagtttagggtttttatgaataatttggagaacaaggagctagggaacggrtactgctgttttctgttttgttttgttttgttttgttttgagatggagtcttgtcttgcactgtcacccaggctggagtggagcaacacgaactcagctcactgcaatttatctcaaataacaaaggttcagggtaagttaattctactcaaatttacaggaaacccaaattagattcaacagagataagcagttcaaattttccggtaagagtcactaacggggcttaggtattggcgtttccttgaatcg

SEQ ID NO: 416632 - DNA, 521 bp, Homo sapiens
taaaatcaatagaacacacactttgaaggtcaataatttagaatagatattaaatagtcttaatatgtccctttagaatcacctttctttcgcctcactttcctgatatactctaaatacaactaaaaatgatgtctagaaagcaaggaacttcattttaaaataacttgcctttttaaaaaakattatacattgatatagacccttcagtgaagtaagtatgcaaagtagacattccactctgtgtaagcaggcactgtaagactaagtgtctggcaaacagatgactaaatcattggcagaaaaaaaacagaactcaggtcacaaaataaggaatttaaagttccaagcaggccactcacactgatttaaaaaaaaaaaaaaaaaaaccctagagaactggtcagcatttacttaataaacagccagggtgataagcatgcctcagggtgatacagatgaattttgatctgaaacttgacatgtatctccaaggaactgtatcaccaggtgttctaaaa

SEQ ID NO: 416633 - DNA, 521 bp, Homo sapiens
taaaatcaatagaacacacactttgaaggtcaataatttagaatagatattaaatagtcttaatatgtccctttagaatcacctttctttcgcctcactttcctgatatactctaaatacaactaaaaatgatgtctagaaagcaaggaacttcattttaaaataacttgcctttttaaaaaatattatacattgatatagacccttcagtgaagtaagtatgcaaagtagacattccactctgtgtaagcaggcactgtaagactaagtgtctggcaaacagatgactaaatcattggcagaaaaaaaacagaactcaggtcacaaaataaggaatttaaagttccaagcaggccactcacactgatttaaaaaaaaaaaaaaaaaaaccctagagaactggtcagcatttacttaataaacagccagggtgataagcatrcctcagggtgatacagatgaattttgatctgaaacttgacatgtatctccaaggaactgtatcaccaggtgttctaaaa

SEQ ID NO: 416634 - DNA, 620 bp, Homo sapiens
ccagttttttaaaataaatggctttttaaaaatctgggcttatattgtcagagcttttatttctttcctgtacgtgacttcttacacagatagtattttggtgttttttctctttccatccacaatactgaatggttatatttcttgtcatctattaaaaactattctgctcacacctgtaatcccagcactttgggaggccaacgygggaagatcatgaggccaggagatcgagaccatcctggctaacacagtgaaaccccatctctactaaaaatacaaaaaattagccgggtgtggtggtgggcacctgtagtctcagctactcgggaggctgaggcaggagaatggcatgaacccgggaggcggagcttgcagtgagccaagattgtgctactgcaccccagcctgggcgacagagcgagactccgtctcaaattaaaaaaaaaacagaaaactgttctgtttctctcatctcatgagtaatacatttcagttatcctcatggcaaaggagaagttaacccccaaatacacgcacattggtcttattaataataccatggttatattattaataattaagcatataaatatatgattcacatggctcgttttcct

SEQ ID NO: 416635 - DNA, 620 bp, Homo sapiens
ccagttttttaaaataaatggctttttaaaaatctgggcttatattgtcagagcttttatttctttcctgtacgtgacttcttacacagatagtattttggtgttttttctctttccatccacaatactgaatggttatatttcttgtcatctattaaaaactattctgctcacacctgtaatcccagcactttgggaggccaacgtgggaagatcatgaggccaggagatcgagaccatcctggctaacacagtgaaaccccatctctactaaaaatacaaaaaattagccgggtgtggtggtgggcacctgtagtctcagctactcgggaggctgaggcaggagaatggcrtgaacccgggaggcggagcttgcagtgagccaagattgtgctactgcaccccagcctgggcgacagagcgagactccgtctcaaattaaaaaaaaaacagaaaactgttctgtttctctcatctcatgagtaatacatttcagttatcctcatggcaaaggagaagttaacccccaaatacacgcacattggtcttattaataataccatggttatattattaataattaagcatataaatatatgattcacatggctcgttttcct

SEQ ID NO: 416636 - DNA, 512 bp, Homo sapiens
tttagaatcagaagatcttacaagtctattaatagcaccaactttaggaccgggtgaaaggcttgatctgtctcttcttaygtaaaatttaatgaactaatgagtgagattagattgaattatctctagggtctcttctatttctacagttgtgtgatgaattataattttaaatttaatttggaaaaggtaggacattcacattgtttaatatgtatgttaatgtctataatacacagacatacatatataaaaagattatatatctttttatatatatcttgaaaaattgccttcctacaccatttttcattcccctgttcctagccttctaaaacctatgcataatgtctatatgtgtataatgtattgtgtataatatgcaattaatatatagtacaatatttatgtatgtgtatttatcatatattttattcaagttcagtttctttttttctcatcaagaatgaaatatgtacatttggctgtcattaacagcataggaaaaaaaa

SEQ ID NO: 416637 - DNA, 446 bp, Homo sapiens
taaagcatgaaagttggcattaggttaaaaagtagtaatattaagtaggaattacttttatttatccactgtagaatcgaatatttcttgtaatacccttttttttttttacataattggccaacctttcaaacgtgtctgtgggtttcctctaccgtttctcttgaatgaatctacttcctgtaaaattgtattataattgtaactktttggggttatttgtgagtctaatgtaagtttgagatgtgcccaagttattttctgttttttattctaataatgaatattaattgagcatcaatagcagtgaacaaaatcccaatggcttgcattcatggagtttatatttatgggggtggacagatgataaataagtaagtaaattatatatcgtattagaaggtaaacaagttttatggagaaaaataaagcggagtaaaaggaaa

SEQ ID NO: 416638 - DNA, 593 bp, Homo sapiens
atatacttgtatatgtaaaaggatttagttgcagcattgttgtatacataaaaaatggaacatgaaatgtcctcaaataagttataatttaggcaccaagtggaacaccacgaagctttatgaaagcaagaattagatctaactgtaccacatttctgatcctggctacctttctgacggtatatgtatgttcaatacacatctcgtctcatcgctcattgagttccagtcacattgatctctttgttgttcttccaataggccagataaggtctggcttctgaggctctgttcctgcctctctttcaggaaagatcgtccccagctgtccacatggctatctccttgcaatcattcaaatgcctccctgaaaatggaggtcttctctgaccatctccaccaaagtggcctgttgtcactagctctccttacttggctttgtttttctttasgagtgcctgccattttattattatctctttgtctggggtctataccctccatgagtgtaacctccactaggacaggaaccttgtaggtttttattccatagagctcctttagctcctccattctgtatcttttatattgag

SEQ ID NO: 416639 - DNA, 593 bp, Homo sapiens
atatacttgtatatgtaaaaggatttagttgcagcattgttgtatacataaaaaatggaacatgaaatgtcctcaaataagttataatttaggcaccaagtggaacaccacgaagctttatgaaagcaagaattagatctaactgtaccacatttctgatcctggctacctttctgacggtatatgtatgttcaatacacatctcgtctcatcgctcattgagttccagtcacattgatctctttgttgttcttccaataggccagataaggtctggcttctgaggctctgttcctgcctctctttcaggaaagatcgtccccagctgtccacatggctatctccttgcaatcattcaaatgcctccctgaaaatggaggtcttctctgaccatctccaccaaagtggcctgttgtcactagctctccttacttggctttgtttttctttacsagtgcctgccattttattattatctctttgtctggggtctataccctccatgagtgtaacctccactaggacaggaaccttgtaggtttttattccatagagctcctttagctcctccattctgtatcttttatattgag

SEQ ID NO: 416640 - DNA, 595 bp, Homo sapiens
accaggcttgccaacagacatctccacacaggaaacctgagataggacctggaggatatggtggtcactaggtggttgaaaatgttcctgaatttctctccttccagatacacaataggattacacttccctggccccttagaagttctgatctggctaggtgatgggctttggccagtgaaatgtgagtggcctagctccctgggtaactaagatgagagacgcctgccctactaatccatcacggacctacaaagcaagtgggaaacaaacctctattgtttgaaactgctgagacttgggcctgtaagttaccaaagcaccacctagcatataccaactcagggggctaaggtacacagacaaaacatccgggccctgcacctaaggagcctgtattctggcaaagcaaaaaaccatgcacaaatgaaacaacaaggggaagggaactgtaatatgtaagcagctaaatgccagawgtgatactaagaactttatgtaataataatctcatgtgttatctcacctctcaatgtccccatttgtaaactgggaataatgacagtattcccagtttataaattcctatttggtg

SEQ ID NO: 416641 - DNA, 605 bp, Homo sapiens
acaataggattacacttccctggccccttagaagttctgatctggctaggtgatgggctttggccagtgaaatgtgagtggcctagctccctgggtaactaagatgagagacgcctgccctactaatccatcacggacctacaaagcaagtgggaaacaaacctctattgtttgaaactgctgagacttgggcctgtaagttaccaaagcaccacctagcatataccaactcagggggctaaggtacacagacaaaacatccgggccctgcacctaaggagcctgtattctggcaaagcaaaaaaccatgcacaaatgaaacaacaaggggaagggaactgtaatatgtaagcagctaaatgccagatgtgatactaagaactttatgtaatmataatctcatgtgttatctcacctctcaatgtccccatttgtaaactgggaataatgacagtattcccagtttataaattcctatttggtgagaacattgagaagtaaaataacattcccaagatgtctcagctagtaagtggcagagctaagatctgaatccaaatctgtcagacctccaaagcctcaagccctttccactacactcggtg

SEQ ID NO: 416642 - DNA, 605 bp, Homo sapiens
acaataggattacacttccctggccccttagaagttctgatctggctaggtgatgggctttggccagtgaaatgtgagtggcctagctccctgggtaactaagatgagagacgcctgccctactaatccatcacggacctacaaagcaagtgggaaacaaacctctattgtttgaaactgctgagacttgggcctgtaagttaccaaagcaccacctagcatataccaactcagggggctaaggtacacagacaaaacatccgggccctgcacctaaggagcctgtattctggcaaagcaaaaaaccatgcacaaatgaaacaacaaggggaagggaactgtaatatgtaagcagctaaatgccagatgtgatactaagaactttatgtaataataatctcatgtgttatctcacctctcaatgtccccatttgtaaactgggaataatgacagtattcccagtttatamattcctatttggtgagaacattgagaagtaaaataacattcccaagatgtctcagctagtaagtggcagagctaagatctgaatccaaatctgtcagacctccaaagcctcaagccctttccactacactcggtg

SEQ ID NO: 416643 - DNA, 621 bp, Homo sapiens
gtacaatttcaatgagtgaaagcatgctatgtgaatgtcttaataaagcttytattttaaaaaatggaaaaaaaaaaaaagctcttggttgtgggcttcaccattagatgattcagttgggccacttcattgacatccaatctcttaaactggtgagttttcccaaagaagacttttataaactcctgcttagaaggaatatgagcctggctggctgtgttctgggacctgacttgaggaaaagggctagtagtttcaatgttcattatgttgacttatgctaaatccctgttttcagaaacggacccccattctcagctgtgcttcatatctggtattccagagacctgttctaccctcagcagagagtaagctccagtcttctgcctgggtgtgagaggggcagtcgctaggctgtgtagcatagggaaggaatatgaaagtgtcatagcttcctaacgaaatttcaactaatcttcccatttttagcccatctcttctgtttccagagttatctcaagttgccaattcccaggccttctggaagtatatctggttgcctcttggttctcctgagtgccagcttagaattccattttctgagttcactaatccagtcat

SEQ ID NO: 416644 - DNA, 586 bp, Homo sapiens
atatatccaaatagtggatatatgatagccactgaaaaagaatggggtggcagtgctctatgtagtgccatgaaagatgttttgtaggattccgttcctataataaaacaacataaccctatatatgtgtaggtatttttctatctacacatctatatatttgtattatataggcacatagatacacgacatgcatatatagaaaagtctggttgcattttcaccaaatcatgctggtcacttctggggaactgaaaacaacttttgctttttactttatatagttctaagcagtttgctctttctcataatatgcataggttacttctgatcataaaaaaggaaagactaaatgtaaattaaaagagtaaaaaaaaccctaggatctgagaaaagaagtaaaggtaataggaagccaaggaaagayggatataggagaagaggctaagaaaggggccagaattagcaggagttgggggcaggtcacacacatctgctagagacgtgcaagcaggtgtatctcctcccagctggtaatcacaaatggatcccctgtgggccatggcaaccacctgcacatttatgc

SEQ ID NO: 416645 - DNA, 496 bp, Homo sapiens
ttgtgtgcaagttatttaacctcttggctcacaggttttgcatgtgtaaaatggagataagagtgcctatctcatgagattgctgggtggattaaatgagataatgcctttagagcacctagcccagtgcctggcacawaggaagtgctaaataaatgtttatttccttccatagtgggagggtggaagaggcgagattctgagacacaagtcatgagcttaatctgctgtacttggtgtcatgtgggcccaggacactgcagtggataagccatggagtacaatccaagaaagtcccctgaaactctcccctccactctgccccgtgagctgttagaccacacaatctctgtcccctgaactccttcctctcccctgatggcctctgtctagttggagagatgctgagaatatgcccagcatgagtccaccaggcacctgccaactgcctgtcccctccctccctgcttagacagatcacccttgtcagacgcgg

SEQ ID NO: 416646 - DNA, 496 bp, Homo sapiens
ttgtgtgcaagttatttaacctcttggctcacaggttttgcatgtgtaaaatggagataagagtgcctatctcatgagattgctgggtggattaaatgagataatgcctttagagcacctagcccagtgcctggcacaaaggaagtgctaaataaatgtttatttccttccatagtgggagggtggaagaggcgagattctgagacacaagtcatgagcttaatctgctgtacttggtgtcatgtgggcccaggacactgcagtggataagccatggagtacaatccaagaaagtcccctgaaactctcccctccactctgccccrtgagctgttagaccacacaatctctgtcccctgaactccttcctctcccctgatggcctctgtctagttggagagatgctgagaatatgcccagcatgagtccaccaggcacctgccaactgcctgtcccctccctccctgcttagacagatcacccttgtcagacgcgg

SEQ ID NO: 416647 - DNA, 292 bp, Homo sapiens
tgacgaaacggtctgctaggtggacaggtagggaggrctcagaagtccattttacaggtagtgaatctcatgtttaaggccaaagtgaagttgtttcgcaagggctctctagcacagagttcctctaaaccttgggcagcaaatgccaaagaacttacctttcccagagttccccaactagtgaaacattcagcaagtcagcccaggctaggctggtttcttggttatatgctcttagatccgtgttccctcctctcacagcacttacatattaacctctgtgactatgtct

SEQ ID NO: 416648 - DNA, 641 bp, Homo sapiens
atgttgtctaggctggtttcgaactcctgatttcaggtgatccatccaccttggcctcccaaagtgctgggataacaggtgtgagccactgtgcctggcctccagttgtcttttattattgatttctgatttaattccattgtggtctgagagcaaacattgtataatttctattcttttaaatttgttaaggtgttttttatggctcagaatgtgctctattttggtgaatgttctatgtgagcttgagaagaatgcatattctgctattgctggatgaagtagcctgtagatgtcaattatatcytgtggattgatggtgttgttgaatttaactatgtctttactgattttctacctgctggatctgtttgtttctgatagtgggctgttcacatctccaattataattatggattcatctatgactccttgcagttttatcagtttttgcttcacatattttgacactctgtagttaggtgcatacacattaaggatcattatgtcttcttggagaattaacccctatatcgttacgtaatgtctctctatccctgataacttttcttgttttgaagtctgctctgtctgaaattaatataggtactcctaccttcttttgattattataagaatgg

SEQ ID NO: 416649 - DNA, 613 bp, Homo sapiens
aatcaacgtgtacaggtttttagaacctaaagtttttataaatggaatatctcctatagagtgctgtatgtgtagttaataacacaaatatttattgcacatctcctccatactttcacatatattaactaatgtattctcccaataattttrtaaggtaggtatcattattaccctgctctagatgtggaaatagaatctcagagacagaatgacaaaactgaaatctttttgattttaggaccatattttacctccccgtagctgcctccttgtgtcaactgattgaatcaataaataacctaatgttagcacagactgcagctctgtctatgcttcacaccgttaaaaaaggcctgggtgtggagtcccgtctgttattctatacgttatcaccaagcctcgctgttgtatatctctcttctgaccttcagaatacctccagggacacagaaagagcacgcagcatcaagcagcacttttcggagtggttacaatgagtatgtaacaaagctaaaatgtgtaatccgggaagggtgactttcaatatatgcccttgatgccattcacgaagcatctcacacgctgcctcttgattgagagctcttccttc

SEQ ID NO: 416650 - DNA, 567 bp, Homo sapiens
gagcacataatggtagtcttcagcaccttacttggcttggcttacagtggaattcattgcctgctttacctggaatccgaaaatggctaaaacagcttttccatcatttgccccakgaaacctcaaggcttgaaacaaatgcacctgaatcaatatgtattttagatcttgaagtaagcaaagattttaacaaattaaatattctgaattttgtttaattttttttctaacttaacttttccttaaatgaaacaggtatttctccttggagtagtatataccagccacttacaattaaaggagaaatgtaattctcaccacagctcctatcagccgttatgcctgccccttcctgtgtgtaaacagctttgtacagaaagacaaaaatcttggtgggatgcggtttgtactctgattcacagaaaagcagtgtaagtagtaaaacaaaaatattgctttcacttagtgcgtaggttttaccggggatttaatcctcatgtgaagatttaatttgtcatgtgacccattaacatatatgtatgtaagccctgaactgtgtatttagaa

SEQ ID NO: 416651 - DNA, 567 bp, Homo sapiens
gagcacataatggtagtcttcagcaccttacttggcttggcttacagtggaattcattgcctgctttacctggaatccgaaaatggctaaaacagcttttccatcatttgccccatgaaacctcaaggcttgaaacaaatgcacctgaatcaatatgtattttagatcttgaagtaagcaaagattttaacaaattaaatattctgaattttgtttaattttttttctaacttaacttttccttaaatraaacaggtatttctccttggagtagtatataccagccacttacaattaaaggagaaatgtaattctcaccacagctcctatcagccgttatgcctgccccttcctgtgtgtaaacagctttgtacagaaagacaaaaatcttggtgggatgcggtttgtactctgattcacagaaaagcagtgtaagtagtaaaacaaaaatattgctttcacttagtgcgtaggttttaccggggatttaatcctcatgtgaagatttaatttgtcatgtgacccattaacatatatgtatgtaagccctgaactgtgtatttagaa

SEQ ID NO: 416652 - DNA, 567 bp, Homo sapiens
gagcacataatggtagtcttcagcaccttacttggcttggcttacagtggaattcattgcctgctttacctggaatccgaaaatggctaaaacagcttttccatcatttgccccatgaaacctcaaggcttgaaacaaatgcacctgaatcaatatgtattttagatcttgaagtaagcaaagattttaacaaattaaatattctgaattttgtttaattttttttctaacttaacttttccttaaatgaaacaggtatttctccttggagtagtatataccagccacttacaattaaaggagaaatgtaattctcaccacagctcctatcagccgttatgcctgccccttcctgtrtgtaaacagctttgtacagaaagacaaaaatcttggtgggatgcggtttgtactctgattcacagaaaagcagtgtaagtagtaaaacaaaaatattgctttcacttagtgcgtaggttttaccggggatttaatcctcatgtgaagatttaatttgtcatgtgacccattaacatatatgtatgtaagccctgaactgtgtatttagaa

SEQ ID NO: 416653 - DNA, 627 bp, Homo sapiens
gttcaagtaacccaaaggaaggcagcaaaaagaaaacggagaagcaaaaaaagatacagcaaaaaagtagagcgaagacttaaatcttagtatatcaataattatcgatatattaaatatgcaaattagtaaattataacagacagcaattgatgaatcaaaaagaaatgtccgaacagtatactgtctataagacactcacatcaaatatgacactagaagtagactcaatataaaagaaaagaaaatggcatagtatgcaaaattaataaaatgaatcagtagcaaatactaatatcagataaagtagactacaaagccaagaatgttaccagtgacagaaatgtacattacataatgaagaaagtcatttcggaaagaagacagagcagttctaagtgcgtagacaccaagcaacagagcaatacagtgcatgtagcagaaactggtgtgaaatgaaggaggccttcattttctatttgggaagcaaatgctctctaagtatagcaggacattctgggatattttttaagcaaagtacccccgtggtcatatttttwttttgtagcagagtaacccgttccctcttcaaaccacatccctctccattgtcccagctcctctctg

SEQ ID NO: 416654 - DNA, 619 bp, Homo sapiens
gaagcaaatgctctctaagtatagcaggacattctgggatattttttaagcaaagtacccccgtggtcatattttttttttgtagcagagtaacccgttccctcttcaaaccacatccctctccattgtcccagctcctctctgactgcaagcctcctcttttattttaaggacctttgtgatcatattggtttcatctagataactgggtcgcttattcttcacttatatctgtcaagttctytttttgctatgtaaggtagaatttttatgatacggctccgttgactggaggaacaccagggttcttggtctcacaccactttggataaaacaacacagacacacgtggagtggttttagggagagaaaggtttaatatgcaagaaggacggaggaagaaaacagctcccccacacagagacagagggaggagggattccaacaaagacaaaactccattgcagcagaaaagtggctcttatatgaggaggctggaggaggtggtgtctgatttatatagggctctagggactggtttgaccaggcatgccattcatgaagcctgcaaaataactggccttcccaacaagacttttaatatgcaaatacagggcgc

SEQ ID NO: 416655 - DNA, 619 bp, Homo sapiens
gaagcaaatgctctctaagtatagcaggacattctgggatattttttaagcaaagtacccccgtggtcatattttttttttgtagcagagtaacccgttccctcttcaaaccacatccctctccattgtcccagctcctctctgactgcaagcctcctcttttattttaaggacctttgtgatcatattggtttcatctagataactgggtcgcttattcttcacttatatctgtcaagttctttttttgctatgtaaggtagaatttttatgatacggctccgttgactggaggaacaccagggttcttggtctcacaccactttggataaaacaacacagacacacgtggagtggttttagggagagaaaggtttaatatgcaagaaggamggaggaagaaaacagctcccccacacagagacagagggaggagggattccaacaaagacaaaactccattgcagcagaaaagtggctcttatatgaggaggctggaggaggtggtgtctgatttatatagggctctagggactggtttgaccaggcatgccattcatgaagcctgcaaaataactggccttcccaacaagacttttaatatgcaaatacagggcgc

SEQ ID NO: 416656 - DNA, 619 bp, Homo sapiens
gaagcaaatgctctctaagtatagcaggacattctgggatattttttaagcaaagtacccccgtggtcatattttttttttgtagcagagtaacccgttccctcttcaaaccacatccctctccattgtcccagctcctctctgactgcaagcctcctcttttattttaaggacctttgtgatcatattggtttcatctagataactgggtcgcttattcttcacttatatctgtcaagttctttttttgctatgtaaggtagaatttttatgatacggctccgttgactggaggaacaccagggttcttggtctcacaccactttggataaaacaacacagacacacgtggagtggttttagggagagaaaggtttaatatgcaagaaggacggargaagaaaacagctcccccacacagagacagagggaggagggattccaacaaagacaaaactccattgcagcagaaaagtggctcttatatgaggaggctggaggaggtggtgtctgatttatatagggctctagggactggtttgaccaggcatgccattcatgaagcctgcaaaataactggccttcccaacaagacttttaatatgcaaatacagggcgc

SEQ ID NO: 416657 - DNA, 499 bp, Homo sapiens
ggtttgaaatttgcagatccacttatattttcttctgtgtgtcacctgtgagcaagcgcttaataagtactaaatatattttctcatttttaaggttttctcaataacattttttctttagcatactttattggaagaatagagtatataatatgtataacataaaaaagcggttaatcaactatttattttatcattaaggcttccagtcaaaagtaatctattactacataasttggagatgcaaaagttctacacaggttttcatctgcaccagtggtcagtgccccaacctccacgttgttgaggggaaaactgctctttcagtctgtagccacatctctctggaacaggatcttggcaggtgggttgcaagtaaaggaatccagaaaataacatctcaaactgtgctgcatttgtatgatgattatataaaaccaaaggcatttagaaagcaggaaatgcacagggggcttttcctaaacatcccctacctgcc

SEQ ID NO: 416658 - DNA, 499 bp, Homo sapiens
ggtttgaaatttgcagatccacttatattttcttctgtgtgtcacctgtgagcaagcgcttaataagtactaaatatattttctcatttttaaggttttctcaataacattttttctttagcatactttattggaagaatagagtatataatatgtataacataaaaaagcggttaatcaactatttattttatcattaaggcttccagtcaaaagtaatctattactacataagttggagatgcaaaagttctacacaggttttcatctgcaccagtggtcagtgccccaacctccacgttgttgaggggamaactgctctttcagtctgtagccacatctctctggaacaggatcttggcaggtgggttgcaagtaaaggaatccagaaaataacatctcaaactgtgctgcatttgtatgatgattatataaaaccaaaggcatttagaaagcaggaaatgcacagggggcttttcctaaacatcccctacctgcc

SEQ ID NO: 416659 - DNA, 585 bp, Homo sapiens
ctttacctagggaggtgattacctgttcttttgaggatgcatttctattckcatctattctctccaggttgcctacatttcccaattacctcttccctagaaaggaaacataaacacctggatcccattgagttatctgggtaatcaccttgctatgatatcctgctgcactttaagtgaattttgtttgccttttctcttattaatcttccttttgtcagtttattttcagcaaacatttagaggacaaatggagctttcttcctttcttccaatataagcaatttcccttaaaattcaggcagcttataaagcagcaggaaggtttgtgcagaggctacagcactgtgatttggctctcctagtcaggcatcagtaaaattttatggagtcctaggctgcagcccactgatgctgatgtagttggatccacttcccctcccacggaaccaggccgggacatttttgggcacattagagatatgagatataacgagtgcaaatccctgtccagtttcatctggaaccaactgatttctccatgtacatgggcagttgcttgataaaagattgagtgcctctttc

SEQ ID NO: 416660 - DNA, 585 bp, Homo sapiens
ctttacctagggaggtgattacctgttcttttgaggatgcatttctattcgcatctattctctccaggttgcctacatttcccaattacctcttccctagaaaggaaacataaacacctggatcycattgagttatctgggtaatcaccttgctatgatatcctgctgcactttaagtgaattttgtttgccttttctcttattaatcttccttttgtcagtttattttcagcaaacatttagaggacaaatggagctttcttcctttcttccaatataagcaatttcccttaaaattcaggcagcttataaagcagcaggaaggtttgtgcagaggctacagcactgtgatttggctctcctagtcaggcatcagtaaaattttatggagtcctaggctgcagcccactgatgctgatgtagttggatccacttcccctcccacggaaccaggccgggacatttttgggcacattagagatatgagatataacgagtgcaaatccctgtccagtttcatctggaaccaactgatttctccatgtacatgggcagttgcttgataaaagattgagtgcctctttc

SEQ ID NO: 416661 - DNA, 585 bp, Homo sapiens
ctttacctagggaggtgattacctgttcttttgaggatgcatttctattcgcatctattctctccaggttgcctacatttcccaattacctcttccctagaaaggaaacataaacacctggatcccattgagttatctgggtaatcaccttgctatgatatcctgctgcactttaagtgaattttgtttgccttttctcttattaatcttccttttgtcagtttattttcagcaaacatttagaggacaaatggagctttcttcctttcttccaatataagcaatttcccttaaaattcaggcagcttataaagcagcaggaaggtttgtgcagaggctacagcactgtgatttggctctcctagtcaggcatcagtaaaattttatggagtcctaggctgcagcccactgatgctgatgtagttggatccacttcccctcccacggaaccaggccgggacatttttgggcacattagagatatgagatataacgagtgcaaatccctgtccagtttcatctggaaccaactgatttctccatgtacmtgggcagttgcttgataaaagattgagtgcctctttc

SEQ ID NO: 416662 - DNA, 460 bp, Homo sapiens
aattttcttactgaaataccagggacttggtgtagatcctgcagctcaccacacagaaagccaatctcgaagacaacaagtattgccaaggaacaggctttaatcaggtgctgcagccgaggagatgggacgccattctcaattgtatctctctgacaaaatwaattaggggtttatataggagggaagaaatgttgaaaacaggaattagggaggggtaaggaagataatttggtcaagaagaagcaggaggtcagttatgcaatcacagcgggtgaaggttctgttgtctcactgtcccgattcagtgatatgtaagtttcagcttcttaatagtatctgggaggcctgatggttggtttactgaaaaaaggactcaggtaagacagacgtaactatcttgagttttaagacagggagggggagacaatttctaagtttattcaaaaaaccataaacc

SEQ ID NO: 416663 - DNA, 460 bp, Homo sapiens
aattttcttactgaaataccagggacttggtgtagatcctgcagctcaccacacagaaagccaatctcgaagacaacaagtattgccaaggaacaggctttaatcaggtgctgcagccgaggagatgggacgccattctcaattgtatctctctgacaaaataaattaggggtttatataggagggaagaaatgttgaaaacaggaattagggaggggtaaggaagataatttggtcaagaagaagcaggaggtcagttatgcaatcacagygggtgaaggttctgttgtctcactgtcccgattcagtgatatgtaagtttcagcttcttaatagtatctgggaggcctgatggttggtttactgaaaaaaggactcaggtaagacagacgtaactatcttgagttttaagacagggagggggagacaatttctaagtttattcaaaaaaccataaacc

SEQ ID NO: 416664 - DNA, 460 bp, Homo sapiens
aattttcttactgaaataccagggacttggtgtagatcctgcagctcaccacacagaaagccaatctcgaagacaacaagtattgccaaggaacaggctttaatcaggtgctgcagccgaggagatgggacgccattctcaattgtatctctctgacaaaataaattaggggtttatataggagggaagaaatgttgaaaacaggaattagggaggggtaaggaagataatttggtcaagaagaagcaggaggtcagttatgcaatcacagcgggtgaaggttctgttgtctcactgtcccrattcagtgatatgtaagtttcagcttcttaatagtatctgggaggcctgatggttggtttactgaaaaaaggactcaggtaagacagacgtaactatcttgagttttaagacagggagggggagacaatttctaagtttattcaaaaaaccataaacc

SEQ ID NO: 416665 - DNA, 460 bp, Homo sapiens
aattttcttactgaaataccagggacttggtgtagatcctgcagctcaccacacagaaagccaatctcgaagacaacaagtattgccaaggaacaggctttaatcaggtgctgcagccgaggagatgggacgccattctcaattgtatctctctgacaaaataaattaggggtttatataggagggaagaaatgttgaaaacaggaattagggaggggtaaggaagataatttggtcaagaagaagcaggaggtcagttatgcaatcacagcgggtgaaggttctgttgtctcactgtcccgattcagtgatatgtaagtttcagcttcttaatagtatctgggaggcctgatggttggtttactgaaaaaaggactcaggtaagacagaygtaactatcttgagttttaagacagggagggggagacaatttctaagtttattcaaaaaaccataaacc

SEQ ID NO: 416666 - DNA, 566 bp, Homo sapiens
aagcttaggggtaggcgtgctgatgctcttagcttcctgcagcatccttccaggtgtttctctagtcctcacctctgtccttgtacctgtcttagttaccaatggataatattgagtcttccttttctgatttccaaatctcaygggaggaactcttattgggcaactctataggacacaagcacagcaaaaagggatatttacataagttaaaatgatttttaccccaatgagtccatttaaataaattatatttgaagccacatgttgaaaacacatccagctttattttcttattaatgcaaatttacatttgcaaatattttcaggattgtaaagtttgaaaacataattatttgttcatggaatgatcaaacccttctataattaaatggagtaaacattttcttgaaaatgtgtactcactgaaataaaggaatatatttaaaatgtgtgaagctatgttagaaattattggacttaaattcaactgtgcagtttgatttgggatgttgttcactcctgtgacctgccacaagaatcttctgtcatgtgtagtcactgct

SEQ ID NO: 416667 - DNA, 566 bp, Homo sapiens
aagcttaggggtaggcgtgctgatgctcttagcttcctgcagcatccttccaggtgtttctctagtcctcacctctgtccttgtacctgtcttagttaccaatggataatattgagtcttccttttctgatttccaaatctcatgggaggaactcttattgggcaactctataggacacaagcacagcaaaaagggatatttacataagttaaaatgatttttaccccaatgagtccatttaaataaattatatttgaagccacatgttgraaacacatccagctttattttcttattaatgcaaatttacatttgcaaatattttcaggattgtaaagtttgaaaacataattatttgttcatggaatgatcaaacccttctataattaaatggagtaaacattttcttgaaaatgtgtactcactgaaataaaggaatatatttaaaatgtgtgaagctatgttagaaattattggacttaaattcaactgtgcagtttgatttgggatgttgttcactcctgtgacctgccacaagaatcttctgtcatgtgtagtcactgct

SEQ ID NO: 416668 - DNA, 486 bp, Homo sapiens
gtggtgtctgatttgcatagggctcaggggattggtatgaccaggcatgtcattcaggtagcctgcagaaaaaactggccctcccaccctagccttttaatatgcaattgcagggcaccataatgttctacacacatggggatatatagggacagctatgttgccaggcctatgtggggacatggaagaagatggtgggaatcaccatgtttgggtgaacccagtttctaatggcgggcatttacatatgaaagttgccagcctggatctaagagccagtgttttcctgctagacaagaaatctttctagagctgctttaaacataacaaaaccttcacaagcaccccttttcctctctatctgcctacaataatttcttaataactcctataacacttgggttccagagatgaggacatggacatctctyggggtggggacattattcatcccaccaacaataaacatattccccaaaattgtcc

SEQ ID NO: 416669 - DNA, 603 bp, Homo sapiens
ggaagttgatactttatccaggcaggctgttacctgttcttttgaggatgcacttctattctcatctattttctctaggttgcctacacttcccaattctatagaaaggaaatataaacacctgaatctcattgagttatctgggtaatcaccctgctgtgatattccactgcactttaagtgaattttgtttgccttttctcttattaatctttcttttgtcagtttattttcagcaaacatttagaggataaatggaactttcttcctttctcccaatataagcaagttcccttaaaattcagatcgcttgcaaagcagcaggaaggtttgtgcatgggctacagcactgtgattttgctcccctagtcaggcatcagtaaaattttgtggagccctagactgtagcccactgatgctgatgtagttggatccamttcccctgctactgagccaggctgggacatttttggcacattagagatgtgagatataacgagtgaaaatcgtgtccagtttcatctggatccaactgatttctccatgtacatgggaaattgcttgataagagattgactgtctctttcctaaaaatggtaacaa

SEQ ID NO: 416670 - DNA, 545 bp, Homo sapiens
taatctggctgatcaaggaagggttcaggtgagtggtttctctgcatggcactgagctcgtcttcagcctacacatatcaactgtctgaggacaaggctgaacagcartgactacccatgactcaagattcttctggcaggtcacaagagtgaacagcatcccaaaccaaactgcacagttgagtttaagtccaataatttctaacatagcttcacacatttcaaatatattgctttatttcagtgagtacaaatttttaagaaaatgtttactccatttaattatagaggtgtttgatcattccatggacaaataattatgttttcaacctttacaatattgaaaatatttgcaaatgtaaatttgcattaataagaaaataaagctggatgtgttttcaacatgtggctttaaatataatttatttaaatggcctcatgggggaaaatcattttaacttacataaattctcattttgtctctcttgtttcttatagagttgcccaataagaagtcctcccatgagatttggaagtccgaaaag

SEQ ID NO: 416671 - DNA, 576 bp, Homo sapiens
catctctacattttattttgactttagtagtttactttaattctctgtattaagacaattcctgcttagaatatctatagtggcttcttctgtgttatatgaattcaagctgaagccataaactagactcctcaagtgtcatgatctctgtatttatcaaatcaggagatgcattgctatgtctgtgcagttggggctgagaaagagaaaagaattagggtgcagaggcgatttcacgtacccctctaccaacaccatcagagtgtggctgcatctgagcaacactctcagccaatggaggcatcaggaggagcagctggggcagcccagcttcacacatctgcttccctgggggtttatgttcgggttggtaacactgtgggagggaaactgttagcctgttgacaatagtaagttgcaaaatcttcaggctgcaggctgctgatrgtgagagtgaaatctgtcccagatccactgccgctgaaccttgatgggaccccactttgcaaactggatgcagcatagatcaggagcttaggggctttccctggtttctgctgataccaggctaaccag

SEQ ID NO: 416672 - DNA, 509 bp, Homo sapiens
cagtgggctgccacctaggactccacaaaattttactgatgcctgactaggggagccaaatcacagtgctgcaggctgtgcacaaaccttcctgctgttttttaagctgcctgaattttaagggaacttgcttatattgggagaaaggaagaaagctccatttgtcctctaaatatttgctgaaaatgaatggacaaaagaaagattaataagagaaaagacaaacaaaattcatttgaagtgcagcagaatatcatagcagggtgattacccagataactcaatgggatacagttgtttatatttcttttctaaggaagagggaattgagaagygtaggcaacctggaaagaatagatgagaacagaagtgcatcctcaaaagaacaggtcatagcctgtctggataaagcatcaacttcagtctcttgtattttagattcctcttttgtgttaatattccctgatgtaaaaattctcaggaagaatttttttgacaattggtttcct

SEQ ID NO: 416673 - DNA, 643 bp, Homo sapiens
tctttttgtgcatttggtgctttctaaatgtctttggttttacataatcatcataccagtgcagcatagtttgagatgttattttctggattcctttacttgcaacccacctgccaagatcctgttccagagagatgcagctacagattgaatgagcagttgacccttgaacaacatggaggtttgggcactgaccatgggtgcagatgaaaacctgtgtaraacttttgcatttctaactccaggcatcatcttgaaagtggagaaagcagaccttaacctgcccatgtcttgatctttaatttcccattctccagaactgtaagaaaataaatttctgttccttatgaattacatagtgacaattaatctgttatagcagcttgaaatagaacaagagagacagcgcacaatcagtgaggacacgatgaggtgtatacataccccagcttcctcatctctcaggtggaatagcccagaggaacttagtccatgtttcctcatgtggttgatctttggttatcctgagtcaggtaggttgttgatgtgtctttttccattcatcttctgttctcttcctcactttcctcctttcctcccagtgtaaatttgctgcctaaacagggatcctcattgagggtgg

SEQ ID NO: 416674 - DNA, 643 bp, Homo sapiens
tctttttgtgcatttggtgctttctaaatgtctttggttttacataatcatcataccagtgcagcatagtttgagatgttattttctggattcctttacttgcaacccacctgccaagatcctgttccagagagatgcagctacagattgaatgagcagttgacccttgaacaacatggaggtttgggcactgaccatgggtgcagatgaaaacctgtgtaaaacttttgcatttctaactccaggcatcatcttgaaagtggagaaagcagaccttaacctgcccatgtcttgatctttaatttcccattctccagaactgtaagaaaataaatttctgttccttatgaattacatagtgacaatkaatctgttatagcagcttgaaatagaacaagagagacagcgcacaatcagtgaggacacgatgaggtgtatacataccccagcttcctcatctctcaggtggaatagcccagaggaacttagtccatgtttcctcatgtggttgatctttggttatcctgagtcaggtaggttgttgatgtgtctttttccattcatcttctgttctcttcctcactttcctcctttcctcccagtgtaaatttgctgcctaaacagggatcctcattgagggtgg

SEQ ID NO: 416675 - DNA, 643 bp, Homo sapiens
tctttttgtgcatttggtgctttctaaatgtctttggttttacataatcatcataccagtgcagcatagtttgagatgttattttctggattcctttacttgcaacccacctgccaagatcctgttccagagagatgcagctacagattgaatgagcagttgacccttgaacaacatggaggtttgggcactgaccatgggtgcagatgaaaacctgtgtaaaacttttgcatttctaactccaggcatcatcttgaaagtggagaaagcagaccttaacctgcccatgtcttgatctttaatttcccattctccagaactgtaagaaaataaatttctgttccttatgaattacatagtgacaattaatctgttatagcagcttgaaatagaacaagagagacagcgcacaatcagtgaggacacgatgaggtgtatacataccccagcttcctcatctctcaggtggaatagcccagaggaacttagtccatgtttccwcatgtggttgatctttggttatcctgagtcaggtaggttgttgatgtgtctttttccattcatcttctgttctcttcctcactttcctcctttcctcccagtgtaaatttgctgcctaaacagggatcctcattgagggtgg

SEQ ID NO: 416676 - DNA, 368 bp, Homo sapiens
gagcataccccaacagataaaactcacaagttagaggaacctgagtctaagattttgtccacctcccttgattcataaaaatacttcgtgattttttaaattttactttagagaaggacaattttggggaatatgtttatggtcggtggaatgaataatrtcccaccccaaaggatgtccatgtcctcatctctggaacccaagtgttataggagtttttaagaaattattttaggcagataggaaaaggggtccttgggaaggttttgtttcctttaaagcagctctagaaacacttcttgtctagccagaaagccctggctcttagagccaggctgggaagctttcctatgcaaatcatagccatt

SEQ ID NO: 416677 - DNA, 368 bp, Homo sapiens
gagcataccccaacagataaaactcacaagttagaggaacctgagtctaagattttgtccacctcccttgattcataaaaatacttcgtgattttttaaattttactttagagaaggacaattttggggaatatgtttatggtcggtggaatgaataatatcccaccccaaaggatgtccatgtcctcatctctggaacccaagtgytataggagtttttaagaaattattttaggcagataggaaaaggggtccttgggaaggttttgtttcctttaaagcagctctagaaacacttcttgtctagccagaaagccctggctcttagagccaggctgggaagctttcctatgcaaatcatagccatt

SEQ ID NO: 416678 - DNA, 601 bp, Homo sapiens
ctggacacagctgcagggctggctcatctcagtaactcagcaccagttcagtgtccccaggtgtcccaggtaagaccagggtagcacaaatttgtctccagagaatgtgtttctactgggaactattttattatgagagacattttttaggttttttttgacaatttgaaatattcctcaggagttgatggagtaatgtatttcattggtgtatggggattatttaggagaatattcttgtttgtaggaaatatataataaaatgttagacggtatgattatcaggtctccaaaagactctcatatgatcccggttagggaaggggttactttgtcctatacttggaacatttctgtgattttaacattgttcctttctaaaaaaatcaaaaataaaatttattgacatgatgctatatatacmtgtcagtattcggtaatggtgttatgccattgttcttaccactataagatcaagcaatttactacagatccacagagatgatgcctatgtacatggagaaagcagtttgatccagacaaaactggaaatgatttgcaatcattatatcgcacatatctaatgtgcccaaaactgtcc

SEQ ID NO: 416679 - DNA, 528 bp, Homo sapiens
gtaggcaatctggagagaatagatgagaacagaagtgcatcttcaaaagaacaggtaatagcctgtctggataaagcatcagttcccagtctcttctatttttgattcctgttttgtgttaatcttccctgatataaaaattctcaggaakaagttttttgacaattggtttccttctggagaatctgctttttggcagataagcgatgtttaggagaaggctttttgtgcatttgctgctttctaaatgcctttggttttatgtaatcctcatacgaatgcagcatagtttgagatgttattttctggattcctttacttacaactcacctaccaagatcctgttccagagagatgcagctacagactgaaagagcagttgacccctgaacaatgtggaggttggggcactgaccacaggtgcagatgaaaacctgtgtagaacttttgcatttctaacttaagtactaatagcttacttttgactgctagccttaatgataaaataaatagttgattaacactttt

SEQ ID NO: 416680 - DNA, 528 bp, Homo sapiens
gtaggcaatctggagagaatagatgagaacagaagtgcatcttcaaaagaacaggtaatagcctgtctggataaagcatcagttcccagtctcttctatttttgattcctgttttgtgttaatcttccctgatataaaaattctcaggaagaakttttttgacaattggtttccttctggagaatctgctttttggcagataagcgatgtttaggagaaggctttttgtgcatttgctgctttctaaatgcctttggttttatgtaatcctcatacgaatgcagcatagtttgagatgttattttctggattcctttacttacaactcacctaccaagatcctgttccagagagatgcagctacagactgaaagagcagttgacccctgaacaatgtggaggttggggcactgaccacaggtgcagatgaaaacctgtgtagaacttttgcatttctaacttaagtactaatagcttacttttgactgctagccttaatgataaaataaatagttgattaacactttt

SEQ ID NO: 416681 - DNA, 413 bp, Homo sapiens
cattttctgtctgttatttatgttttgctcaattatttttgtgtgtgtgattttgattaatcctcccaaaacatacaggtttaaaaagaaccaatatttgcaaggcaaagccggcctctagaagtcacctatcccatccccctctttctgtgtcacagctttcactaaagtacatgtccttgctccttctggaatcttcctcactctcacagatctagacatcayatgccccatcctggaggacaagacacatctaacacgaggacaggacacacatgggaggtggcgggatccacagagttcaccctcccaccccatcatcctccctcatttcccttctgcccttaccagggacccagagcattagcagccccaggagctgagcagggagcctcactgtgagaaggtgaact

SEQ ID NO: 416682 - DNA, 413 bp, Homo sapiens
cattttctgtctgttatttatgttttgctcaattatttttgtgtgtgtgattttgattaatcctcccaaaacatacaggtttaaaaagaaccaatatttgcaaggcaaagccggcctctagaagtcacctatcccatccccctctttctgtgtcacagctttcactaaagtacatgtccttgctccttctggaatcttcctcactctcacagatctagacatcatatgccccatcctggaggacaagacacatctaacacgaggacagracacacatgggaggtggcgggatccacagagttcaccctcccaccccatcatcctccctcatttcccttctgcccttaccagggacccagagcattagcagccccaggagctgagcagggagcctcactgtgagaaggtgaact

SEQ ID NO: 416683 - DNA, 606 bp, Homo sapiens
attgaaaatgtaacctccaaattttcaaatatatgggaactatacaatattgttctttccaaagaaccagcctttggtttgcctggtgttcagtgtcactttttctgtttgcagttttattgatttctgccctaatatttattatttattttgctcatgttctacttcagatataaattgctcctctttatgtagtttcataaggtggaagtggagattattggttttatcccttttattttctgaaaaatactcatatgcatatgtttatctacatgcatacacaggcataaatatgtgcagatgcatattcatacacgtggttttaataccataaattaccctgtaagcgctgctgaatacctatgcrtattttcttttctctgagctcaaactccactcacttgcaaacctgcccacttaatctgcatgttcattggtgtctcaatctagaattgagcaaaaataacaaactcctttcattttatctcaactttcttggccgctaatacatttaacatcagtaagtcagaatctatctaatagattaaggccaaagctgccaggtcactcctaatctgactcttctcacaccaaggagtgtaa

SEQ ID NO: 416684 - DNA, 404 bp, Homo sapiens
aaatttccctcttaacactgcctaacctgtgtcccagagattctggtatattgtatctttgttctcattcatttcaaagaacgttttgatttctgccttaacttcattatttacccaagtcattcaggagcatgttgtttaatttccatggttttgagttattttcttagtcttgaattctacattcattttkctgtggtccaagagagaggttggtatgattttggttcttttgcacttgctgaatattgatgtatgtccgattgtgcggtcaattttagcatatgtgccatgtggtgatgagaatatatatattctgttgttttggggtgaagagttctgcagatttctataaggtccatttgatccagggttgagtccaagtcctgaatatctttgttaat

SEQ ID NO: 416685 - DNA, 404 bp, Homo sapiens
aaatttccctcttaacactgcctaacctgtgtcccagagattctggtatattgtatctttgttctcattcatttcaaagaacgttttgatttctgccttaacttcattatttacccaagtcattcaggagcatgttgtttaatttccatggttttgagttattttcttagtcttgaattctacattcatttttctgtggtccaagagagaggttggyatgattttggttcttttgcacttgctgaatattgatgtatgtccgattgtgcggtcaattttagcatatgtgccatgtggtgatgagaatatatatattctgttgttttggggtgaagagttctgcagatttctataaggtccatttgatccagggttgagtccaagtcctgaatatctttgttaat

SEQ ID NO: 416686 - DNA, 404 bp, Homo sapiens
aaatttccctcttaacactgcctaacctgtgtcccagagattctggtatattgtatctttgttctcattcatttcaaagaacgttttgatttctgccttaacttcattatttacccaagtcattcaggagcatgttgtttaatttccatggttttgagttattttcttagtcttgaattctacattcatttttctgtggtccaagagagaggttggtatgattttggttcttttgcacttgctgaatattgatgtatgtccgattgtgyggtcaattttagcatatgtgccatgtggtgatgagaatatatatattctgttgttttggggtgaagagttctgcagatttctataaggtccatttgatccagggttgagtccaagtcctgaatatctttgttaat

SEQ ID NO: 416687 - DNA, 346 bp, Homo sapiens
ttcactttttttgaggcaaataagttgcttgatccaaagccatattatggaagaacttcctgactctgatgaaaactcyttgaaaatccacaaataatattttatgcagaaacataaccgaaaaggaaggcaaatccatatatagtaaaataaccactgccattctcatgttccatgaggtccactagaatcacctgataccagtaattagtctgagccctgatgtgtggtacaatgttaagggttctggaggggtcagttttcttggcaaattgggtgttcagaagagccagtagccctgtacatctcagttagttgaaagtcatattattgagtctccacaggg

SEQ ID NO: 416688 - DNA, 568 bp, Homo sapiens
ggaagtgagaaaaggaagactcagtattatccattggtacctaagaggcagagagacaaaggtgaggactggagaaacacctggaaagatgctctaggaagcgagaacttcagcaattccagacttaarcttccagacaggactgaggaccacatggttagaaaacccttacttcaggggtggatacattctgttttcagtgggagcaccaaagaatgctgcttctaatatcaactttcctgaatactatatccttggttttgaaaggttgtagtgtgaatgttaatcataggaattgggtcattcttgtcataccaaacagagccatgaaaccagaggggaaaggcactcagggtgaaaaatattgtttctagaatgcaattgaaataggccctattatgccatggaactaatgtttatggttttttgaataaacatagaaattgacttccctgatcttaaaactcaagatagttacatctgtcttacctgagttcttttttcagtaaaccaaccatcaggcctcccagatactatcaaggagctgaaacttacatatcactgaatc

SEQ ID NO: 416689 - DNA, 414 bp, Homo sapiens
aatatccctctttacctctcatgtcctatagggttgcccaataagagggtcccccatgagatttggaagtgagaaaaggaagactcagtattatccattggtacctaagaggcagagagacaaaggtgaggactggagaaacacctggaaagatgctctaggaagcgagaacttcagcaattccagacttaagcttccagacaggactgaggaccacatggktagaaaacccttacttcaggggtggatacattctgttttcagtgggagcaccaaagaatgctgcttctaatatcaactttcctgaatactatatccttggttttgaaaggttgtagtgtgaatgttaatcataggaattgggtcattcttgtcataccaaacagagccatgaaaccagaggggaaaggcact

SEQ ID NO: 416690 - DNA, 568 bp, Homo sapiens
ggaagtgagaaaaggaagactcagtattatccattggtacctaagaggcagagagacaaaggtgaggactggagaaacacctggaaagatgctctaggaagcgagaacttcagcaattccagacttaagcttccagacaggactgaggaccacatggttagaaaacccttacttcaggggtggatacattctgttttcagtgggagcaccaaagaatgctgcttctaatatcaactttcctgaatactatatccttggttttgaaaggttgtagtgtgaatgttaatcataggaattgggtcattcttgtcataccaaacagagccatgaaaccagaggggaaaggcactcagggtgaaaaatattgtttctagaatgcaattgaaataggccctattatgccatggaactaatgtttatggttttttgaataaacatagaaattgacttcccygatcttaaaactcaagatagttacatctgtcttacctgagttcttttttcagtaaaccaaccatcaggcctcccagatactatcaaggagctgaaacttacatatcactgaatc

SEQ ID NO: 416691 - DNA, 514 bp, Homo sapiens
tgcaaaatcttcaggctgcaggctgctgattgtgagagtgaattctgtcccagatccactgccgctgaaccttgatgggaccccactttgcaaactggatgcagcatagatcaggygcttagggactttcccctggtttctgctgaaaccaggctaaataattgctaatgccctgcctcgcccgacaagtgatggtgactctgtctcctacagatgcagacatggcagatggagactgggtcatctggatgttacatctggcacctgagattggaaacataaaaacaaatgtccacacaattaatcatgttgtaagagaatttccctgaacagtaaagcagtactgagcactctgggctgagtaaactgttagtgttctccatccttacctgggaaccagagcagcaggagccccaggagctgagcggggaccctcatgtccatgctgtgtcctgagtgggactgattcctccatgaagtgtgtccagcctattaataaggcttcagggcagga

SEQ ID NO: 416692 - DNA, 514 bp, Homo sapiens
tgcaaaatcttcaggctgcaggctgctgattgtgagagtgaattctgtcccagatccactgccgctgaaccttgatgggaccccactttgcaaactggatgcagcatagatcaggtgcttagggactttcccctggtttctgctgaaaccaggctaaataattgctaatgccctgmctcgcccgacaagtgatggtgactctgtctcctacagatgcagacatggcagatggagactgggtcatctggatgttacatctggcacctgagattggaaacataaaaacaaatgtccacacaattaatcatgttgtaagagaatttccctgaacagtaaagcagtactgagcactctgggctgagtaaactgttagtgttctccatccttacctgggaaccagagcagcaggagccccaggagctgagcggggaccctcatgtccatgctgtgtcctgagtgggactgattcctccatgaagtgtgtccagcctattaataaggcttcagggcagga

SEQ ID NO: 416693 - DNA, 514 bp, Homo sapiens
tgcaaaatcttcaggctgcaggctgctgattgtgagagtgaattctgtcccagatccactgccgctgaaccttgatgggaccccactttgcaaactggatgcagcatagatcaggtgcttagggactttcccctggtttctgctgaaaccaggctaaataattgctaatgccctgcctcgcccgacaagtgatggtgactctgtctcctacagatgcagacatggcagatggagactgggtcatctggatgtyacatctggcacctgagattggaaacataaaaacaaatgtccacacaattaatcatgttgtaagagaatttccctgaacagtaaagcagtactgagcactctgggctgagtaaactgttagtgttctccatccttacctgggaaccagagcagcaggagccccaggagctgagcggggaccctcatgtccatgctgtgtcctgagtgggactgattcctccatgaagtgtgtccagcctattaataaggcttcagggcagga

SEQ ID NO: 416694 - DNA, 568 bp, Homo sapiens
tctgggctgagtaaactgttagtgttctccatccttacctgggaaccagagcagcaggagccccaggagctgagcggggaccctcatgtccatgctgtgtcctgagtgggactgattcctscatgaagtgtgtccagcctattaataaggcttcagggcaggaggctatgctctgggaacatgcaaatgagcaggggatggggcaggctgggcgcagctgcagggctggctcatctcagtaactcagcagcagctcagtgtccccaggtgtcccaggtaagatcagggtagcacagatttgtctgcagagaatgggtttctactggagactattttgttacgagagacattttttagattttttttgacaatttgaaatattccttaggagtccgtggagtatcatatttcattggcgtatggggagtatataggaggatattctttttttgtaggaaacacatagtaaagttttagacgatagaattctaaggtctttaaaagactattgtataattccggttagggaagggggtatttattgtatacttgcaacttttctgtaagt

SEQ ID NO: 416695 - DNA, 568 bp, Homo sapiens
tctgggctgagtaaactgttagtgttctccatccttacctgggaaccagagcagcaggagccccaggagctgagcggggaccctcatgtccatgctgtgtcctgagtgggactgattcctccatgaagtgtgtccagcctattaataaggcttcagggcaggaggctrtgctctgggaacatgcaaatgagcaggggatggggcaggctgggcgcagctgcagggctggctcatctcagtaactcagcagcagctcagtgtccccaggtgtcccaggtaagatcagggtagcacagatttgtctgcagagaatgggtttctactggagactattttgttacgagagacattttttagattttttttgacaatttgaaatattccttaggagtccgtggagtatcatatttcattggcgtatggggagtatataggaggatattctttttttgtaggaaacacatagtaaagttttagacgatagaattctaaggtctttaaaagactattgtataattccggttagggaagggggtatttattgtatacttgcaacttttctgtaagt

SEQ ID NO: 416696 - DNA, 568 bp, Homo sapiens
tctgggctgagtaaactgttagtgttctccatccttacctgggaaccagagcagcaggagccccaggagctgagcggggaccctcatgtccatgctgtgtcctgagtgggactgattcctccatgaagtgtgtccagcctattaataaggcttcagggcaggaggctatgctctgggaacatgcaaatgagcaggggatggggcaggctgggcgcagctgcagggctggctcatctcagtaactcagcagcagctcagtgtccccaggtgtcccaggtaagatcagggtagcacagatttgtctgcagagaatgggtttctactggagactattttgttacgagagacattttttagattttttttgacaatttgaaatattcctyaggagtccgtggagtatcatatttcattggcgtatggggagtatataggaggatattctttttttgtaggaaacacatagtaaagttttagacgatagaattctaaggtctttaaaagactattgtataattccggttagggaagggggtatttattgtatacttgcaacttttctgtaagt

SEQ ID NO: 416697 - DNA, 568 bp, Homo sapiens
tctgggctgagtaaactgttagtgttctccatccttacctgggaaccagagcagcaggagccccaggagctgagcggggaccctcatgtccatgctgtgtcctgagtgggactgattcctccatgaagtgtgtccagcctattaataaggcttcagggcaggaggctatgctctgggaacatgcaaatgagcaggggatggggcaggctgggcgcagctgcagggctggctcatctcagtaactcagcagcagctcagtgtccccaggtgtcccaggtaagatcagggtagcacagatttgtctgcagagaatgggtttctactggagactattttgttacgagagacattttttagattttttttgacaatttgaaatattccttaggagtcsgtggagtatcatatttcattggcgtatggggagtatataggaggatattctttttttgtaggaaacacatagtaaagttttagacgatagaattctaaggtctttaaaagactattgtataattccggttagggaagggggtatttattgtatacttgcaacttttctgtaagt

SEQ ID NO: 416698 - DNA, 540 bp, Homo sapiens
tccaaagtttatctctcttagtgagcatggccactgcacggagcatgtctctgccatgcaccatcaatgccactgtccgcttttacattttatcagtgagtgggracatcatcctgacccagacaccagcctccctgttaacatctttaggaaagagacactcaatcttttatcaagcaactgcccatgttcatggacaaatcagttggatccagatgaaattggacatggatttgcactcgttatatctcacatctctaatgtgcccaaaaatgtcccagcctggttcagtagcagggaaagtggatacaaccatatcagcatcagtgggctgcagctagggctccacaaaattttactgatgcctgactaggggagccaaatcacagtgctgtagcttgtgcacaaatcttcctgctgctttataggctgcctgaattttaagggaacttgcttatattgggagaaaggaagaatgttccatttgccctctaaatgtttgctaaaaataaactgacaaaaggaagattaataagagaa

SEQ ID NO: 416699 - DNA, 540 bp, Homo sapiens
tccaaagtttatctctcttagtgagcatggccactgcacggagcatgtctctgccatgcaccatcaatgccactgtccgcttttacattttatcagtgagtggggacatcatcctgacccagacaccagcctccctgytaacatctttaggaaagagacactcaatcttttatcaagcaactgcccatgttcatggacaaatcagttggatccagatgaaattggacatggatttgcactcgttatatctcacatctctaatgtgcccaaaaatgtcccagcctggttcagtagcagggaaagtggatacaaccatatcagcatcagtgggctgcagctagggctccacaaaattttactgatgcctgactaggggagccaaatcacagtgctgtagcttgtgcacaaatcttcctgctgctttataggctgcctgaattttaagggaacttgcttatattgggagaaaggaagaatgttccatttgccctctaaatgtttgctaaaaataaactgacaaaaggaagattaataagagaa

SEQ ID NO: 416700 - DNA, 579 bp, Homo sapiens
acacatgggaggtggcagggcccacagagttcaccctcccaccccatcatcctccctcatttcccttctgctctcagcagggacccagtgcattagcagcccwgggagctgagcagggagcctcactgtgggaaggtgaactgaggagtcctgatcagtcaaggcaaggttagagctgagcttttatctcagactcacaagggaaggtcttccctaggggacagcatgcaaatcccctggtgggtgcagtggggtggaaagagccaaggagaaggtggggacctctcttgtgagcaaaatgacataaatatattttatgtttttaaggatatcaagagaggtaaaatctgtttcctgagtggcagaagggacatatttagatgtttcctgctatttcctctacccaatttctagttcgttaggactttctcaggcatgttttacacttctctttaataaggttgagctttcataaatatttggtgattcttatttcttggttcaggcttatttaaaagagcctaggtttgttttattttattttatttaaggaaaaacacacagtgcaaaaggttcaaa

SEQ ID NO: 416701 - DNA, 579 bp, Homo sapiens
acacatgggaggtggcagggcccacagagttcaccctcccaccccatcatcctccctcatttcccttctgctctcagcagggacccagtgcattagcagcccagggagctgagcagggagcctcactgtgggaaggtgaactgaggagtcctgatcagtcaaggcaaggttagagctgagcttttatctcagactcacaagggaaggtcttccctaggggacagyatgcaaatcccctggtgggtgcagtggggtggaaagagccaaggagaaggtggggacctctcttgtgagcaaaatgacataaatatattttatgtttttaaggatatcaagagaggtaaaatctgtttcctgagtggcagaagggacatatttagatgtttcctgctatttcctctacccaatttctagttcgttaggactttctcaggcatgttttacacttctctttaataaggttgagctttcataaatatttggtgattcttatttcttggttcaggcttatttaaaagagcctaggtttgttttattttattttatttaaggaaaaacacacagtgcaaaaggttcaaa

SEQ ID NO: 416702 - DNA, 583 bp, Homo sapiens
ttctttgaacatatatttgataagggtggagcacatagacaccatggagatggaccataaggcagggagctccgaattagattaggtgaattttgagtctctgactatatgatgctcttgtgggttttaattatttcccatgttttatgtttctcatattacaaatagcttttatttttaagatagtaactattatagaaattcagcttataaatycctggaaatttctaacagaaagattgatgaaaagatggtttttttaggcccccacaccagcctctgcctgggacctgactttgtctctgagccagtggaatctgtgatgaggttttgagttgggcagtgaaatcaccacagggaaggctgtgctctgggtgctttggatgacaggaggacactccttcagggtcagtgatgctgggagttcaaagggagactcagcatggagctgcctgtgagttatcccagcaatcctgtttggacagtgatcatctcacaagtgtgctcggaagccactggatggccaaaatgtgggctcaggttggagaaggacaaagctatagggatgaaaatataagactca

SEQ ID NO: 416703 - DNA, 583 bp, Homo sapiens
ttctttgaacatatatttgataagggtggagcacatagacaccatggagatggaccataaggcagggagctccgaattagattaggtgaattttgagtctctgactatatgatgctcttgtgggttttaattatttcccatgttttatgtttctcatattacaaatagcttttatttttaagatagtaactattatagaaattcagcttataaattcctggaaatttctaacagaaagattgatgaaaagakggtttttttaggcccccacaccagcctctgcctgggacctgactttgtctctgagccagtggaatctgtgatgaggttttgagttgggcagtgaaatcaccacagggaaggctgtgctctgggtgctttggatgacaggaggacactccttcagggtcagtgatgctgggagttcaaagggagactcagcatggagctgcctgtgagttatcccagcaatcctgtttggacagtgatcatctcacaagtgtgctcggaagccactggatggccaaaatgtgggctcaggttggagaaggacaaagctatagggatgaaaatataagactca

SEQ ID NO: 416704 - DNA, 583 bp, Homo sapiens
ttctttgaacatatatttgataagggtggagcacatagacaccatggagatggaccataaggcagggagctccgaattagattaggtgaattttgagtctctgactatatgatgctcttgtgggttttaattatttcccatgttttatgtttctcatattacaaatagcttttatttttaagatagtaactattatagaaattcagcttataaattcctggaaatttctaacagaaagattgatgaaaagatggtttttttaggcccccacaccagcctctgcctgggacctgactttgtctctgagccagtggaatctgtgatgaggttttgagttgggcagtgaaatcaccacagggmaggctgtgctctgggtgctttggatgacaggaggacactccttcagggtcagtgatgctgggagttcaaagggagactcagcatggagctgcctgtgagttatcccagcaatcctgtttggacagtgatcatctcacaagtgtgctcggaagccactggatggccaaaatgtgggctcaggttggagaaggacaaagctatagggatgaaaatataagactca

SEQ ID NO: 416705 - DNA, 604 bp, Homo sapiens
tcttgaatgttcaactgaatacagtttttgtgtaattcattgtccraatggaatgatagaatatttcacattcccttgtgcttccctcatggacaatctttgtcagttatcacccctctcacccagcaaaattaatgtctttctgacatctatacaatcatttaggttttcctgtcttaaactttatataaatagcattaagtgtatttttatctttttagacttggtattgctccttacaacttttgaggccttcatttctttcagaggattcaaggtcctgtctcatgtcatttcctgtgattctgaaggattttctctcaaatgtcttgtaagagacatagctgctatgaatgaatgtattttgtttatcaaagaatttttttgctttttctttagatttgaagggtattttcgatggatatagatttcctggttgcctttttttttcctttcagcatttaaatatgacatttcactccttctagcctctattggtcctgatgaaaactcggccaatggctatgttgttgtttttctgtatatagtgtctgctttcattcttgatgcaatgaagattttctctttgtctttcaatatttta

SEQ ID NO: 416706 - DNA, 604 bp, Homo sapiens
tcttgaatgttcaactgaatacagtttttgtgtaattcattgtccgaatggaatgatagaatatttcacattcccttgtgcttccctcatggacaatctttgtcagttatcacccctcycacccagcaaaattaatgtctttctgacatctatacaatcatttaggttttcctgtcttaaactttatataaatagcattaagtgtatttttatctttttagacttggtattgctccttacaacttttgaggccttcatttctttcagaggattcaaggtcctgtctcatgtcatttcctgtgattctgaaggattttctctcaaatgtcttgtaagagacatagctgctatgaatgaatgtattttgtttatcaaagaatttttttgctttttctttagatttgaagggtattttcgatggatatagatttcctggttgcctttttttttcctttcagcatttaaatatgacatttcactccttctagcctctattggtcctgatgaaaactcggccaatggctatgttgttgtttttctgtatatagtgtctgctttcattcttgatgcaatgaagattttctctttgtctttcaatatttta

SEQ ID NO: 416707 - DNA, 604 bp, Homo sapiens
tcttgaatgttcaactgaatacagtttttgtgtaattcattgtccgaatggaatgatagaatatttcacattcccttgtgcttccctcatggacaatctttgtcagttatcacccctctcacccagcaaaattaatgtctttctgacatctatacaatcatttaggttttcctgtcttaaactttatataaatagcattaagtgtatttttatctttttagacttggtattgctccttacaacttttgaggccttcatttctttcagaggattcaaggtcctgtctcatgtcatttcctgtgattctgaaggattttctctcaaatgtcttgtaagagacatagctgctatgaatgaatgtattttgtttatcaaakaatttttttgctttttctttagatttgaagggtattttcgatggatatagatttcctggttgcctttttttttcctttcagcatttaaatatgacatttcactccttctagcctctattggtcctgatgaaaactcggccaatggctatgttgttgtttttctgtatatagtgtctgctttcattcttgatgcaatgaagattttctctttgtctttcaatatttta

SEQ ID NO: 416708 - DNA, 604 bp, Homo sapiens
tcttgaatgttcaactgaatacagtttttgtgtaattcattgtccgaatggaatgatagaatatttcacattcccttgtgcttccctcatggacaatctttgtcagttatcacccctctcacccagcaaaattaatgtctttctgacatctatacaatcatttaggttttcctgtcttaaactttatataaatagcattaagtgtatttttatctttttagacttggtattgctccttacaacttttgaggccttcatttctttcagaggattcaaggtcctgtctcatgtcatttcctgtgattctgaaggattttctctcaaatgtcttgtaagagacatagctgctatgaatgaatgtattttgtttatcaaagaatttttttgctttttctttagatttgaagggtattttcgatggatatagatttcctggttgcctttttttttcctttcagcatttaaatatgacatttcactccttctagcctctattggtcctgatgaaaactcggccaatggctatgttgttgtttttctgtatatagtrtctgctttcattcttgatgcaatgaagattttctctttgtctttcaatatttta

SEQ ID NO: 416709 - DNA, 620 bp, Homo sapiens
ctcaaaatcttctctttttctgagcccactccaaaaagcagccttccaagttagcttataagtgcggtggtggagtagacccaagtgtgggatttgttatgtcaatactctaagcaggccttgccaacactgtgctgcattctcagtgattggagctgcaaagtacaattatttgtccttaccttgaaggggatgagccaacgctactcatgttccttcactaaatccctgatamcttctccaatgtgacaggtccttaacttttgtagggttgaatcccacactctggtcttcatgtgctttcactgaaaatccagagtccttattattttctgcttatcctatctagttaccacgatgacatcaatatcgtgttgtatggagtgatgctttgtgaagcgtccacaggatcaaagtttcttcagcctcattgtgaatgtgttgtcaggaaagttaagatagccctgtgccgagactgaggatgtgagctgctgttcaccccagatgactgcagagcctcccagagactgcgatggactcttccttcactctgaggctgggccctgggtctggtcaagccctgccggggctcagcggcgctcatctgcaggtgccagcag

SEQ ID NO: 416710 - DNA, 620 bp, Homo sapiens
ctcaaaatcttctctttttctgagcccactccaaaaagcagccttccaagttagcttataagtgcggtggtggagtagacccaagtgtgggatttgttatgtcaatactctaagcaggccttgccaacactgtgctgcattctcagtgattggagctgcaaagtacaattatttgtccttaccttgaaggggatgagccaacgctactcatgttccttcactaaatccctgataacttctccaatgtgacaggtccttaacttttgtagggttgaatcccacactctggtcttcatgtgctttcactgaaaatccagagtccttattattttctgcttatcctatctagttaccacgatgacatcaatatcgtgttgtatggagtgatgctttgtgaagcgtccacaggatcaaagtttcttcagcctcattgtgaatgtgttgtcaggaaagttaagatagccctgtgccgagactgaggatgtgagctgctgttcaccccagatgactgcagagcctcccagagactgcgatggactcttccttcactctgaggctgggccctggktctggtcaagccctgccggggctcagcggcgctcatctgcaggtgccagcag

SEQ ID NO: 416711 - DNA, 612 bp, Homo sapiens
catattacatatacacataattttacatttatttttgtagcgtgtgttccttttatttccaagcagaacagagtctggctgagtaaagactttgagtacatttgcagactctccctctttggctccaacaaggtcccagtcattcagtaccagggagggcacagctgacagcacccatcccaggaacccagagctagtcccgaggtctgggtcttgagacttttactcttgccaggctgcaggatatatgcttaatgcagctctcgtgaatttgtgagcagtttccttcccttaagcccctgccaggcagccctgtggccaggsgctgtggttcctcccaggtcctcagctctgtggctcaggagagcagctgcttcctccacagcttagggtcagcatcgggcagctctcaggcactgcagcctgactgtagccctgggttaaggaccctattccaaatgtctcctcatttattgtagtactggaaagtctgtcttgttcttaaactcaaagtccacatttccataattgctaaagctggcatttgccatctggaaaagtagaaatgtgaattcattgtcattctcagagcctggcctcttccaagcccac

SEQ ID NO: 416712 - DNA, 612 bp, Homo sapiens
catattacatatacacataattttacatttatttttgtagcgtgtgttccttttatttccaagcagaacagagtctggctgagtaaagactttgagtacatttgcagactctccctctttggctccaacaaggtcccagtcattcagtaccagggagggcacagctgacagcacccatcccaggaacccagagctagtcccgaggtctgggtcttgagacttttactcttgccaggctgcaggatatatgcttaatgcagctctcgtgaatttgtgagcagtttccttcccttaagcccctgccaggcagccctgtggccaggcsctgtggttcctcccaggtcctcagctctgtggctcaggagagcagctgcttcctccacagcttagggtcagcatcgggcagctctcaggcactgcagcctgactgtagccctgggttaaggaccctattccaaatgtctcctcatttattgtagtactggaaagtctgtcttgttcttaaactcaaagtccacatttccataattgctaaagctggcatttgccatctggaaaagtagaaatgtgaattcattgtcattctcagagcctggcctcttccaagcccac

SEQ ID NO: 416713 - DNA, 551 bp, Homo sapiens
ttgcttgaccttcctcgtctccatattttccacagtcaagaaagatactcccattttataggaacctggcaagtgaagatattgtgcccacaggactgtgctgcctggctgtgactcagaccaggaaaatgagcacatttgagtgagatcaggcatttcccctccytcatctcaatccaaaacgactctgtagtaacacatctgatgggcagtcagagaaaggggtcagatttctagcagttgacagttgataccagagctgctgtccttctgggggcagtagtgagaagagccgctctctcttctgctgcaagagacagcttgaatgtggagtctcagacagcaggaggagctcccccgacctgtgccagcagtacgattcttggaattgttctagaggctttgactggagcctgttttttaaggcttttcaacaatttgtaaggaatttaataacctctagtaaatccctttttgcttcatggatttgacatttgcaacagggaatatacgcagtccgcagtgacatcattcacagcctcctttattct

SEQ ID NO: 416714 - DNA, 551 bp, Homo sapiens
ttgcttgaccttcctcgtctccatattttccacagtcaagaaagatactcccattttataggaacctggcaagtgaagatattgtgcccacaggactgtgctgcctggctgtgactcagaccaggaaaatgagcacatttgagtgagatcaggcatttcccctccttcatctcaatccaaaacgactctgtagtaacacatctgatgggcagtcagagaaaggggtcagatttctagcagttgayagttgataccagagctgctgtccttctgggggcagtagtgagaagagccgctctctcttctgctgcaagagacagcttgaatgtggagtctcagacagcaggaggagctcccccgacctgtgccagcagtacgattcttggaattgttctagaggctttgactggagcctgttttttaaggcttttcaacaatttgtaaggaatttaataacctctagtaaatccctttttgcttcatggatttgacatttgcaacagggaatatacgcagtccgcagtgacatcattcacagcctcctttattct

SEQ ID NO: 416715 - DNA, 551 bp, Homo sapiens
ttgcttgaccttcctcgtctccatattttccacagtcaagaaagatactcccattttataggaacctggcaagtgaagatattgtgcccacaggactgtgctgcctggctgtgactcagaccaggaaaatgagcacatttgagtgagatcaggcatttcccctccttcatctcaatccaaaacgactctgtagtaacacatctgatgggcagtcagagaaaggggtcagatttctagcagttgacagttgataccagagctkctgtccttctgggggcagtagtgagaagagccgctctctcttctgctgcaagagacagcttgaatgtggagtctcagacagcaggaggagctcccccgacctgtgccagcagtacgattcttggaattgttctagaggctttgactggagcctgttttttaaggcttttcaacaatttgtaaggaatttaataacctctagtaaatccctttttgcttcatggatttgacatttgcaacagggaatatacgcagtccgcagtgacatcattcacagcctcctttattct

SEQ ID NO: 416716 - DNA, 551 bp, Homo sapiens
ttgcttgaccttcctcgtctccatattttccacagtcaagaaagatactcccattttataggaacctggcaagtgaagatattgtgcccacaggactgtgctgcctggctgtgactcagaccaggaaaatgagcacatttgagtgagatcaggcatttcccctccttcatctcaatccaaaacgactctgtagtaacacatctgatgggcagtcagagaaaggggtcagatttctagcagttgacagttgataccagagctgctgtccttctgggggcagtagtgagaagagccgctctctcttctgctgcaagagacagcttgaatgtggagtctcagacagcaggagragctcccccgacctgtgccagcagtacgattcttggaattgttctagaggctttgactggagcctgttttttaaggcttttcaacaatttgtaaggaatttaataacctctagtaaatccctttttgcttcatggatttgacatttgcaacagggaatatacgcagtccgcagtgacatcattcacagcctcctttattct

SEQ ID NO: 416717 - DNA, 605 bp, Homo sapiens
gcatgcagtttgctttttaaactacacacagatgggttgacagaagatagatttataacctccagatatttgagcaaaatgtctcagatcattggtgaccacttcgctatgcagatacatgtgtagttcctataaaatcaaactaaatattaatattaagaacagaaagaagcagagatatctgtggtcaaacgccacatgagatacagayttttctatatcttgcattgaaaatatatttaatacatctaatccacttaacattatgcctcagcctatcctatcctaaatatgctcagaacacttacattagcttactgttggtcaacattatcttacacaaagcttatcttacaataaagtgttgaatacctcatgtaatttattgaatactatattgaaagagaaaatagaatagttgtgtaaatactagaatttctatttctacttgaatgcatatcacattcacaccatctgaaagtcaaaacattataactccaactgtcataagtcaggtactatcagtaagttcagacaagaaactaagaagaaaattaaaaaatgatcagaaaaacaaaacaaattccaggcctgacatggtggct

SEQ ID NO: 416718 - DNA, 605 bp, Homo sapiens
gcatgcagtttgctttttaaactacacacagatgggttgacagaagatagatttataacctccagatatttgagcaaaatgtctcagatcattggtgaccacttcgctatgcagatacatgtgtagttcctataaaatcaaactaaatattaatattaagaacagaaagaagcagagatatctgtggtcaaacgccacatgagatacagacttttctatatcttgcattgaaaatayatttaatacatctaatccacttaacattatgcctcagcctatcctatcctaaatatgctcagaacacttacattagcttactgttggtcaacattatcttacacaaagcttatcttacaataaagtgttgaatacctcatgtaatttattgaatactatattgaaagagaaaatagaatagttgtgtaaatactagaatttctatttctacttgaatgcatatcacattcacaccatctgaaagtcaaaacattataactccaactgtcataagtcaggtactatcagtaagttcagacaagaaactaagaagaaaattaaaaaatgatcagaaaaacaaaacaaattccaggcctgacatggtggct

SEQ ID NO: 416719 - DNA, 531 bp, Homo sapiens
cctggctgagaccgagaccaggaaaatgagcacatttgagtgaratcagacatttcccctccctcatctcaatccaaaacgactctgtagtaacacatctgatgggcagtcagagaaaggggtcagatttccagcagttgacagttgatagcagagctgctgtcctcctggaggcagtagtgagaagagctggtctcttttctgctgcaaaagacagcttgaatgtctcaaacagtaggagctcctccccagcctgtgccagcagtatgattcttggaattgttctagaggctttgactggagcctgttctttaaggcttttcaacaatttgtaaggaatttaatatcttctagttaatcactttatgcttcatggatctgacatttgcaacagggaatatacgcagtccgcagtgacatcattcacagcctccttttttcttgctaaatatataatgctttccaggtggacctgccagaggaagacaatgtgaacaacaatccatgtcaccaaaaatgcaagacaaataa

SEQ ID NO: 416720 - DNA, 570 bp, Homo sapiens
agtgagatcagacatttcccctccctcatctcaatccaaaacgactctgtagtracacatctgatgggcagtcagagaaaggggtcagatttccagcagttgacagttgatagcagagctgctgtcctcctggaggcagtagtgagaagagctggtctcttttctgctgcaaaagacagcttgaatgtctcaaacagtaggagctcctccccagcctgtgccagcagtatgattcttggaattgttctagaggctttgactggagcctgttctttaaggcttttcaacaatttgtaaggaatttaatatcttctagttaatcactttatgcttcatggatctgacatttgcaacagggaatatacgcagtccgcagtgacatcattcacagcctccttttttcttgctaaatatataatgctttccaggtggacctgccagaggaagacaatgtgaacaacaatccatgtcaccaaaaatgcaagacaaataagctcgggaaagccactgggttctcacctagttgcactgtccccctgagtcttttttttttttttttttggtcacctt

SEQ ID NO: 416721 - DNA, 531 bp, Homo sapiens
cctggctgagaccgagaccaggaaaatgagcacatttgagtgagatcagacatttcccctccctcatctcaatccaaaacgactctgtagtaacacatctgatgggcagtcagagaaaggggtcagatttccagcagttgasagttgatagcagagctgctgtcctcctggaggcagtagtgagaagagctggtctcttttctgctgcaaaagacagcttgaatgtctcaaacagtaggagctcctccccagcctgtgccagcagtatgattcttggaattgttctagaggctttgactggagcctgttctttaaggcttttcaacaatttgtaaggaatttaatatcttctagttaatcactttatgcttcatggatctgacatttgcaacagggaatatacgcagtccgcagtgacatcattcacagcctccttttttcttgctaaatatataatgctttccaggtggacctgccagaggaagacaatgtgaacaacaatccatgtcaccaaaaatgcaagacaaataa

SEQ ID NO: 416722 - DNA, 531 bp, Homo sapiens
cctggctgagaccgagaccaggaaaatgagcacatttgagtgagatcagacatttcccctccctcatctcaatccaaaacgactctgtagtaacacatctgatgggcagtcagagaaaggggtcagatttccagcagttgacagttgatagcagagctgctgtcctcctggrggcagtagtgagaagagctggtctcttttctgctgcaaaagacagcttgaatgtctcaaacagtaggagctcctccccagcctgtgccagcagtatgattcttggaattgttctagaggctttgactggagcctgttctttaaggcttttcaacaatttgtaaggaatttaatatcttctagttaatcactttatgcttcatggatctgacatttgcaacagggaatatacgcagtccgcagtgacatcattcacagcctccttttttcttgctaaatatataatgctttccaggtggacctgccagaggaagacaatgtgaacaacaatccatgtcaccaaaaatgcaagacaaataa

SEQ ID NO: 416723 - DNA, 570 bp, Homo sapiens
agtgagatcagacatttcccctccctcatctcaatccaaaacgactctgtagtaacacatctgatgggcagtcagagaaaggggtcagatttccagcagttgacagttgatagcagagctgctgtcctcctggaggcagtagtgagaagagctggtctcttttctgctgcaaaagacagcttgaatgtctcaaacagtaggagctcctccccagcctgtgccagcagtatgattcttggaattgttctagaggctttgactggagcctgttctttaaggcttttcaacaatttgtaaggaatttaatatcttctagttaatcactttatgcttcatggatctgacatttgcaacagggaatatacgcagtccgcagtgacatcattcacagcctccttttttcttgctaaatatataatgctttccaggtggacctgccagaggaagacaatgtgaacaacaatccatgtcamcaaaaatgcaagacaaataagctcgggaaagccactgggttctcacctagttgcactgtccccctgagtcttttttttttttttttttggtcacctt

SEQ ID NO: 416724 - DNA, 581 bp, Homo sapiens
acatgattaaaaaaattaaaaataaattaagctcaaratcaagatggagaaatccattgtaatgagaaatagagcttcctcaaagttagagagggattgaggctcaaaaaattcacagcagtatagaaaccagatatatgtcttcaagttcatggccttaggttttaatttctatttaggaagagtggtacaggacgtaagtccttgagtttatggaagcaggaaggatttcttaataatgaatgtaggatgagagaattctctattgcaggcttatggagacaattagaatgcttgttgttcatctagaaatttggattaaaaaaaatcatccactagaaagtagaatcctaagccaattctcatcaataaataacagctcctagacacagtaagtactcaaaatttgctgaatattgaagcattttaccaaaggacactcctctcctccattcccaaagactcctgtgagtgctcatttgcaaatgaagtaatacatatgtcacttatgacaagtaccagaaacatcaaggcatctgcttcccggataaagttgcacttggccttcattttgccacaaa

SEQ ID NO: 416725 - DNA, 580 bp, Homo sapiens
ttgtaatacagtgatgtgagatgtttgtattaggagaagctaggttaagaggcatgtgggaattctgtcaaatttttgtgaatttcctataacattaaaaatatttcaaaataaaaagtttttaaaatgtcaattatctcaaaattgattgatagattcaatgcagaccatttataatcccatagactttttttagaaattaaactggttctaaaatttacatgaaattcgaagcacttaaaatatttaaagcaatcttgacaaaaggarcatagttggaggatttacaccacctgattccaagacctgctattaaagctacagtaatcaagacagtgtggctctgccataaggatagacaaatagacaaatggaacagaagagagagcccagacataaatccacagttatacagttatttgctttttgacaaaggcaccaaagcagtccaaatgagaaaaaaaaatgtatttttagcacatggtgttgaaataactggctactgatataggggaaaaaaaaaaaacaacttcaggccctaccttataccatacatacaaatacatttgagatggaacac

SEQ ID NO: 416726 - DNA, 540 bp, Homo sapiens
tcttgccacaaaaacaaaagcaaaaaaatgggtaactatgtgagataatagatatgttaatytgtttcacaatagtaatcattttactatctatatgaatcacattacatcatgttgcataccttaaatatatataataagatttattttaaaaaaaataattaatcaagaggtagaatatactgcttccccacagttaaatgatccagagtgatagagaaggggagaaacttatctttgacagcaactattaatatatccttccctcctggcttttgctctaattgtctaccctactaacaaaacctacttccctgcttcagctaaaaaggttatttcattactgttatgtatattatgtactgatatgtacattattgttaacaacttagggtatatgccttcccattcccagaggcatttaacacaatccaaagccagtaggtaaaagatggcttaggtatgagtagtgaaaggtttttggatcagactaggattcagagagatgtgaggaaattttcaaatttgccattgctccca

SEQ ID NO: 416727 - DNA, 634 bp, Homo sapiens
tttggcaggtctctctttgattgattctctaactaactacatgcagctgttaacctctattcaattgccagatgattgatgtattttttccaacagtagcctggggcctaaattggtccacatactaatctaatcaaattgggctgcctagaaggagtagttgcataggtcagtgttwgagatttgtttatgtctgacccctggcaggctcctcccagctttctttttctcaggttatcaactccctcccctattcccaagcaaaatttctgagctgtggatctggagttggggttggagatagggtataattctctttgagtggcatccctactttaggaactgaggttcagtgacagagtaggcagtagcctcagttcttcttggcttgcctcttctggtgtgaaattactgccttatgggccaggtccctggtattctcagtggcactgtgtccaagataaagccttgataccatcagtgggggcttggcagaaaaagggcacccctatctctcagtcgtacttgcctggaacttagcctcagcagcaggtagctgagggcaggatgagaaacgctgaaatcctgtaaggatgatagaccactggctggtacctgaagggaaagaaagcca

SEQ ID NO: 416728 - DNA, 597 bp, Homo sapiens
tcatgttccattccccagaacctgtgaatatgtcacctgacatggcaaaagggactttgcagatgtgaataagggtatggattttgagattgagagattatcctggaatatgtaggtgggcccaatctaatcacactacaccataaaagtagaggacctcccattctagttaggaagatatgtggtgacaaaagaagagtcagagagatgtgacatcgacagctttcaaaatggagaaagggggccaggagcaaaataatgtgggtggcctctagaagctggaaaaggcaaggaaacagattctttctgaaagcctcaagatcagcatgcagccctgctaacatcttgattttatatagcccagtgagacttgtatcagatatttgacctatagaactataatactttgtattaagtcattcttacgataatttattacagcagcaacagaaatgaatatatttcaaaatatttttttctgtaatgccttaacaagtacaaaaggaattgtgtcctgctttcacaaaaaataagtaaaatttaatgtgctggcctatgyatttaaatagcctggtagggttacctctgtgtaatcag

SEQ ID NO: 416729 - DNA, 446 bp, Homo sapiens
acggcaccaaatttcatgcgcctccgtgtgaagagaccaccaaacaggctttgtgtgagcaataaaagcttttaatcacctgggtgcaggcaggctgagtccgaaaagagagtcagtgaagggagaaaggggtggggccgttttacaggatttgggtaggtaaaggaaaattacagtcaaagggagggttgttccctggcggtcagagtgggggtcacaaggtactcagtgggggagcttttgagccaggatgagccaggagaaggaatttcacaaracaatgtcatcagttaaggcaggaacaggccattttcacttcttttgtggtggaatgtcatcagttaaggcaggaaccggccatctggatgtgtacgtgcaggtcacaggggatatgatggcttagcttgggctcagaggcctgacagtaagtgttcagtaaatgtaat

SEQ ID NO: 416730 - DNA, 586 bp, Homo sapiens
cttttcttatttccacataagtatttgaaaacttgtcagaatgctattttcattagacacttttcattattacgctgtcatcactgaacaagtttatttcaaagccttttgagaaaaatgacagaaaacatagcattttatttccttggccgttcattagattagaaatgtcaagaaagacttagattatacttatttttattaaaaggaatgagagacttttcttgaaaaaaagaaaaaaagaaatttaaattttgaatgctacgtcttagggctctatgcagtgaaacattttctcttcattgtttagaaagacttacattttattttaaaattcctgcccrtctttttctcttgaagagataagatactctaatcattctagaacaccagctattaatctgaaattaaatctattacgtgccagaaacaaattaccccaaagttaacctaaaatatcatcagggtaacaccttcagttacaaattatagtaacatcttagataataaatttcagcagctattaaaagagagatgataatagtacctttgtctgaggcttgttatgataattgactttaaatat

SEQ ID NO: 416731 - DNA, 613 bp, Homo sapiens
cttgttatgataattgactttaaatatgtagagcatctaatactgcatgtgaggctgaattctatgaaattactaatactgaagcatttttggcctacagaaggaacggtttcatgtggttcaaccgaagtgttgctcgttaattttgagtttcccattcaccactgcactgacctttagccaggacagtacttactaattataatttaaaggtcgcatggatagagagcaaggcagacttgttacgacaaacctgtgtcttgtctatcttggtatggtggtgcctcagttagcacagggckttcactctcttactatggccagcttcacagtctctgtgacccttcaacctgtcccatgacttctgcttacccgtggccatggtgtctactgatggcatcactatgctcactgccttcacccatatgattctcatatgtgtaatttactagccagtatccagcaaggcctgctgtgtatgggagctggtgccatagaaagtgtggatgaggttatgtgtaggtatctctgctggtggtgggttgatgataaccatatttgacgcccttaaatttctaaaattaggagtcattgtattcattctagattgagg

SEQ ID NO: 416732 - DNA, 572 bp, Homo sapiens
cttttctagccacactactcctttgccaacctaacaaattctgtttctcttctaatgactcttctagacgcagtcctctgccacctgctctaggaaggtatgccataggtagataagttgtctcctgcatttgcttgcagtctccacacactgcagcgatcacatacacctgcacataaaatgtctttgctatacatgcccattcctgggcccacacaagtcttccacccttcctcaggtgtgaataccttaagggtcttctttattcctattttattttatattccagtgtatgttctaacaagtaatcaagtgacttgaatggaaatctcaatagccaaactgagttgttgctgtacatttttaatatttaacagagagatggatctattggaggcagtcatctgagatgatcagatataatggccaatagcaactatgctaatcataaaatttaaaatgtaaaaaattgcttcgtcaaactrttttaaaagatgtatctaaaacatagtaggctgagcatggtgactcatgcctttaatcctagcacattgggaggccaaggtagcagg

SEQ ID NO: 416733 - DNA, 602 bp, Homo sapiens
tttttggaaactgggacttaagtaaaatggcataaaataaaacacttttttttctcatcaacgttataataaaacaacgtctaatcaaacaacattatctgagggcctgctatacagcctttcacttaaagtcacagtttctaagaacctatcaaagacttgaagacctgctgtacatattctgaaatcaccaaaaacaattaacttttctataacttccaagccttcttgtacactccaaaggtcaaaccaagaaaacayaaattttttttttttttttttttgaggcaggatctcattctgtcacccaggctggagtgcagtggctcagtcacagctcactgtagcctcggcctcccaggtccaagcaatcctcccacctcagcctctagagtagctgggaacacaggcaaacaccaccaggactggctaattttttaatttttagtagagacggggtccctatgttgcccaggctggtcttaagcaatcctccacctaggcctcccaaaatcctggaattatgggtgtgggccactgctcctggcccaaaacacaaattctttatcacttgtttaagtgcataggaatcgattttctaa

SEQ ID NO: 416734 - DNA, 611 bp, Homo sapiens
aattttaagacataagagaaaatttaatacaaatttaaatttttggagacaactatttttatacttctacttaagcagatgtaacatttacaaagcatttagagatgtctttctccaggtaagataacaataatttttaacacaaagttagaattccaaggctcaaatgagatatcttctggtcctttcttgtattaacaggaactttaagcagcaaaattstagtaaacttgaaaattacttagtttgagaatcttgtcatatcaactctatgcgctcaaatatatctaaatataatctccccatttaggcagtatctgtgtatgtaagcatattttgcttagttggaggcttgtgattagaagtcacaagccttaagaaaagatgagcgtctgttgaaagctctctccctgaagcattcagttttttcctgaggtcaacatggaggtaagaatgagttggaaaataagctcatatctttgcaaacaaggattgtggggaggagaaaaatcataatatgtcttcaaaacactaaggagaagttgcccctacaggcaacctgttacgttcagaaggcttatctgcctctcagcacctgcctaagtcagcct

SEQ ID NO: 416735 - DNA, 455 bp, Homo sapiens
cacaaaatttaaacattgtttcaatgcaataaaaggatagtgatctacacgaataatatattgatatgtaaacattcaagcaccaccacattagaagacataatcaagtagtcagatgttttactcacacctagaatcaccttcaatataacaacgacaaatgtaggctgacacacaggtgccstttgtgccacttagacaccatgagcagcattggtatctgtgactttctgaaatggtgaaaacagttgtgacctgagcaaagtacgtttcctccactgacactgtagttatatttagaaaattagtgcacattaaaactatgcaatatactttgtatctacatacaaatttgagtttgtttccagattcagaaatttgtaaagagattttgcaattgcacaaacctacagtcactgggtggtgggaaattctttgtagggtaggccagacgt

SEQ ID NO: 416736 - DNA, 455 bp, Homo sapiens
cacaaaatttaaacattgtttcaatgcaataaaaggatagtgatctacacgaataatatattgatatgtaaacattcaagcaccaccacattagaagacataatcaagtagtcagatgttttactcacacctagaatcaccttcaatataacaacgacaaatgtaggctgacacacaggtgccctytgtgccacttagacaccatgagcagcattggtatctgtgactttctgaaatggtgaaaacagttgtgacctgagcaaagtacgtttcctccactgacactgtagttatatttagaaaattagtgcacattaaaactatgcaatatactttgtatctacatacaaatttgagtttgtttccagattcagaaatttgtaaagagattttgcaattgcacaaacctacagtcactgggtggtgggaaattctttgtagggtaggccagacgt

SEQ ID NO: 416737 - DNA, 627 bp, Homo sapiens
cctctttcttggaatggcatttctgatcaattccataaaatggcaattttgtcagaatcacttatctagtgatgaggttcaatcacataacgattttgcgcttatgatggtttcgaatctccttgagctaacccctgataaggtggatgggttaattatatttttgaaggaatttgaagacagtaagatgtgtatgcagttcaatatatccttcttataagaaatgatgtttacctttagtagatttatgattgtacatttgttaagatagtaactttaaggaaaggacattttttaatgcaartattattttgtatgagtagcttccaaatcagttggccattggattatttgagagttatgtattagtttcacatcagtttcctcttactgtcaaaattttaaaatgtagttcaggtttacaaaccagaagattttatgcatttatagctaaaaatttcctttccatgtacgtaatatttatgtatctgtgacatgagtcatttgatttgatgtctgcttaactgaaatgtgatgagttgacattatcaaacggagcagattttctgaaactttaagccaaatgttccagggtatgttcggaaggattggcaaagcagggggccg

SEQ ID NO: 416738 - DNA, 603 bp, Homo sapiens
catgcatgcataaagtgtgttggggcaaaccctactggaagcttctttgggtcataggtcttcctggccttttcatttgtgcagcctcttggcaggtcatcactmctttctaattctaagtcctgaaaattgcctatgaggtaagtttctatttcattaaatgttctattaagacaagttttctattgtcagttttgttatgaccaaattcataaatggaacatataataaaatgttaggaaatttggacattttatttcatgattattgatttctaaatttatgtaaggtccattctgtgaaattcctagagaaatttaaagagttttctttagaatattttatttgcagttattgatacatgtaacaaaaatatgggtagtatttttgctttctatgacaaaatatttatagttaagatattaaaaatataacgaatattaattatacaaaaataatacattttagaatgataattcaaatacagaacccatcaaaatcaataactatatgttagtatcaataaaatgccaattaaaaatataagaaaatatgagaaaatactaagaaaatataagaaaataatttaagaaaacctcttaa

SEQ ID NO: 416739 - DNA, 535 bp, Homo sapiens
tctaaactgtttcttctgaaacctggttccacagtaacatagtctcctgatttacgaatataaagccaatcaatcctcagagatgagccattcttttcrtcactgctactctcttttgaagtgacattttcgtagctgcataatctgagataatgtttggttgtataaaatatgctactattatcacatgtatgtgctgaaaaattacaaataagccatgtttcttaattatgttatcatactgagtgatatggtttggctctgtgtccctacccaagtctcatgtcaagttgtaatcgcgaagtgttgagggagagacctggtgggaggttattggatcttggaggtggtttcccccatgctgctctcatgatagtgagggagttctcatgaaatctgatggtttaaaagtggaagtttcccctgcacgctgtctctctcctgccaccttgtaagaatgtgcttgcttatccttcaccttttactgtgattgtaagtttcctgaggcctccccaatcatgcataactgtgagtc

SEQ ID NO: 416740 - DNA, 535 bp, Homo sapiens
tctaaactgtttcttctgaaacctggttccacagtaacatagtctcctgatttacgaatataaagccaatcaatcctcagagatgagccattcttttcatcactgctactctcttttgaagtgacattttcstagctgcataatctgagataatgtttggttgtataaaatatgctactattatcacatgtatgtgctgaaaaattacaaataagccatgtttcttaattatgttatcatactgagtgatatggtttggctctgtgtccctacccaagtctcatgtcaagttgtaatcgcgaagtgttgagggagagacctggtgggaggttattggatcttggaggtggtttcccccatgctgctctcatgatagtgagggagttctcatgaaatctgatggtttaaaagtggaagtttcccctgcacgctgtctctctcctgccaccttgtaagaatgtgcttgcttatccttcaccttttactgtgattgtaagtttcctgaggcctccccaatcatgcataactgtgagtc

SEQ ID NO: 416741 - DNA, 506 bp, Homo sapiens
aaaatataatcttgggtttttttatcagagtaattcagctttttctaacctcatgggcagattaggccttacattttcaagtaaaactttgaaatgataatttgtaaaggcctgtccgattaactatttagataaaaatttacctcttgtagcttcctagaggttgtagacagagcagggtatggttggcttcatttttctcacttacaagtagagaacggaaaatctggaatgagatcagggataccatatgggattggaaatcacctgtgaaataatatttgtaaagccaattaaagagagtcaaagacagacctctaagtgcaagtataaagggaaaatagaaacatctcaatgttcacccatttaagggacagggaaatacattaaayccagataaattacctgagaggtaatcataatagttgtgtgagttagtgcaattatcttaatttacttatagagaaagtgagatacagaaatgaacggagctaaatgaagaagtc

SEQ ID NO: 416742 - DNA, 412 bp, Homo sapiens
gaaaaatggtgcactccagccatattgaatattagggctagtgctatatgctctgtctagaaaagaataagctcatttctgagatgtagagtctaggatgatgctggcaggtcccattttctttattgttagtgttcttctagacatgtagcaaattggagagtacatagttataatggggttcatrcgaaagccaaaaatcaacttttagtagcagcatttacaacaaataaaggttaagaaaacacaccatctagcaaataaattataaacacttaactcaattttaggagatggtttcttagaaaataaaccataaaatgggtggcttataaacaacacgcatttatttttcggttttggaggctgagaagttcaagataatgtgcttgcagatgtggtgtctggtgag

SEQ ID NO: 416743 - DNA, 451 bp, Homo sapiens
tcctcttattagtttttgaaaatgctagatctactgacaaagttgaatgacattaggtagcatccaaaacccaatccagtgattagattgaagtcagcagtcagatagaccagataaaataatatagcaaacagggcatattattctggagaatctggacatttaaagaacaaagtaaacaatcaaaagaacaaatgatcatttattgttcacatggtaggagttgacattactgacttgaaactaaagattactaaattttttttcatctggaaagatgaattgatttaaatctctctacaaatttatttactatgtcctcaatttgcaatagtggagctatatagtgcaccaaaatttgagatrataattactgcctaaatgtttaagctagtttgcatagttactgccaaaacatttacagcttgcttccatagttcttactgaacct

SEQ ID NO: 416744 - DNA, 649 bp, Homo sapiens
tatcatgccagagttgaatctgggggaatgatagtgtagagttaaattttctatgtctctccttttgtgagtctacatagaaaataaaaacaatcatatacataagcttgcttttggaacaaagacagatatttagatttgaaactgtaatagatgctattacaatgtagaacaactatttatttttatctagccatctggtatctgaaaggatatttctcagaagtgttaaaacacttttatgctcaagtaagtttgggcaattctgggttaaagaaagttaaactagtaacaatgggttacttcagaacctttaatatgttaatatgttttgcaaattaccaaagaaatttccattgccctcatattggtatttcttaaatgtatttcatatcagaaatttatggccctgattgtccccagtgcwtgcaccggaaatttccattgccctcatattggtatttcttaaatgtatttcatatcagaaatttatggccctgattgtccccagtgcatgcaccggaaaatgctattctaggcacttgctaagaaagcaaaaataattactccttttctctcttttatgtgaatggtcttagtttgtatgtgaagatcatgtaacttacggattgatcagaaaaactgaaga

SEQ ID NO: 416745 - DNA, 609 bp, Homo sapiens
atttaaaagcagtgggtggtgttaggcacccatcatatggcagtattaattttgtcacagatgtacartaaaaagtaacagtacaaggactgaattttaagcttaggctaatatagaataccagggataatggcattttacaaatacgcacgcgcacacacacacacacacacacacacatttccatatgtactatggatcagagaatattgatgggtaattaatataagtccataattggttataagacaagtctatgtatcaatgtctttgctaatttggtttttataagaaggcaaaaaggcagacgggagaacagctcccttcaacttgggccacttacagcagaactgtcatgctctatccatctctgcccccatagcccttttcactgtggtgcactcctgacttccaacgggctgagagttttctcacgcagccacggcctgtgcacctgaaaacaccacaggctggaagtacaagagagatcatgaccacttggggaaaaggggtataagaaccccagatcccttatgccccagagaagaagatgctgatggcaaacttttctaagggttctcagtttcccagtgggattaagctacagct

SEQ ID NO: 416746 - DNA, 586 bp, Homo sapiens
ctctatatatttcaaagaccccaccataatttctggcacaaaatccatcaaaatctaataaagtagcttaattagcatgatcatcgtcttattaataatttactggttggcaaaggctctaatgggattataatgcatcattttaaaaataaaagaacatcattgtgatgctcatcaaggtgagcactayagaagtaaaatctgcactaaacaaatttggtatctttaaaatataactagataacctgccatttcctgataaagcacagtcctataagagagcatattttctttctaggaattctgcaattcatatctaaaaatgatttcaaggtaaccattctgacactttgaaaaatatatatattggttcctgatcaacagggcatatttaaaatttttccgtaaaatggcctggtttagcaaatcaacaataaattagcagaaatcactatcaatatttaacattaaaatccttgtccacagaaaatgaaatttcctaatggaccttagaatatttgtaatgttcactgtatattcataatgcattttgtagacagacagtataaagaagtcaacgtaacag

SEQ ID NO: 416747 - DNA, 582 bp, Homo sapiens
atactgtgcatgtagagaggaaatgcatgattgttcctttggttcagaaagagttaaacactagaaagactgcctataggaatcttaggataatattcataagcgcatactagtttctgagaatgagtaagttgataaagaattatcgtggagatttcagagtttaaaaggaagatttttttgtccatttaggaaaagaaaagtttaatattttccagaattcgtcatatgcgaagtagtctttgtttctaagattttgggatgtattaatgcatctttgttaataatgatcttattgtagtggtaaatatcaacaggaatagcattgaaaaaggacattataagttgtaataaggaatctactatataatatccggttatgagccagtattactgttttgacatatcttcctaagtacagtattagcttttcttttcycacaatgtgtaaagataaggagataaactaactggcaatctaagtttgtaatgaacttgaaaacattgtatagcattttttataacacaagttaaatcacaaagagttaaatattgttaatatttatgtcaattttataaatt

SEQ ID NO: 416748 - DNA, 622 bp, Homo sapiens
gctttaaactagctctctttctgaattatctctccacctttctgcacaaatggacaagagaagtatagaaatgctaagtctaaaagtgtgtgccacatgtgcagttcctttccagggaattcttccaggataaatggctgcgataggtgccacgagamaccaatcctcaccctattcccggatgcacttcatcagagcaattatagactggtctgtatgtagtctcacagaagagctttgctcagaagggatcttagttattaattagaccaataaaatttgtcttgatgggtcaaaataggatacaaagaaagaatcattcactggtaggattactacgcaaaagcacagagtttctgctgattacgctttaatttaattatattttgtgctcattctacattcacatacctgtaccttgcttttctataagtcagcagacatgggagtaagtggatactataagcaggtcgatgtttaaagatgatgaacattaaacaaaggaggaggtgactagttgctgcgaacaggactgattgatgcagaagtagagtagagctagtcacaatactgaaggaaaacaggttcactcctgcgtcttactaaggagatgtggccaaga

SEQ ID NO: 416749 - DNA, 622 bp, Homo sapiens
gctttaaactagctctctttctgaattatctctccacctttctgcacaaatggacaagagaagtatagaaatgctaagtctaaaagtgtgtgccacatgtgcagttcctttccagggaattcttccaggataaatggctgcgataggtgccacgagacaccaatcctcaccctattcccggatgcacttcatcagagcaattatagactggtctgtatgtagtctcacagaagagctttgctcagaagggatcttagttattaattagaccaataaaatttgtcttgatgggtcaaaataggatacaaagaaagaatcattcactggtaggattactacgcaaaagcacagagtttctgctgattacgctttaatttaattatattttrtgctcattctacattcacatacctgtaccttgcttttctataagtcagcagacatgggagtaagtggatactataagcaggtcgatgtttaaagatgatgaacattaaacaaaggaggaggtgactagttgctgcgaacaggactgattgatgcagaagtagagtagagctagtcacaatactgaaggaaaacaggttcactcctgcgtcttactaaggagatgtggccaaga

SEQ ID NO: 416750 - DNA, 622 bp, Homo sapiens
gctttaaactagctctctttctgaattatctctccacctttctgcacaaatggacaagagaagtatagaaatgctaagtctaaaagtgtgtgccacatgtgcagttcctttccagggaattcttccaggataaatggctgcgataggtgccacgagacaccaatcctcaccctattcccggatgcacttcatcagagcaattatagactggtctgtatgtagtctcacagaagagctttgctcagaagggatcttagttattaattagaccaataaaatttgtcttgatgggtcaaaataggatacaaagaaagaatcattcactggtaggattactacgcaaaagcacagagtttctgctgattacgctttaatttaattatattttgtgctcattctacattcacatacctgtaccttgcttttctataagtcagcagacatgggagtaagtggatactataagcaggtcgatgtttaaagatgatgaacattaaacaaaggaggaggtgactagttgctgcgaacaggactgattgatgcagaagtagagtagagctagtcacaatactgaaggaaaacaggtkcactcctgcgtcttactaaggagatgtggccaaga

SEQ ID NO: 416751 - DNA, 587 bp, Homo sapiens
tagaatcattagagtgattacctccatgctcctgttctcatgatagtgactgagttctcagctctgatagttttatagggagattttcccccttttgctcagcatttctctttgctgctgccatgtgaagaaggacgtgtttgcttccccttccacaatgattgtgaggatcctgaggcctccccagccattctgaactgtgagtcaattaaaactctttcctttgtaaattacccagtcttgggtatggccttattagcagtgtaaaaatggactaatacayagtgttagattattttagttttatttgattacttataaagttttaaatgttttcatgaatttattggtagaagatggaatttattggtagaagaattccaatacaagttctttgagcctttttctaatgtaaaccaactttaatataagccagcattttaaaaattgtaaaatatttatttttgttttaaccaagttgtagcaatagtttatctgaaataaagatgtgcataaatctgaataaacatggtttttaatttaagaaaatatcaagaaacaacttaaaatgtcaaagatttgtgaaa

SEQ ID NO: 416752 - DNA, 620 bp, Homo sapiens
  misc_feature (1)...(620): n = A,T,C or G
tttacctagcacacatttatctactcagtgtctgccatacgttgagcactgtgctaagtgcttasggacaagaatcattaatggttgaatatggagggtcttgaattctatacaaaagaattctatacaaaattctatacataaactatagtttacgctgtaggcagtggggcagacgaacaacatgattagactcctaatttaaaaataaccatcgtgaaaatgtggaggatggagtgagtaatgggagaaagtccagttagaagacccttgaaatggtcccaataagagtaaaatgaaagcctggggtaagacagtagccataaacactgaaagaggaatcaggtatgaagtcctgagtgatgacatgtttgagcctcccatgtttaacaaagacagcagcatataaaagatcttacaatatttgaaactgaagagtgaaaaaggcaatgatggacttgacttccctaagaaaggtctgctgtcatggttggccagttcaggttgcctctcatccttcataatatgaagccaanttgccatgccacacatgaagcaacagctatctgaacaaggcagtgcaaccgctggaaagtgtatacagagttagttggaattaa

SEQ ID NO: 416753 - DNA, 528 bp, Homo sapiens
cttgggacaaaaactatccatttcatgaggatactgaaatttattttctagagttgttcatcgagtctgaagtggctgtaagcctccctgttctcccttttcctgccacaaataatgtgtaatctatttactctttggcctaggactttatacaaattctartgtgtggagttggggagttcaattgtttattattcacttatgttggactatattatagtccgagaatgttacctgcataatttatgacttttgaaacttactgcagtttcctagactaatagaggatccgtttttgttaatgttccacggatgcttcaagaaagcatagtgtatctatttctagggcccaagactacttgatttttaaagcaacataattttcttacacaaattatttttccttatttattttacaacttggcatattaaatactgattggcacataaaaggctctgactatggattttaaaaaatctctcctggtattcttacactatgtgtgtatgtgtgtgttatgttatttg

SEQ ID NO: 416754 - DNA, 528 bp, Homo sapiens
cttgggacaaaaactatccatttcatgaggatactgaaatttattttctagagttgttcatcgagtctgaagtggctgtaagcctccctgttctcccttttcctgccacaaataatgtgtaatctatttactctttggcctaggactttatacaaattctagtgtgtggagttggggagttyaattgtttattattcacttatgttggactatattatagtccgagaatgttacctgcataatttatgacttttgaaacttactgcagtttcctagactaatagaggatccgtttttgttaatgttccacggatgcttcaagaaagcatagtgtatctatttctagggcccaagactacttgatttttaaagcaacataattttcttacacaaattatttttccttatttattttacaacttggcatattaaatactgattggcacataaaaggctctgactatggattttaaaaaatctctcctggtattcttacactatgtgtgtatgtgtgtgttatgttatttg

SEQ ID NO: 416755 - DNA, 528 bp, Homo sapiens
cttgggacaaaaactatccatttcatgaggatactgaaatttattttctagagttgttcatcgagtctgaagtggctgtaagcctccctgttctcccttttcctgccacaaataatgtgtaatctatttactctttggcctaggactttatacaaattctagtgtgtggagttggggagttcaattgtttattattcacttatgttggactatattatagtccgagaatgttacctgcataatttatgacttttgaaacttactgcagtttcctagactaatagaggatccgtttttgttaatgttcyacggatgcttcaagaaagcatagtgtatctatttctagggcccaagactacttgatttttaaagcaacataattttcttacacaaattatttttccttatttattttacaacttggcatattaaatactgattggcacataaaaggctctgactatggattttaaaaaatctctcctggtattcttacactatgtgtgtatgtgtgtgttatgttatttg

SEQ ID NO: 416756 - DNA, 343 bp, Homo sapiens
ttttgtatttttagtagagacagcgttttaccatgttggccaggctggtcccgagctcctgatctcgtgattcacccacctcggcctcccagagtgttgggattacagcatgagccaccrtgcctggcctcaaatactttttaaatttctgccttaatttcattgtttacccaaaagtcagtcaggagcaagttgtttagtttccatgtatttgtgtggttttgagatttcctcttggtactgatttctatttttattctactgtggtctgagaagataaattgtattatttcaatgtttttgaatttatcaagacttgctttatgactgagaatgtggtcaa

SEQ ID NO: 416757 - DNA, 532 bp, Homo sapiens
atagtgtttgaggagataaagagatctttatttgtagctatgagttgaaagggcttggaataatttacttggcagtagaaaaataaaaatatattcatttctataatgaatttaggatatgaacaacagggtttatcaggtgacagagaatagagagaagaggagatggagaagcaaaattgaatccacagagtagatccagtagacttgaaggtcgatttgggaattgatgtgtgggttgggagggaagctggcccaagatactatctagaggaggctgaaaaaaactaggttgagtgaaataatgaaatgcttatattttccccacttgagaatttagagaaagtataataactctaaagtagatgaaaggaaataataaagcatgaattactgaaatagtaaacagacattttatagaaaggatcagtgaagccacagtttgtttttggataagattaacataactaatgaagagtgaaccctaatgtraactatggactttaattaatcataatgcatccatattggt

SEQ ID NO: 416758 - DNA, 565 bp, Homo sapiens
tttctgggatagcacaagttaccctgtatctttgctcaaggaattctttctgtaggcttcctagaggataccagaattaaatttttctcccctttgawgagtctctccaaagcaaggagtaatacctgtattacttttgcccacccatgaagggcacttgattttatttcaagccctggcttttagacgtaccttagcattttgtgagttgtaattaaaatcccaacctcttcctaggaatacaaccataatctcctaaactctgtcctcacctccaacacagtccttttggctttcaagaactatccacaatcaggctcagatgtgcttttcctttgttatgtaatcagatgaatctgaaagtggaaagttacatgtattaaagtgaggagatgggtagaggaaggtggaaatgaagaaaaagaacaaatctgaaaggaatcagagaaactgtattctgatactattgtttagatttctaaaggaaatggaaagatgtttggcaatgagagaagtcagttatgatttttagaagatggttgttttcttcagcatttaaaactgt

SEQ ID NO: 416759 - DNA, 565 bp, Homo sapiens
tttctgggatagcacaagttaccctgtatctttgctcaaggaattctttctgtaggcttcctagaggataccagaattaaatttttctcccctttgaagagtctctccaaagcaaggagtaatacctgtattacttttgcccacccatgaagggcacttgattttatttcaagccctggcttttagacgtaccttagcattttgtgagttgtaattaaaatcccaacctcttcctaggaatacaaccataatctcctaaactctgtcctcacctccaacacagtccttttggctttcaagaactatccacaatcaggctcagatgtgcttttcctttgttatgtaatcagatgaatctgaaagtggaaagttacatgtattaaagtgaggagatgggtagaggaaggtggaaatgaagaaaaagaacraatctgaaaggaatcagagaaactgtattctgatactattgtttagatttctaaaggaaatggaaagatgtttggcaatgagagaagtcagttatgatttttagaagatggttgttttcttcagcatttaaaactgt

SEQ ID NO: 416760 - DNA, 613 bp, Homo sapiens
tattggaagagttaaatgagataatacactgaaagcatgtcagtcacttggagccttggcacaagaaagcattcagtaagtgcaatctatcattaaaataataaatgagaacaaagtattcccacagggccaattctcctaaaaacgtgaagtactaatgtctgcaaaacccttgtcagcaaaccctccgagacagtaaaaatgtacatggaacagtttactactttttgaggcagcttcatcatatctacttttgccgatgatgaagctctgaacaaagggcatttgatgacaacygaatggagtgcctgtgcatatgcaaatcaattccttttgagaaggcttccattgataacaccaacatcccctacctggaccaattgtagaaggtaatgcagaacatcatcgtcctccaagctctccagtttctgaactgcaatggctcttacattttcatctgagaagttgcagtccaggagctgcattgttaacccaacatccaaagcactttgatcccagacttcccttctggccaacaattggtatgttttggccacaatttcttgctgtccccatttcactgaactaaatagcttaggatatgcttttgggt

SEQ ID NO: 416761 - DNA, 510 bp, Homo sapiens
ccacttgcctctgcctaccaaagtattgggattactggcatgagccatctgatgtacattttttaatatgcaaataaatatttgaataagaaaattacagaaaattaggctgaaatatttctatatctacatatctgcattaatgaccaaagagtttgagatatagccatcccttggtacctgcaggagtttggttccaggaccccctgcataaaacaaaatttgtacatgttcaagttctacaatcagccttgcagaacctggatacatgaggagtcagccttctgtatatggggttttgcatttgtgagtactgttttgttgaaaaaaagctgcatataagtggccccaygcaattcaaacccatgttattcaagggtcaactatacttggtctgccatatttccagtgtcataggggtagatcccagcagccctgtctcccccatgcgatcccacatccctgatcataactgatgggccgtgatgtggactcttgaccaaagctcag

SEQ ID NO: 416762 - DNA, 641 bp, Homo sapiens
ggttcttagcggttagaattggctgcaaagaggtatgagagaactttctggcgtgatggaattgttctttatcttgaacatagtggtaggtgcatgggtttatgtatttattaaaactcctcaaattctacatttaaaattggtgaaagttattcatgcartgttccataaagctgattcaaaaagcaaatgggagttggtagcattgtcaattgattctagcttctctaattttctttaagcccagacccaggaactaatttgcattgattagaataactcatcagagaaggttgctatttagaagattccttggtatctgatgttgacagagaatggaaattatttttcctttgaagtcctactgagaagatactgtacttagaaaattgttaagattttcatcatttaaagtactcctaaaagtcacactccaagggtgatgccattgaacttttggctttaatttcttgagattttttatccttctttaaaaagaatatagaaatgatagtgatcacttattgagcagtaactcttggccagaattctacttaatgcttcactttcattatttcaattaatcagcacagtaattctgtaaagcaggtactatactgtcctccctagtttacagagga

SEQ ID NO: 416763 - DNA, 634 bp, Homo sapiens
acaaactggtggcttaaaacaatagaaacatattcttttacttccagaggctagaagtccaaaatcaaagcactggcagggcatgagcccttggaggcttctaggggcggatccttccttgccttttccagctgctagttgccccaggttgttccctggcttgtagatgcatctctgcctccatcacatggtactcaccttggatgttacttgggttggggccactctcataactttgccttaacttgattatatctgttataaccttatttggaaactatttccaaataaggttacattcacaggcaccagggttgagacttcaacatatctttttgggggacaaagttcaacccacaacaaacatgcacccattatgaagtatcagctatcrctaacatattataaacatggtaaagactgggactaggtcaatcttgctccgtatttgaatccccagtacttagtgcagtgtctggtaggtggtgggccctcaatagtgattttttttcttttgagacagggtcttgctctgttgcccaggctggagtgtagtggcataatcatgcctcactccagcgtcgaccctctgggctcaagcaatcctcccacttcagcctcctgagtacccagg

SEQ ID NO: 416764 - DNA, 558 bp, Homo sapiens
aaggaagtcattagtctgtttaaaccgagaatattctccaatgccacagacaaatgagaaaaaaccaaacctgcaaataatcctagcactggacattgcttaaccaaacaatcagcaatgccaacatcttttctccagggaagagttcaggtaggaaaagagctatacttctgaaatgccagctttcacaatgtctattgcatttgaaatccaagttcgatgattgctatgctaatttaaaccatagaacactaacttgttyttgattctagcctaaagtattaggctgaatgtttctctccttgtttgatgccaagaacaagatgtagaaaccaattaaactgcacagtccatcctttgtctctgcaaacttcgatctgatcaagaaaatactttttagcatcctcctcatttttccccactgtgagggcatcccggatatattcaatgtcttctttgcttgttaactggggcattcctgtcatcagcatcatggagaacaggatgatcagtaggtttgtgtgatgacgaagggctagataagccttaacacagatg

SEQ ID NO: 416765 - DNA, 616 bp, Homo sapiens
atttttgtgtctgaaaatcaaatttatccccaaataatgaaaatatgatcattttccaaaaaataaagtttcagaacaatgtatatggtaagatcccattttgtaaaaccaagtgcaaatatattcaagacacattattttcccattttaacgtagaggtgtttttcaaacccaaaaaactatgattaaaatggcagttcatcatataatcactgacatcttaaaaatgaaaaatattatagataatttcaatgtttccaagtacagacatagttactgtactgcccaatctcactttatagaaaaggctggttaaggtaatttcataaaatatataaattcataaacaccattgctgtctctcttctttctgaaatttttcacatgctattcctctaccagtttacctggaatacttgccccttcctctacccacaccccattatttacctgctaactttcatttgtaaggcagtgttccctagactaacttaggttctccygctatgtgctctcatagcaccctttacttcccctcctcaacactcctcatacatcatatgtatttgtttatgtcaaaatgtatactccatgagggcagggacaaagtatgtct

SEQ ID NO: 416766 - DNA, 516 bp, Homo sapiens
gtaacactctgtaataattatattgcaggctggattaggatgctattatcataatctggacgtttacaattatctgtaatttgcaaagatgcgccaggtcttgattacagcagtttttttttttttttttttttgtaccacgctaaccatcactaaacagtgacagtaataacagctaattttgctggcaatataagaggtgctggggtgtgcaaacaatttcacacctggatgtgctcactcaaccaagaatatagagaaagagcttctgccctgagactcaraaaaatattctcctgtgctttggttcagtatagatttctaaaccctgatcattgcttaagagatattcactgagggtaagtttttatttcttgcatacttcaaggaacagttcttatttctcttctcacactttccaagatacatgttgccgttgtaatttatcatgggcgacaactttgctttatagatttctctatgctgaccttttatcccctctaatagtaaaaaggg

SEQ ID NO: 416767 - DNA, 411 bp, Homo sapiens
ggatgtaggatggaggcaagaaggaagggaaacagcattttttttttttttagtggagtgttgggaagcaagttgtaacttacatgttttgaaaatttgctctttggggaaagaggcaacttcctttgcaggagatgagtatctcccggacgcgggctggacaggaatgcccaagaaggcacaatgtccattaagccggtgaatggcagggagagttcctgcagcccaaagtccttataatgacttttaaaaattactgtcttaaacacatataacttaaggaagcccaaatcctcgttgctggcttgcaaaaagagccaaacagctccacttctgtttaatattttcatctattttcaagacattgraataaaggctctttaactatgttcagtggccaaagactcccgc

SEQ ID NO: 416768 - DNA, 503 bp, Homo sapiens
tgtgtgatcctcctgaatctttccaagccaatggaaaaccctcaggtcctccggcaagggctcttcacctttttgaatcattatggatccttgcagcagtccggtggagcctatgaactctttttagaacagtgtttttaaatgtatgaaataaaagccaaaagattacaattaaaacagattattttgaaacacagttaacaaagtatcttaaaatgcaaatctgtgatacggtaatgtgtgttcttctttattaatgyattaaattacaagatctagtggcaagtataataactaccatgtttccaacatgctgatgatataaagagatagccttgatacctgaagtgtgaaaaaaaatctgtgatttatttcaatgacaaagttgcaggcttagcagacatctttcagttaacaaaggtcacaggacttgcccagccacctttgtggcttagactagtatgtgaatctgagaccccatctcctttattgcctttggatca

SEQ ID NO: 416769 - DNA, 283 bp, Homo sapiens
catgtgaatatgtgtctgcttccccttcaccttctgccatgattgtaagtttcctgagggcttcctggccatacaaaactgtgagtcaattaaatctcttttcttcataatctcaggtatgtatttatagcagtttgagaatrgcctaacacgataaggcactagctagactgaccaaaaaaaagaagagagaagaccaaaataaacaaaattagaaatgaaaaagaagacattacaacttatttcacagaaatacaaaagatcatcagagactattatgaac

SEQ ID NO: 416770 - DNA, 582 bp, Homo sapiens
tggcatatatacacaatggaatattattcagctgtgaaaaaagaatgaaattctgtcatttgcagcaacatggatggaactggaggtcattatgttaagtgaaataaaccaggcatggaaagacaaatattacmtgttctcactcatatgtgggagctaaaaacgtttatctcatgggggtagacagtagaatatagttacaggaggctgggaagcttatgtgtaggggtagggagatgaagaagagatggttaatgggtacaaacatagagttagatagaaggaataagttctaatgttcaatagcagactaggatgattatagctaacaataatgcattatatattacaaaatagcaagagaagagggcttgaaatgttcccaacacatggtaatgatcaatgctcaaggtgatgaatatcctaaataccctgacttgatcattacacattctatggatgtaatagaatatcacatgtactccataaatgtgtataattattatgtattaataaaaatatgtaacttatctaattgtaaattgttgtactttaatgtttaataatggctagtttaatcaa

SEQ ID NO: 416771 - DNA, 629 bp, Homo sapiens
aggcattgggttcaactaaaaaaatcatgattttccatttataaataaaataattttaaatctcttaagaaaaatcaaacactttttttttttgagacagagtctcactctgttgtccaggctggagtgcagtggcacagtctccactcactgcaacctccacctcgcaggttcaagctattctcctgcctcagcctcccaagtagctgggattacaggcacgtgccaccatgcccagctaattttttgtatttttagtagagatggggtttcaccatgctggccagtgyggtctcaaactcctgacctcatgatctgcctgccttggcctcccaaagtgctgggatgacaggtgtcagccaaagcgcctggcctcaagtactctttaactaatgttcccctaacagtttaaattcccctgaacaaataacctatttataaacttatttaattaagttacctcaagccagtggttctcaaaagtctagagagtttattaaaacacaaactgctggactccatccctacagtttctgatatagtaagtctgaggttaaatatgcacatttaacacttttccagatgatgctgatgctactgatgtgggaaccacacttggagaattacaa

SEQ ID NO: 416772 - DNA, 575 bp, Homo sapiens
aacttggtagggagattgaagttgtgtatcttttgaatcaaaggctgaaaatattgaaaaaagatatatattaataacatttgcaataaagctgaattatatcaggcataatctgctcatgaaatctattcctgtttctttttcttatastttctttcttttttattataatttaagttctggggtcaatgtgcagaatatgcacttttgttacataggtataaacgtgccatggtggtttgctacacccatcaacctatcacctacattaggtgtttctcctaatgttatccctcacctaagcccccacccccgacagaccccagtgtgtgatgatctcctccctctgtccatgtgttctcattgttcaactcccacttatgagtgagaacattcagtgtttggttttctactcttgtgatagttggctgagaatgatggtttccagcttcatccatgtccctgcaaaggacatgaactcatccttttttatagctgcatagtattccatggtgaatatgtgctacattttcttaatccagtctatcgttgatggacatttgggctggttccaa

SEQ ID NO: 416773 - DNA, 575 bp, Homo sapiens
aacttggtagggagattgaagttgtgtatcttttgaatcaaaggctgaaaatattgaaaaaagatatatattaataacatttgcaataaagctgaattatatcaggcataatctgctcatgaaatctattcctgtttctttttcttatagtttctttcttttttattataatttaakttctggggtcaatgtgcagaatatgcacttttgttacataggtataaacgtgccatggtggtttgctacacccatcaacctatcacctacattaggtgtttctcctaatgttatccctcacctaagcccccacccccgacagaccccagtgtgtgatgatctcctccctctgtccatgtgttctcattgttcaactcccacttatgagtgagaacattcagtgtttggttttctactcttgtgatagttggctgagaatgatggtttccagcttcatccatgtccctgcaaaggacatgaactcatccttttttatagctgcatagtattccatggtgaatatgtgctacattttcttaatccagtctatcgttgatggacatttgggctggttccaa

SEQ ID NO: 416774 - DNA, 604 bp, Homo sapiens
gacccttgaacaacatgggtttgaactgcatgggcacacttacatgcagattttaaataaatgagwaaattttttggagattgagacaatttgaaaaaactcaaaactgtgtagtgtagaaatattcaaaaactaaagtattcatgaatgcataaaatatatacagatactagtctatttcatcatttactaccataaaatatacacaaatctactatacaaagttgaaatttatcaaaatatatgaacataagcccttacagactttatatggtgccatttgcagtcaagagaaatgtaaacaaatgtaaagatgcagttttcaatcataattgcattaaattaactgtggtacacactgtactactataataattttgtagctacctcatgttgctactgtggtgagctaaagagttgcaagtatctccttaagatgtcacataatgctaatcatctctgcagaagcagtttgtctctttagcagatcacaaaaagtgatctttcgtggtttattctcatgtatttttcattgtgggtagtacagtattgtaaacattgaataataccatgggacccacatgtagtgcttctagtgatactg

SEQ ID NO: 416775 - DNA, 601 bp, Homo sapiens
tggccacccagaaccccatgatttaaacacccaaggtgtcaaaatggtctacttgcccccagacatgtctctaattcaggctctagatcgggggttataaggacctttaaggctcattacatgcaggactcaatagaaaggattgtcaccaaggattgtcttttaccccaatggaagagaacatcatgaaagtctggaaggattacaccattgaagatgccattgttgttaagaagaagtcatgaaagcagtcaagcccaaaacaataaatttctactagagaaaactatgtccagatgtacatgatttcacaggatttacgacagagccagtctaggaaatcatgaaagagattgtcratatggcaaaaaaaagtggagggtgaaggatttcaaggtatggatgttgggccagtttcagtggctcatgcctgtgtttccagcagtttggaaggccaaggtgggaagattgcttgaggccaggagtttgagaccatcctgagcaatatagtaagacctcatctctattaaaaaatttgaaaaatcacgcactaatagtcaccacaccagaggaattaacagaaggtgacttgaaggagatg

SEQ ID NO: 416776 - DNA, 564 bp, Homo sapiens
aagcagtttacaatgctattaagtatgctttgagatattttgatggttgtataatttccagtcttaggattcctatgatttatctaactgcttctctactattttgtttttccatcattacaaataatgtataaggttataaacgtatcctttctcatttcatcacaccattgccaactctagttattataaaaattctgtaggctaggcatggtggctcacgcctgtaatcccagcactttgggagggattacactagatcayttgaggccaggagttcaagaccagtctggccaacatggtgaaaccccatttctactaaaaatacaaaaattagctggtgtggtggcacacacctgtagtctgagttacttgggaacctgaggcacgagaattgcttcacactgggagatggaggttgcagtgagctgagatcatgccactgcactccagtctgggcaacagagtgagactctttctcaaaaaaaaaaaaagtatttactcatttgacaggcaaaaaataacataaattacttgtttacctatgaagtaaaacatgttttc

SEQ ID NO: 416777 - DNA, 565 bp, Homo sapiens
gttagcttctaggggttgtctatattttttgcyttccatctaaacatacctttcattgtaggaaaaacggattttctgggaaaagtagtctatttataaaagagaacgcagttgctatagaaactcagcatgtatcattgatgtttgatgtttgaaattatactgataattgtacattttaaattaatgagtttaaaactttaaaaaaatacttaatgatagggctctttcttgctttatggaaccgatatgtgctttcagagttagctcggtagggcaatttcattttctcttgatgttggatgataaagctggaaattcattcatttaaaaaactttgattccacaatagaatgatttagaaaattaccaagagagatgaggctattgaacaatttatttttcttttgtacttgggaaaattattcccaaactttcctgtctacccaacccattcaggaccataagaccatttccctatgtctgtggcttctatatttctacacctgtacttaccttgaattttgttctttttctggatgtttctaataacttagggagagct

SEQ ID NO: 416778 - DNA, 565 bp, Homo sapiens
gttagcttctaggggttgtctatattttttgctttccatctaaacatacctttcattgtaggaaaaacggattttctgggaaaagtagtctatttataaaagagaacgcagttgctatagaaactcagcatgtatcattgatgtttgatgtttgaaattatactgataattgtacattttaaattaatgagtttaaaactttaaaaaaatacttaatgatagggctctttcttgctttatggaaccgatatgtgctttcagagttagctcggtagggcaatttcattttctcttgatgttggatgataaagctggaaattcattcatttaaaaaactttgattccacaatagaatgatttagaaaattaccaagagagatgaggctattgaacaatttrtttttcttttgtacttgggaaaattattcccaaactttcctgtctacccaacccattcaggaccataagaccatttccctatgtctgtggcttctatatttctacacctgtacttaccttgaattttgttctttttctggatgtttctaataacttagggagagct

SEQ ID NO: 416779 - DNA, 398 bp, Homo sapiens
taaattagttttaacattcaagtaaatttgaaaatgttacctttctaatcaacttttaatttctagtatcttagaatctttgaactttatgcatgtgtattttgtataatcaacatttaatctacatagttatgttctgctttttaaatrtaacacaaatgggttcccatgctgtaaaaaaattcataagtatttaaattttctaatcttctgtttaactagttcccttttgagtattttccagtttttcattcctaatgtgctaaaaatgtaatttgtgcagcttttttcttttgaatgctttactttataaaatatataatcattttagaaaatttagaataaaatattccattacttcaaaataaccactatcagccgggcaaggtggctcacgc

SEQ ID NO: 416780 - DNA, 398 bp, Homo sapiens
taaattagttttaacattcaagtaaatttgaaaatgttacctttctaatcaacttttaatttctagtatcttagaatctttgaactttatgcatgtgtattttgtataatcaacatttaatctacatagttatgttctgctttttaaatataacacaaatgggttcccatgctgtaaaaaaattcataagtatttaaattttctaatcttctgtttaactagttcccttttgagtattttccagtttttcattcctaatgtgctaaaaatgtaatttgtgcagcttttttcttttgaatgctttactttataaaatatataatcattttagaaawtttagaataaaatattccattacttcaaaataaccactatcagccgggcaaggtggctcacgc

SEQ ID NO: 416781 - DNA, 610 bp, Homo sapiens
agagtttaggagatactgaaataggatttgtagacagatttaatcagaatatactacctactatgtgcccatttgtgaacagaaatgtaatcagttcctgtcaattgaatggataatattctggccctctcttaggcattttctataaaaatagataattcatgtttgcatattttcctatgtcaggcactagaatgtgaacttacgaggagagcaaataatggattatacagtaccagccaccagcacagtgtctggtacatgataagtaatgtttgaataaacaaacaagtgaattaatgtgaaaatagacctcaaataagaaataaacaaaactcaattattaacatttgaggatacctacagttagtatggtagatkgtggtacatgagattaaatgctatcaactaggtttttcttggtttaaagacatcctggagtctcaatggactcaccagggcctgcacaggatccagaaaagagatacaggtcttcgaaatgatagtgtctacatggagagagatatttacagaataagccaaagctacccaaataaagcctatttctatgaaaaaaaaaaaaaacaaaaaaaaaacaaaaaaaacatga

SEQ ID NO: 416782 - DNA, 590 bp, Homo sapiens
gtcttcagtactttaggtatttcaggacttctaatctacctttagaacaacaccaacaaagtgcagaaatcccaasgtgcctttaaaaggaaggttttcttgatgtggttgaatgtttttgaaatgacagattcttgtttcatatagtggaaccaggacagttgtatgctttgtttcatactcttttttttgaagcatttagacaacagcaaatttccttctcactgttattttagtattatatttgtttctttagttttgctagatgtggttatatatgagtgcctgtatcttaattttatagaactgctttattgtcatttttagttatgctttcatttttgaaatatcggttgcttttatctttatacttgttagtgtcacttcagtgctgcccacaagttcatagtttcctattccaggaaagaaataagaagcaggatatacagggaagactaggcgatagaataactgatggaaagatataggagtatgtgttatagatcttcctagaaatctttcctctcccaaattaccccaatcctaattacaatgagcttaggatttttttctagttgggttttgcacag

SEQ ID NO: 416783 - DNA, 577 bp, Homo sapiens
gagaaacttataagaggagcttggaaaggccagtgacagaaatttgggaaaagacacattcagcagtgtaaggagaacaaatggtcaatgaaaaagacttcagtgacgtatggagacgacaatgggaccatgtgaaaaaatcaagtaagaagataattttaacattcatacctgagtgtcaaacattctataatgaggaaaattagacttaaataaagctactaggtttccttaatgggacattattggtgactttcaagataatcactggagaacaaaaatcgaggacagtaaattaaagagtgaatggaaagcgatgaagcagaagccagactgtgtgggttatagaatatttaaaamaatatatgattctgtaatgcagatatttttaatacaaatctttgtgctttgaaatataaaaaattagatgtgtagctgaaaaacaggtgcatagttagccaagttaaaggaaaagagggattatcttgttaccaaatctgtatctcttaatggtggcgatttgggcagttatgtgaccttttattatcaaacttaaaatgtcatttcaggtttaaca

SEQ ID NO: 416784 - DNA, 553 bp, Homo sapiens
agacagtaatagcagctcaggttagtatttatgtgaacattttttccctgttctgttaaaaaaaaccatgtatttcaaggctctgttgtaaacaggttgactttaaattaaatgttcttgttaatcatttaaggagaatcattaagttatgactgccctttggaacacaaatgtttatttaagttcagtattctgcttccctagaaataggatttctatactctttcagacgaatatttggtaaaatgacttggctgcttctatatttaaacttccttttgaaatgaaaatttgttccaacatggattctaaaggttcagcaaaactgctcatgaatgactggttttagaagcatcttttgatgttttagaaatttctgttaaggccaggcmctgtggctcacacctgtaatcccagcactgggaagctgaggcaggaggatcacttgggcccaggagtttgagacaagcctgggcaacatagggaaacctggtttctacaaaaaatatatttttaaaatttttattttgtcctgcaagcaagtttaaaaaaa

SEQ ID NO: 416785 - DNA, 433 bp, Homo sapiens
  misc_feature (1)...(433): n = A,T,C or G
aaaagaaaccaacgttgttcaggaatctgtaaggggataattcagtcagcatccggagacaagcaaaatgactctactaattttttacatttttcttccaagttagaaagctctttcaggagtgatatctcctttggtcatttctacatgcctgtgacttaggtaggagggccatgattggtgtgctgattttgtaggtrtgcaaattcatgaaggaacccatgaaggagacacaactggttcgagatctctcagagagccatagcccaaccacaatactctctgacnactcgcataggcagagcaggttggagcaaagcaggtcattaatccatgcctgccatttcccccatttaattgggaccattatctatcttcaattattgatattaattgatcacagattatcatctacaaaatacgtgaaaattgg

SEQ ID NO: 416786 - DNA, 346 bp, Homo sapiens
ctaggtaactagctaagacaatttttcaaaacaaataccttattttggagcatctattataaatcatgttattattgaaggaaaatcttcttactacgatctgtatttcctttcaaaatccattgagtcatacattctattaaacaacttgatacttgagtcacacactctattaaaggaatatttattgaacagctcatatgaaagattgtgtcaatatctaaatcwggctcataaattttaaagagtgcatatcctataattaggttttgattatcttcagatgataattaaatcaagacctagaagttggattctgataacttacctggatatggaagctgtt

SEQ ID NO: 416787 - DNA, 438 bp, Homo sapiens
taatacatattcttctccagtgcatatggagcatttaccaaggtagatcatattccagaccataaagcaagtcccaataaacttaacaggattaaagtcctacaaagaatgttcactggttaaaatgaaattaaattggaaatcaataacagaaatatttcttgaaaatcccaaatatttgaaaaataacacttctaaataactcatagatgaaaaaaggaatcaaaaggaaacatagaaagtactttgaactgaatgaaaatgaaagtacaacatgccagtatttgtgggatgcctctaaaatcagyatttaggggaaaatgtataccattaaacacctacattagaaaacaaaatggtatcaaattgatgacctcatctcccatgcaaagcaattagaagagtcagttaaaccaaaactaagtagaataaagaaag

SEQ ID NO: 416788 - DNA, 505 bp, Homo sapiens
aatatacatgcctactatgtatccataaaaattaaaaaatttaaaaagctcaacagtatcaaataattttttaaacaaaataggtaaataaaatcttccatatcaaattccctggccattagttgtaatgycttaaaattttgacactcatttcggtgaggaagaaaagggtactaatattaattgcatgtgcctacgatactgtgctaagcattttagaaacatcattttatttaatcttcataagaactcagtaaagaaaactatgtaaatttttattttaccaagggtaaaagtaattaagaatctgtgtcaaatgcaatgtttgctaccaagtccatctgcttccaaaacccatgccaaaacaccaaacagttcatgctttatctgcatcataaaactgcactccatgaatttaagtaaccacagataatgtattgactagaataaatgatgtctctattataccacatacttatcatgtgtagttgttttgttttgttct

SEQ ID NO: 416789 - DNA, 505 bp, Homo sapiens
aatatacatgcctactatgtatccataaaaattaaaaaatttaaaaagctcaacagtatcaaataattttttaaacaaaataggtaaataaaatcttccatatcaaattccctggccattagttgtaatgccttaaaattttgacactcatttcggtgaggaagaaaagggtactaatattaattgcatgtgcctacgatactgtgctaagcattttagaaacatcattttatttaatcttcataagaactcagtaaagaaaactatgtaaatttttattttaccaagggtaaaagtaattaagaatctgtgtcaratgcaatgtttgctaccaagtccatctgcttccaaaacccatgccaaaacaccaaacagttcatgctttatctgcatcataaaactgcactccatgaatttaagtaaccacagataatgtattgactagaataaatgatgtctctattataccacatacttatcatgtgtagttgttttgttttgttct

SEQ ID NO: 416790 - DNA, 583 bp, Homo sapiens
agaaaagtggcatagtttggatgccaggttggaggccactgaaagcagcagtcagtcactgtggcatgttagagctgcagggagtctgcagacctgcaggcggctaggagtaatcaattatggacataggaatacaataaacatccaaggcttttgagatgaaccaggagactgaataatacattttaaagcagatastatgtatgcagggaagtggaataaaaacacacacttaggcttagggaatacacatcttcagaaaagatttaaaagaccctgagcctttaaaacattttgggcaatgaaggtcttcccctgcacaaagccatgctacaaaagctgggggaagtggaaatttttttcaagtgtccaaatctcaagagaacgtatcaagacataccaaaataaaacagagtaacatgaatgattcaaaggaaccagataaatctccagagattgtccgctaaagaaatgcaggcctctgacttacttgataaataaattaaaacaactaccttaaatatggccaatgaactcaaagaaaacacagtgaaaaacacaaaactaaatctagaaaatggtt

SEQ ID NO: 416791 - DNA, 452 bp, Homo sapiens
tgccaaattgtgcttggagagccacccattttaagccccgctttgttaaataggatggactctcaggaaattatgtcacctcactaaaaggrgaaagcatcccccattcctgtagtttaggctactgacttacccaatagtctgttctggaaactctcttgcatatttacatattgggccacttcgcaagtcttcctgataaactttttgaaggctttccaataatatgcttgttccaggaaaaattgtgttttttcaagtgtatgaaatatcctgcaatcaaaaagaatccagagaaaattaaaatttaaaaatgatcttgcagatgacagatcattataaatttttctaaaaacaaatatatgcaaatgcatggcagtccacttatgtaaggaaatagaatctttcaaatagttctactaattttttaagtttgtttacaaactcctcta

SEQ ID NO: 416792 - DNA, 542 bp, Homo sapiens
aatttcaggttcttcacattatcaaactcattttctttccagcttctcttctcagttgtttcttccatgtctggagcccgttagtctgacattctagggactatttgtattgagctgcctgggtggtcgttcttcctttgaccttggagaatcctacaggcattgccaattggctsaagttgggaccactgcgatgggtcctgtataccatcacacaccatctctatattttgaaacttttctcaaaatatttttctatatctcattaactataggcttcaaggcaaatgtttttagaccccatgtgaaactttatcctaaccctcacttcttttacacacacctaggaatatactttcccattttggggtaaagagaatgtttaatccatattcagtattgaaagaatctcccaatcaggtgactcaatgcaatttgtcaagaacctggttgtgtgatgaagtgtgactttcagtctagtgaacacacttctcaaagcagtggaatattttcctttgaacggaatttttatttccctaatt

SEQ ID NO: 416793 - DNA, 542 bp, Homo sapiens
aatttcaggttcttcacattatcaaactcattttctttccagcttctcttctcagttgtttcttccatgtctggagcccgttagtctgacattctagggactatttgtattgagctgcctgggtggtcgttcttcctttgaccttggagaatcctacaggcattgccaattggctcaagttgggaccactgcgatgggtcctgtataccaycacacaccatctctatattttgaaacttttctcaaaatatttttctatatctcattaactataggcttcaaggcaaatgtttttagaccccatgtgaaactttatcctaaccctcacttcttttacacacacctaggaatatactttcccattttggggtaaagagaatgtttaatccatattcagtattgaaagaatctcccaatcaggtgactcaatgcaatttgtcaagaacctggttgtgtgatgaagtgtgactttcagtctagtgaacacacttctcaaagcagtggaatattttcctttgaacggaatttttatttccctaatt

SEQ ID NO: 416794 - DNA, 542 bp, Homo sapiens
tgttatgttgtatggcaagtgagatttaaggctgcagatgaaattaaggctacttatcacctggctttgagatgggcgattatcctgggtaacctggtgmgcccagtgtaaccacaagggtttttattggagaaaggaggcaaaaatgtcagtgcccaagtgatgggatatgagaagaactagacctgccattgctggctttgatgattgagaaagaggctcagacccaaggaatgtggatggccactggaagctggaaaaagcaagaaaacagaatacgccaccccaaagtatgtttctttggcatatggattattttgagctaaagacaaactgaaaaccagcagaggcaggaaaaacttcttaccgttccctaactgtttaaaaatagagtataaatttccttttggtaaaggaaatttagatttataaagaaaatttacattattaagataattttcatctgtaaagatgtctcctaccaaaaagagagctgcttctccaaataactctgatcacctgggagatttctctgcaaaaca

SEQ ID NO: 416795 - DNA, 554 bp, Homo sapiens
ccaatgttctgtgggggatgacacagtaaatatgcaaacaaamgaaggtcagtgttaagagaccagaaagttctatcatgcaaatagaacacaacaatgaggacaggtggtccctggaagcctccctgaatcggtgaagatggatgtcagactggaatgatgatctgcatatgaagagctatatgagagtcacagagctggggcatttctgtcaaaagaccagagacaggagtgagcagaaggaggcaaatgcagcagatgcatggataccatctcatttttctttcctgccctcttccctggctgcagagaacctgccatgggcacccacccatgggaatttcctttttcttgcagagctctattctctaatatcagcatcacccaattaaaaccacaaatcacaggggcttcctggacactggagcccatctagcccagccttctgtcctgggtttgcatcctgtccacctgccctgtgaagcacccatccacttcatgctgtgttcctatgttttaggcacatgttcaaatcaacaatgacttccttcttt

SEQ ID NO: 416796 - DNA, 561 bp, Homo sapiens
cttgagttgatttttgtatagcataaggaagaagcccagtttcaatcttctgcacatggctagccagttatctcagcaccatttattgaatagggaatctttccctattgcttgtttttgtcaggtttgtcgaagatcagatagttataggtttacggccttatttctggactctattttctattagttccataggtctatgtgtctgtttttgtgccagtaccatgctgttttggttaattggatattctttcaaggtgttttttgatawcaaattctgatactttaatttgcaaagtatcatttttttctctcaacttcatcagtcaccaaaagatgagagtatcttttatattttcatccaagtcgttagtgcagaaagattaccatggcataggaaggtataacctaacacctatttatttgtttgggctcttaaatcagttgcaacatgtctgtctggggtgtcttggtaatttattagcctaataatttcatcattaaaagaaaatgactttatattgacatggctcattgatcatgactgtatcgacatggttt

SEQ ID NO: 416797 - DNA, 579 bp, Homo sapiens
actatctagtagtgacacattcaaaatataaatcgaagacccccaaggtatgacaaaatctctggggagtatgcctcagcaactgcaaacataaaaacacataaatttcttggtgtgtttgaatcttgaaccttcatttagaaattagattgtttcagatcatgatgattcaacacccattgactgagccccttcacctgccagccactrataagccattttcacaagcattatctcataggatccttataattgcagtgaggtctacaaaaaaaagcacaatccatgacattcacaaagacagaccaagtcaacggggacttcaggaaggtgttaaagatggggaaaatcccagaaatacaagattttttgtttccagtctgattgcctttacatggcatcatgggaggaaaaaagattggtgtctgagattaaaaccagcatttattgtatgttgaagaggtactaggacctagactaagaatacaccatgggaggtctcacttagtcctccaacaacactatgaggtaggtgctgtaattatcccctttttcttagagtcccacttgttagattaa

SEQ ID NO: 416798 - DNA, 579 bp, Homo sapiens
actatctagtagtgacacattcaaaatataaatcgaagacccccaaggtatgacaaaatctctggggagtatgcctcagcaactgcaaacataaaaacacataaatttcttggtgtgtttgaatcttgaaccttcatttagaaattagattgtttcagatcatgatgattcaacacccattgactgagccccttcacctgccagccactaataagccattttcacawgcattatctcataggatccttataattgcagtgaggtctacaaaaaaaagcacaatccatgacattcacaaagacagaccaagtcaacggggacttcaggaaggtgttaaagatggggaaaatcccagaaatacaagattttttgtttccagtctgattgcctttacatggcatcatgggaggaaaaaagattggtgtctgagattaaaaccagcatttattgtatgttgaagaggtactaggacctagactaagaatacaccatgggaggtctcacttagtcctccaacaacactatgaggtaggtgctgtaattatcccctttttcttagagtcccacttgttagattaa

SEQ ID NO: 416799 - DNA, 579 bp, Homo sapiens
actatctagtagtgacacattcaaaatataaatcgaagacccccaaggtatgacaaaatctctggggagtatgcctcagcaactgcaaacataaaaacacataaatttcttggtgtgtttgaatcttgaaccttcatttagaaattagattgtttcagatcatgatgattcaacacccattgactgagccccttcacctgccagccactaataagccattttcacaagcattatctcataggatccttataattgcagtgaggtctacaaaaaaaagcacaatccatgacattcacaaagacagaccaagtcaacggggacttcaggaaggtrttaaagatggggaaaatcccagaaatacaagattttttgtttccagtctgattgcctttacatggcatcatgggaggaaaaaagattggtgtctgagattaaaaccagcatttattgtatgttgaagaggtactaggacctagactaagaatacaccatgggaggtctcacttagtcctccaacaacactatgaggtaggtgctgtaattatcccctttttcttagagtcccacttgttagattaa

SEQ ID NO: 416800 - DNA, 598 bp, Homo sapiens
tcccttggagtcaaaatgtgtttaaagcagtgtcacacttgggagattatctttaaaataagatcaaaatattacctacctaatagggtggtgtgaggatcatccagcacccagcactgtgtaaataagcaggaagagaagcggcagtggtgagactaacactgagatatgtgcattttcagcrtaaggactacaagaataagcaaggaatgtgaagcaatatgattattctttctattacaatttttgttaatttttgcttagacaaacagggcaaattgttatcaaatgagaattatctctaagcagatccaaaggcagaagtaattctcctaagaaggttgttatggctgactcacattactgctcccattcatctgagccagagaggaaggatctgaggacagtactaggtcaactccataactttgcacttgtgaattgtgctacagtaaatacacaagagcaggtatctttttaatataatgatttatattcctttggatagacatccagtaatgaaattgctgtatagagtggtagttctattcttagttctttgagaaatcaaaatgtttaaaacaataccaaaaaatat

SEQ ID NO: 416801 - DNA, 372 bp, Homo sapiens
ctactcccactgctgcctactcccactgtctgcctactcccactgctgccttactcccactgcctccctacttccactgcctccctactcccactgctgccttactccccgtgcctccctactcccactgcctccctactcccactgctgcctactcccgctgctgcctactcccrctgctgcctactcccactgctgcctactcccactgtctccctactcccactgctgccttactcccactgcctccctactcccactgcctccctactcccactgctgcctactcccactgcctccctactcccactgcctccctactcccactgctgcctactcccactgcctccctactcccactgcctccctact

SEQ ID NO: 416802 - DNA, 391 bp, Homo sapiens
tggtcagggtgcatcttggttttatacatttttttgggagacgtgagacatcaatcaaatacttttaaggtgtacattggttcagtccagaaaggygggataactcgggggggttgaatgggggcttccaggttataagtagatttaaaaattttctgattagcaattggttgaaagagtttaaagacctggaatcaacagaaaggtaattaatgtctgggttaagataagggattgtggagaccaaggttcttcttattatatgaagcctccaggtagcaggcttcagagggaatagatggtaaatgtttcttatcagacttaaaaaggtgccagactcttagttgattctctcttggatcaggaggaaagcctgggaaagggaaagggg

SEQ ID NO: 416803 - DNA, 391 bp, Homo sapiens
tggtcagggtgcatcttggttttatacatttttttgggagacgtgagacatcaatcaaatacttttaaggtgtacattggttcagtccagaaaggtgggataactcgggggggttgaatgggggctyccaggttataagtagatttaaaaattttctgattagcaattggttgaaagagtttaaagacctggaatcaacagaaaggtaattaatgtctgggttaagataagggattgtggagaccaaggttcttcttattatatgaagcctccaggtagcaggcttcagagggaatagatggtaaatgtttcttatcagacttaaaaaggtgccagactcttagttgattctctcttggatcaggaggaaagcctgggaaagggaaagggg

SEQ ID NO: 416804 - DNA, 556 bp, Homo sapiens
gagagaggcatggagcagattcttcctcagagcctccagaaggaaccacctgctgacaccttgattttggactcctagctttcaggactagcaagagaataaatccctgctgtttgaagccacctggttagtggtcattggttaaggcagccctgggagactaatgcacctgtttagcgctttacctgrtgactatttggaatgtttgcggtagagaatgaaaagagaaatgaagacgaataagaaaaaaaaaagttagtcaagcaagactgaaggctcagctgagacaggcaatgagacggtgccagcagccttggtgatgggggatttcatctcacgctcctcctaagtgggcagtcagtgtggagaacacagaggtctggaatgttctgcagctggagattgttgaaacagattgaggggaaagaaaagggaatgagaattggctgtgttgccgcgaattcagggctgggccatggattgaggtttaaaaagtagaaggggaagcctggggatttctgtgggtgtggggtggtctgagagaaaccagcgtgag

SEQ ID NO: 416805 - DNA, 526 bp, Homo sapiens
tatatgaattctctgcatcgctgcctctaggcagcaggacagccagcagtaagctgcagacatcccaccatgctgcagcttgctgtctgcagcaggaagccccacatacagcctgacagtcaggccaagccatttggccattcaccagtgctgcaagctcaggcaggttgcttaacctgtctcagttcctgcttctgagaagtaaagctaatggggtctatgtcatgagattactggaagattaagtaaaataacaagyatcaggcagctgacacagaaagtgtgcctgagaggtggatggatggctccctagcccctctctttgtcttctgggctgagcccctcccgatccccacagggcaaaggctggctgattttcagtagtttaagctggtgtgtagcagctaaactccacatttctagaccgtttgaacaggaaacctgagatgagggagcgtttgaattggctcatgcaaaaaacaatatttgctggaggttagctgctgcattatgaatttttaacctc

SEQ ID NO: 416806 - DNA, 420 bp, Homo sapiens
gctcttttacaatttaaaataaaagactggggaaagatagacaggaaagttcacatgacagaggaaacgattatttcaatatgaagaaaatgtargcatcaactcaaggagccttaaagtggcaataaaagtcatgttgtgttatgaaaggtattagcagtaaaaatggtccttagccttcatatgctgagaaacacagtactggcactgtatattcacattttaaaagtcaagaagaaatgatcaaaatacaactattagggagagtttatcagtaccactactctatggtagatcaggaaacaatgaaaagagaattagttgcgtgtggctgccataacaaattgccacaaatgtgatggtttaaaatgacacatattgactgtctcacaattgtgcaggtcagaaggctgtaatcag

SEQ ID NO: 416807 - DNA, 709 bp, Homo sapiens
cataattttctaaaattcaagatttataataaacatttagaaagaataacccaattagttaagatataacaaataaaataaaagccctctcagataactaataggatatcaaatattatttcagtatatttagaaaattattaaaaaggaagacactatgtaactaaggctttccaaggtattgggagaggccaattattaaccctaaatgctttcatttccaaatgaagaagaaaaaaaatatatgttatccttcaacgtagggaattagaaagaacataatatagatgaaatcagaaattaatgacttttaagatgatgggattaataagtgaaacaaaaaatgatttatttgcaaagacaataaatacctctgcccagtgtagtcaaggaatagrgaaactgtagaaaaataaacttagtgaaggtcttcgtttctcattcctatcaacacattacaatgttactttggaggctctggacagaagacaaaaacaagtaatatacatttgatatgaagaagatagaagtattactatttgcagccagtatgattgtatataaacaccccagattgtcaatcaaaataacatatggattgtggatagaattcagtggctgattctgaaagtaatatataaaaaatcaggtctttataatgtctataaccacttggaaaacatacaaataattatagatactattatta

SEQ ID NO: 416808 - DNA, 597 bp, Homo sapiens
tgtcactgcaatggcgtggtcacctctttgctacatggagtgggctgctgccaggctgggctcagctgcgtccccctggggtctccctttttgacatcttgtgtttggtctttgcagggaactgattccctcgctctttgtcgcaagctgcaaagccagcactcagctctgagatgaaggcaggataagcagcaggacctccccggtagtgagcagatggatyaggactaattttgcaaaggtgaggggggaaggttgccatgggatcctagctctgaagaatggcaagcagatgtggggagtgcgggggttgggggaggcagtgggaatcctatccaactcagtgtgctttccaattaggagcctttcaagttaaggcctccttcaggtcaccttcagccacttcttgaaggttaaacaagtcttgcttctagtgtgcattatgcaaagtgggtaacaattacttgttgtttattaacatcatatattttatggtcagacttgaccctgccaagcccccaacagacccgccactgggagaggagtccccggcaggcagggcccagtcacccccagctcagctccagactctctgcc

SEQ ID NO: 416809 - DNA, 545 bp, Homo sapiens
ccactaataattaactctcctaattcccattagtcttcccaagggcatgattatagtttggcattataaaagccatggactcaatgtgagaaaagtgcaaactattattgtcaaattagtgttttcctggagatttctcaaattgtcttgtgacattccatatcaatgttattgctcaggtaaatatgatattccatttcccaagcatctagatttaaaatttctaaaygtactctaacaactaatagctcaatactgctgaagctccatggccattgaattaggttgttcttcaacttcaaaacagccttcaatgtcattcatccattactgttccaggccatatatttcctctgtgtagcataggttgaaacactcaagcagaatctgagtgacttatccaaggttgtgctggggaaagaaaagccttcttaatgcctgatatatcttgatctcttcctcctataaatgaaaagctaataatgtaagcttttttgtgtgcacattagtttcaacatatgggcatagaacattctaccgcatgg

SEQ ID NO: 416810 - DNA, 586 bp, Homo sapiens
aacggtcctttggtcccataaattttttcttgaattttacttacatgtactttattcctgctttctttgtattcaatttttayacatctgtttgttctttttattttttgagttagttttagttatttaattttacactaggcatttcagatatgccacttttgttttccatgggcctcttataaacatatataaatggaatttgtttttcagtcaatttaagaattttttaaataggtgttgaacatatttaagttcaatttattttggcattatgttctttgtttttgtttcttttttgagactgagtctcgctctgttgcccaggctggagtgcagtggtgcgatcttggctcactacagcctctgcctcctgggttcaagcaattcttgtgcctcggcctcctgagtagctaggattacaggtgcccaccaccatgcctggctaatttttgcatttttagtagagacggggtttcaccatgttggcccagctggtctcaaactcctgacctcaagtgatctgcccgccatggcctctcaaagtgctggaattacaggtataaaccaccatgcccagatgttc

SEQ ID NO: 416811 - DNA, 586 bp, Homo sapiens
aacggtcctttggtcccataaattttttcttgaattttacttacatgtactttattcctgctttctttgtattcaatttttacacatctgtttgttctttttattttttgagttagttttagttatttaattttacactaggcatttcagatatgccacttttgttttccatgggccwcttataaacatatataaatggaatttgtttttcagtcaatttaagaattttttaaataggtgttgaacatatttaagttcaatttattttggcattatgttctttgtttttgtttcttttttgagactgagtctcgctctgttgcccaggctggagtgcagtggtgcgatcttggctcactacagcctctgcctcctgggttcaagcaattcttgtgcctcggcctcctgagtagctaggattacaggtgcccaccaccatgcctggctaatttttgcatttttagtagagacggggtttcaccatgttggcccagctggtctcaaactcctgacctcaagtgatctgcccgccatggcctctcaaagtgctggaattacaggtataaaccaccatgcccagatgttc

SEQ ID NO: 416812 - DNA, 586 bp, Homo sapiens
aacggtcctttggtcccataaattttttcttgaattttacttacatgtactttattcctgctttctttgtattcaatttttacacatctgtttgttctttttattttttgagttagttttagttatttaattttacactaggcatttcagatatgccacttttgttttccatgggcctcttataaacatatataaatggawtttgtttttcagtcaatttaagaattttttaaataggtgttgaacatatttaagttcaatttattttggcattatgttctttgtttttgtttcttttttgagactgagtctcgctctgttgcccaggctggagtgcagtggtgcgatcttggctcactacagcctctgcctcctgggttcaagcaattcttgtgcctcggcctcctgagtagctaggattacaggtgcccaccaccatgcctggctaatttttgcatttttagtagagacggggtttcaccatgttggcccagctggtctcaaactcctgacctcaagtgatctgcccgccatggcctctcaaagtgctggaattacaggtataaaccaccatgcccagatgttc

SEQ ID NO: 416813 - DNA, 586 bp, Homo sapiens
aacggtcctttggtcccataaattttttcttgaattttacttacatgtactttattcctgctttctttgtattcaatttttacacatctgtttgttctttttattttttgagttagttttagttatttaattttacactaggcatttcagatatgccacttttgttttccatgggcctcttataaacatatataaatggaatttgtttttcagtcaatttaagaattttttaaataggtgttgaacatatttaagttcaatttattttggcattatgttctttgtttttgtttcttttttgagactgagtctcgctctgttgcccaggctggagtgcagtggtgcgatcttggctcactacagcctctgcctcctgggttcaagcaattcttgtgcctcggcctcctgagtagctaggattacaggtgcccaccaccatgcctggctaatttttgcatttttagtagagacggggtttcaccatgttggcccrgctggtctcaaactcctgacctcaagtgatctgcccgccatggcctctcaaagtgctggaattacaggtataaaccaccatgcccagatgttc

SEQ ID NO: 416814 - DNA, 487 bp, Homo sapiens
cctgaatgagtcattttagctaagtggtagaggcaaaggccaaggtaggtgagcactggaaaagttattgtacataaactcgaccattctcacaagacattgaacagagaataagaggagagaaaaaggcttacaacatcaaggacaacaggtactgggacatggaaaagaccaagatatgtgtacaaatatagcaaaacaagaatgataagaccaagcagagaaggtatctttggtagagaatagtctctaargagaaatgttaatagttttgggatgccactgaagaatgaacaacattctccactcattcctaacttgagggtaagcattacacgtggaaaacataataggccagactccattaagctttccctgctgatgtcaagggctcatagcaggggctgccagagcaatctcagggaaagtcaattttcagcgcagcagggaatgagggtcatctgcaagtcaatggctgcctatttaa

SEQ ID NO: 416815 - DNA, 487 bp, Homo sapiens
cctgaatgagtcattttagctaagtggtagaggcaaaggccaaggtaggtgagcactggaaaagttattgtacataaactcgaccattctcacaagacattgaacagagaataagaggagagaaaaaggcttacaacatcaaggacaacaggtactgggacatggaaaagaccaagatatgtgtacaaatatagcaaaacaagaatgataagaccaagcagagaaggtatctttggtagagaatagtctctaaggagaaatgttaatagttttgggatgccactgaagaatgaacaacattctccactcattcctaacttgagggtaagcattacacgtggaaaacataataggccagactccattaagctttycctgctgatgtcaagggctcatagcaggggctgccagagcaatctcagggaaagtcaattttcagcgcagcagggaatgagggtcatctgcaagtcaatggctgcctatttaa

SEQ ID NO: 416816 - DNA, 593 bp, Homo sapiens
cattcttcattttaatttggaaccttaacaaacgtatccatggacttagaacatgtaaaagaactttagtttatatgtatatgtgtgtgtgtgtgtgtgtgtgtgtgtaaaatagaattataggaattattttatactaggaaatatttttgctatgactttacttttaaagctacagtaataagactgacagctgatttctcaaccaatacggtgggaaccaaaaagcaatggaattggtatacctaatgttttgaaagaaaacagctactaatgtagaattttgtatgtagcaaaaatattctccaacagtgaatcagaaataaaaacatctttagatttagaaaatcctgacagaattcatggtcatttaatattaaaaaaggaaatactaatcgaggcactgtggtgtgcacctgcagtcccagctactcagaaatttgagggaggaggatcayttgagcccaggagtttgagtccagcttgggcaacatagaaagaccctgactctaccaaaaaaagagaaaggaatactgaaaggatttttttgattccaggtaaatgcacagtaaaacaggaagaaataatgagca

SEQ ID NO: 416817 - DNA, 593 bp, Homo sapiens
cattcttcattttaatttggaaccttaacaaacgtatccatggacttagaacatgtaaaagaactttagtttatatgtatatgtgtgtgtgtgtgtgtgtgtgtgtgtaaaatagaattataggaattattttatactaggaaatatttttgctatgactttacttttaaagctacagtaataagactgacagctgatttctcaaccaatacggtgggaaccaaaaagcaatggaattggtatacctaatgttttgaaagaaaacagctactaatgtagaattttgtatgtagcaaaaatattctccaacagtgaatcagaaataaaaacatctttagatttagaaaatcctgacagaattcatggtcatttaatattaaaaaaggaaatactaatcgaggcactgtggtgtgcacctgcagtcccagctactcagaaatttgagggaggaggatcacttgagcccaggagtttgagtmcagcttgggcaacatagaaagaccctgactctaccaaaaaaagagaaaggaatactgaaaggatttttttgattccaggtaaatgcacagtaaaacaggaagaaataatgagca

SEQ ID NO: 416818 - DNA, 533 bp, Homo sapiens
cttctttattccattacaataatctactacctattgtttaatctgaatcatagctatgaacacccattgtttcccacttttccatatttactctttataaaaacttcagaaaacaggtactattgtgtatattttactaacagaaacaarcagttgaagaacttgcccaagaaatcacaaataacaaaaggctttatcttataatatagcctcactctgctgtgtccccacagaggctgagatgaaggggacagtggacaggagacatttccatggacagagccttcaggctgttctaacttgtgatcaatttttcactagatatttcacttcagtgtatgaaaggagtcccatgctaggttctagaaatatcaaaactatttaacctggctagccactctagctggaagcagaagaatgaggttcatttttttgtctttaaattttttgctttgagataattgtagcttcatgcacttctaagaaatgatacagagggattttgtgtaccccttacacagttacccccaatt

SEQ ID NO: 416819 - DNA, 533 bp, Homo sapiens
cttctttattccattacaataatctactacctattgtttaatctgaatcatagctatgaacacccattgtttcccacttttccatatttactctttataaaaacttcagaaaacaggtactattgtgtatattttactaacagaaacaagcagttgaagaacttgcccaagaaatcacaaataacaaaaggctttatcttataatatagcctcactctgctgtgtccccacagaggctgagatgaaggggacagtggacaggagacatttccatggacagagccttcaggctgttctaacttgtgatcmatttttcactagatatttcacttcagtgtatgaaaggagtcccatgctaggttctagaaatatcaaaactatttaacctggctagccactctagctggaagcagaagaatgaggttcatttttttgtctttaaattttttgctttgagataattgtagcttcatgcacttctaagaaatgatacagagggattttgtgtaccccttacacagttacccccaatt

SEQ ID NO: 416820 - DNA, 407 bp, Homo sapiens
gcgtttttttaagatttataccagcactgtttttacacatgcacatgtgcacacacacatacacatattccttgtattagctcattttcctactgctataaagaaataccaaagactgggtcatttataaaggaaaacaggtttaacagactcagttccacctggctggggaagcctcacaatcatggcggaaggtgaagaagaagcaaagacacgtgttacatgacggccgtcaagagagaagtgcagcatgaaatgggggaaggccccttataaaaccatsagatcttgtgagaactcactcactaccacaagaacagtttggaggtaacaactcccatgattcaattacctcccaccaggtcccttccacaacaagatgagatttgagtggaaacacagccaaa

SEQ ID NO: 416821 - DNA, 604 bp, Homo sapiens
ttatatttctaatagataaagagtgtacgcatttacttcataaaatatgttgttcgaaatatgtatacaatgtggaatggctaaattaagctaatcaacatatgcattactttacatacttayccttttttgtggtaagaacactcaaaatctactttcagcaattttcaagaatgcaatacatggttattaactataatcaccgagtggtacaatacatctcttgaatttattcctcatatctacagaaattttgtattctttgacgaatatctccccaacctctctgcacctggcccccgcccctggccagtccctggtaacaactattcgactctctacttctatgagtttagcgttttatgattccacatataagtgtgatcatgcagcattttctttccgtgcctggtttatttcacttaacataacgtttatccatgttgttgccaatgacacgatttccttcttttaaaaggctgtataatgttccagtgtgtctataaggcacattttctttatccattcattcatggatagatgcttgggttgattccatatcttggctattgtgaacagtgctgcaataaatatggtagtgtaa

SEQ ID NO: 416822 - DNA, 544 bp, Homo sapiens
atcacaatgttcagtgactaagtcagatgcttaagagcctttccctatggcagactctgttctgaaactcagatcargacactggtcccagctccatgctcctctgatggatgtggacccagtagctgggacactggctgaggattccttgaggcctctgttcaccaccctccctggcaaagaaggactaaaggggtcaagatacaaggagtcaccgaaagaatgcagaagagacaagttcaggaagactaccacatacgtattgttacccagagagaacctgaaaacagcagcaccattggccaacatggcatcagtaagcaccagctgggcctgctccaagtcccctgagtttccacattcccttgggcaggtaaaaatttgcaaaccccttgtgttcacccacattgtattcccttcactgagtcatactctccctgtcatctgctcccactcacagtgactcacttatgtcaacaggcccaacatactttccccacccttcctgcaggtcccaagactggcccctgatgcagatggggca

SEQ ID NO: 416823 - DNA, 440 bp, Homo sapiens
gtaccactgaactagctgagcaacattgggcgatgctttactccaaccaccactcctagcctttcctccccggcagcccgtggagactaaaacaccaaccaaatcatttcactcctctggtctcaacttyccaacagcttctcatcacttctagaataaaatccaagtgcctcctcaaagccttccaggcctacagcagaggcagccagtgctcaccaaactctacattctcctctttgtcccaggctccctgctgtgccacatttctctgcttctttgcgtgggtggggtgatggtggatgcggagacttatgccttattcttgtcaatggagtgtgagtggaggtgacatgtgttaacccaggtcgaagtggttgagagcagtgtgccttctccacactttccccacatgccagctggatggacatccagtgaggacc

SEQ ID NO: 416824 - DNA, 494 bp, Homo sapiens
ctctggggccaccaggcatccctcctactgcctggttctctaggtgtcagctccctgcttagttagatagcttctcccgtgctgctggtccaaggcctaatactctcagtttcatcacagtagacaaaactccaattccagttacaaccaaccaaccaaccaataggagaagactccaattggctaggcttgaattacccatcaccttctcaaccaattattgaaactcagaggtagaaaggtaytatgattggtcagggctggatcaggtgatcacacccaggccaataattgttccaaaatggccactttacatttagatcgcctaactagaatgggaatgcacagtgctttgcagaaaacagtggtgaaagttcatgactggcccgggcaactgatatggttaggctttgtgtccccacccaaatctcatcttgaattataatctccataatccccacatgtcgagggagagaccaggtggagataattga

SEQ ID NO: 416825 - DNA, 494 bp, Homo sapiens
ctctggggccaccaggcatccctcctactgcctggttctctaggtgtcagctccctgcttagttagatagcttctcccgtgctgctggtccaaggcctaatactctcagtttcatcacagtagacaaaactccaattccagttacaaccaaccaaccaaccaataggagaagactccaattggctaggcttgaattacccatcaccttctcaaccaattattgaaactcagaggtagaaaggtactatgattggtcagggctggatcaggtgatcacacccaggcyaataattgttccaaaatggccactttacatttagatcgcctaactagaatgggaatgcacagtgctttgcagaaaacagtggtgaaagttcatgactggcccgggcaactgatatggttaggctttgtgtccccacccaaatctcatcttgaattataatctccataatccccacatgtcgagggagagaccaggtggagataattga

SEQ ID NO: 416826 - DNA, 533 bp, Homo sapiens
actgttctctttcccctgctggctatcttgaccattacacatcctttcctttgccaataatgtttttcaataactcagttaaaatttaaattatgacattttagcctaaatgcaaaatacttaatctttgatgaaaaatttaaaaagagtataaatcatctcatgactcccaagagtactatagtacttacmgatattttaatgccagtaatttaaagagatacggatcttcaacagttgtcagaggattgcgattgagaattctgaaaaatgcaatggaattaaaataacctgcattttcaatgtgtgaaactgcataagaagtttacattcattttttggtatggaacttgtgggtaaaaaaaaaaatcattttctgtttttacctaataaatcaacattagactctgtaaagcattattccttcgggaactacctagatctctaggagataaagtagaggagagaaagagggggaaaaatagggaaaaaaaagtggatagcaaagaaacaatatgccacagaacttttca

SEQ ID NO: 416827 - DNA, 494 bp, Homo sapiens
ctctggggccaccaggcatccctcctactgcctggttctctaggtgtcagctccctgcttagttagatagcttctcccgtgctgctggtccaaggcctaatactctcagtttcatcacagtagacaaaactccaattccagttacaaccaaccaaccaaccaataggagaagactccaattggctaggcttgaattacccatcaccttctcaaccaattattgaaactcagaggtagaaaggtactatgattggtcagggctggatcaggtgatcacacccaggccaataattgttccaaaatggccactttacatttagatcgcctaactagaatgggaatgcacagtgctttgcagaaaacagtggtgaaagttcatgactggcccgggcaactgatatggttaggctttgtgtccccacccaaatctcatcttgaattataatctccataatccccacatgtsgagggagagaccaggtggagataattga

SEQ ID NO: 416828 - DNA, 533 bp, Homo sapiens
actgttctctttcccctgctggctatcttgaccattacacatcctttcctttgccaataatgtttttcaataactcagttaaaatttaaattatgacattttagcctaaatgcaaaatacttaatctttgatgaaaaatttaaaaagagtataaatcatctcatgactcccaagagtactatagtacttaccgatattttaatgccagtaatttaaagagatacggatcttcaacagttgtcagaggattgcgattgagaattctgaaaaatgcaatggaattaaaataacctgcattttcaatgtgtgaaactgcataagaagtttacattcattttttggtatggaacttgtgggtaaaaaaaaaartcattttctgtttttacctaataaatcaacattagactctgtaaagcattattccttcgggaactacctagatctctaggagataaagtagaggagagaaagagggggaaaaatagggaaaaaaaagtggatagcaaagaaacaatatgccacagaacttttca

SEQ ID NO: 416829 - DNA, 533 bp, Homo sapiens
actgttctctttcccctgctggctatcttgaccattacacatcctttcctttgccaataatgtttttcaataactcagttaaaatttaaattatgacattttagcctaaatgcaaaatacttaatctttgatgaaaaatttaaaaagagtataaatcatctcatgactcccaagagtactatagtacttaccgatattttaatgccagtaatttaaagagatacggatcttcaacagttgtcagaggattgcgattgagaattctgaaaaatgcaatggaattaaaataacctgcattttcaatgtgtgaaactgcataagaagtttacattcattttttggtatggaacttgtgggtaaaaaaaaaaatcattttctgtttttacctaataaatcaacattagactcygtaaagcattattccttcgggaactacctagatctctaggagataaagtagaggagagaaagagggggaaaaatagggaaaaaaaagtggatagcaaagaaacaatatgccacagaacttttca

SEQ ID NO: 416830 - DNA, 533 bp, Homo sapiens
actgttctctttcccctgctggctatcttgaccattacacatcctttcctttgccaataatgtttttcaataactcagttaaaatttaaattatgacattttagcctaaatgcaaaatacttaatctttgatgaaaaatttaaaaagagtataaatcatctcatgactcccaagagtactatagtacttaccgatattttaatgccagtaatttaaagagatacggatcttcaacagttgtcagaggattgcgattgagaattctgaaaaatgcaatggaattaaaataacctgcattttcaatgtgtgaaactgcataagaagtttacattcattttttggtatggaacttgtgggtaaaaaaaaaaatcattttctgtttttacctaataaatcaacattagactctgtaaagcattattccttygggaactacctagatctctaggagataaagtagaggagagaaagagggggaaaaatagggaaaaaaaagtggatagcaaagaaacaatatgccacagaacttttca

SEQ ID NO: 416831 - DNA, 532 bp, Homo sapiens
tggtcatagaggtggatctctcatgaatagattaatggccttctctggagtgagtgagttctcattcaattaattcctgtgagagctggttgttaaaagagcctagcacaccctccttttcctcctctctctcacaatgccatctctgcacactctggctcccttttgccttctgctatgagcagaagtagcctgaggccctcgtcggatgcagatgcctaatcttgaacttgtagccatgagaatcatgagccaaataaaccatttttctttaaaaattacccagcctctagtatttctttatagcaacacaaaacagactaagatagctattctagttcctttgtctttccacataaattttagagtaatattgtgtatagctayaaaaacttttgcaagattttaaaaggaattgcattaaactcatatatccttttgcggagtaagtcaacatctttactatgttgaatctttcaatccatgaacataatacatctctccatttatttagctgttctttgatttgttt

SEQ ID NO: 416832 - DNA, 532 bp, Homo sapiens
tggtcatagaggtggatctctcatgaatagattaatggccttctctggagtgagtgagttctcattcaattaattcctgtgagagctggttgttaaaagagcctagcacaccctccttttcctcctctctctcacaatgccatctctgcacactctggctcccttttgccttctgctatgagcagaagtagcctgaggccctcgtcggatgcagatgcctaatcttgaacttgtagccatgagaatcatgagccaaataaaccatttttctttaaaaattacccagcctctagtatttctttatagcaacacaaaacagactaagatagctattctagttcctttgtctttccacataaattttagagtaatattgtgtatagctacaaaaacttttgcaagattttaaaaggaattgcattaaactcatatatccttttgcggagtaagtcaacatctttactatgttgaatctttcaatccatgaacataawacatctctccatttatttagctgttctttgatttgttt

SEQ ID NO: 416833 - DNA, 583 bp, Homo sapiens
attactaattccagctctggagtgtccctatctgacctttagtgggtgcaggattattgcctgtggaaaattctgtcttgcttctgccatgtgttatgtcccaatggcaacctgtcctcacaccctacctttaaagaggtgatctgtctccatctcacagccaacatcaacaagggaaagctcctacctccatggtattatttgcagcctttgttctgaacctatcaatygcttcaccctcttggaatcttctctgaattgttcctgaggcctcagctgccagcctcttgccctaccccctgaccagggccttgcaggctctccttgaccctgatgactgatgtttccctcccaaccctcagcctttgactccccactcatttataatccagacacattcttcatcacatctgtcttctgccatgccaggggtctccccagcccagcctgtcccaggctttacctcagcactgccccagatggtcaggtgctctgctggcctataagccctgtgacctcagactgactgtgtagtgtttagagggggatctggagctctaaaaggagttggggattgtgacta

SEQ ID NO: 416834 - DNA, 583 bp, Homo sapiens
attactaattccagctctggagtgtccctatctgacctttagtgggtgcaggattattgcctgtggaaaattctgtcttgcttctgccatgtgttatgtcccaatggcaacctgtcctcacaccctacctttaaagaggtgatctgtctccatctcacagccaacatcaacaagggaaagctcctacctccatggtattatttgcagcctttgttctgaacctatcaatcgcttcaccctcttggaatcttctctgaattgtycctgaggcctcagctgccagcctcttgccctaccccctgaccagggccttgcaggctctccttgaccctgatgactgatgtttccctcccaaccctcagcctttgactccccactcatttataatccagacacattcttcatcacatctgtcttctgccatgccaggggtctccccagcccagcctgtcccaggctttacctcagcactgccccagatggtcaggtgctctgctggcctataagccctgtgacctcagactgactgtgtagtgtttagagggggatctggagctctaaaaggagttggggattgtgacta

SEQ ID NO: 416835 - DNA, 487 bp, Homo sapiens
ttcataatagccaaaaagtggaaacagttcaaatgtccatgaacttacgaaatggataagcaaaacatggtctctgggcacagaggtgtgtgcctgtaactctagctactctggaggctggaaggctgaggcaggaagcctgagcccaggagtttcaggtcagcctgggcaacattgcaagaccctgtctccatttaaaaaaaaaaaagtggtacagccatacaatgaagtgttattcaaatatagtactgatacatgctaagataygcataaaccttaaaaacagtaggctaaatgacagaagccatacattatatgattccacttaataagaaatgtccgtaagaggcaaatcaacagcaaatgaacgtaattactggctgccaggggagagcaggagggaggtgaagaacagggagtgacgccataggcatgggcttcttttgcaggggcgtaaaaacaagctggaattaggtagtgttaatgg

SEQ ID NO: 416836 - DNA, 487 bp, Homo sapiens
ttcataatagccaaaaagtggaaacagttcaaatgtccatgaacttacgaaatggataagcaaaacatggtctctgggcacagaggtgtgtgcctgtaactctagctactctggaggctggaaggctgaggcaggaagcctgagcccaggagtttcaggtcagcctgggcaacattgcaagaccctgtctccatttaaaaaaaaaaaagtggtacagccatacaatgaagtgttattcaaatatagtactgatacatgctaagatatgcataaaccttraaaacagtaggctaaatgacagaagccatacattatatgattccacttaataagaaatgtccgtaagaggcaaatcaacagcaaatgaacgtaattactggctgccaggggagagcaggagggaggtgaagaacagggagtgacgccataggcatgggcttcttttgcaggggcgtaaaaacaagctggaattaggtagtgttaatgg

SEQ ID NO: 416837 - DNA, 487 bp, Homo sapiens
ttcataatagccaaaaagtggaaacagttcaaatgtccatgaacttacgaaatggataagcaaaacatggtctctgggcacagaggtgtgtgcctgtaactctagctactctggaggctggaaggctgaggcaggaagcctgagcccaggagtttcaggtcagcctgggcaacattgcaagaccctgtctccatttaaaaaaaaaaaagtggtacagccatacaatgaagtgttattcaaatatagtactgatacatgctaagatatgcataaaccttaaaaacaktaggctaaatgacagaagccatacattatatgattccacttaataagaaatgtccgtaagaggcaaatcaacagcaaatgaacgtaattactggctgccaggggagagcaggagggaggtgaagaacagggagtgacgccataggcatgggcttcttttgcaggggcgtaaaaacaagctggaattaggtagtgttaatgg

SEQ ID NO: 416838 - DNA, 458 bp, Homo sapiens
cacagggtttaccatctagtggagaaatagaaataagctggcagttatcatacagagtgataagtattatggtggagaagttggcgggggggctacaaagaaaataaaatgtgcactagacacatgtttcaggagccatggaagacctcccaagccaggtgaatgaggggctggaggttggtacaggaagagtaaaactgaagatagaccatttaggaaggtattacaatagtctagttgtgagattgtgtcttagaactagaggagggacaaatcaattgtttcaattgttattaaggaagttgaaatttgtaggacttgtaacttggctgataatataagggtaaatgaggagcagagaatggtcytaggtctgtagcttggacaatggaaggatagtagagggaacacaaggaagaggctttctggggtaggcaggtagttatgaatcatgaatt

SEQ ID NO: 416839 - DNA, 597 bp, Homo sapiens
ttaaaatgaaattttttttgtctatgcaagctagaatttttctgaggcctgcagagtcatagggattgtttccaaaraaaaagataaatatcagatgatcttgattcgtgcaattttaagtgctttctagagtttattgttatttttaaaacttcaaatataacataaatttaaaaattgatattagtgtgtcaactatgaatccatcacaaatagctaagtgatttttaagtaacattaaattttaattagtttatagttatgacatttgaaattcctttttatctcttatacatggataacacagttcttcactgacattaatcttcacagcatatttttaatggcatttttattgtaagtatatttagagaatagataaattgaagctctcagactttcaaagcttaagccattgagtcaagtctatgcagtgaatgatacaataaatccaatattttttatcccccattcacttactataaacactaaacacagtttttttgttatttatttatatatttactgccacctacattcctgaaagttttcaacatgttgtagggctgtttttgttttctagttaattagcttaaa

SEQ ID NO: 416840 - DNA, 597 bp, Homo sapiens
ttaaaatgaaattttttttgtctatgcaagctagaatttttctgaggcctgcagagtcatagggattgtttccaaaamaaaagataaatatcagatgatcttgattcgtgcaattttaagtgctttctagagtttattgttatttttaaaacttcaaatataacataaatttaaaaattgatattagtgtgtcaactatgaatccatcacaaatagctaagtgatttttaagtaacattaaattttaattagtttatagttatgacatttgaaattcctttttatctcttatacatggataacacagttcttcactgacattaatcttcacagcatatttttaatggcatttttattgtaagtatatttagagaatagataaattgaagctctcagactttcaaagcttaagccattgagtcaagtctatgcagtgaatgatacaataaatccaatattttttatcccccattcacttactataaacactaaacacagtttttttgttatttatttatatatttactgccacctacattcctgaaagttttcaacatgttgtagggctgtttttgttttctagttaattagcttaaa

SEQ ID NO: 416841 - DNA, 597 bp, Homo sapiens
ttaaaatgaaattttttttgtctatgcaagctagaatttttctgaggcctgcagagtcatagggattgtttccaaaaaaaaagataaatatcagatgatcttgattcgtgcaattttaagtgctttctagagtttattgttatttttaaaacttcaaatataacataaatttaaaaattgatattagtgtgtcaactatgaatccatcacaaatagctaagtgatttttaagtaacattaaattttaattagtttatagttatgacatttgaaattcctttttatctcttatacatggrtaacacagttcttcactgacattaatcttcacagcatatttttaatggcatttttattgtaagtatatttagagaatagataaattgaagctctcagactttcaaagcttaagccattgagtcaagtctatgcagtgaatgatacaataaatccaatattttttatcccccattcacttactataaacactaaacacagtttttttgttatttatttatatatttactgccacctacattcctgaaagttttcaacatgttgtagggctgtttttgttttctagttaattagcttaaa

SEQ ID NO: 416842 - DNA, 597 bp, Homo sapiens
ttaaaatgaaattttttttgtctatgcaagctagaatttttctgaggcctgcagagtcatagggattgtttccaaaaaaaaagataaatatcagatgatcttgattcgtgcaattttaagtgctttctagagtttattgttatttttaaaacttcaaatataacataaatttaaaaattgatattagtgtgtcaactatgaatccatcacaaatagctaagtgatttttaagtaacattaaattttaattagtttatagttatgacatttgaaattcctttttatctcttatacatggataacacagttcttcactgacattaatcttcacagcatatttttaatggcatttttattgtaagtatatttagagaatagataaattgaagctctcagactttcaaagcttaagccattgagtcaagtytatgcagtgaatgatacaataaatccaatattttttatcccccattcacttactataaacactaaacacagtttttttgttatttatttatatatttactgccacctacattcctgaaagttttcaacatgttgtagggctgtttttgttttctagttaattagcttaaa

SEQ ID NO: 416843 - DNA, 496 bp, Homo sapiens
gtgtggtatgtattaagcactcaatattagtttgatgaatgaatcagtgtgtgaatatgcattaycttttaaataactctatgaactaattattaacaatcctttaaagtctctcctgtctctaaattctatattccatccttttttctttccttgaccatacagaaataccttccttcaaaattaagcagaagtaagaactagagatatgtgtgcgtatttgcttgtatgtgtgtatatctttgaggccaaagatattagcaagtaacaaaagatgcatgctttattccatttaaccctatgcaaatcttaaggatgcatgagaacttgtttcaaaaagtataataaaaatatcattaataattttttaaaacataagaacatctaggtaacctggaacactttagattccacatcttgatgtctttttaattccaccaaaacagaaacaaaaacttatttaatgactgaagaaggggattctttccacattata

SEQ ID NO: 416844 - DNA, 496 bp, Homo sapiens
gtgtggtatgtattaagcactcaatattagtttgatgaatgaatcagtgtgtgaatatgcattatcttttaaataactctatgaactaattattaacaatcctttaaagtctctcctgtctctaaattctatattccatccttttttctttccttgaccatacagaaataccttccttcaaaattaagcagaagtaagaactagagatatgtgtgcgtatttgcttgtatgtgtgtatatctttgaggccaaagatattagcaagtaacaaaagatgcatgctttattccatttaaccctatgcaaatcttaaggatgcatgagaacttgtttcaaaaagtataataaaaatatcattaataatttttwaaaacataagaacatctaggtaacctggaacactttagattccacatcttgatgtctttttaattccaccaaaacagaaacaaaaacttatttaatgactgaagaaggggattctttccacattata

SEQ ID NO: 416845 - DNA, 598 bp, Homo sapiens
cattctcttccctttctgattggtttttatggaaatgtgatttatatgtgatctatagctatatttacagcaaaaaaaaaaaaaaaaaaaatccgtatgtctagtgagatgtagagtcacaggataaaggaaataaaagacatgtggttgaagaagggggctaggccatccctgtgatggtgcccagaggtctaagtgttttaraaaattcttttaagactgtgtttttcatctttggttttctttggccagggagaacctggggaatctggtcgtccagggcaaaaggtaatatctctatctctagtgtgttcctactgtctcatattcaccattttatatctaccatccactgtgtaatatgaaaacaattattacaaaatgatgcggttttcatgttttgcattacagagtgttattgttgttttgcattttaaaaggtcttgatgatgaccatagcacaatgtgcaaacaaactttatatatgtaaaagatgctttgtgaaataaaagtctgcatatacttagctgtttgaaactcacaaagattaggtgggttggaatgccaacaatgtatcctgcatgcttcatggtaatct

SEQ ID NO: 416846 - DNA, 514 bp, Homo sapiens
agcctgccaggctgagtgggcagaatgagcccagcaggtctgaacaaaactcaagcaaaggtsgcactggccacaaaggtttccagctggaaaagtgacacccaaaggatcctgtgacattgtcacaattatggttgccagtaagtgctaacacaattctctgaattgacaaactcatttggatctctgactgaggaaattagtttcactacatgatactttttttatggatggtaaatctgtgtctttccttttcagatgagacaaatgctgctttcccatttaacacactcacagataggcacagaaaagttgtagttttaaagtataatattattttgaaatattgattaggataacagattcacgtacatccttactgtgaccaattttaaataaaaaacttccatctacaaaaacttgaggaaatattaacattgttcatgcaactctaaaaggtactacctctgtttcaagataattagaaagaaattgcctcaataactcagaaact

SEQ ID NO: 416847 - DNA, 514 bp, Homo sapiens
agcctgccaggctgagtgggcagaatgagcccagcaggtctgaacaaaactcaagcaaaggtcscactggccacaaaggtttccagctggaaaagtgacacccaaaggatcctgtgacattgtcacaattatggttgccagtaagtgctaacacaattctctgaattgacaaactcatttggatctctgactgaggaaattagtttcactacatgatactttttttatggatggtaaatctgtgtctttccttttcagatgagacaaatgctgctttcccatttaacacactcacagataggcacagaaaagttgtagttttaaagtataatattattttgaaatattgattaggataacagattcacgtacatccttactgtgaccaattttaaataaaaaacttccatctacaaaaacttgaggaaatattaacattgttcatgcaactctaaaaggtactacctctgtttcaagataattagaaagaaattgcctcaataactcagaaact

SEQ ID NO: 416848 - DNA, 514 bp, Homo sapiens
agcctgccaggctgagtgggcagaatgagcccagcaggtctgaacaaaactcaagcaaaggtcgcactggccacaaaggtttccagctggaaaagtgacacccaaaggatcctgtgacattgtcacaattatggttgccagtaagtgctaacacaattctctgaattgacaaactcatttggatctctgactgaggaaattagtttcactacatgatactttttttatggatggtaaatctgtgtctttccttttcagatgagacaaatgctgctttcccatttaacacactcacagataggcacagaaaagttgtagttttaaagtataatattattttgaaatattgattaggataacagattcacgtacatccttactgtgaccaattttaaataaaaaacttccatctrcaaaaacttgaggaaatattaacattgttcatgcaactctaaaaggtactacctctgtttcaagataattagaaagaaattgcctcaataactcagaaact

SEQ ID NO: 416849 - DNA, 583 bp, Homo sapiens
gataggagcctatataaaattcatctataattttaaaaatatcagagaaaagctaatgaccatcaagcaccaaatgcaaaacttcattaagtgctatttaatttcaaatctaacaatggaagtatcataaatatgarcacttagaaatgatacatgtagtagattttggaaaaatattatgataatgatgtaggcataagaggtaggccagacttttccttggggacacaacaacaactcttcgctccttttttgtgctgtagaaagatcacgtgagggtatgtcttggcttcacgttttccctaatacctatccttcctcaatttattgacttccttttgctgtgatgtgaggaagacattttaaactaaatgatcatgagatttcacatccactaaaggcaaactggtagccaaaacaaaggaaaccagagcaggtttctaatgggaccatttgaaaatgctggtcccagcctccttgcaaattttcaacattttccagcataggcagttaggtagactatgtttctgcagagccatagtaaatataggacctgatgtgaaggtgttctgaagtgccatga

SEQ ID NO: 416850 - DNA, 583 bp, Homo sapiens
gataggagcctatataaaattcatctataattttaaaaatatcagagaaaagctaatgaccatcaagcaccaaatgcaaaacttcattaagtgctatttaatttcaaatctaacaatggaagtatcataaatatgagcacttagaaatgatacatgtagtagattttggaaaaatattatgataatgatgtaggcataagaggtaggccagacttttccttggggacacaacaacaactcttcrctccttttttgtgctgtagaaagatcacgtgagggtatgtcttggcttcacgttttccctaatacctatccttcctcaatttattgacttccttttgctgtgatgtgaggaagacattttaaactaaatgatcatgagatttcacatccactaaaggcaaactggtagccaaaacaaaggaaaccagagcaggtttctaatgggaccatttgaaaatgctggtcccagcctccttgcaaattttcaacattttccagcataggcagttaggtagactatgtttctgcagagccatagtaaatataggacctgatgtgaaggtgttctgaagtgccatga

SEQ ID NO: 416851 - DNA, 499 bp, Homo sapiens
gtagactatgtttctgcagagccatagtaaatataggacctgatgtgaaggtgttctgaagtgccatgatatacgttcattcttagccaccatcatccacggttctcctggtcctgtccattcttggtttccagtgctggtttatgatctttcktctgtttattaactgtggctgtatactcaagatttactatgactgtgtttctttttacagttactctctttagtatcttattaactactatgcatttaatgctgcctttatatttaatttcccaagtctttctattcatatctgaattttctactctgtcttgtctataagacacgagcacttggatgttgtggcagatgtaggtgcctgcccaccactatctgctccaagacagtgctagaatacaggtcccatatgtccctctggcttcctaaattcctttcacagcaggccaggagtgctgaaaagccaacatccagctgtgaacgtcaacagtaaaggcag

SEQ ID NO: 416852 - DNA, 620 bp, Homo sapiens
atttgatgatgtgcagtactttatttaaacttttgcctggtacattaggccattcttgcattgctataggaaattcctaagatcragtaatttataaggaaatgtttaatttgcacacagttcttcatgctttacaggaagtgtggtgctgatatctgctaggcttctagggaggactcaggaagtttacatttatggtggaaggtgaaggaagggcagatgtgtcacatggcagaagcaggagcaagagtgagagtgaggacgtgccacacacatttcaatgactagatcttgtgagaactcactgtcacaaggacagcaccaaggggatggtgctcaaccattcctgagaaatcctcccccatgatccagtgacctccgtccaggccccacctccaacactgaggattacaattcaacatgagatttgagtggggatgcacattcaaactgtgtcacctactattgtctgtttcgttcattccaattgtttgatctgataaataattctatagaagacagtgtaggctgaattgttcaaacattttgccatatttcaagttaagttcccagaagttgggtttattaaaatttaaatattttaatactcattacatata

SEQ ID NO: 416853 - DNA, 620 bp, Homo sapiens
atttgatgatgtgcagtactttatttaaacttttgcctggtacattaggccattcttgcattgctataggaaattcctaagatcaagtaatttataaggaaatgtttaatttgcacacagttcttcatgctttacaggaagtgtggtgctgatatctgctaggcttctagggaggactcaggaagtttacatttatggtggaaggtgaaggaagggcagatgtgtcacatggcagaagcaggagcaagagtgagagtgaggacgtgccacacacatttcaatgactagatcttgtgagaactcactgtcacaaggacagcaccaaggggatggtgctcaaccattcctgagaaatcctcccccatgatccagtgacctccstccaggccccacctccaacactgaggattacaattcaacatgagatttgagtggggatgcacattcaaactgtgtcacctactattgtctgtttcgttcattccaattgtttgatctgataaataattctatagaagacagtgtaggctgaattgttcaaacattttgccatatttcaagttaagttcccagaagttgggtttattaaaatttaaatattttaatactcattacatata

SEQ ID NO: 416854 - DNA, 620 bp, Homo sapiens
atttgatgatgtgcagtactttatttaaacttttgcctggtacattaggccattcttgcattgctataggaaattcctaagatcaagtaatttataaggaaatgtttaatttgcacacagttcttcatgctttacaggaagtgtggtgctgatatctgctaggcttctagggaggactcaggaagtttacatttatggtggaaggtgaaggaagggcagatgtgtcacatggcagaagcaggagcaagagtgagagtgaggacgtgccacacacatttcaatgactagatcttgtgagaactcactgtcacaaggacagcaccaaggggatggtgctcaaccattcctgagaaatcctcccccatgatccagtgacctccgtccaggccccacctccaacactgaggattacaattcaacatgagatttgagtggggatgyacattcaaactgtgtcacctactattgtctgtttcgttcattccaattgtttgatctgataaataattctatagaagacagtgtaggctgaattgttcaaacattttgccatatttcaagttaagttcccagaagttgggtttattaaaatttaaatattttaatactcattacatata

SEQ ID NO: 416855 - DNA, 606 bp, Homo sapiens
atgagagaaggtcttagaagaactaattaagaaacgagacagggatgcctcctgtgtccttaaccagatgcctgmcctcattctcatttcttcttgcctgaaaagggcacagatgtttgttccaaactagtacttatgtcccaacatctggtccacattttgaaattgaaaggaaaagcatacgggtacttagccctgggaaaaataaaaggatgtagtgtagaaagagatggcagatacaaggatacatcagtgaataaaaatgcaggattaaaatgactttcagagatcaagaataaagtgatctcagaaatatttcttttcaagcataatacagttttcttttgtatgtccttatagagagatactgttctctgcaagggtatttgccatgattgatttacatctagggcaatgttgcatgcctataatcattatcaaaagatgccttagtgctaaggaggatgtacagatgtggaaattaaaggataaaaggatttgacataaaaccacagactgagagaggagcccgagcagtctccagatggtggtaacagcagtggatctcaaagagcccacattcagggcacaaaggaaggtgtgcaa

SEQ ID NO: 416856 - DNA, 467 bp, Homo sapiens
ggctggaagtaaaagcttctacaaggacttagaatctagtggtagatgagtttccaaatataaattaataaaacatacagaatggcaaatgttaagtaaaagtaaatgttaaaccacatgcatggcttttattatctctgagaagttaagtttaaagaaagaatttaagttcaagtaataactgtataaaggcgattgaatatctgataacaaaagatgtcttatatttccagtgaggatcaaagagaattagacaaaaatataactgagaagtttcactagagatataaggcaaacactgttatcraacaaatttataccgtacctcaatgtacagtgttttaaagaaggatacataactacattgcattaatctattcacttgttctttgattcaatcaaatatttattgaatatttactatacatgtcatagattatgtactgggaaattactaagtgggtaat

SEQ ID NO: 416857 - DNA, 623 bp, Homo sapiens
gcacatttctttctttaacatcaaataagaaaagagctagttattgagacaataaattagctcctttcttttactgaaaccatattcttggcataactgtgctgtggcgtacactctccattgagcaataaaagttaagcacagagcagcatttaaaatcatattaatacatccatttgttcccccaaatgttagatgcagcataaatctagcagaagtatattaatctgaaatgtaacttgaatagcataatatgacctgtattcttaggcaagctgaccagtgccttcctaagataccgttttgaatttttctctttataatagatatctttaaagcaaaattaacaataaaataaaartattgctaggtattgaagccatagttagtataaattgctactttttgaatacctaaaaagtctaaaattaatatgctgtatacagagctggactaagataaatgttgtaagcagtccacttccatagtcagtcttttgggcctttatagaatatagaacaataaaagcgatggaatattttgttgaggtagggcaggactcataggtgagtatactgtatatttcaagtagatttctctccagccatctaaataaggatctt

SEQ ID NO: 416858 - DNA, 633 bp, Homo sapiens
ttcctcagtagactccagagcatcagcaagaggaaatgcatgccaggtttaggccaatgaactcatcttgtagacactgacatccatggatggaaaccagagaatgatctccatggccatgcatgtaatcagcagcagagagggccactttaaatgaaaggaacaggtgggyagggaagagagttgatgtgtatctgtaatcgaagaccaaatagggagacagttctttcaggagataccgcatagagagatgacttgaggacaacttgcatatgaattgtcttgcaatatgaaagtcctctgaaacttagtcacaaaccccccaaaaaattttattttgccaacccagaagaatagggcttaagaaagatattaagttgtcttccagagaaaatttttttcacggttgaatttttgacctgacagtcacactcattacatatgtttatagttttattctgaagttttcatactgacagggtttaaataaaggtcaaaaacattattgagggtatcctctgatcacctcgttcatctctccaaaaccttcaacttatgagtaagtgaaatacgcctacaattctgacaaaactgactcttattttagacttgtaggacaagttgtcaatgtaa

SEQ ID NO: 416859 - DNA, 633 bp, Homo sapiens
ttcctcagtagactccagagcatcagcaagaggaaatgcatgccaggtttaggccaatgaactcatcttgtagacactgacatccatggatggaaaccagagaatgatctccatggccatgcatgtaatcagcagcagagagggccactttaaatgaaaggaacaggtgggtagggaagagagttgatgtgtatctgtaatcgaagaccaaatagggagacagttctttcaggagataccgcatagagagatgacttgaggacaacttgcatatgaattgtcttgcaatatgaaagtcctctgaaacttagtcacaaaccccccaaaaaattttattttgccaacccagaagaatagggcttaagaaagatattaagttgtcttccagagaaaatttttttcacggttgaatttttgacctgacagtcacactcattacatatgtttatagttttattctgaagttttcatactgacagggtttaaataaaggtcaaaaacattattgarggtatcctctgatcacctcgttcatctctccaaaaccttcaacttatgagtaagtgaaatacgcctacaattctgacaaaactgactcttattttagacttgtaggacaagttgtcaatgtaa

SEQ ID NO: 416860 - DNA, 633 bp, Homo sapiens
ttcctcagtagactccagagcatcagcaagaggaaatgcatgccaggtttaggccaatgaactcatcttgtagacactgacatccatggatggaaaccagagaatgatctccatggccatgcatgtaatcagcagcagagagggccactttaaatgaaaggaacaggtgggtagggaagagagttgatgtgtatctgtaatcgaagaccaaatagggagacagttctttcaggagataccgcatagagagatgacttgaggacaacttgcatatgaattgtcttgcaatatgaaagtcctctgaaacttagtcacaaaccccccaaaaaattttattttgccaacccagaagaatagggcttaagaaagatattaagttgtcttccagagaaaatttttttcacggttgaatttttgacctgacagtcacactcattacatatgtttatagttttattctgaagttttcatactgacagggtttaaataaaggtcaaaaacattattgagkgtatcctctgatcacctcgttcatctctccaaaaccttcaacttatgagtaagtgaaatacgcctacaattctgacaaaactgactcttattttagacttgtaggacaagttgtcaatgtaa

SEQ ID NO: 416861 - DNA, 456 bp, Homo sapiens
aattaacatagtaagcttgagactgttattcttagaatggacggcttgcaaagttagcgcttgactggcattcagtaacttgaagggtaaatagttccctacacggatataaaactttctctaaatgataataggagtccattgtgcttaaactgtaaaaactaaataatttatactgaatacctggctttcctactgaaagactagaaatgtggcatatatttgacagaaggcgtttgctgaaccatgataaaaatcctaaacttctaatcttgggcaagatttcctagtagacatttcgtacacrttgtcacaactcattgctggaggaattaagtgtgtcccgtctgactccagtagaagaagcttcttggaaggttgcactgagttttctctggatgtggcttttccctttgctgatcttgctttgtatccttttgctgtaatcaatcatag

SEQ ID NO: 416862 - DNA, 621 bp, Homo sapiens
tgtgccgaatcctgtgagttttagtgaattacagaaaatgggccagggggagtttgaagatctcaaaagcatagttcaattcaactttattgagaattcgaggcagatgaatcccactgagtacagctgttccatcattttagattaattttsacattgaatgttttcattttaccaccataaattgggagcattatgaaatttcccccaagttctccttgaggatattatgaaaaaaactaacagttactaaatattttgagtgattcagacatattatctcatttaatactcaaaagaattaactgaggagggtcacttcatctctccagcacacctatgacaaaaagctcagagacatcacagaaattgagtaacgtgatacatttcatagccttattatctgaatttaagatttatctgactaaagcctatcttcttatattgtataatttttcctgaaaattaaaaaagaaaagatctaccttctgatatattctagaaatgtttgctataactgtttttatgaatttaagtgctgctgagcaaaataaatgctaagtgtaaaggaataccatgcctagaagactcacttggagacacaaagaggccaatctgcat

SEQ ID NO: 416863 - DNA, 621 bp, Homo sapiens
tgtgccgaatcctgtgagttttagtgaattacagaaaatgggccagggggagtttgaagatctcaaaagcatagttcaattcaactttattgagaattcgaggcagatgaatcccactgagtacagctgttccatcattttagattaattttgacattgaatgtyttcattttaccaccataaattgggagcattatgaaatttcccccaagttctccttgaggatattatgaaaaaaactaacagttactaaatattttgagtgattcagacatattatctcatttaatactcaaaagaattaactgaggagggtcacttcatctctccagcacacctatgacaaaaagctcagagacatcacagaaattgagtaacgtgatacatttcatagccttattatctgaatttaagatttatctgactaaagcctatcttcttatattgtataatttttcctgaaaattaaaaaagaaaagatctaccttctgatatattctagaaatgtttgctataactgtttttatgaatttaagtgctgctgagcaaaataaatgctaagtgtaaaggaataccatgcctagaagactcacttggagacacaaagaggccaatctgcat

SEQ ID NO: 416864 - DNA, 621 bp, Homo sapiens
tgtgccgaatcctgtgagttttagtgaattacagaaaatgggccagggggagtttgaagatctcaaaagcatagttcaattcaactttattgagaattcgaggcagatgaatcccactgagtacagctgttccatcattttagattaattttgacattgaatgttttcattttaccaccataaattgggagcattatgaaatttcccccaagttctccttgaggatattatgaaaaaaactaacagttactaaatattttgagtgattcagacatattatctcatttaatactcaaaagaattaactgaggagggtcacttcatctctccagcacrcctatgacaaaaagctcagagacatcacagaaattgagtaacgtgatacatttcatagccttattatctgaatttaagatttatctgactaaagcctatcttcttatattgtataatttttcctgaaaattaaaaaagaaaagatctaccttctgatatattctagaaatgtttgctataactgtttttatgaatttaagtgctgctgagcaaaataaatgctaagtgtaaaggaataccatgcctagaagactcacttggagacacaaagaggccaatctgcat

SEQ ID NO: 416865 - DNA, 597 bp, Homo sapiens
tatcactactttaaaaattaagcatttgtgagccttgtgatggttcaggtcagcaattccagcactttaggattccaaggcaggcagactgcttgagccccaggagttcaaaaccagcctgggcaatgtagaaagaccttgtctctaccaaaatcaataaattagttaatttaaaaatataaaaataaaacagcattggtattagtggatattttgtgttgtgtgctayaaggcaatttactcttataaattgtcatgctttgagcatttgatagagagtttttcaaatagagatgaaaaatgtcaagtgggaaaaaaaaagtggtcttccagataacacatggaatttttttcagctatggaaatgacaaaatagcataagtaacttatttgaaggtagaaaataaagaccacacacagaattatgacttaaatggctaacatatatatatatatatatatatatatacatatatatacacatacatatatgtatatatattcttatgtatatattcttatatatgtattcttacataagaataagaagatacatgtataagaatatttattgcaatgttttctgtaataaacatc

SEQ ID NO: 416866 - DNA, 604 bp, Homo sapiens
aacatcatataaagtaacctccataggtacaatgtacactactcaggtgacaggtgcactaaaatctcagaattcacaaccatataattcatgcatgtaaaaaaaaacatttgtatcccaaaagctattgagataagaattaattttaaaaaataataaataatacagttgatgtgaaaatactaaaaaaaaattacccatayggaaatgatgcactggtatcacttttgttgaatagaatgcagtagacttctgtgtgctaatataaaaagatcttaaagttgtactcttcagtgaaacaagcatctataatatatagaaaagtccaatgtgtaaaaaaaaatctgtctatatttgtttatatataaattcatgtatatgagtatataattgggaaatttgtaagatacaaaggtaattaatgatttagttacttctgtgaaagagcctaagtccctggagtagaaagaagactcagtatatgttatcttatatatgtctatgatatcttctatggttctagcatattcactttcatctatattgtaataaatgtggatttgacttttaatacatctagatattggcaatattctgaaaactg

SEQ ID NO: 416867 - DNA, 533 bp, Homo sapiens
atatacacattaatattattctaactaatcattataactagtaatagattagaagttagttaagcaagagccagggacatttgtttatgtttttcacaactagcattatgcttcattatttctgtatgcatttaaataaaacaattgatagccaacttgatgctatagtaatagttcaatctaattctatgtcaatamcgtggtatacatacttgttaagagagaaatatggtcaatttcaaaataaattccattatatggtttcatcattttaagaggagatgtaacagatgacaaatcttacagtatttctataaactcacaaatttttagctcagttgtactcttcttgacatcataccttttttcactctatacctgtgattgtcctttcacttcaaagttcatttttcctaataaatccctcatataaatgcagaaaatctttgcatagtaaagtggatatgttatcataaacagctaaaatgtgactatcagggcattctgaacagtccaatgtgaaagcttgcata

SEQ ID NO: 416868 - DNA, 533 bp, Homo sapiens
atatacacattaatattattctaactaatcattataactagtaatagattagaagttagttaagcaagagccagggacatttgtttatgtttttcacaactagcattatgcttcattatttctgtatgcatttaaataaaacaattgatagccaacttgatgctatagtaatagttcaatctaattctatgtcaataacrtggtatacatacttgttaagagagaaatatggtcaatttcaaaataaattccattatatggtttcatcattttaagaggagatgtaacagatgacaaatcttacagtatttctataaactcacaaatttttagctcagttgtactcttcttgacatcataccttttttcactctatacctgtgattgtcctttcacttcaaagttcatttttcctaataaatccctcatataaatgcagaaaatctttgcatagtaaagtggatatgttatcataaacagctaaaatgtgactatcagggcattctgaacagtccaatgtgaaagcttgcata

SEQ ID NO: 416869 - DNA, 625 bp, Homo sapiens
aacagatgacaaatcttacagtatttctataaactcacaaatttttagctcagttgtactcttcttgacatcataccttttttcactctatacctgtgattgtcctttcacttcaaagttcatttttcctaataaatccctcatataaatgcmgaaaatctttgcatagtaaagtggatatgttatcataaacagctaaaatgtgactatcagggcattctgaacagtccaatgtgaaagcttgcataacttttgtttctttcttcattcattaatccccaaagatagatctgagtgcctacaaattgctactaacatcacttgatcaataatgaaacaatgaaaatgttacaattcctacattaatgatgtgtcttatataactcaatggaattattgtaatatcatgaatacattacatacttttcaagcctcagtaaaatgaatcagacagctttagcatctctctatcaatacaaacatttaatggaaaaatagacacccacctacaaggactgttgtagagaagactttagtttggggtgagacagtggacaacaaagaccatatctaactgtcttcttgcaggtgtactgccatacctagtttattgcccacacattaa

SEQ ID NO: 416870 - DNA, 533 bp, Homo sapiens
atatacacattaatattattctaactaatcattataactagtaatagattagaagttagttaagcaagagccagggacatttgtttatgtttttcacaactagcattatgcttcattatttctgtatgcatttaaataaaacaattgatagccaacttgatgctatagtaatagttcaatctaattctatgtcaataacgtggtatacatacttgttaagagagaaatatggtcaatttcaaaataaattccattatatggtttcatcattttaagaggagatgtaacagatgacaaatcttacagtatttctataaactcacaaatttttagctcagttgtactcttcttgacatcataccttttttcactctatacctgtgattgtcctttcacttcaaagttcatttttcctaataaatccctcatataaatgcagaaaatctttgcatagtaaagtggatatgttatcataaacagctaaaatgtgactrtcagggcattctgaacagtccaatgtgaaagcttgcata

SEQ ID NO: 416871 - DNA, 515 bp, Homo sapiens
cccaggtcggaaatggagcaggtcaaaatgtggatgtacgtccttaacatttatattcttagcattttatattatatatataggtatayatataggtatatatgtatatatatgtgtgtatatatatttaacatttactgttgacaatacaataacattaacaaattttgaaaacttgggctgtgctgtcagatcaactcatcttatttttcattttatatataatgaaataaaggccagttggaatcttatatataaaaagttatgaaattatccattttcatgcaataataaatagaaatgtaaggaatattcttccatgattactttgtaattaactcaaatattttttatgtgactttgaatatatatcctttaatttataaactatcacaaaatgtgtactctttaaaacacaattggataaagagagccttggaattatgaaattatttattgatgtgaatgaacagacattgttatcaactgaaagaccatttatattgacttcctaa

SEQ ID NO: 416872 - DNA, 581 bp, Homo sapiens
cccaggtcggaaatggagcaggtcaaaatgtggatgtacgtccttaacatttatattcttagcattttatattatatatataggtatacatataggtatatatgtatatatatgtgtgtatatatatttaacatttastgttgacaatacaataacattaacaaattttgaaaacttgggctgtgctgtcagatcaactcatcttatttttcattttatatataatgaaataaaggccagttggaatcttatatataaaaagttatgaaattatccattttcatgcaataataaatagaaatgtaaggaatattcttccatgattactttgtaattaactcaaatattttttatgtgactttgaatatatatcctttaatttataaactatcacaaaatgtgtactctttaaaacacaattggataaagagagccttggaattatgaaattatttattgatgtgaatgaacagacattgttatcaactgaaagaccatttatattgacttcctaagaaatgaaaacaatttgattttatagttgtagaattttccctcattttacatatataaatatcact

SEQ ID NO: 416873 - DNA, 515 bp, Homo sapiens
cccaggtcggaaatggagcaggtcaaaatgtggatgtacgtccttaacatttatattcttagcattttatattatatatataggtatacatataggtatatatgtatatatatgtgtgtatatatatttaacatttactgttgacaatacaataacattaacaaattttgaaaacttgggctgtgctgtcagatcaactcatcttatttttcattttatatrtaatgaaataaaggccagttggaatcttatatataaaaagttatgaaattatccattttcatgcaataataaatagaaatgtaaggaatattcttccatgattactttgtaattaactcaaatattttttatgtgactttgaatatatatcctttaatttataaactatcacaaaatgtgtactctttaaaacacaattggataaagagagccttggaattatgaaattatttattgatgtgaatgaacagacattgttatcaactgaaagaccatttatattgacttcctaa

SEQ ID NO: 416874 - DNA, 581 bp, Homo sapiens
cccaggtcggaaatggagcaggtcaaaatgtggatgtacgtccttaacatttatattcttagcattttatattatatatataggtatacatataggtatatatgtatatatatgtgtgtatatatatttaacatttactgttgacaatacaataacattaacaaattttgaaaacttgggctgtgctgtcagatcaactcatcttatttttcattttatatataatgaaataaaggccagttggaatcttatatataaaaagttatgaaattatccattttcatgcaataataaatagaaatgtaaggaatattcttccatgattactttgtaattaactcaaatattttttatgtgactttgaatatatatcctttaatttataaactatcacaaaatgtgtactctttaaaayacaattggataaagagagccttggaattatgaaattatttattgatgtgaatgaacagacattgttatcaactgaaagaccatttatattgacttcctaagaaatgaaaacaatttgattttatagttgtagaattttccctcattttacatatataaatatcact

SEQ ID NO: 416875 - DNA, 592 bp, Homo sapiens
agttggaatagatactttactgcaaatataccaggtccttgattgttaggttctgtccagccccaactttctcacttaaggggtgttctaagtaatcattacagagcacaggcgacacacagaaagaccaagtcagaaggaccttgaaagtcattgcatccaccccactgccctgctttcatactactgagaccttgaagtggtaaatgtcaaggatgtaaagaatttggaactgtaatttctggtgcattactatttcttctctatcaccctgacccaggtggttttcraagagtggtttttgtaaaggtttttggctttgtattaggaataaaaaatcttagtggaagggtagaaagcctttggggaggaggatgcagtgattaatcttgaatataagcatgattttacccttgggaaggtgagaaaattagaaaagctaacaaatttaacatataaatattctcatcatgacccagtttttgtgatagatgttttagatatcatttatttatcatattgacatatctgatatttaaaggacaagatgttcaaaaattctaattggttgaatgttttctgctttacttct

SEQ ID NO: 416876 - DNA, 585 bp, Homo sapiens
aggatgcagtgattaatcttgaatataagcatgattttacccttgggaaggtgagaaaattagaaaagctaacaaatttaacatataaatattctcatcatgacccagtttttgtgatagatgttttagatatcatttatttatcatattgacatatctgatatttaaaggacaagatgttcaaaaattctaattggttgaatgttttctgctttacttcttgaattatgtaatcacttatttatcctgtgctatatggataaacatttccaactaataaacatttctaatgtatctttaaaactaaaaaattacttaattgctactaaaactctatttaaaatttgttttctttttaagcgattggctagtttttaggtgatttcaagtgatttgttttaagcaatggtttttaaatcataaattataaaaggtgtcatcttattagcctygcaaaatgacttatacctttagatatttaatactgtattgatttttctggagaagaaacactgactcaaaattaaaatgacgtcttgaatgacttcatggaatttatttacattccccaagtagagttgtgat

SEQ ID NO: 416877 - DNA, 558 bp, Homo sapiens
caaaatttcagttagacaatgggaataagttcaagagattgattgtatatcatggtaattatagttaataaaatgtgtatttgaaaattgctaagaaagtgttctcattacccccmaaaaattatgtgaggtgatgcatatgacaattagctttatttatccattctacaatgtaaacatattaaaacacaatgttgtataccacaaatatatataattttatttgtcaaaacgttcttaaagaaaggaaaaagaaaatgtattctgttataaaaaaataactcagcaaacaaatgagtaaaaacatttatatttaacagaggaaagagaaagttcaaggcaattctacctacataggttattatgacaggattgaaaataaaaatccatatattttttattaaatattaagtattttaaaaaagaaataggttttctaaaattttaaattcataagaaaaatattgatttccagcctctccctgccctggtgggccttaaacttttacaggccaaataaatatatatatatttttagagtaagcagggttgactttt

SEQ ID NO: 416878 - DNA, 558 bp, Homo sapiens
caaaatttcagttagacaatgggaataagttcaagagattgattgtatatcatggtaattatagttaataaaatgtgtatttgaaaattgctaagaaagtgttctcattacccccaaaaaattatgtgaggtratgcatatgacaattagctttatttatccattctacaatgtaaacatattaaaacacaatgttgtataccacaaatatatataattttatttgtcaaaacgttcttaaagaaaggaaaaagaaaatgtattctgttataaaaaaataactcagcaaacaaatgagtaaaaacatttatatttaacagaggaaagagaaagttcaaggcaattctacctacataggttattatgacaggattgaaaataaaaatccatatattttttattaaatattaagtattttaaaaaagaaataggttttctaaaattttaaattcataagaaaaatattgatttccagcctctccctgccctggtgggccttaaacttttacaggccaaataaatatatatatatttttagagtaagcagggttgactttt

SEQ ID NO: 416879 - DNA, 535 bp, Homo sapiens
tttcactaatctataaaccaaatctataattccactaatctataaaccaaatccccaagccagcaccacactgtctttattattgyaatttggtagtaagttttaaattggaaactgtgagtttcacaacttttttgccccaacattttgactattttgtgtcatttgcatgctatatgaattttaggattagcttcttttttttatccctccccttcctccccccacaccccgaaggccctagtgtgtgatcttcccctccctgtgcccatatattatcattgttcaactcctacttatgagtgagaacatgcggtgtttggttacctgttcctgtgttagtttgctgagaatgatcgtttccaggattagctttctaattctgcaagaatagccactggtgttgtattgaagctgtatatcaatttgaggagtattgctgttttaacactgtaactcttacaatccataaacactgaatattctttcatttctttgggtctttaaaaatttcttttagcaacattttgcagtt

SEQ ID NO: 416880 - DNA, 590 bp, Homo sapiens
agagctatatgccgagacaggaggtcagaaggcggcctcaaatggttccagcaaggctccagttgtttgtagatactttttggccttagattcaacgttagttacactgcattctcatcagcttgagggatatgaatcggtgttaatacagatatctgaccaacaaatggaatgcccaaaagaacaactttttaactgttttatatggggctgtgtgtgtgttcaaacatttcaagtatttatttcaaccaaaggcacaataataatgttcatgtcagtaaaaaagaaaaaatcacatcattttatattcacctattaaagccagcacttgtggaaaactatgccggtcatgagtacgcagacagcataattctcacttctattatggaagtgagaagagctcacacttacgtatgaatgtattttttttttaagaaacaaaacctcaacatttttagaatgttccattgaaatgttcactaygtgatatagcaacttttaaaaatatatttgcatagtaatctttgtataatatcctacattggattaattttaattttctttcaaatgtaaatgaaattgttagtcca

SEQ ID NO: 416881 - DNA, 473 bp, Homo sapiens
gatggtaagttataaataaayaggcatgaaatttcagttgtgcaaaatcagggaggtctggagtaacattgtgcctgtagtcagcactactgcattatatatttaaacatttaagaggatagatcttaagggttcttaccacaataaaataaaatcaaaaaataaaaattaaaaaacaaaatggcttccaatgtgtaaattaagaagaaacataataaaaattacagtttcaggtcacatgaatttacagttacactctatggcttaattaaagtctcaaaataatagaaaagaaaagaattataagaataccagactcttatgcaaaacaaagatgccattgggagtagaataagtcctggtaaacctacacattctgtacacctgtgaaatttgggctttcagacctttggacacactcgaacttacaccgtggctgaaaagtcacactaagtgcttacgacctaaacgac

SEQ ID NO: 416882 - DNA, 494 bp, Homo sapiens
gtggccacattgtcagaaacacagtgagtcactkgttgcagctgtaataaactaaagaacatattcactcctcagtttccagtgattacagaagaaaagtgagaactctgtgttattagacattcttatgtttcaagaaaactcagggtactaaattatcactcagaattgtcccagttttaattattagcaagtaatttaatttttaaactaattttatgagaaggaaaaatcagctctgtggattgcctttagtcagcagcccacatatttgtaaccctgataattaaaaccaatgaagacttcataatcagatctgtgtaataaagtcaggagtggactgcaaaatgaggttcattagactatgaattcccaaggagtggttttttaatgaatgaataaataagtaagaatctaaagacagagaccagtctggaagtttgtctggaaagtttagttaagtagttcatcaggcctgaactaaaggagaagca

SEQ ID NO: 416883 - DNA, 616 bp, Homo sapiens
gactttgtggaatattttactctcaagcaagaaaaagagaayacgtctataataaaaggaaattttaggcaaaaattcaatgcaaaaagaaaaaagagtgtcccttttaaaccaggagttggagagatgatccccctcttcttcctcatcttatctaaatctacagttcttcagcatcttgatagaaatcaggttaaaagaaaacaaacagcactgctccataagatgcacaatttagtcctgttttctttcccacctgcccatagtctatgtattttttttttcatgtttctaccgtagctttatgtctctgggtaatcatgaatgaatatttaaccattttaccatcatttgcagcctagcaaaggttgaattccattgaactggcagattgctttttaattttctgcttggatgggttggttttttgtcctgtagtttccaaaatattttatgagtcttgatggagaggctaaaatgcttgcaaattttgctgatctctgccaaaagctgattaacccttcctcattcttcagaaacccatgtaccagcagcttaagtgctgtaagaagcatgatatagcgttgtgaaaaaggacttacacaggggttgcaga

SEQ ID NO: 416884 - DNA, 564 bp, Homo sapiens
aagtgttcccttctattctatattttggaagtgtttgcgaaggattactgttaattctttaaacatttggtagaattcaccagtgaatctactttggcttgaagtttctgttgtggaaattttttttttattactaatccaatctctttatgtgttttacatatatgctaattttacctttcttcttgagrcagttttgttatttgtgtcttcctaggaatttgcccattttccccagtttatctcacttgtaggcatagaattgtttatattattcctttgtaagcttttttatttgtaattaaaatcctggtagtaatatctagtaatattgctgttaatttctccttttcaaccgtaagtaattagagtattctttctttttctctttgtcaaagtagtgtgttggatagtggccttgaaaaatatatgcccacccagaacctgtgactgtgaagcatttgataaaagagtgtttgcagatataattaaaggattatgaatgagattatcctgtgttatcaaggtacatcctaaatctaatgacaagtgtcattataagag

SEQ ID NO: 416885 - DNA, 532 bp, Homo sapiens
gcaaaaaccaggaacgtagcaccttccagttatgtgggcatctaaggaatgtggaaataactgtggcaagcacataaggccacccccaggtagagcggccaatcctgtttgctggcaaatatgaccatactgtgtctccacagtcccataaactcccagggggcacaaagtcctctgggcccagccttgatgtggtcacctattcatcacacctttggtgtggtgataacatattatatgtgttcagactatggcagacaaccaccccacggtgacattaccccagtgttgctctayacatcatgatacctgtgttaggggcaccttgtgttctcccactaacgagccccatccatcacagacattacaggtcagccaggaagcaagcatgccatgggttttgtggcatcccctatccaaagctgcccatgttgcattctaaacgtcagccatggaactcctagtgtccatccatgtccagttttccacagaagctggatgtatgtgccagggcaagacatcccctgctgct

SEQ ID NO: 416886 - DNA, 571 bp, Homo sapiens
gtgttcagactatggcagacaaccaccccacggtgacattaccccagtgttgctctacacatcatgatacctgtgttaggggcaccttgtgttctcccactaacgagccccatccatcacagacattacaggtcagccaggaagcaagcatgccatgggttttgtggcatcccctatccaaagctgcccatgttgcattctaaacgtcagccatggaactcctagtgtccatccatgtccagttttccacagaagctggatgtatgtgccagggcaagacatcccctgctgctgcttgaagggtggtgcagatccaacggttggacacattggtcaactcatcgtaggtgtgggaccaytccacaatgctgttggagcatgtcaacctatggtctaaatgacaaagtaggcacaggtactaacaggggtaaatcatgcccttcaggcaaaatacaggccaagctttcatctctagataacaatgcaactgcaaaggacttctgccctgggtgatggtaccacaacttttcagcaccccatggttcctttgggtctatatcttgccagagtt

SEQ ID NO: 416887 - DNA, 533 bp, Homo sapiens
ggagtcccttatatcactcaataataccagtagtttktgggttatatggaacctccactttatgtccatccattgtgcccactgttgtacgtgctatccaggaaaatgtgttcccctatcacattcaacagtcaggggatgactgtatagggcacacaagtgttgcagggcctgaattgtatgttgttggttggccatcctgcaagggtaggcaaacagcagactggtggccgtgtctacagctgtcagcacatgcatatgcccctgcgacctcagcagtgacctgatgtagtctatttgccatctagtcaagagcatccaccctactgtcacttgttgtgtaacattgggcagctgtctctgtctggggtatgtctgtgtccacgctgggcatttctggcagacctcccagatatcttacatagacaaagatagaccatagcacttattgacctattccattagtttactcccgacgtggcccaatttctgctgcagccatagagctacatctcgtgtaggtgctgactcca

SEQ ID NO: 416888 - DNA, 533 bp, Homo sapiens
ggagtcccttatatcactcaataataccagtagtttttgggttatatggaacctccactttatgtccatccattgtgcccactgttgtacgtgctatccaggaaaatgtgttcccctatcacattcaacagtcaggggatgactgtatagggcacacaagtgttgcagggcctgaattgtatgttgttggttggccatcctgcaagggtaggcaaacagcagactggtggccgtgtctacagctgtcagcacatgcatatgcccctgcracctcagcagtgacctgatgtagtctatttgccatctagtcaagagcatccaccctactgtcacttgttgtgtaacattgggcagctgtctctgtctggggtatgtctgtgtccacgctgggcatttctggcagacctcccagatatcttacatagacaaagatagaccatagcacttattgacctattccattagtttactcccgacgtggcccaatttctgctgcagccatagagctacatctcgtgtaggtgctgactcca

SEQ ID NO: 416889 - DNA, 582 bp, Homo sapiens
aggagtcccttatatcactcaataataccagtagtttttgggttatatggaacctccactttatgtccatccattgtgcccactgttgtacgtgctatccaggaaaatgtgttcccctatcacattcaacagtcaggggatgactgtatagggcacacaagtgttgcagggcctgaattgtatgttgttggttggccatcctgcaagggtaggcaaacagcagactggtggccgtgtctacagctgtcagcacatgcatatgcccctgcgacctcagcagtgacctgatgtagtctatttgccatctagtcaagagcatccaccctactgtcacttgttgtgtaacattgggcagctgtctctgtctggggtatgtctgtgtccacgctgggcatttctggcagacctcccagatatcttacatagacaaagatagaccatagcacttattgacctattccattagtttactcccgacgtggcccaatttctgctgcagccatagagctacatctcgtgtaggtgctgactccaaccaccrgacctggccaaggcatttgcctcatcattgcccagggcagt

SEQ ID NO: 416890 - DNA, 592 bp, Homo sapiens
cccatttcccataggtctggccacatggcctggccccaaatgggcctgtgaccaactagctaattctgtaactttcaggtagttaaccacaaggttagggcttaataaactgcccagctaccagtgaagattaccataggtgtctcctccttagtgatcaccatccacagtgccctgagttcaacctattgactactttgtccaggtattaaaccatatggtatcagtactaggctggaccatgacagcagtccaggcagcagtagcaccctggctggacccatcctgtctaccatgcctcatcaggaatgggaggtgyctctcttgaaatggtaatggctcagtgtttaggggcgcctcaggctgacccatggccttatcttgcatcaggactacaggtcccaagacttcttataattctgctgataaggggcttgtactcagggtactctgctgttctaagtaggagccccactttgctaaggtggatatctctgccatcccagtctggggttcattacccatgaacatacttgctccccaactattgggtaagttgtccacacaatgactgtagcccttcctgtcacac

SEQ ID NO: 416891 - DNA, 597 bp, Homo sapiens
aggtgtctcctccttagtgatcaccatccacagtgccctgagttcaacctattgactactttgtccaggtattaaaccatatggtatcagtactaggctggaccatgacagcagtccaggcagcagtagcaccctggctggacccatcctgtctaccatgcctcatcaggaatgggaggtgtctctcttgaaatggtaatggctcagtgtttaggggcgcctcaggctgacccatggccttatcttgcatcaggactacaggtcccaagacttcttataattctgctgataaggggcttgtactcagggtactctgctgttctaagtaggagccccactttgctaaggtggatatctctgccatcccagtctggggttcattacccatgaacatacttgctccccaactattgggtaagttgtccacacaatgactgtagcccttcctgtcacactctcacaagcctgaagggtggcatatacagttgttaattccttctctatccatgaatagcagagctcacctccrttccaaagttgggaccaaaagcctacttgtgttctacagtgctctctgcactgccataggccccagcc

SEQ ID NO: 416892 - DNA, 620 bp, Homo sapiens
agaaaaatgaagtatgcaagttaggaaagttgttgaaatgttgtgagtaaaattatacatttatttctgaaaggaaaagaacacatttatgaaatatattttgtaaattcttaacaaaacctagaaattaactaaacactattttccccagaaaactgagcagtagaaatattatttaatacatgctgtagtatattttaagaaatgatctatcatgcgtcagggcagggatgaaggggaaaaagtatgataattgaagatattgagcatttatgctgtgccaagaacattcaggaatgttaacttatctgaaatttgcgacagtacagtaagtgataatattctccaatttacagaatgatgcaacttaaaatcttagtggtccctaaatctgcctttctgagatactcatttttgcctttgcttataggtgaaactacatacctrtccatctaatctctctctctctctctctctcctctatctatctatctatctatctatctatctatctatctatcatctatctgtctatctagatcatcatttcattttactttatattctgctcctacgtggaattcctagttgtgttgctatttgtgaacttgtcattgtag

SEQ ID NO: 416893 - DNA, 556 bp, Homo sapiens
agaggttaaaaagttctctttgctttttgagaacccattttgtagttcattgttgcagattgtctgatgttgactttcagaagtgaactgaaatgtatgagaaatctggaaayatggtaaagacaaggaatcaaagccaagaagcaaacagacacgcaggggaggatatttaccgcatcgtctcactgagcatacctggaaaactgagaagctggcttttgaatagtgcatatataatcagttctttggtctgtaaattcagtaatcatgaaaccccatgaattagtatcaacatagcagtacatgtcttcattaatattttgtatcattacctctgtagcctctctgaggaattcagggaattttatgggggaaaaaaaaccttaaaacttgaagcaactaaaatttatataaaaatcatacagaatgaatgaataaagtatattaaatatacaagctcttttcttagagacttagaatataaaatgaatacgaacccactttccccaataattagccttgatacacaagtaagcataagcacaatattttttct

SEQ ID NO: 416894 - DNA, 562 bp, Homo sapiens
aaattcagtaatcatgaaaccccatgaattagtatcaacatagcagtacatgtcttcattaatattttgtatcattacctctgtagcctctctgaggaattcagggaattttatgggggaaaaaaaaccttaaaacttgaagcaactaaaatttatataaaaatcatacagaatgaatgaataaagtatattaaatatacaagctcttttcttagagacttagaatataaaatgaatacgaacmcactttccccaataattagccttgatacacaagtaagcataagcacaatattttttcttgccaatttctacaatgacccaaaacctttaatgaataaaaaagatatatcctaactaattaaataattatagttgacaataactttattaggcaaaaaaatctactaattttcattgtctttttaaatattacagtattcgggcattgttatatatacattataaaatatatatctagatatctagatatattcatatatatatatatatatatatatcttgagataatatgaatgtaacatttcaaattaagatatac

SEQ ID NO: 416895 - DNA, 625 bp, Homo sapiens
taccactctgttctatattctgaaaaggactgcttttgcaatctctggtcaacataaattatgtggctcacaaataatttctaacctatgttttattttagcctatgacttagagttaaggtgatatcttggtcccaatccgctcacaattttagctttgcaaacagaaagrgagagagggaataaagaaatgagaacaaggggagtttctctatgagtagtaaatttactacaccaggcaggagctctgcgccccacagctctgattcgcatcacagaagccttggtaggtaatgacagggtgtgggaagaagcttcatcctaagtcataatcctgtcatcactaagggagtcagtaaggaatgtttacattccttggggaacctgagcatgacatttgggaaccaagggaaatctaaagcttctctgtctttctttctctttcataaatcaggggggaatgatagggttctcgaactgatagggatccatttataaagctcactcaatcggttgagtgcaacaaaactctggttgctgcagggaccactactgtttcacaaccacctaaaattgaaggctggaaattagagatgtaataagaaaaatgccagcaggaggtaat

SEQ ID NO: 416896 - DNA, 612 bp, Homo sapiens
gtaggcaaatggaattcacactagctattcctttactcagatccatcttcttgtatcacttaggagatctttctaaaatgggaaactggccattcacattctggcttaaaatgttttcaatggtgctttactccctgcagttgaattcaaattcttctgtgtagcatatacacgtggcccttttgtgatctgtgctcttctggatatttctcctctgtgcatccatattattgagccatactttatccttccacgagcaccacagtcttgtggtttcacttctttactcatgttcttcattggtctgtaatgcccatacatcccttttctgcatggaaattccttatcaaggcatcgctcagtattactttatccgcaaaacttttcattattcctgttcttcttgcctcttcttcacttctaccacagcgcataattataacaagccatttatctcatgcacttaaactattgmcatgtctctctctcacaccagattgagagttatgtgaaggtaaggtatcttttcgattttctttgtattcctggcatccagcaccatataccacatataatatgctgtcattaaacaacaggtaagtgaatgctgat

SEQ ID NO: 416897 - DNA, 593 bp, Homo sapiens
gctggggcaatgagtcgcttagtcctgaagggagacatctgggtgtcacaccacggcagccacgccactctccttatgtggcttagctcttaaggtatgcaaaaacgtgatgaagctctttcccgtggtactctctgtttcctaccaacatatttgtttggttgattttggggataaagttcctctatgtagtgtgtctgtgtgtgtgtgtttgtgtgtaagccatatatcatatagctatcacatgataacatatatacattatatcatatatcataatacaatatatacatgatctatttttatatctaccctagtgggctatgctggtrtgcttaggattttataggtctttatggatatctagaggcagacaaaatactggagagaagtacttttgaaataagtttttaaaaaacatgtctgctttgaaaatcatctgccaggtctaggtgtggcctgaaggaccacagagtcctcagctctggttgtccaagtgttcgtagtcatatgatgacaaagaaagcattttccctctgagagtggtttgtaaccactttgtggaacttggacagtaaaatgtgttcttagac

SEQ ID NO: 416898 - DNA, 397 bp, Homo sapiens
agcccagcaggctgcgctcagcttgcactactggccaagatcccacacctgcgaagggtaaaccaggcacagagtggagaggggtgtgtggacgagtgagcacagggtcagccactgcacacagccagacatgccaactgctgtggcggggcaggcagcttcagacactggcacaggtgccagctccatgcaaggctgcagctgctggaagcttggagatgccaggaaccacagagccccaaagagggtgtcacagccctggctctggtgagcccctaggtctaggctccccaaagggccacagctattttctccttttggtcacccacaatgtggtgagcacggggcagaggggggtgtttcagatctgttggtrttacagctctttcaatcccgc

SEQ ID NO: 416899 - DNA, 555 bp, Homo sapiens
acatcaaccagggccaggtggtgggaattgtacaaagaatcagacagaagtaatgtgtcatgcataaccagaggaatgtcagctacagaccttgccctcagccccacaggtataagctatcctccaggtaaatagcctgcatcacaaagatgccatggagcacaggcatcctagacacacccagggaatgagaccttgaaargccaagtgcctatagcatataagcaaatgtcttatcataaataaagtaaagataaaaacaggagatttctgttacctttggagataatatatagtcctatacacacttaaatgttttagcagagtggcatgtttagtaaagtgtgaaattttcagtgttttttctgcattagtcaacaatattattcagatggtaaataagttcacttttcctggcattaatagaggtagattgccgcatacacacacacacacacacaaacacacacacacacacacacagtcttccttagactttatccttttggttaacaataccattcaaatgtgcaattcagctgctcatccctatag

SEQ ID NO: 416900 - DNA, 601 bp, Homo sapiens
atgaaatgctttagtatccttgcatggtctagtcactggttgagcccttaattggcaaagcccttaggaagagtggcctcaaagtaaacggagccatrgattcagagtgcaacagccaaggtcagttacagtccttatactgggaggtcagcaaggtgcattctcatggccacatcatgaataaaactataactagctatttgcgtgataagaggaagtgtttcctggaacttccatgtctcaaccccaccatctgttcatatgccctcttttctacaggagtagcaacagatactttaattgctgattaatctctcaaaagtaaatagctgccaaccgagtgtaagaataaagaaaatgagaagtcaattgttctaggatcaccagagaagcagaaaactctcagactttagagagtgcccaaattaagaaactcttcacccaccttttagcttcacttgaaactggcccaggatatgccattcagagccccactgcagggcaccttggcgtgttgccagccctctgtcatacaatgactgccagctccttccagactttgaaatgctctgtgagagaaccatcattacctaccatagaa

SEQ ID NO: 416901 - DNA, 564 bp, Homo sapiens
aaatgtgaaattcacaatttaaatcctgattcttgaggaagagattttgtttccaaccacggtatcccaacttctcacaattaagatttccaaaataactttttaaacctctggaattttaataaatgggcccttattcttcaatcctttttcccattcaagaaacaaaattttcaaatcccttctctatctcagttgaatgcctacaatagtcaatacataatattaattcaccaaatgttttaaaaactattttaaatgtttacaaaactttgcgaaatgaataaagctactttttcttttttaaaacacatattttaccttagtgaaagtatgtaaaacaccccaaagggagcagcagytattagatcacactgagatagttatgtccaaaagtagtatgacttttttcccccttttttggcacaactgagttggaatgactattaaattatgataaaataaggtaacattttataaaattcccaatttcatacaaagcagcatttcctaaacttccacaatctcaattgcatattaaatttcaatgtcagtaccaggtta

SEQ ID NO: 416902 - DNA, 570 bp, Homo sapiens
ggatgaattatggcaaggactgtgaaagaggcccatgcattttgcttacttcctattcctgatttgcttctcagctattaaatgcattattttcctagcaccttccaatatcacakaaactggtggagatggaaacaatatgaagtgcgttttcattagacataccaacctgtattaacaatttttgctaatatactttgaaagccatagcctagacctttttcacccacgtactgaatcagaagttttaaacttttaaatatgtttctctcctccaaccccttttacctataaaaaagtggcggacaatataaaagagtggtcgagagcttggctctaggatcagattgcccaggattcaaatcctgatactaatacttactttttatgtggtcttgagttacagtatttcacccaaatccttcatttgtaaaatgggctaacagggttgtggtaaaaaagtaaatgaggcaagtccggcatgtggtaagtacttaggaatccttaaaccactagatacccaagaatcccctgaaattacgtgcaacaactctgtgtgtatgtgcacat

SEQ ID NO: 416903 - DNA, 497 bp, Homo sapiens
aggagcaggagggaggctaaggtcagaacgaggaaggctggccagaggctaggaggtgccygagagcggcacacccaaacacacatctgctgtgtatctgctctggactggacactcagacagcgtgtctgtgctgggggcctggccttgtgctggcggcaggggatctgcagatgatgcaggcctggttcccactgccatggtgctcatggtctaggggagggagcagcatgtgcccagcacacttcatggctcactcagagctcagtggagtcctgggaatggagggccctgcggcaggccactgcttgggagggccgttagaagttacaggtggccaaggtggggagcgcctgggccacaggaccctgaggaagctccactggacctgtggacaacagtgctcaagaggatgaagcaccagtgaggtggcctcagagcacgggggactggggaatgagaatggaagaaaaaacaacaaaaaaaagtaatataaa

SEQ ID NO: 416904 - DNA, 497 bp, Homo sapiens
aggagcaggagggaggctaaggtcagaacgaggaaggctggccagaggctaggaggtgcctgagagcggcacacccaaacacacatctgctgtgtatctgctctggactggacactcagacagcgtgtctgtgctgggggcctggccttgtgctggcggcaggggatctgcagatgatgcaggcctggttcccactgccatggtgctcatggtctaggggagggagcagcatgtgcccagcacacttcatggctcactcagagctcagtggagtcctgggaatggagggccctgcggcaggccactgcttgggagggccgttagaagttacaggtggccaaggtggggagcgcctgggccacaggaccctgaggaagctccactggacctgtggacaacagtgctcaagwggatgaagcaccagtgaggtggcctcagagcacgggggactggggaatgagaatggaagaaaaaacaacaaaaaaaagtaatataaa

SEQ ID NO: 416905 - DNA, 620 bp, Homo sapiens
ttggggggatgccaacatctctccactgaaaatgccactgacagctggctgctctctagtattagggaaatctgggttcctagttgattcatatttgtgatgttttcaaatcagtagcaggtgatgaatgtcatcaactgccctgttcggcctctgtggaccctgcacgtctcttgcggcatttgctgtggcaaatcatgctgacaggctgcctcgccccacatcaccctcgcccgctgtccatgtgctggtatttcacttgggattcccatgcctgcttcacctgctggaggtgagacacagtgttcctgcataccacgtggccaacaggctcagtaacagctctgagggcagccggccttgggttcaatcctgccgctgcccctgcccctaccagctatgcagccctggctgaactcttcctgcctcagctttctcatccagaaaggtggggacacsaggacctacacctcacaggattgttgcgaggactaatggggtaatagatgtagatgtgctgggcttagaactgtgcagggcacaccgtatgtcttcaatagttatcacacctttgtcaagttttagaaccagggtatgttagctttatacattaaattatt

SEQ ID NO: 416906 - DNA, 599 bp, Homo sapiens
ggagccaggagggggacttggaacagacgctatctcagaagcagacatccctggccgcagtttcatcctggacttccttcccccagaactgtgagacaagagacatctgcggcccctagtgtgtagtgctctggcagccctagccaactctatgcaaggtctgtatctttctcaaggaaagcaagccataaaaagatggccttggggtcctggctgtctgtctttctttaccaaattagtggaattttctgtgatcagagagaacgatgctgatgcaatagacagacagaggggattactactatatgggggcatagagggccctcatgtctagccctccctggacttcgcctctgttctgccccaggtggagcccagtattcgtttgctgagctgtgctgtgtgcagctgtggggtgaatggctctgggccctgctggggtcactgtgggaagtgtagtcctcagttctagtagcaagagcctggggcacagaggtgtgggaggcaggagctactggttggatgggaggaacctgggaacacgtgtgggtccctgtgtgggagccytgagccctaagaacacaactggccatagggag

SEQ ID NO: 416907 - DNA, 377 bp, Homo sapiens
ggatacattgggtgggtccttgttagggttgactgcacccaacccccacccccattcatcccacccatgcttttatctagacagcaccatgcaacacaaacacacccccatcagtgtgtcagtagatctccagtcatctacacaggagatttggttttgtttttcttgggagaggtgggagaagttttagagaagagagaaactgagaaggggagaaaagcagtttgggccatggtaatgwctgtatgccttagttccttgggctggttttgagccccccaagaagacagagtttgagaagcagaagctgctttactgggtctggtgacagagtgtggtacaatttagggaggaaggctgcctctatcatccattct

SEQ ID NO: 416908 - DNA, 267 bp, Homo sapiens
tggctatttctcccaatgttagttatttggagaaaaaaaacgtgatggtaattttggggtaacaaatacaatatttgatgaaagcaaatttattgagggttagacaaactacaagatrctttaggctgcaaagtcaacacgagacttctggcccaaattgtgcagagtttgcgtccagctgcaaagttcaaaggaagaggccatataagacgattctcacttctgacaccaactgccagttcaggggtttcccctgaacaccctcag

SEQ ID NO: 416909 - DNA, 631 bp, Homo sapiens
tgggtttagagtttcagttttacaaggtgaaaccaattatggagatggatggtagggacggctgcacaatattatgactatatttagtaccactgaactgtacacttaaaatrgttaacagagtacattttatgttatgtgtattttaccacaataaaaaaataaaataccttaggaacattttcatgaaaaagcccacataaaattcattttaatgcacgtgtttatgcatagctttctatttttctcttttctctttatattccaaattctaatcagagaagggaatcccctctgtacctccaggatattcagtaaagaccattggaggttcataccctggtgacagtgctcatttagctccaaattacagatgactctagactaactccacaaagtttaaagagaagatttaaaacaacaacgtacaaatactcatcctgaagttacttaacagcctgccacaacattgtccaaaggtagccaataaaatctagatattcattagcataacatcaaaataccccccaaaaaaaaactctgacatgcaaagaagccgtaagatatacataattaagatatatattaacaggataaaaataagtcatttgtaaatgacagaaaagaagga

SEQ ID NO: 416910 - DNA, 239 bp, Homo sapiens
gtatctcagggaaagcctgtctayatcaatgcagactttctctacaaatataaatctccccaacaaacacagcttttcagctattcttgtagaagaagctatctccagtcttccgagtagccatcttgaaatatgtcaaaaagctggccaggcgcatgcctgtaatcccagcactttgggaggctgaagtgggtagatcacctgaagtcaggagttgcagaccagcctgaccaacatgg

SEQ ID NO: 416911 - DNA, 239 bp, Homo sapiens
gtatctcagggaaagcctgtctacatcaatgcagactttctctacaaatayaaatctccccaacaaacacagcttttcagctattcttgtagaagaagctatctccagtcttccgagtagccatcttgaaatatgtcaaaaagctggccaggcgcatgcctgtaatcccagcactttgggaggctgaagtgggtagatcacctgaagtcaggagttgcagaccagcctgaccaacatgg

SEQ ID NO: 416912 - DNA, 626 bp, Homo sapiens
actatttatttctgtgtgtattttaagcatgaatataataaatatttttcagattcaacaatatatatccatccaactagctcttataaatattagttaaatcaattagtaaattcatatgtatataaacacacatgtatcagtctgtatgcatatatgtgtgtgtaaatgtaactgtatgtgtgtgtaaatgtaactggatgcatcctaatatttacccttacctacaagatttccaagtttcatttattatctttagatgatgtgcatttaaagatttaccaaataaagctgtaatcatggaaaatatcaagatgttactaaattcatcttttggacatagttgtttctttaaatttatgtttcttgcaaaacttgtggtaatgctcatgcacaaaataattgcctaaataaaaaataaaagcattttctcagtcattaattcttaataattatttctccccaataattaatgtgaattaattcttaattcttaattatagaataatgttgcccttcagagttctgaatcttttgcatgttgtatacatttcactaactagaacwacttctggaatattggcattaattaatgtcactcagcaattaatgatttcaaagaaatt

SEQ ID NO: 416913 - DNA, 626 bp, Homo sapiens
actatttatttctgtgtgtattttaagcatgaatataataaatatttttcagattcaacaatatatatccatccaactagctcttataaatattagttaaatcaattagtaaattcatatgtatataaacacacatgtatcagtctgtatgcatatatgtgtgtgtaaatgtaactgtatgtgtgtgtaaatgtaactggatgcatcctaatatttacccttacctacaagatttccaagtttcatttattatctttagatgatgtgcatttaaagatttaccaaataaagctgtaatcatggaaaatatcaagatgttactaaattcatcttttggacatagttgtttctttaaatttatgtttcttgcaaaacttgtggtaatgctcatgcacaaaataattgcctaaataaaaaataaaagcattttctcagtcattaattcttaataattatttctccccaataattaatgtgaattaattcttaattcttaattatagaataatgttgcccttcagagttctgaatcttttgcatgttgtatacatttcactaactagaacaacttctggaatattkgcattaattaatgtcactcagcaattaatgatttcaaagaaatt

SEQ ID NO: 416914 - DNA, 208 bp, Homo sapiens
tgtttaactcacagagtctaacctttcttttcatgcagcattctgggaacactctgtttgtaaagtctgcaagtggatatttggacctcttagatgccttcgttggaaacgggatttcttcatataatgctagagggawgaattcttagtaacttctttgtgttgtgtgtattcaactgacagagttgaaccttcctttagacagagc

SEQ ID NO: 416915 - DNA, 591 bp, Homo sapiens
tgaattcttagtaacttctttgtgttgtgtgtattcaactgacagagttgaaccttcctttagacagagcagattcgaaacactctttttgtgcaatttgcaagtggagacttcaagagctttgaggccaaaggcagaaaagttattatcttcgtataaaaaccagacagaatcattctcagaaactgctctgtgatktgtgcgttcaactgacagagtttaacctttcttttcatagagccgtctgtaagcgctctgtttgtcaagtctgcaagtggatattctgacctctttgtggacttcgttggaaacggtgtttcttcctataatactagacagaagaattctcagtaacttccttgtgttgtgtgtattcaactcacagagttgaacgatcctttacacagagcagatttgagacactctttttgtggaatttgtaagtggagatatcagtcgctttgagctcaatggtagaaaaggaaatatcttcgtataaaaactacacagaatgattctcagaaactgctttgtgatgtgcccgttcaactcacagagtttaacctttcttttcatagagcagttaagaaa

SEQ ID NO: 416916 - DNA, 218 bp, Homo sapiens
catacagcattctggaaaccctctgtttgtaaagtctgcaagtggatatttttacctcttagatgtcttcgttggaaacgggatttcttcatataatgctagagggaagaattcttagtaacttctttgtgttgtgtgtattcaactgacagagttgaaccttcctttagacagagcagatttgraactctctttttgtggaatttgcaagtggagat

SEQ ID NO: 416917 - DNA, 402 bp, Homo sapiens
aacttctttgtgttgtgtgtattcaactgacagagttgaaccttcctttagacagagcagatttggaastctctttttgtggaatttgcaagtggagatttcaagcgctttgaggccaaaagcagaaaaggaaatattttcctatgaaaactagacagaatcattctcagaaactgctctgtgatgtgtgcgttcaactcacagagtttaacttttcttttcattcagcagtttggaaacactctgtttgtaaagtctgcacgtggatattttgacctctttgaggccttcgttggaaacgggtttttttcatgtaaggctagacagaagaaatctcagtaacttccttgtgttgtgcgtattcaactgacagagttgaaccttcctttagacagagcagat

SEQ ID NO: 416918 - DNA, 452 bp, Homo sapiens
tcttcgttggaaacgggatttcttcatataatgctagagggaagaattcttagtaacttctttgtgttgtgtgtattcaactgacagagttgaaccttcctttagacagagcagatttggaactctctttttgtggaatttgcaagtggagatttcaagcgctttgaggccaaaagcagaaaaggaaatattttcctatraaaactagacagaatcattctcagaaactgctctgtgatgtgtgcgttcaactcacagagtttaacttttcttttcattcagcagtttggaaacactctgtttgtaaagtctgcacgtggatattttgacctctttgaggccttcgttggaaacgggtttttttcatgtaaggctagacagaagaaatctcagtaacttccttgtgttgtgcgtattcaactgacagagttgaaccttcctttagacagagc

SEQ ID NO: 416919 - DNA, 452 bp, Homo sapiens
tcttcgttggaaacgggatttcttcatataatgctagagggaagaattcttagtaacttctttgtgttgtgtgtattcaactgacagagttgaaccttcctttagacagagcagatttggaactctctttttgtggaatttgcaagtggagatttcaagcgctttgaggccaaaagcagaaaaggaaatattttcctatgaaaactagacagaatcwttctcagaaactgctctgtgatgtgtgcgttcaactcacagagtttaacttttcttttcattcagcagtttggaaacactctgtttgtaaagtctgcacgtggatattttgacctctttgaggccttcgttggaaacgggtttttttcatgtaaggctagacagaagaaatctcagtaacttccttgtgttgtgcgtattcaactgacagagttgaaccttcctttagacagagc

SEQ ID NO: 416920 - DNA, 452 bp, Homo sapiens
tcttcgttggaaacgggatttcttcatataatgctagagggaagaattcttagtaacttctttgtgttgtgtgtattcaactgacagagttgaaccttcctttagacagagcagatttggaactctctttttgtggaatttgcaagtggagatttcaagcgctttgaggccaaaagcagaaaaggaaatattttcctatgaaaactagacagaatcattctcagaaactgctctgkgatgtgtgcgttcaactcacagagtttaacttttcttttcattcagcagtttggaaacactctgtttgtaaagtctgcacgtggatattttgacctctttgaggccttcgttggaaacgggtttttttcatgtaaggctagacagaagaaatctcagtaacttccttgtgttgtgcgtattcaactgacagagttgaaccttcctttagacagagc

SEQ ID NO: 416921 - DNA, 402 bp, Homo sapiens
aacttctttgtgttgtgtgtattcaactgacagagttgaaccttcctttagacagagcagatttggaactctctttttgtggaatttgcaagtggagatttcaagcgctttgaggccaaaagcagaaaaggaaatattttcctatgaaaactagacagaatcattctcagaaactgctctgtgatgtgtgcgttcaactcacagagtttaacttttcttttcattcagcagtttggaaacactctgtttgkaaagtctgcacgtggatattttgacctctttgaggccttcgttggaaacgggtttttttcatgtaaggctagacagaagaaatctcagtaacttccttgtgttgtgcgtattcaactgacagagttgaaccttcctttagacagagcagat

SEQ ID NO: 416922 - DNA, 569 bp, Homo sapiens
aagttttccacagggcacttgtctgtggggtgagtgccagcaggcacatttcttgactcccgctgcaaccgagcaggtcaatgtggcgtgtggggctgtccatgtgcgctgtgaagtctgtggggtgagtcaggtaggttgtatccaacggttccatagctggtagtcaccaggaggaggcaactgtgtagggtcaaaatctgggccagccacactgaggaactgtgagggttagaactggaaattgtcaagggaatctgaacccagctaccatatgagagagttcaacttatgttcaacgtgaatggcatggaaatattaaaaggtaagaattcactccatacgtgcttcaggtaaacaggagaaacctagaatttatgtaaacagtgagaagattggatgcgttttccatcacawattttaatactagcagcatattatatatgtcaatccgtcagacattcagaaatacatgcttatgaaaattttttgcaccatcagacaaaagacaagggtagaaaacatttgtaaccctataaacactagtaaattaaaaacagaaggacctt

SEQ ID NO: 416923 - DNA, 569 bp, Homo sapiens
aagttttccacagggcacttgtctgtggggtgagtgccagcaggcacatttcttgactcccgctgcaaccgagcaggtcaatgtggcgtgtggggctgtccatgtgcgctgtgaagtctgtggggtgagtcaggtaggttgtatccaacggttccatagctggtagtcaccaggaggaggcaactgtgtagggtcaaaatctgggccagccacactgaggaactgtgagggttagaactggaaattgtcaagggaatctgaacccagctaccatatgagagagttcaacttatgttcaacgtgaatggcatggaaatattaaaaggtaagaattcactccatacgtgcttcaggtaaacaggagaaacctagaatttatgtaaacagtgagaagattggatgcgttttccatcacatattttaatactagcagcatattatatatgtcaatcygtcagacattcagaaatacatgcttatgaaaattttttgcaccatcagacaaaagacaagggtagaaaacatttgtaaccctataaacactagtaaattaaaaacagaaggacctt

SEQ ID NO: 416924 - DNA, 629 bp, Homo sapiens
taatctatacagtaggtatcattagtgtattgatgttaaattttgggggtggattaatggtattgtgattatataggagaagtcctggttcctagaagatatctgcgaaagtacttaacagtgaaatgctctgatactgccaacttactttgaaatgattcagrgggaaaaagggcacatatacaatcttccatacgcagaagacagaaaacaagtgtgacaaaacattaactagtgaatccagttgaatagcatacagatgttcactgtatgattttatcaacttttctgtgtttgcaagttttcaaaataaaagttgagggaaagaaacatcaccccaaatctttctatgaaatgggaccacagaaaaagcagagaagtgaacactttgcagaaaagagcactgcacccatccggacagcatggtcaaagtgcaggctctcctccaggaggctcttctctggtctcttctgtgctgtcacttcccccacatgcagccaaggcttttttctaacaactctttttctaaagatgtaatttttgtcattcatctaagaaagagaagaaaagaattagtatacatttagaaaataaaattacacttacatttgtgaaaaagcaaaaaatac

SEQ ID NO: 416925 - DNA, 526 bp, Homo sapiens
caccccctccatatttaaaagttatttgccattggaggtatcatcaaagactactctccctttctaaaatcttggtgttagcagctagaagagagactgccagtcttccccgccagccctactttatgacttaatgcatggcaccacttgtgcagctgatgcctggtcgggccacactttccattatgaacatgctctttcctgacttccctcacattcattgaagtccrgtcccggctcagttgctggccgcggctgcttctattgtagaaagtggaatgaataaaaatgaagggcttctgacactggggtgaaactttgtcactgaagagatcttttcaatccaagaagaggaacccagccagcttcgccaaagctggaaaaagctgcaaccttcttttgcccctgttgagatattggaacccccactggttggcttccctctgccctacagctgcccacctgagatttctcacctgggcagagccacagcacagcacagagaaactcagtttccggggacttt

SEQ ID NO: 416926 - DNA, 631 bp, Homo sapiens
ctaacctgcacattgtgcacatataccctaaaacttaaagtataataaaaaataaataaaaaatttaaaaaaacaggtgaaattaaaaagaaatgtctttgtctgtagtagtatttactgtcttaaactgtattttgtctgatattcatataggtgcttcacctctcccatcattactgtttgcatggtccacattctctatcgttttactttctatctatttgcgmcatttaatctgaaggatgtcttgtgcagacagcatattcttcagctttgctttttaaaaaatctagtctgaacatttatgatttttgatataatacaattattgatattggatttatatctaccatattgctgctttctgtaattttcatgtatttttgttcttttctcccttttactaacagatatttgtagcgtattattttagttcaattgttgatttctaattctatttttcaacatattttcctagaatttgttctcggaatatacctacatctatacttatcccaaacttctttaggtttataatgatatctgcctgatgaaacacagcaactttgccacaatgtcactccattttctctcttctttgtgcagttattgtaatacacattacagcaat

SEQ ID NO: 416927 - DNA, 631 bp, Homo sapiens
ctaacctgcacattgtgcacatataccctaaaacttaaagtataataaaaaataaataaaaaatttaaaaaaacaggtgaaattaaaaagaaatgtctttgtctgtagtagtatttactgtcttaaactgtattttgtctgatattcatataggtgcttcacctctcccatcattactgtttgcatggtccacattctctatcgttttactttctatctatttgcgacatttaatctgaaggatgtcttgtgcagacagcatattcttcagctttgctttttaaaaaatctagtctgaacatttatgatttttgatataatacaattattgatattggatttatatctaccatattgctgctttctgtaattttcatgtatttttgttcttttctcccttttactaacagatatttgtagygtattattttagttcaattgttgatttctaattctatttttcaacatattttcctagaatttgttctcggaatatacctacatctatacttatcccaaacttctttaggtttataatgatatctgcctgatgaaacacagcaactttgccacaatgtcactccattttctctcttctttgtgcagttattgtaatacacattacagcaat

SEQ ID NO: 416928 - DNA, 631 bp, Homo sapiens
ctaacctgcacattgtgcacatataccctaaaacttaaagtataataaaaaataaataaaaaatttaaaaaaacaggtgaaattaaaaagaaatgtctttgtctgtagtagtatttactgtcttaaactgtattttgtctgatattcatataggtgcttcacctctcccatcattactgtttgcatggtccacattctctatcgttttactttctatctatttgcgacatttaatctgaaggatgtcttgtgcagacagcatattcttcagctttgctttttaaaaaatctagtctgaacatttatgatttttgatataatacaattattgatattggatttatatctaccatattgctgctttctgtaattttcatgtatttttgttcttttctcccttttactaacagatatttgtagcgtattattttagttcaattgttgatttctaattctatttttcaacatattttcctagaatttgttctcggaatatacctacatctatacttatcccaaacttctttaggtttataatgatrtctgcctgatgaaacacagcaactttgccacaatgtcactccattttctctcttctttgtgcagttattgtaatacacattacagcaat

SEQ ID NO: 416929 - DNA, 683 bp, Homo sapiens
cggggactgtagagacaaggtatgaggtcagttttctcaaggggcttttttttattggctctgcaaatggagcttgactccttgaagagtctccttaaagccttggtaaaacaaccagtttttccaattgtgtcttgtagcgaaagaaaatgaattcttattggactgatgtaaacaactatattgttataagtcaagaatactcataaccagtttccgaattctagaggaaccaggcagagagaaacaagcatgtttcaaattttgttcacaggagtataccttacttagttgttaaaagctgtagctagctcaaaagaaagtcccctcaactctgaaaaacaaaataaggatcagcaatgttccaatcaaaagtcaaaaagattagttcaattttctactagttcaatccattcagttaactcttgtcctgcctgatactccataacatytcagcttttcatgaatctggtgcatttttctgttatcacaaacctgcatttgagactacctgttaaagtcctacagctgattataaaccatcctttaaaggggattaaaacaagacaacaattgtctgtaaacaacaaaatgtccagggtggttactgtcagaaacatgtttgacaaagaaatttggttacttctgtggtttacaatagcttaacataataatcttaatta

SEQ ID NO: 416930 - DNA, 354 bp, Homo sapiens
gagcgggctctctctgctgtcaccgccacacagaagaagaaggcggagagggtgagtccaaccacctgccccgtcccctgggagcctggcttygcagacagaggagtgagcctaaaggtcccttctgcaggatggagtgtcctgcccagaaggcagcatggccatttctcactgcttttttgtatggttgttagcggcagcttgggactgagtcagctgctgtgggtgagttggggggcactctggggacaaagcacaggacgtagagcttggaggccaagtgcctgccatgcctttacctggctgtggtcttggccaagtcctcagtgggtattgggtacttgtactgtgaag

SEQ ID NO: 416931 - DNA, 542 bp, Homo sapiens
aaggtacagaagagtacctttagtatgttaccatttctgtagagagaggaaacgtgtgtgtgtgtgtacatattatgataatatacataaaatatgtttgcaagtgttcataaaaactcaggagagagcaacagggtggctgggagatacttcccttctgtaccttctgagtctgggactatktgaatgtattatcctttcaaaaagtgaacaaaagattaattttccccttcctagctgtgcccccacccccagcaagaaaaatgggcttagagaattggatagatctgggtgtttaaatcccagctctgcctaagtgatcttaggcaagcacttaacctcaaatactccatgttttttcatctacacaatagaggtcatcatagtaactgtctcccatggtggttgtgaggattaaatgggattgctagcatggtatctggtgaagcactccataaaagttcaaacagtggtaataataacagtaataacaacagcaatattatctgatctctctgggcctctgttagccagctataaat

SEQ ID NO: 416932 - DNA, 542 bp, Homo sapiens
aaggtacagaagagtacctttagtatgttaccatttctgtagagagaggaaacgtgtgtgtgtgtgtacatattatgataatatacataaaatatgtttgcaagtgttcataaaaactcaggagagagcaacagggtggctgggagatacttcccttctgtaccttctgagtctgggactatttgaatgtattatcctttcaaaaagtgaacaaaagattaattttccccttcctagctgtgcccccacccccagcaagaaaaatgggcttagagaattggatagatctgggtgtttaaatcccagctctgcctaagtgatcttaggcaagcacttaacctcaaatactccatgttttttcatctacacaatagaggtcatcatagtaactgtctcccatggtggttgygaggattaaatgggattgctagcatggtatctggtgaagcactccataaaagttcaaacagtggtaataataacagtaataacaacagcaatattatctgatctctctgggcctctgttagccagctataaat

SEQ ID NO: 416933 - DNA, 542 bp, Homo sapiens
aaggtacagaagagtacctttagtatgttaccatttctgtagagagaggaaacgtgtgtgtgtgtgtacatattatgataatatacataaaatatgtttgcaagtgttcataaaaactcaggagagagcaacagggtggctgggagatacttcccttctgtaccttctgagtctgggactatttgaatgtattatcctttcaaaaagtgaacaaaagattaattttccccttcctagctgtgcccccacccccagcaagaaaaatgggcttagagaattggatagatctgggtgtttaaatcccagctctgcctaagtgatcttaggcaagcacttaacctcaaatactccatgttttttcatctacacaatagaggtcatcatagtaactgtctcccatggtggttgtgaggattaaatgggattgctagcatggtatctggtgaagcactccataaaagttcaaacagtggtaataataacagtaataacaayagcaatattatctgatctctctgggcctctgttagccagctataaat

SEQ ID NO: 416934 - DNA, 341 bp, Homo sapiens
acaccctaccttcatctcctccctgagctccagcctgatggtgtcctcctcccagtgccgcatctttggcacggccccctggttctgataaaaggtgrtggattttcctgcgggaggacagggctcagacgctggggcccctccgacggccctgtagctccccctgctgtgccctggcctcccactcactgatggcatctctcttgccagtattgaatgaagcgaagttcttgtttcttcaccagctcactcaggtctgccttctcctccaggtggtccataaagctgctctggagccaaaatattgtagtcacatctcggcagcgacctgccctcaggtg

SEQ ID NO: 416935 - DNA, 341 bp, Homo sapiens
acaccctaccttcatctcctccctgagctccagcctgatggtgtcctcctcccagtgccgcatctttggcacggccccctggttctgataaaaggtgatggrttttcctgcgggaggacagggctcagacgctggggcccctccgacggccctgtagctccccctgctgtgccctggcctcccactcactgatggcatctctcttgccagtattgaatgaagcgaagttcttgtttcttcaccagctcactcaggtctgccttctcctccaggtggtccataaagctgctctggagccaaaatattgtagtcacatctcggcagcgacctgccctcaggtg

SEQ ID NO: 416936 - DNA, 341 bp, Homo sapiens
acaccctaccttcatctcctccctgagctccagcctgatggtgtcctcctcccagtgccgcatctttggcacggccccctggttctgataaaaggtgatggattttcctgcgggaggacagggctcagacgctggggcccctccgacggccctgtagctccccctgcygtgccctggcctcccactcactgatggcatctctcttgccagtattgaatgaagcgaagttcttgtttcttcaccagctcactcaggtctgccttctcctccaggtggtccataaagctgctctggagccaaaatattgtagtcacatctcggcagcgacctgccctcaggtg

SEQ ID NO: 416937 - DNA, 341 bp, Homo sapiens
acaccctaccttcatctcctccctgagctccagcctgatggtgtcctcctcccagtgccgcatctttggcacggccccctggttctgataaaaggtgatggattttcctgcgggaggacagggctcagacgctggggcccctccgacggccctgtagctccccctgctgtgccctggcctcccactcactgatggcatctctcttgccagtattgaatgaagcgaagttcttgtttcttcaccagctcactcaggtctgccttctcctccaggtggtccataaagctgctctggagccaaaatattgyagtcacatctcggcagcgacctgccctcaggtg

SEQ ID NO: 416938 - DNA, 559 bp, Homo sapiens
ccctaccagcagcagaaaaattcagagacaaatagcatgtcccctatagccagtcaaaaaaagaaacccagtcaaaaggggaaagagggtgaaaaagagacagcatctccattcccaacaggaagagagatagtgtccccttgaaaaccctaattggagcctagcaatcccatagttgcatggaaaagaaaacactttctgatgtgcatattaaaaggcttgcaaagaaccagtgccaaacctcttaattaccctaagttatccatgatagataaaaaaccagatgaaaatttcatggcctttatggaaagactgagagagaacttagtgaaacacacctccctgtctcccaattcaataaggaacagatttattaggcagctcctgatatcagaaggaagttgctgaagcagaactttgtccaaaaatctatttaatttttctcactcccaygttgaaactctgtggtatgtaaataacactctcctctgtgccccaaccaaggaagtcagggaggcactgaggctgtcctcagtttcttagctgaaaggggatatag

SEQ ID NO: 416939 - DNA, 560 bp, Homo sapiens
atgcccctaactatgctggaaggagtcagactttatttgcacctagtacataaataaaacaacttaccaggtttacattaaagttaaaaattgttaagagttaccattatgacatgtaattgagactattgacaatagatttccatgtaagctgtgtacaaacagtaaggtgtgtttttagtaaaagattataagaagacatggaaatgtacattttgcctggggataaaggattgtcttaaatgagttaaagtaaagctgaaggtttaagacaaaggtctaccttatcttaaatgagataaaataaagctgaaggtttaagcaaaatgtacattttgcctagggataaaggattgtcttaaatgagatgcagtaaagctgaaggtttaagtaaattggggaaaaattgtaacaattaaccttgcaaagaaaactgtatgagcatattgactaaattcaaaaggggtatttttttttgtaarttgagcactgaaataaaagcacaacaaggttatcttaagacactaatctgctctttagcaaaacttgtaaagtgttat

SEQ ID NO: 416940 - DNA, 551 bp, Homo sapiens
tatgtgttgtttttataaggtacccaattgacttataagtaaaagatcactcataagttaagtaaataagtccaagcatttaaaaagttcatttgacatcggtawatctttactaaacaagatggctttaagattcttggtaaaataaaaatgcttttgaaattgttggcatacatttttgcctggattttatatttgtctctgctaggtattttaaggtgtcagggtttggcacaaaagtttataagattgtaaacccagccaagaggaaaatgatctgtgtttgcgagatttttttgagaaataagtctaatttaatgaggctggtttaataaaagccactgaatcttctgagttattagcaatgatgtccattagttaattttaagcctcttacttaggtaaagatttaatatgtgcaggtcataaggatggtgaagaagaaaataactacatttttctgatatctcagttctcataaataatctagataaactgctaaaaataaataaaatatagatgagataattactgtaggtgacctttttgtg

SEQ ID NO: 416941 - DNA, 551 bp, Homo sapiens
tatgtgttgtttttataaggtacccaattgacttataagtaaaagatcactcataagttaagtaaataagtccaagcatttaaaaagttcatttgacatcggtaaatctttactaaacaagatggctttaagattcttggtaaaataaaaatgcttttgaaattgttggcatacatttttgcctggattttatatttgtctctgctaggtattttaaggtgtcagggtttggcacaaaagtttataagattgtaaacccagccaagaggaaaatgatctgtgtttgcgagatttttttgagaaataagtctaatttaatgaggctggtttaataaaagccactgaatcttctgagttattagcaatgatgtccattagttaattttaagcctcttacttaggtaaagatttaatatgtgcaggtcataaggatggtgaagaagaaaataactacatttttctgatatctcagttctcataaataatctagataaactgctraaaataaataaaatatagatgagataattactgtaggtgacctttttgtg

SEQ ID NO: 416942 - DNA, 542 bp, Homo sapiens
tggctcacgcttgtgatcccaggactttggacagccgagcgcggattatcacttaagcctaggagttccagaccggcttgggcaacatggtgaaaaccagtcactttttttttttttttgaggtggagtttcactcttgttgccctgctggagggcagtggcgaggtctcggctccccgcggcctctgcctctgggtttggctggttctcctgcctcagcctcccgagtgcctgggattgcaggcctgagccaccatgcagggctcattttgttatttatttatttatttatttatttattttggtacagacggggtttccccatgttggtcaggctggttggtctcaaattcccgacytcaggctattccctgcctcggcctctcaaagtgctgggattacaggcgtgatcggcctggcgtggtggttcacgctgttaatcacaggacttatgacggccaagcgcggcagatggcttgagcctaggacttccagacgggcctgggcaacatggtgtaacccggtccctttttttttttttt

SEQ ID NO: 416943 - DNA, 542 bp, Homo sapiens
tggctcacgcttgtgatcccaggactttggacagccgagcgcggattatcacttaagcctaggagttccagaccggcttgggcaacatggtgaaaaccagtcactttttttttttttttgaggtggagtttcactcttgttgccctgctggagggcagtggcgaggtctcggctccccgcggcctctgcctctgggtttggctggttctcctgcctcagcctcccgagtgcctgggattgcaggcctgagccaccatgcagggctcattttgttatttatttatttatttatttatttattttggtacagacggggtttccccatgttggtcaggctggttggtctcaaattcccgacttcaggctattccctgcctcggcctctcaaagtgctgggattacaggcgtgatcggcctggcgtggtggttcacgctgttaatcacaggacttrtgacggccaagcgcggcagatggcttgagcctaggacttccagacgggcctgggcaacatggtgtaacccggtccctttttttttttttt

SEQ ID NO: 416944 - DNA, 540 bp, Homo sapiens
cagactgtattatccaacattccaataagataaaataatcacaatgacttctcttttttggaaaaatgtttctcttattctcctacgttattgtgaagactttttttcttaaacaagaaacatgtgtaatatttgtaaaaacacaaagcttttgggccgggtgcagtggcttatgcgtataattccagcactttaggagcctgaggctggtggatcatgaggtcaggagattgagaccatcctgactaaaaaggtgaaaccacatctctactaaaaatacaaaaaaytagccaggcgtggtggtgggtgcctgtagtcccagctacttgggaagctgaggcaggagaatggcgtgaacccaggaggtggagcttgcagtgagctcagatcgtgccactgcactcgagcctgggctacagagcgagactccttctcaaaataaataaataaataaataaataaaacttctatttctttcactttctaatataattttaatatctcctcctgggatttcactaagacacattttggacctca

SEQ ID NO: 416945 - DNA, 562 bp, Homo sapiens
atgtgcatacttaaccttctttttatttatttatttatttatttttaatattttgagacaacatcttgctatgttgcctaggctggtcttgaactcctgggttcaaaccatcctccagtcttgacttcccaaagtactgggactacaggtgtgagccaccagccccgccagccctgttacactattcttggcccctcaagtgactgtatgaattttaggatcagcctctcgagttccacaaaaaaattctattgggatttgtgtaggaatttcttgaatttatagattaatttgttgagaagtagtatgtttatagcattgagtcctacgattcataatatatatggcatatatttcagtttagtcagttctycctttaagtccctgggtaatttttatatttgtcttagtcccttcatagtgccataacaaaacacctgagactgggtaatttacacagagcagaagtttattttctcagttctggaggttgggaagaacaagatcaagactccagcagacacagtgtctagtgagggcctggtctctgcttccaagatgg

SEQ ID NO: 416946 - DNA, 576 bp, Homo sapiens
ttgttgctattgtcaatagaatctcttttttttttttttttttgccacggagtctggctcctttgcccaggctggagtgcagtggcgygatctcggctcactgcaagctctgcccctccaggtttaagcagcctgttgcccaggctggaatgcagtagcatagtcatagttcaatacagcctcaaactcctgggcccaaatgattctctaagctaatatttttaattttttagagatggagtttcattcaaggatcactaaaggccagtgatcctcccgcctcagcttctgaaattgctgggattacaggtgtgattgagccatggagcctggccagacatgggctattgattctcgctgttactcttttccctttccttctaatccttgtattgggaagaaaacagtatggaaattttatttcttcattttattgatacgtagatctctgcttagaagacaattttagttttaaattataaatgtttcgttcattattcatagaaaactagatttgccatgggatatttataagtgttgcacgaatgaagggttttctagtcaaataagttgaaa

SEQ ID NO: 416947 - DNA, 546 bp, Homo sapiens
agcatgaggccaactgagtctgtctcttctttctcccctcttttccccttttcttctgcagtttactctaaaggcaaacaaaaatatttcactatttttarcattatataaaaataaaaaagaaataaatctattcaattttaattagtttgatcacaaggtaagatttttgtaaaccctttataattttttaattaaaaagccaattaatgctctacaaaaatcctgttatttaggcagagaggcccagattctgggcctgcatcagtgtactttttacattaatgtgctgtccatagaaaaactaaattatcccctttatattttggccaacttgctcatacacaggacttcgcttctaagatcaatattttatagatttttttataacttactaaaatctttttttttttttgagacagagtctcactctgtcccccaggatggagtgcagtggcatgatctcagctcactgcaacctctgtctcccaggttcaagtgattctcctgccccagcctcctgggattacaggtgcccaccaccat

SEQ ID NO: 416948 - DNA, 463 bp, Homo sapiens
cactgctggccctgccacagagagggttactgggaaagctttccttgccttgttgatatgctgggccactagtggtacacacttccctccctgaaaagtaagtggctcacgctgatgtaaccttgacatttagtgaaactamaaaagaggaaggtgtgcattctattaaagttcaagccgacagcaatgagaaaaccaagaaaccaagccaacttactggtcctttctcatatgggttattcaaaagctattttcaaaggggctccggcccactcatcaatccttggcctgtccaggtgcaaataaagagaagcacaccagctggtcacagcaacttgtgtcctgtcctgtgcagaagccactgagatatctacatggagcaggggctttggaatcagattacagtcctgtcatttactgattgtgtggccttagacttcacctcttcgagtctcaggctgac

SEQ ID NO: 416949 - DNA, 463 bp, Homo sapiens
cactgctggccctgccacagagagggttactgggaaagctttccttgccttgttgatatgctgggccactagtggtacacacttccctccctgaaaagtaagtggctcacgctgatgtaaccttgacatttagtgaaactaaaaaagaggaaggtgtgcattctattaaagttcaagccgacagcaatgagaaaaccaagaaaccaagccaacttactggtcctttctcatatgggttattcaaaagctattttcaaaggggctccggcccactcatcaatccttggcctgtccaggtgcaaataaagagaagcacaccagctggtcacagcaacttgtgtcctgtcctgtgcagaagccactgagatatctacatggagcaggggctttggaatcagattmcagtcctgtcatttactgattgtgtggccttagacttcacctcttcgagtctcaggctgac

SEQ ID NO: 416950 - DNA, 526 bp, Homo sapiens
tatatggtacctgaccccccttctctacctctccttgtctaggggttaaatattattattcccattcttcaggcagggaagcaaaccagacagcttcagttacccaaggccaagtgcccattgtgaactctgggagttctcagaggagytggctggaccccatggagctggcaaacccatgtatgtggaggtgacatttatcttctcagccaggaaggagcacgccatccagctgctgcccagagcccaggagaaccctgcagcactgtgattctcattagcctctggaaggtgtgagggaaacatggaaggcagttatgcctggttttggaaattagggaggtttaatttaaaatatgtcagtttaaaacagctctcatcaaaacctactatggaacactaggacttattctgtctgaatggattttttatccactaaccgacctctgtttatctctgtcttccgccccttcccagcctctggtaattaccattagacactcaacctccatgagaacaacttttt

SEQ ID NO: 416951 - DNA, 460 bp, Homo sapiens
ttcatattttctggacaccggacttgcaaaggaaagctgtgcaaaggcccgctaactcrgttttgccttcaggatctcttccttggaggatcttcctgaaggcttggagcttacatagcactaacctcaatcttttcactgaccttcccaagttgtgtgtatgtgtgtgcatgtgtgtttgtgtgtgtgtgtgtgtgtgtgtgttgtctgaactcaaatcaatgtatacatattgtttcttatggcattataaatgctcatacaatatttcactcccacatccttctttctccccagccttacaccccctttccctccttcattactccttatgccctgccaagtaaaaccttccaatggaaagaggtaagtatatacactaagaattaaaacgcataacaagctcctttctctctcttatactcaagtatattcctctttggggagtatttactgtacc

SEQ ID NO: 416952 - DNA, 556 bp, Homo sapiens
ggctcgattttattatgatcatttggacaacaagcgacttccctttcttctaagtaattgccattgtacagatgatgtctttcaggggcatgaacagagaatctgaggaaggaggcaggtccatgaagagtgtccattcttttcctgttttcccatgaaatcccaaaaagtgctacatgcagttactttatgaattgaagtctgggaaaaatctctaaatcattctcatgcatgcatcatatgttgyttttcaaagggaaaggatatgcattaaagatttgttcagtcttaaacctgcttttgagcatccaagatcaatttgaaggctgattaagttgtgctctatagatttctatagtcaagttcatcaaggcatccattcctcttcccctaatgatgctgaaccccaagttcttctctgaagtgctttaattttcacttggccattgcaaaaagacagtgacttaataaactgtaaataggaaaagaaagttacataaatcatcttcgcatccttttccatggtcgtaccatgactattctttcctcattacag

SEQ ID NO: 416953 - DNA, 632 bp, Homo sapiens
catggtggtggttgcacaactctgtggatgtacaaaaaaaacattaaattatacacctgaaatggaagaattttatggtgtctcaataaaccttctataaaaaaacaagaaccaaatgagataaytcctttaaagttactcagcacagtaccttacaaccttggctaagttaaccatacttcataaaatctatgatgctatagattgtaagagacaccattatttaatatacaacaagaaaaacattaccaagttaactatgacagatcatcaattataagacatatcttaattttgaagatgttaaaatatggaaaatgtatattagaatcaatgaattatggcatgtgttgaagaaatagcatctgaagttaaatctattcaactgagtagatctttctgtcttcagattccatttttaggctcagatatctttcctagattaatggattttgggggtatccacctttgactcccagccttcatcaaattcggcaggtgggcccagaagaagtacttgccctctctggtcctacctggtgctctgtcattccccttacagctctatcctaggagtgcctggtctgcctgagaatctcttgtgtttttgtaggcatggatctctgagtgtg

SEQ ID NO: 416954 - DNA, 374 bp, Homo sapiens
cgctcctgcattcctacattccaggcctcagctggagactacactttctccttactccctcttctctccaaatcccggcttctcagtctctctcctagacttgcaatctaatatagccaccaaaaaaatgtctgcctattttgaaatcatggaaaactgttggtttatttctaccttttttgggtggtgtgaaggaataagcaaagaaayactacattttaggaaaaggagaaatgtgtacaatgctgatttttaagttccagctttagtcagtttaggagcataaggctatcctctacgactcagtttgctaattaagtggtgattggaatattaaattttaaagtataatttagtcagacaataattaccag

SEQ ID NO: 416955 - DNA, 574 bp, Homo sapiens
agaaagcaaataaatgaccaatgacaggaaaggctcaagtgaactataatgcatctgctagatgkaatataatgcagccattaaaatacaacaatagcttggaaagtgcctataatattgtaagtggaaaaagcgagcaaaattgtccatatagcatgtctcaactaagcaaaattacacatgtctaaaagtaaagtatactaaatgtcaacaatgattacgtttaggtaggagaactagagtatattgttattttcctacttttctgtatttcccaaatttactttaaagaatatgcactatatttataatttcaaaaatgacatctttgaagacaaacaaaattcattttcaatatctttaaggcttcctttctaaatgtattctgtttttcaaagctattgagtttctcatattactaataactttatagctttaaatcagtaaactgaagtttattaagccctgacttggcatctagatcttctcatagcactatgagacctaaataaaaaaaaaaaatacaatgatgcaaataaaaggaacaaaagtgatagggaaaaaatagaggcta

SEQ ID NO: 416956 - DNA, 574 bp, Homo sapiens
agaaagcaaataaatgaccaatgacaggaaaggctcaagtgaactataatgcatctgctagatggaatataatgcagccattaaaatacaacaatagcttggaaagtgcytataatattgtaagtggaaaaagcgagcaaaattgtccatatagcatgtctcaactaagcaaaattacacatgtctaaaagtaaagtatactaaatgtcaacaatgattacgtttaggtaggagaactagagtatattgttattttcctacttttctgtatttcccaaatttactttaaagaatatgcactatatttataatttcaaaaatgacatctttgaagacaaacaaaattcattttcaatatctttaaggcttcctttctaaatgtattctgtttttcaaagctattgagtttctcatattactaataactttatagctttaaatcagtaaactgaagtttattaagccctgacttggcatctagatcttctcatagcactatgagacctaaataaaaaaaaaaaatacaatgatgcaaataaaaggaacaaaagtgatagggaaaaaatagaggcta

SEQ ID NO: 416957 - DNA, 539 bp, Homo sapiens
cctaatcattttcacagagcctttggtgaggttgatgttgagcttgttggataattatctgttttttaaaaatctaagcatccttttatacgtcgcgttttctgtttgcaagtttcgcttcaagtttactgaaccatttaattaacttaagtgtttaaacttctagaggtgttgattgattctaatcagcattttctgctactctaattgaaggcttcctctcttggactattgtcagtgaagcaaaaaaaaaaaaaaaaaaaagcaaaatgttgttcagtctttggcataatctaacacaaatttagttggtcccatgattgcatgaacttcaraaggccagaagagagccaatttgtctatgtttttgaaatcgcggagccagccccaggaagagactgtgctgcaggcacagggaggactcgcaacctctggtggggacttagactccaagccaaaccactttcaggtttggcagttttcactcttcctggaagctcagtcgggggatgttttgcagggacccttaccacccagag

SEQ ID NO: 416958 - DNA, 539 bp, Homo sapiens
cctaatcattttcacagagcctttggtgaggttgatgttgagcttgttggataattatctgttttttaaaaatctaagcatccttttatacgtcgcgttttctgtttgcaagtttcgcttcaagtttactgaaccatttaattaacttaagtgtttaaacttctagaggtgttgattgattctaatcagcattttctgctactctaattgaaggcttcctctcttggactattgtcagtgaagcaaaaaaaaaaaaaaaaaaaagcaaaatgttgttcagtctttggcataatctaacacaaatttagttggtcccatgattgcatgaacttcaaraggccagaagagagccaatttgtctatgtttttgaaatcgcggagccagccccaggaagagactgtgctgcaggcacagggaggactcgcaacctctggtggggacttagactccaagccaaaccactttcaggtttggcagttttcactcttcctggaagctcagtcgggggatgttttgcagggacccttaccacccagag

SEQ ID NO: 416959 - DNA, 573 bp, Homo sapiens
tgggacaggcttcacggagacgtgaaggtgagacgagcagatggaaggccatgagggggtgagccaagcacaggtggggaacaatgtggcagcagaggaagcaggtgccgtggaggcccatggaactgtgccatgttcaaggagcaccaaggaggccaatgtggccagagcatgagcaaacggaggtgggagaaggggccagagaagatgtcggacaaaacccaggggtcttgtcagccattgccaggattctgctcttgctctgagtggggtggagagctttgggagggtctgtgagcagtgcagcgatattatctgaagtatgacttaaaacatcccctctggctgctgcactgaggacagatggaagcaagacaaagacagcagtgagacctgttaggcggccactgcagcaacccggctaagactacttcactgaccgggacattcaccagttctccaaggaygctctcctatttcaaaggcagagctgggattcccagtctagttctctctgcagcatcgtgcagcctaccacctgatggccacaaccatggtgcaaacttattctaa

SEQ ID NO: 416960 - DNA, 501 bp, Homo sapiens
ctatgtgatgtcttatatatggaatctaaaatagtcaagctcacagaagcagagagtaggtggtggttaccaggggttggaaggagaggcaaatgaggagatctgggcaaagggtacagtatcagtatacaaaattaataaattctggagatttaatgcactataagtgacaacagttaacaataccgtattgtgtatttgaaatttgtatgagggtagatcttaagtgttcctatcaaagaaaaaagagaaaaggtaactatgtgaggtgatggatatgttaattaatttgactgattatttcacaatgtctacaaatattaaaaagtmattctgtataccttaaatatatacaattgccttctatcaattatacctcagtaaagcaggaagaaaaacagaagggagacaagaacattaagggcacgatggcatctctttgtcagatactggtcctaagtgaaaactgaagaagacttgtttcgtccagtgaccttgaaa

SEQ ID NO: 416961 - DNA, 574 bp, Homo sapiens
gttactgttcccattttactgataggaaggcaaaggtacagagagtttaagtaatttgcccacatggagatagtacataggtgatggtactagtacagttcagctctaacacggtgctttttttttttttcattacrttgcattattacctcttaagaggcccctgggagatacctacctgtgtacataaattaaaatcaaagtcctgtggtttactgatttcccaaagccaaaacacatagacacagatgtatatacatatcaatctatgggatgtctcttcactctattgttttctttgctgtgcagaagaatacagttgcatcaaactcgttttagtttgatgcaactatatgtttgttttttgctgcctatgcttttgtggttctatccaagaggtccaacaattcattgaaataaataaacacagagacagaacatgccaaaatctgtgggatacagcaaaagttatgttaaggggacagtttatagtgctaaacaccagcctcaaaaacatagaaagatctcagattaacaatctaacatcacacctagaggaactagaaaaacaaga

SEQ ID NO: 416962 - DNA, 596 bp, Homo sapiens
atggattaaccatggtgcatctacacaatgaaatactattcattgataaacagaaatgagagctggaacaagacaaggatgttcactttcactgcatttatgcaacatagtactggagtggtcatgagcaattaagcaagagaaagaaagaaaatgrttatccaagttggaaaggaagaaatcaaattatccttgtctgcaaatgagataatcttaggttttaaaaaaacctatcattcccatggtaaatggtaaaatagatagatagatagatagatagatagatagatagatagatagatagatagataggatggataggtaggtaggtaggtagatagaaaacaaactgtagcattactatatgttaacagtgatcaatctgaaaaaggaatcaagaaatcaatcccatttacaatagctaccaaaaaaaaaaaaaaaccctaagaataaattaaccaaagaagtaaaagctatctacaaggaaacctataaaacactaagaaaagaaattgaagaggaacaaaaaactgtagtgagatatcccatgctcatgagctggaagaattaatattgttaaaacatctgtactaccc

SEQ ID NO: 416963 - DNA, 596 bp, Homo sapiens
atggattaaccatggtgcatctacacaatgaaatactattcattgataaacagaaatgagagctggaacaagacaaggatgttcactttcactgcatttatgcaacatagtactggagtggtcatgagcaattaagcaagagaaagaaagaaaatggttatccaagttggaaaggaagaaatcaaattatccttgtctgcaaatgagataatcttaggttttaaaaaaacctatcattcccatggtaaatggtaaaatagatagatagatagatagatagatagatagatagatagatagatagatagataggatggataggtagrtaggtaggtagatagaaaacaaactgtagcattactatatgttaacagtgatcaatctgaaaaaggaatcaagaaatcaatcccatttacaatagctaccaaaaaaaaaaaaaaaccctaagaataaattaaccaaagaagtaaaagctatctacaaggaaacctataaaacactaagaaaagaaattgaagaggaacaaaaaactgtagtgagatatcccatgctcatgagctggaagaattaatattgttaaaacatctgtactaccc

SEQ ID NO: 416964 - DNA, 475 bp, Homo sapiens
gctttggctttttgagtctcttaaactgggagatggagctaattgtgctggttctatatatatattatagggtaattgtgcaatgcaaagaaaactcttctgtgatagggctttttaagccataaagtgctgtacaagtcagttagttattggctagccaataactaagttctaaggttcaccttagaactcatctagcccaaactgaagataagatacattagcataaccacggtgaactaaaatgacttctaccatcagctgtaatttattgagcatgtactgtgtctcaggcattgtgcttagggccttatcacacccagtsctcacaataagcttttgagctagcacttattagcaccattttatattcaaggaacagaaacctcgagaggttaaagaacctgctttcagttgcatggttggtccagggaagagaacccaggtctctgactccagctatgcactgagtgac

SEQ ID NO: 416965 - DNA, 579 bp, Homo sapiens
gatctccgattcattctttctgagaactgccatcaaattgacttgtcttcattcaccttccattcatatttcactccacttataattcagattcctgggagactgagtctggccaacctgtaaggtcatgaacctacccaggaacagggtaccaggattggtgccccccagggccatatggaaatgcagtaggcacagttatccaaaggaaaggaagggtgctgttaccaagggaagagggataaataaatatatgctgggcaagataacaacagatgcctgtacccacactctaccctttgctctagtaagtaagcctagtgattagggaagctagctagcctttggtcctaggsttaagtgacaactaaggagtgatatttttcaaaagatatagaaccaaaatttgtattttttcaggccctatttttgtgaaatgacttaccatcatcaatagtcctcaaggcctaccattgtccccgctagatatcatcgatgggttcagtttatgcatatcaggaattgttaccttacactgcctattaaacatctatgcccttgctgcggacatgacccagc

SEQ ID NO: 416966 - DNA, 332 bp, Homo sapiens
ggggcaagaaaagaggatctgtggaggacacaacagataatcagacagtgggaacaccaagtcacagagttcttgcagctgtgtgtcctgtgcagacaaagmcactcaccctcctcctgcctttatggaaggaaggtcgtaggcaatgttactttgtttttggcaaacccccaaaagaagaaaccactccacatagtctgagaggtagtatagtaagtgttgtgcgtagagacctcattaatggccaacacctgttttatttgcaactcacaatctttctagttaagaagagttcagagcctgacctgcacactatattgggagataaaaca

SEQ ID NO: 416967 - DNA, 332 bp, Homo sapiens
ggggcaagaaaagaggatctgtggaggacacaacagataatcagacagtgggaacaccaagtcacagagttcttgcagctgtgtgtcctgtgcagacaaagccactcaccctcctcctgcctttatggaaggaaggtcgtaggcaatgttactttgtttttggcaaacccccaaaagaagaaaccactccacatagtctgagaggtagtatagtaagtgttgtgcgtagagacctcattaatggccaacacctgttttatttgcaactcacwatctttctagttaagaagagttcagagcctgacctgcacactatattgggagataaaaca

SEQ ID NO: 416968 - DNA, 579 bp, Homo sapiens
ttctcagtgggaagatattaggctaaacccatatgtggagggaaggcctcccacagggcatacctgtcttacctggtttctatggcactttccatagaagcaaactgccatcagtcgggggccagaacttgacctcagctatctttggctctaaagcctgtgcttttaaccactggaaattattaggttgtgcagtttttgtttctgttttttgatacggagtctcactctgtcgcccaggctggagtgcagtggcgtgatcttggctcactgcaacctccacctcccgggttcaagtgattctccctccacagcctcccaagtagctgggattacaggtacctgccatcacgcccagctaatttttatatttttagtagagacggggtttcaccatgttggccaggctggtctcgaactcctgacctcaggtgatccacctgcctcggcctcccaaagtgctgggattacaggcatgagtcaccactcccagccacagctggttatttaacaatgtaatattacagmattttcttcaagaggtgggttgagagtgtaggagcctcacagtagtttgga

SEQ ID NO: 416969 - DNA, 541 bp, Homo sapiens
ggaggggcctggtgtctcggggctccctgtttgttacccctgctctgccctacatcttcccagatggaattctggccacaagttatcaggttgcagatgaatagtgaatactttttttgaatttcatcattcttccccctagaatgactcattacaaattctgygtccatgtgatgcattaatattgattaagaaacaggtgctctcagattcaattagcaaaactgcaatgattcacacagggttacgctggaaaattgggggaaaatatgcaggtgtgcaaatgagcctaatctgaaggtgctgcagcaggtcttgaaaaatgcatcccctccagcaaatgctttcctggaattaccctttgtttgggtgacaaatggacttgccatttcaaccaaacagtgaccccaaacctctgtggcttaggatccagtggaacttcacatttggagtcagacttctatgtcgggattcccaagctttcctgttgaaccactgcagctgtttgtgaaacacacagcttccttggccccaatctagg

SEQ ID NO: 416970 - DNA, 541 bp, Homo sapiens
ggaggggcctggtgtctcggggctccctgtttgttacccctgctctgccctacatcttcccagatggaattctggccacaagttatcaggttgcagatgaatagtgaatactttttttgaatttcatcattcttccccctagaatgactcattacaaattctgcgtccatgtgatgcattaatattgattaagaaacaggtgctctcagattcaattagcaaaactgcaatgattcacacagggttacgctggaaaattgggggaaaatatgcaggtgtgmaaatgagcctaatctgaaggtgctgcagcaggtcttgaaaaatgcatcccctccagcaaatgctttcctggaattaccctttgtttgggtgacaaatggacttgccatttcaaccaaacagtgaccccaaacctctgtggcttaggatccagtggaacttcacatttggagtcagacttctatgtcgggattcccaagctttcctgttgaaccactgcagctgtttgtgaaacacacagcttccttggccccaatctagg

SEQ ID NO: 416971 - DNA, 605 bp, Homo sapiens
ttctcagtttttcttgtatgtattgtgtttttagtgacatatttaagaaatctttgcccaaccagagaactcaatggcttgcttctatgttttcttctagagtttttatagtttactttctatgacccatttaaaattaatgtttatatatgatgaagtatggattctggttctttgctttgcacatggatatcttattatyccagtgccatttgttgaaaagatgtttttcatccaccaaattgcctttgtacctttgcaaagtatcagttcactacatataagtagctctattctgaattctctattctgttccattgatctatctgtctatccttttactcaataccagccttgatcactgtagtgctgtatggagtctggaaattagttagtgatttctctaactttgtttttctttttcagaatgctttagctcttctaattcttttccatttcgatatacatttcagaaccagcttattgattactatttttaaaaatccagcaaattaaatgaaaactgactcagattaaaatttttttaattttaaattcaactggaattttgattagagttgtatcaacttcgtagatcaatctgg

SEQ ID NO: 416972 - DNA, 535 bp, Homo sapiens
ccactttcagtgaaagtataccaccacattgcatttctgtttccatcacggcttccaggagactaggctactgttttccaggttgagtttgagtgtaaaggaaatgtagacaaggaattgtccaattctcaattctgactttgctgacttaatttaaatgcttgcttctctgaaccgattttctcctatcttctctaggggtttcaaaaggcttagttaattgatttccagaaagtactcatagcaagttcataaaagttcytgagacctaaatttcttcttaaaaaaaagaaaagatcctaagtcatacattttgattgtgtagaggttgttcaactaaaggaataaatgtctattaaactaaaaagaaaaaaaaaaaagactaaccttggcaaaatcagaaagaaacattccagtacactggagaaaaatggctttttcttcattaattaaagataatttagcataatgttgaataatcagttttacaggcattgaatttttatagaacaggttatatgaaatcccaaacatg

SEQ ID NO: 416973 - DNA, 577 bp, Homo sapiens
aaaccctgtatcaaaaagagggggaaaaaaaagaaggtgaaatgaagacacttttgcttaggataaatataatgggataagttaaagtagaatggaataaactaaagatgcattttaacaagttaagtttaaggtgtaatttgtagaggaacaackaaaaataaaacaaggtgatacagctttaaaaccaataaaaaaattaaaatgtaatgataaaaagtataaactacacccaacaaccgccaagaagctcactcttttcaagtaaaccaagtgtagaacactaaaataaataaatatatttcaaaagactgtcttacaaagcatactttctgaatacaacagaatgaaattaaaattcatcaacaataaaacatctacataagctcaaaatatataacaattaaaagtagtgcttacagaaaatttatagccttaaatgtctttactagaaaaagagatctacattaataatcaagtttcctccttaagtagctacaaaaagatcaaagtaaacctaaaatgagtagagagtaagggaaaaaattaaagagaaaaaatgatgaaaaagaaaaca

SEQ ID NO: 416974 - DNA, 577 bp, Homo sapiens
aaaccctgtatcaaaaagagggggaaaaaaaagaaggtgaaatgaagacacttttgcttaggataaatataatgggataagttaaagtagaatggaataaactaaagatgcattttaacaagttaagtttaaggtgtaatttgtagaggaacaacgaaaaataaaacaaggtgatacagctttaaaaccaataaaaaaattaaaatgtaatgataaaaagtataaactacacccaacaaccgccaagaagctcactcttttcaagtaaaccaagtgtagaacactaaaataaataaatatatttcaaaagactgtcttacaaagcatactttctgaatacaacagaatgaaattawaattcatcaacaataaaacatctacataagctcaaaatatataacaattaaaagtagtgcttacagaaaatttatagccttaaatgtctttactagaaaaagagatctacattaataatcaagtttcctccttaagtagctacaaaaagatcaaagtaaacctaaaatgagtagagagtaagggaaaaaattaaagagaaaaaatgatgaaaaagaaaaca

SEQ ID NO: 416975 - DNA, 623 bp, Homo sapiens
tcctttgttctttttcagttgttaaaacagttttaatattcttctctcaaaataaatttatcacctgctayacagtagaccatacatttcatagcttgttcataaaaataattatatctaaaatactagttgaaggttaatacaatagatgagatcatttaccattgaaaatatctttcaaatgttgtgaacaattagagttaatccaatgtaaagtggaggggaggggaggaaaagactccaattctgattctttgctttataccccacctgcactgctacttaaccttgacatttatacagaggaaatgagaaagcctttaattcctggaatatggatttaaccatccactcttttcacaaaagaaattctgtgatttcaaaattaaaaataagccttagtactcaagtgctaccgttagtacaaaaatcaagttgcagaaatctacatagcataatcccatttatataatatattgaacactattataaacatacagatgaaagcagagaagcacaaaatcatgcatgtaaattctaattcctaattctgaggaacaggatgggggaaatgtggagcagagtggaaaaaaatttaacttaaaatattctacattaaattt

SEQ ID NO: 416976 - DNA, 578 bp, Homo sapiens
agaagaatacactaaacataaaagattaytaatgacttacgaactcctaatgtagcatgaatcataccagcaacactagaatattggtttcaacaagtagactattttattttataaacttcactagaatattatcaacagcagtattagaaaatggaaagctaatgaaattaggaagcagcatcggcatactgcataacatgtttctcctcactctaatgcagaatctaatggatgagaaatccatctttcaacttaaaaaaaaagcagcctataaagctagaaaaatagaccaccatttgacaaagttattagggaatattttgctatctaaattcaataaactgcattagtggaaccagtttcttttataagaaaagagcagcacactttcttcttgctatttattatagttccaaagcctgattatcttactagtgttttgttttcctttagcaagatctgaagtagaaaccgactaaagattaaagaattataaatattctctttttataaagatgttttcctgactctattatagtcagaggatattacaaatactggataatatcaaattt

SEQ ID NO: 416977 - DNA, 578 bp, Homo sapiens
agaagaatacactaaacataaaagattactaatgacttacgaactcctaatgtagcatgaatcataccagcaacactagaatattggtttcaacaagtagactattttattttataaacttcactagaatattatcaacagcagtattagaaaatggaaagctaatgaaattaggaagcagcatcggcatactgcatamcatgtttctcctcactctaatgcagaatctaatggatgagaaatccatctttcaacttaaaaaaaaagcagcctataaagctagaaaaatagaccaccatttgacaaagttattagggaatattttgctatctaaattcaataaactgcattagtggaaccagtttcttttataagaaaagagcagcacactttcttcttgctatttattatagttccaaagcctgattatcttactagtgttttgttttcctttagcaagatctgaagtagaaaccgactaaagattaaagaattataaatattctctttttataaagatgttttcctgactctattatagtcagaggatattacaaatactggataatatcaaattt

SEQ ID NO: 416978 - DNA, 578 bp, Homo sapiens
agaagaatacactaaacataaaagattactaatgacttacgaactcctaatgtagcatgaatcataccagcaacactagaatattggtttcaacaagtagactattttattttataaacttcactagaatattatcaacagcagtattagaaaatggaaagctaatgaaattaggaagcagcatcggcatactgcataacatgtttctcmtcactctaatgcagaatctaatggatgagaaatccatctttcaacttaaaaaaaaagcagcctataaagctagaaaaatagaccaccatttgacaaagttattagggaatattttgctatctaaattcaataaactgcattagtggaaccagtttcttttataagaaaagagcagcacactttcttcttgctatttattatagttccaaagcctgattatcttactagtgttttgttttcctttagcaagatctgaagtagaaaccgactaaagattaaagaattataaatattctctttttataaagatgttttcctgactctattatagtcagaggatattacaaatactggataatatcaaattt

SEQ ID NO: 416979 - DNA, 268 bp, Homo sapiens
gtagtatcgactcttctaggtaaatcactsaagatggctcatagtttagtttaatccctctttttaaaaagtgtcttgaaagtctgtatcttaaaaccatgattcaaaaatttccccttgaatttaagcatatcatgctaattttacctatataaaaacatttctgatgtgtagtttatatgtaataaaatacacccatttaaaatatacaatttagtgaatttttatggaagtatatactcttaaaattaccatcacatgatatgaa

SEQ ID NO: 416980 - DNA, 415 bp, Homo sapiens
aaaacaaccactcacataacatttaagttgtaataggtattataagcaatctagatataatacataaattatagacaaatactatgccattttatatgagggacttaagaatccatagactttggtatgtgcagtaggtcctggaatcaatatcccacagataccgggggaagatggtatataaaatagtwactgtccaatccaggcagggaaagggcatgtgatacatgctacctatctggtacttcccacacgcaggacaaacattcataatcaatgacaactctctttccaactgaggccaggtgcaactcaacacattttagtaaggagtcatggccagttgtttggagttagcaggtgagatgcaagctattcaccgtcaccccccacttcaacccatgctcttgacctt

SEQ ID NO: 416981 - DNA, 618 bp, Homo sapiens
tgcttttcttattttaatattatcatatattttttaacactgatctatttaaaaatatacttctaattgtatttggatatacagccaattcaaagaagagctacatctatgctagaaggctctaaacaatatgctcagcagtgaaagggagagacacaaacctcaggtgcccacagatgctagacagaacaggtttcattaatgctcaacccataaattgtgagtttagctccattttaggcatgaacctttttagaaaggtttataaagatattcttcataatatcactgactttaatgagtattattaatgtacaatgyaagatggatgaatggatggataaacagacagatggatagatgaatatattgttaatagttcacagttagtgggtcgattacaacataaagttacagtctttcaaacaactaagataaaatgcattcaaatcatccgcttcttactacctaactgtatgctagtcctggctctttattcccaaaatgcttatctttgaaacatatttgaggtatatgacctggctctctcattcccaaaatgcttatctttgaaatacatttgaggtatatgacataagtaaaaatgaaatataactt

SEQ ID NO: 416982 - DNA, 613 bp, Homo sapiens
cactgactttaatgagtattattaatgtacaatgtaagatggatgaatggatggataaacagacagatggatagatgaatatattgttaatagttcacagttagtgggtcgattacaacataaagttacagtctttcaaacaactaagataaaatgcattcaaatcatcygcttcttactacctaactgtatgctagtcctggctctttattcccaaaatgcttatctttgaaacatatttgaggtatatgacctggctctctcattcccaaaatgcttatctttgaaatacatttgaggtatatgacataagtaaaaatgaaatataacttagtgtcaagaatagggaagaataattaatatacaattattcttcaatgagtagctatgttttataaaaagttttaaaatatttttagccagagtactctttcttcagatgaaatgttatttaaaagttcaaaagtttacaaaataagtaaaagtggaactattttggttaaagtgagtagtggaagtctggagtaccacctgctgtggagagctttctgggcagccgaaggcacagctagaaaaccactgctggataaaattataagtacaaataatagtc

SEQ ID NO: 416983 - DNA, 618 bp, Homo sapiens
tgcttttcttattttaatattatcatatattttttaacactgatctatttaaaaatatacttctaattgtatttggatatacagccaattcaaagaagagctacatctatgctagaaggctctaaacaatatgctcagcagtgaaagggagagacacaaacctcaggtgcccacagatgctagacagaacaggtttcattaatgctcaacccataaattgtgagtttagctccattttaggcatgaacctttttagaaaggtttataaagatattcttcataatatcactgactttaatgagtattattaatgtacaatgtaagatggatgaatggatggataaacagacagatggatagatgaatatattgttaatagttcacagttagtgggtcgattacaacataaagttacagtctttcaaacaactaagataaaatgcattcaaatcatccgcttcttactacctaactgtatgctagtcctggctctttattcccaaaatgcttatctttgaaayatatttgaggtatatgacctggctctctcattcccaaaatgcttatctttgaaatacatttgaggtatatgacataagtaaaaatgaaatataactt

SEQ ID NO: 416984 - DNA, 613 bp, Homo sapiens
cactgactttaatgagtattattaatgtacaatgtaagatggatgaatggatggataaacagacagatggatagatgaatatattgttaatagttcacagttagtgggtcgattacaacataaagttacagtctttcaaacaactaagataaaatgcattcaaatcatccgcttcttactacctaactgtatgctagtcctggctctttattcccaaaatgcttatctttgaaacatatttgaggtatatgacctggctctctcattcccaaaatgcttatctttgaaatacatttgaggtatatgacataagtaaaaatgaaatataacttagtgtcaaraatagggaagaataattaatatacaattattcttcaatgagtagctatgttttataaaaagttttaaaatatttttagccagagtactctttcttcagatgaaatgttatttaaaagttcaaaagtttacaaaataagtaaaagtggaactattttggttaaagtgagtagtggaagtctggagtaccacctgctgtggagagctttctgggcagccgaaggcacagctagaaaaccactgctggataaaattataagtacaaataatagtc

SEQ ID NO: 416985 - DNA, 593 bp, Homo sapiens
tgtactaatttatttgtgacaaatgaactttggcttttctcattctgatcaagcaatattttagttccattgtaagtaccaagcattacctttttaaacaagaaattataatcctaccacattgcagaaagtaattattaatttaaatcctccaacaataaacaacattattatattcatgatgtttaatcttctccccacatctcacttctctgaggggtctcaactttcttttctatttctgtcttctattttttctttgccaaagatatacttacctgtttcctttgtcttgcttccaaatttctccatttttattcccttcagatttgctgctggaaaactgtactcatggcttccaacctttgctctcactgcccagtctgacatattagagtaaattcccacttctactgattagtactaattttcagccattstcttctgtatttcctgcttctggcaatcttagcaaaactatatattcaatgtttagatatttaatggtttctgaaactcattatttaatctctaatgtctgcagtcctactgacaaatgataagaataaattactgcaaggtgtgagagaagg

SEQ ID NO: 416986 - DNA, 581 bp, Homo sapiens
gtcaactgtgtctgccacaatcttagggaaaatcacttaattttctgagatacctgtatttgagaatgaggacaagaaactgctctttaaaacaaaaagacaatgtaggctattgctttgccatgtttctaagtaattctttaaattaaaagatatttataaaatgttttgaatggcatggctgagagaaaactagtcatcattcttggcacattccctttccttcactatcaaatgtaaccaaatgtaatcaaccatagggccctggctatccaacaaccttcattatcattagatctaactatttctttctatctccacagcttttatgttatttcagtccatcatcttttctccctaaattgctgcaatagtctcttattgaatgccagtagttsctgccttgtctcatgtcaattcattttccactaacacaacaaaatctttataaaatataaacttaatcatgtcaattctcttcttaaaatctacagtatcctaccatactgcagtttacctattccctctgttatcttgtcaaagctacattacatgaaaagtaacaacagcagccacaacaa

SEQ ID NO: 416987 - DNA, 581 bp, Homo sapiens
gtcaactgtgtctgccacaatcttagggaaaatcacttaattttctgagatacctgtatttgagaatgaggacaagaaactgctctttaaaacaaaaagacaatgtaggctattgctttgccatgtttctaagtaattctttaaattaaaagatatttataaaatgttttgaatggcatggctgagagaaaactagtcatcattcttggcacattccctttccttcactatcaaatgtaaccaaatgtaatcaaccatagggccctggctatccaacaaccttcattatcattagatctaactatttctttctatctccacagcttttatgttatttcagtccatcatcttttctccctaaattgctgcaatagtctcttattgaatgccagtagttcctgccttgtctcatgtcaattcattttccaytaacacaacaaaatctttataaaatataaacttaatcatgtcaattctcttcttaaaatctacagtatcctaccatactgcagtttacctattccctctgttatcttgtcaaagctacattacatgaaaagtaacaacagcagccacaacaa

SEQ ID NO: 416988 - DNA, 581 bp, Homo sapiens
gtcaactgtgtctgccacaatcttagggaaaatcacttaattttctgagatacctgtatttgagaatgaggacaagaaactgctctttaaaacaaaaagacaatgtaggctattgctttgccatgtttctaagtaattctttaaattaaaagatatttataaaatgttttgaatggcatggctgagagaaaactagtcatcattcttggcacattccctttccttcactatcaaatgtaaccaaatgtaatcaaccatagggccctggctatccaacaaccttcattatcattagatctaactatttctttctatctccacagcttttatgttatttcagtccatcatcttttctccctaaattgctgcaatagtctcttattgaatgccagtagttcctgccttgtctcatgtcaattcattttccactaacacaacaaaatctttataaaatrtaaacttaatcatgtcaattctcttcttaaaatctacagtatcctaccatactgcagtttacctattccctctgttatcttgtcaaagctacattacatgaaaagtaacaacagcagccacaacaa

SEQ ID NO: 416989 - DNA, 506 bp, Homo sapiens
cactttattacaaaatgaaacatgtaactactatgacttagcaagagtacacttgggtatttattccagagaaatgaaaataatatgttcacacaaaaacctatacatgcattatcatagtaacttttcttataacagccaaaactgaaaaaaaactttcaatggataatagttaaacaaactgaggtacaaccataccgtgagatactacttagcaataagaagaacaagttactgatatacacaacaacatagataaatctccagggggttatggtgagtgaaaaaagccaatctcaaaggttacatactatacaattccatttamaaaacgttcttaaatgacaaaaattatgaaaaagaacagattactggttgcctaatcttttctttcaaagggggtctaaaagcaaaagaaaagtgagtttgccaaaagagggcactatgagggattcctggggtaatactctctatcttagctgtatcaatgtctacattctggttgt

SEQ ID NO: 416990 - DNA, 630 bp, Homo sapiens
atgggaaaaaaagatacaacatatcagaatctctgagacacagctaaagcagtgttaggaggcaaatttatagcactaaatgcccacctcaaaaatttagaaagatctcaacataacaacctaacatctcaaactaaaagaacaagagaaccaagagtaaatcatcctgaacgctagcggaagacaagaaataagcaaaataagggctgaactgaaggagattgagacacaaaaaccattcaaaagatcaacaaacccagaagttgttttttgtttggaaaatttaataaactagatagactgctagctagagtagtataaaagaaaagagagaagatccaaattaacacaattagaaataacaaagggatattatcactgagtcctcagaaatacaaataacaatcacaaaatattgtaaatacctctactcacacaaactggaaaatggataaattcctggacatacacactccctagaatgaaccaggaggamattgaattgctgaacataccaataatgaactctgaaattaaaacagtaataaacagtctaccaataaaaaaaaaaatcccaggaccagacagattcacagctgaattctaccagatgtacaaataataatcaat

SEQ ID NO: 416991 - DNA, 564 bp, Homo sapiens
gaaataaatagagggaggaggcaggaatggctggtaggctccagagagctcttgtaaattattttgctaaatgcattgccagaaatatgaggtgatacctgaaggaggatgtaggctcaaagaagaagaatttgattcctatcaggtgtaaccacaggtcaataggctaatgaggattatttaagatgaagggaaaatattgatggagaagacagaggggaaaattcctggggcaatgtcattgaattgctgggggacgggattcattgcacaaatggatgagatggctttgttgtgagcatggagaatattccataataataggagagatggtagggtatatggatagagkttggtagatttgagagtggagatttccagattattttcttctaactttatatatatagttttgccctccaaagaaatataaacaaagttatcagcccaagtctgaaggaaaaacgaaggtgttaaaagttggaagacatagacagtgttgaagaattgtcaggaactgtcaaaaagtgaactggcaatggaaattcaacaatttccttaagg

SEQ ID NO: 416992 - DNA, 455 bp, Homo sapiens
tagtttcttactaaaactgcttgaaatatatattaatataaaattctatctatgaaaatctattacactgcttcctgtcactacactgcccctttctgaytaatgcactcattatacataaatattgaattatttatccctactgtccttatcaatatgactccaagccatccttaaattatttaagatgaattaatgacatttactgtgaatgtatagttagtgaagtagccttatcctctaagtcaaaaatcacattttgtcaacaaacaattgtctaaactttaccatgacatttcctgcaaagctttcaagtaaattacacaaagtactttttttgttcttttcacaaactgttgacctattagactcaaaaatatttcttaaaattctctcttagatactgaaaatagagatagcttaaagtgaaaatgtcactaagtaagtggttgaac

SEQ ID NO: 416993 - DNA, 455 bp, Homo sapiens
tagtttcttactaaaactgcttgaaatatatattaatataaaattctatctatgaaaatctattacactgcttcctgtcactacactgcccctttctgattaatgcactcattatacataaatattgaattatttatccctactgtccttatcaatatgactccaagccatccttaaattatttaagatgaattaatgacatttactgtgaatgtayagttagtgaagtagccttatcctctaagtcaaaaatcacattttgtcaacaaacaattgtctaaactttaccatgacatttcctgcaaagctttcaagtaaattacacaaagtactttttttgttcttttcacaaactgttgacctattagactcaaaaatatttcttaaaattctctcttagatactgaaaatagagatagcttaaagtgaaaatgtcactaagtaagtggttgaac

SEQ ID NO: 416994 - DNA, 565 bp, Homo sapiens
aatgtcccagtatgccttaatacctttaaatggaatttttatggcctgttctgcacgcatattattaatacagtgccatcaagaaaaccacagacacgcataatagctcatcaatttgtaactaagcacttytgaccttgaaaaatcagctgtctttcagattaatgtagttacattttaggcagaaaaagaagccataaaattatcatgcttatttttgtaacatgtcaggataagaattaggaataacgtccctgccgatggcttcttattgatattgcctccaacctctgacatctgaattagaaactctgagacctcatcctaataaaaacccacttaaacgttaaatttcagctaaagggatgaatataatatactgctgataagttaaaggggtagagtataaactaccatccccattgatgttcacatttcttagaaaattaaaagaaaggaaaagtctccagatttgtttcctcttgaatgtgcgcacacacacacacacacacacacaataaaaatgaaaataattagtgtaaaagaaaagctcaccatgaatata

SEQ ID NO: 416995 - DNA, 507 bp, Homo sapiens
atgaaattaacataaaatattatttttaacaatgaaatgttaaggaaggcttcttaatattgatttaatggagactatcaacttcaacatttaagtatttttttggggagaaagtccataattattatcagatttagtttattgaaccaaagaaaatctgagaaccattgatctataggcatgacactgggcaaagacaccaactacaaattttgaaaagagaaaaaaagaaagagaaagaaatatgcctatcagaaaagaggaaaagtaattataaacatttgtagacaatgtgattaaatctagaaactcccctcctaaagaagataaaaaatctgcttaagtgttgtttgtattacattctataattgtttctaaagtctacatgtcttcatatatcaggacttgaagatattacaaaaataggcaattcaaaagagcaaaaatattcaattaatagcaataatcttaaaaatatgattacatartatttaagattacatatgt

SEQ ID NO: 416996 - DNA, 598 bp, Homo sapiens
caaaatctactcttcaatactagagtagctgttccacaaacatttgacaaatttttccagtgacttcccaaacccgcatttgtttccattccctactctaaactaaatattatcccaagaatttcatgggaagactctttcayaggagtgggggatctttctttggcttctattttcttgggagtttctcatctctatataatcccttatctatactgtatggttagtttgatatttcaagacattcttcagtattctagtaggcagctggtgattctcttgactttggagtgttgtaatgtttgtttttatttttatattcttcgagcaatgcaaagaaactttgaaaaagagaccttattacatatagaggaaaaccagaaatttttttaaaacattgatatttgaccatatacttaaacatttctttgtaacaaaattaaatgataaatacaatatgaaggccttaaacaaaattaaaagaaaaatgactagtaaataaaaattatagggaagcaatagattaataatttaatgtccttaatatgtaaataaaatttaaaaacgattataagaagacaaaaccacaattgaaaga

SEQ ID NO: 416997 - DNA, 605 bp, Homo sapiens
gatatttcaagacattcttcagtattctagtaggcagctggtgattctcttgactttggagtgttgtaatgtttgtttttatttttatattcttcgagcaatgcaaagaaactttgaaaaagagaccttattacatatagaggaaaaccagaaatttttttaaaacattgatatttgaccatatacttaaacatttctttgtaacaaaattaaatgataaatacaatatgaaggccttaaacaaaattaaaagaaaaatgactagtaaataaaaattatagggaagcaatagattaataatttaatgtccttaatatgtaaataaaatttaaaaacgattataagaagacaaaaccacaaytgaaagacagacaaaacatattacaaatgatgaaatgcaatggcccacaacaaatgaaagatgttcagcataagcagtaatcaaagcagtgcaaattaagataatgggcctctctcccctcccctttttatttttgcctagaagcttaggaaagatttaaaaagaaatacaaatacgctgaaacaaaaaaagatagtggagaattggtattgtcctatactagcagtgaaggtgatgacagaaa

SEQ ID NO: 416998 - DNA, 605 bp, Homo sapiens
gatatttcaagacattcttcagtattctagtaggcagctggtgattctcttgactttggagtgttgtaatgtttgtttttatttttatattcttcgagcaatgcaaagaaactttgaaaaagagaccttattacatatagaggaaaaccagaaatttttttaaaacattgatatttgaccatatacttaaacatttctttgtaacaaaattaaatgataaatacaatatgaaggccttaaacaaaattaaaagaaaaatgactagtaaataaaaattatagggaagcaatagattaataatttaatgtccttaatatgtaaataaaatttaaaaacgattataagaagacaaaaccacaattgaaagacagacaaaacatattacaaatgatgaaatgcaatggcccacaacaaatgaaagatgttcagcataagcagtaatcaaagcagtgcaaattaagataatgggcctctctcccctcccctttttatttttgcctagaagcwtaggaaagatttaaaaagaaatacaaatacgctgaaacaaaaaaagatagtggagaattggtattgtcctatactagcagtgaaggtgatgacagaaa

SEQ ID NO: 416999 - DNA, 605 bp, Homo sapiens
gatatttcaagacattcttcagtattctagtaggcagctggtgattctcttgactttggagtgttgtaatgtttgtttttatttttatattcttcgagcaatgcaaagaaactttgaaaaagagaccttattacatatagaggaaaaccagaaatttttttaaaacattgatatttgaccatatacttaaacatttctttgtaacaaaattaaatgataaatacaatatgaaggccttaaacaaaattaaaagaaaaatgactagtaaataaaaattatagggaagcaatagattaataatttaatgtccttaatatgtaaataaaatttaaaaacgattataagaagacaaaaccacaattgaaagacagacaaaacatattacaaatgatgaaatgcaatggcccacaacaaatgaaagatgttcagcataagcagtaatcaaagcagtgcaaattaagataatgggcctctctcccctcccctttttatttttgcctagaagcttaggaaagatttaaaaagaaatacaaatacgctgaaacaaaaaaagatagyggagaattggtattgtcctatactagcagtgaaggtgatgacagaaa

SEQ ID NO: 417000 - DNA, 586 bp, Homo sapiens
gtgtatacatacatagaaaattatgtggatgtttataaatcaaaatatcaataatggttacctcttggaaccatattatatatattatattgtttttgtatttcactttattttcagatcactttcctatacctaaatgttaattttcaaattttacaagtagaataatgtcatattttgaaacatgctaagtaggaagtcatttcaattatatagaaaattacttcccctagagaaataactaagaatatatgtgaagaacatgacattaaaagctattttttctgttttgggttaaagtagacatattttcctcatcttttattcttattacaagtgtttctgtttttagttttaytctgtcaggtaaaagtgtctctgtctgatccctcacaaccagccctaaaaataggtcagtaactctgaattataataaagttactagtttttcctttctttttcttcacatttttcagcacaatttaacagtcagatataatttgggcagtatgatataaaactgagttttggaaaataggtgatataatcaacagacacattttattttattattttgttatttggt

SEQ ID NO: 417001 - DNA, 605 bp, Homo sapiens
atatgagtggagaactcagcctaacatactatgtattttttttgcatcagtggtgctaaagatgagwgtaattttttgaaaattcaaaattacatgtaatagcccatatctatctggttgttttaaattaacctaagaattttgatttcatttataagtccagtttatggtcctaaagccttgtctactgattatgctttttataagcataataagaaaatacagcattttgtcaagttccaaggtctttcttcaaactacagctgttctacctttaagcataatatttgatcttcaacctaataggaatagctatttagtaatagtaataataataataatagtaagcttttatgcagtgtttacaatgtgccaggcattattctaaattctttacatatttgacttcatactattactatcccaacttcatttatttattgttaaataacttcagtttttattttagattcagaggataaatgtgaaaatgtgttacaagagtatattgtgtgatgccgaggtttgctgtacaaatgattctggcactcaggaagagcacatagtactgggcaggtactttttcaggccttttctcctccctc

SEQ ID NO: 417002 - DNA, 493 bp, Homo sapiens
aatataatactaatgttatcagaaaaggcaagaagcaagctgatggtgctgtacttttttctttttctttttggaatgaaataggggagattgcttgttttcttttggcttcacaatattgccaagactatttctttttctttgttcctatgtttgtctgtttagctgctattcttccagtaagtcatctccttccttctagtagggtagagaagttgagaggagggatagtggaaggcagtcacttaaaaatttgagaggtcttttgtgtaccaataactttattttactttaaaggaataaattctcactagctrtaaagacacagtcacacacatacacagacatacacacacacgtacacgttattaacacataactctggttatatatatgttttgtatgttgtacaatctttattctaatctttttttacttagttcatctccttttctattctgtctgcccaccatcactactatgttccagttat

SEQ ID NO: 417003 - DNA, 463 bp, Homo sapiens
tgtgttttcctctggtcttttgattactttttctagttacagcaagatgtgatttctttcattttctttttttaatttgaacatkttattgtaccttctcattctattaatggccatcttcccatatgtgctcttctatttagataaatatttctctatttttattagaaaacaacataccaaccctttccctatctaaatgctgtcttgccaagatactgtatttccccaacttctacttcaagataagtttagaatattctgacatcccttccccgctgcaactctctacccttgttacctgccctgaatgaaactttttgaatgatttcacttaattctctttattttcctctgtttagttggcattatttagtaatttcaagacaatgcttttcatctatttggttttaagtatgtgtgtgtgtatgtatgtgtgtgtgcgtgtgtgaataaagaagca

SEQ ID NO: 417004 - DNA, 582 bp, Homo sapiens
agctctaagtgcccgcatcaaaaaagagaaaaaacttcaaacaaaatatctaacaatgcatcttaaagaactaaaatagcaagtgcacaccaaacccaaaatagtggaagaaaagaaattataaagatcagagcagaaataaatgattgaaatgaagacaataatacaaaagatcaatgaaacraaaagtaggttttttgaaaagttgaacaaaatcaacaaacctatagtcagactaagaaataaggagagaagatccaaataaataaaatcagaaatgtaaaaggagacattgcaactgatactgcagaaattcatgggatcattactggctactatgagcaattatatgccaataaattggaaaatctagaagaaatggacaaattcctagaacacataaaatctacaaacatcgaaccaggaagaaatccaaaacctgaacagaatctaattcaccagtgaagctatctttactgggataattttttgctgggagaatgcatctttactgagaaaacattcaccagatatttaaagaagaactaataccaatcctactcacaccattttgaaaaatag

SEQ ID NO: 417005 - DNA, 582 bp, Homo sapiens
agctctaagtgcccgcatcaaaaaagagaaaaaacttcaaacaaaatatctaacaatgcatcttaaagaactaaaatagcaagtgcacaccaaacccaaaatagtggaagaaaagaaattataaagatcagagcagaaataaatgattgaaatgaagacaataatacaaaagatcaatgaaacgaaaagtaggttttttgaaaagttgaacaaaatcaacaaacctatagycagactaagaaataaggagagaagatccaaataaataaaatcagaaatgtaaaaggagacattgcaactgatactgcagaaattcatgggatcattactggctactatgagcaattatatgccaataaattggaaaatctagaagaaatggacaaattcctagaacacataaaatctacaaacatcgaaccaggaagaaatccaaaacctgaacagaatctaattcaccagtgaagctatctttactgggataattttttgctgggagaatgcatctttactgagaaaacattcaccagatatttaaagaagaactaataccaatcctactcacaccattttgaaaaatag

SEQ ID NO: 417006 - DNA, 595 bp, Homo sapiens
acatacactggggaaagctagtctcttcaataaatgttgctgggaaaactggatatccatatgcagaagaatgaaattagacacctgtctctcaccatattacaaaatcaaatcaaaatggattaaagacttaagtctaagacctcaaactatgaaactcctccaagaaaacattggagaaaatctccaagacattggtctgggcagaaatttattgagcaatactccacaagcacaggaaaccaaagcaaaaatagacaaaygagatcacatcaagttaaaaagcctctgcacatcaaaggaaacaatcaactaaatgaggagtcgggccacagaccgggataaaatattagcaatctacccattgatcaggggcgtaaccaaaacagaatatataaggagctcatacaatcctatagaaaaaaaaaatctaataatctgattaaaacataacaaaagatttgaatagacatttctcaaaagaagatatacaactggccaacagacatatgaaaaggtgctcaacatcattatcagagacatgcaaataaaaattacaatgagatatcatctcaacccagttaaaatggcttac

SEQ ID NO: 417007 - DNA, 635 bp, Homo sapiens
ctgaaaatcaaaacaatttaactcatggacatagagagtagaaagacagttaccagaggctgcaaagtatagtggggggctggcagggaggtgttaatgtacaaaaaaaagaaagaacgaataagtcatatactatttgatgccacaacagggtgactacagttgataatagcttaattgtatatttcaattgtatattttaattgtatatttcaaaataactaaaagaattggattgtttgtaacacaaaagataaatgcttcaggggatggrtatctcattctccatttatgtgattatatcacattacatacctgcatcaaaatatctcacattgcatacctgtatcaaaatatctcctgtaccctacaaatatagcctacatttaaaaaaaattaaaaaaataaattaatgtatcttctattttttcactatttctgttttgttgtatatatgttatcattgctctgacaaattttcctgtttccaatttgttgggctttcttaaattcacgaatatttgttttcttagtttgtctctatattacctgagagtcctactgagaactggtgataaagcaggccctactgttagagtcctgattctatctcaagttcagggcagagctggatc

SEQ ID NO: 417008 - DNA, 519 bp, Homo sapiens
tttgttttcttagtttgtctctatattacctgagagtcctactgagaactggtgataaagcaggccctactgttagagtcctgattctatctcaagttcagggcagagctggatcaccccactcactcatttcctttctagcttccttagcctcttctggtcacagagaggccagaaagatcagacatgtaaggtcagtgtcaactttctctcagtttctatagatacttgcagagctcttctggttcttacacttggatttccaacactagttaygaggaaacaaagtgaaccagagaagagaacccaaattctcactggttatcagttgtaaaaaggcctcagcaggcctcctgttttcctctggagagggttagtgtgaaaacattcagatcactgtgaatcagttatttatataatcaactaagagagtatttgattgtttgttaatctgtgattgaagctatttctcaatatagatttatgtctaaaacataattattcgtacataaaatgtac

SEQ ID NO: 417009 - DNA, 647 bp, Homo sapiens
cttacttagctgaacattctattcatagccatgaccacaatgtaaagcagagatttgctttagcattgtatttaatctaaggggatcaaggatcaagataacaatcaacatgctaaatacaccataagtgaagggtcttattttgtgtgtgggctgaagatgtttctaataagtcccctgaagaatttaccttcaatcaagtgtttctaaatgttaccatttttaatagaatgctaaaataaaatgatagttctaaataatgatataattactactttacaaataatttatgttagagatacattcccaagcccatgtctgctacacaataaatgtttaatgaagttgctattcttcagatgggacacttatactaaaaaccattgtattaaaacacaccatcactaactgtgtatgaaaaaaataatggaatttcaatacatacatttttataatgcaaatwcttttttttaaattttgtattaggaaagtttaagttactatagactatttctgtgaatctttgcttaatatgactctaattttcagatttaataaaaaagttttacaaatatagagtttttcttaatctccatagtccccctacagctaactgaaagcaatttctaccatatctatttcccata

SEQ ID NO: 417010 - DNA, 612 bp, Homo sapiens
catacgccatctaatacttaggaaaaaagctggatatagattttaggaaccagaccctattaaagagatgcacacatgtggtttcataagaaatatatttctcatattcaaagaagtaataatataccatatgctatttcaatattaaaactcaaatcttttacttttcaagtaaaaggaamaggtgatctgcaaatcatattataaagcactgtaatgctaatactcaggtctaacaaaacaggtgaataacttacctcaaatgagtcttacttacatgttattaaatgaataatactatggaaggcaaaataatggatcctcaaagatttcctcgccctaatctctaaaacctgagattgtgttaccttacaatggcaaagagacttgcagttgtgattaaagatacggatcttgaaaaatggtgatatgcctgaattaccctatcccagagaggccaattaatctacattaatccttaaaagcaagaatctttcctggctgtggtcagagaatgagatatggtagtggaagaagagtccaaaatatgctatgtagctgtaactttgacaacagaggaagggggccacaagacaagaaaggcaaagatat

SEQ ID NO: 417011 - DNA, 556 bp, Homo sapiens
aagctaatatgttttgggaaatcaggtaatatacatcatattataggcttaaaggaaaacattcatacaatcattagaagtgatactaaaaataagcatgaaacataaatatatctattttaaaatgctaaaaacaatttattgaatgatattaccttaatagagcctcatgctctgatataatatagatgggcayttatatggtttggctctgtgtccccatccaaatctcatattgaattgtaatccccaatgtggggagggacctggtaggaggtgattggatcatggcggcagatttccaccttgctgttctcataatactgagtgagtcctcacaggatctggttatttaaaagtgtttaaaacttccccctttgctctctcacttgctctgccacggtaagacacacttgctcccccttcaccttccaccatgattggaagtttcccaaggcctcccagctatgcttcctgtatagcctgtggaactgtgagtcaagtaaacctctttttttataaattacccagtctcagataattccttatagcagtg

SEQ ID NO: 417012 - DNA, 582 bp, Homo sapiens
taacatactgcatatacaacttaaaaaactctttatttacttgatttttaaatttttattatttatttatttattgagacggagtctcgctctgtcgcccaggctggagtgcagtggcrccatctcggctcactgcaggctccgcctcctgagtttatgccattctcctgcctcagcctcccccgagtagctgggactacaggcgcccgccaccacgcccggctatttttttttttttttttttttgtatttttttagtagagacggggtttcaccctgttagctaggatggtctccatctcctgactttgtgatccgcccacctcagcctcccaaagtgctgggattacacgcatgagccaccgtacccggcctttatttgatatttttaccatgatttttgggtagaaaataattgcattcaaagcttattagcaaaggttattttacatcttgcaatgtagcattcctgagtaaccagccatgagatacaatttcagtggctctttaaaaggcaggaaaataaattaagtacagtgtgttggagaatcaaagctaaattgggtcataattataaaatac

SEQ ID NO: 417013 - DNA, 582 bp, Homo sapiens
taacatactgcatatacaacttaaaaaactctttatttacttgatttttaaatttttattatttatttatttattgagacggagtctcgctctgtcgcccaggctggagtgcagtggcgcsatctcggctcactgcaggctccgcctcctgagtttatgccattctcctgcctcagcctcccccgagtagctgggactacaggcgcccgccaccacgcccggctatttttttttttttttttttttgtatttttttagtagagacggggtttcaccctgttagctaggatggtctccatctcctgactttgtgatccgcccacctcagcctcccaaagtgctgggattacacgcatgagccaccgtacccggcctttatttgatatttttaccatgatttttgggtagaaaataattgcattcaaagcttattagcaaaggttattttacatcttgcaatgtagcattcctgagtaaccagccatgagatacaatttcagtggctctttaaaaggcaggaaaataaattaagtacagtgtgttggagaatcaaagctaaattgggtcataattataaaatac

SEQ ID NO: 417014 - DNA, 503 bp, Homo sapiens
aataaatacatgttaatagaagtcaaaatactgttcgccttttggtgagatgactgagaagtgtataaagatactttctaaagtttargtgacattcttgagttgggtacagatgcacttagagtgtgaaaattctttgggcaatgcatttattatttttactttttttctgtatcacaaaacccagtaaaattgtttcagtgtaggggagttaaaatcttcaataataattgtacattcatctctgtctccttggtcatgtctactttgcttcatccattttgaagttacatcattaggggcatgacctttagaactcaggtccctctagagaacaagatttacctttatgtaatattgcttggtatctctcataacaatatttagaacaatttgtttgatataaatatgttcacaccataaaattgtggttagtatttggtggttgtgttttctatttcaatgcctttacttttaatccatgtgtgtctatttaaagtgta

SEQ ID NO: 417015 - DNA, 503 bp, Homo sapiens
aataaatacatgttaatagaagtcaaaatactgttcgccttttggtgagatgactgagaagtgtataaagatactttctaaagtttaggtgacattcttgagttgggtacagatgcacttagagtgtgaaaattctttgggcaatgcatttattatttttactttttttctgtatcacaaaacccagtaaaatygtttcagtgtaggggagttaaaatcttcaataataattgtacattcatctctgtctccttggtcatgtctactttgcttcatccattttgaagttacatcattaggggcatgacctttagaactcaggtccctctagagaacaagatttacctttatgtaatattgcttggtatctctcataacaatatttagaacaatttgtttgatataaatatgttcacaccataaaattgtggttagtatttggtggttgtgttttctatttcaatgcctttacttttaatccatgtgtgtctatttaaagtgta

SEQ ID NO: 417016 - DNA, 558 bp, Homo sapiens
tgactttttagtaatagccactctaaattacctggtatggtttcttactgttgttttgatttgcatgtctctggaaatgcaaattaggaatgttgagcattttttttcatatgtttgttgattgcttgtatattttcttttgagaagtatctgttcatgtcctctgtcyactttttaatagggttatttgtttttcacttgttgaattatttaagagccttacagattctggatattagacgtttgttgaatgcatagattgcgaatattttttcccattctgtaggttgtctctttactctgttgatagctatgtttgctctgtagaagctctttagcctaattaggttaattcttgttttacttgcaactgcttttgtggacttttagtatatcaacagtcttttcaaatggtttcttaaatttaaaaatacagttttttacatatgcttatatatccatcatttcttttccctttcattctctcctgtagatccatgttttgatctgggatccttttaatttattttgaaagatttttttaaatttcttagtgtt

SEQ ID NO: 417017 - DNA, 551 bp, Homo sapiens
tactttggtaatttctattacctgtcgtatgttcactgtttctttttttctctgtcctgtattttattaaatcaatttctgatactatatttttcagttctagaatgttattttgtgtctttattagaaattctatttatttgctaaaatctttgtacttttcatcattttgtccattttttcttctaattttttaaatatatttataactgttattttaaaggccagatgcgatttccaacatctgtatstacttcttatgactatttttctcttgattatggccaattttaattattcttcacatatctgatatatatttcatggtgactatttttgattaaagaatcaaagagattcagataaatattattttcttcagagggaaaaagtccctttctctgttcatcagatagtaaaagaggctaatcatttaaatttaattgggaattctgctagattgaactatgttgcaattaaattagtttaagtttacctctgctttaaaattcttggggtcaagttatgcactatgtatattatagaagtct

SEQ ID NO: 417018 - DNA, 546 bp, Homo sapiens
aataatagtaagaaatgtaatgggagaacagtaattcaaagatacacaggaaaaatttacacatgaactatagatttggagaaataatgcctgttcatttacatgatatcaactttcatactttgagatactcatgagatactttgagatattcatgagatttttttttaacacgaaaataaagtctttataataaaccagataattgaatttaaaaacctcatgtcttcagttctgtgaatatattttttatttaaaggtttggatatccaagtcaaaaatctctatctcatagatatgyataaacacagtaatgaaaataaaagtaagtttattcagtgttagtggatgattttacagtgaacatctggctgagagaaaagtgcaaccctaaaagccctgtgattatatactctttattgattaaaaagtagtgttactatctcaaggaactcacctgaaaagccattctcaaaatcataacctcaaaacgatagtatgtaataggcagtgtacaatttagacagtctttcaaaacactcattc

SEQ ID NO: 417019 - DNA, 704 bp, Homo sapiens
cctattttctacaccatacataggttccagatccctggaatatgattctatagggttatctcagagctgtatggcttggcactggcaagagttctcctcttcaggcaaatgcaatatttctttcacaggaagaagcaagattagaccaccagaataacgatgaccttggtgataacgatgtttaggaaaattctcacttacatgggacctgagacaattttagagctcttgaggacatcgtcaaaccttgagttcaagccacatgtatggacttgtcagtgttcccactgtgttgccacctctggtctatagttcctgaggrcagcagaggtgagtgacagcaggcatcttttatcctgtgtacccactacatttcactgtgtgcctacccatttcactgacactgaaattggccattccatctctttcacaggagcctcactacatatcaggcagtcccccagcaggctgcaaccatttcctgaaatgacttaaggacttctcagattattgttctgcaaggctatgggctcttcccattggtgtccgttcttgccttttattgaaagggtgatactgtgcttttccaggttactcttaaaccacacttcaggagtgatgatcgttccttgcatggatggtactactcttcttgttctacccatggctccttgaatggcaatatgcagaaggaagtagttgca

SEQ ID NO: 417020 - DNA, 574 bp, Homo sapiens
gttcctggaactgaagagaaagagatggtgcctgaacaatatgaagaatcttctcattcactgatcaaataatcaagcaatatttaagagcattttttctaaccattactctaagtttttgttgataagctacaatatactataccacacatgaacccatgaattttataattccattttagttaaatttttatataagaccccacaaaatcatacacttccaagactcacactctctagagaggatgttgccacatgaataaactttgcacatcatttttatatttcaagtaaaaaaaataagtttgtctataacattactgttatctgttgctatatagcaaattactccaaacataacagctttaaaacaaacaaaaaaaaacatttattatttcatatgatttctgagggtcagaaatatgggagtggtttagctgaatggtctgggtcaggttatctcaggaataaaacagtcaagttgttgaagytgttgccatatggtcccctacgtagggctgctcacataatatgtcatctggctgccccctagaaaagtgcaatctcaagacaa

SEQ ID NO: 417021 - DNA, 574 bp, Homo sapiens
tctcagaagtgacatcccatcatttttgtcatagtctattctttagaagtaagtcattaattctagtttatactcaagggaacacaaacaaatctccacttcttgaagagggaaaaaaatcatagcatgtgtgaacatgttttttaaaacacaacaatgacctatacagagtccaaaaacaactgaatatatgccagccacagacaaaaaaaaaccactccaattataaaaagatactaaaatattctgtgtttttacatctacacaaatatacacacagaaaactgtcacactcagttttacaaatttagccataggttaaaagagaagcacacaatttattttcaacaaaaactcacctgttgattgctttagctctctaatagaaaagtcaaggagtgcaaaacrtatctgagacaaacttgttacggtttttcaatccaggggctgctctttactccacggggcacaaagctttgcttttgttttgtggtttttgttttaatgatttgaggtcctaatggtacacaaacaagtccaacaacaacaaaaaaatatgctactgaaagtcaga

SEQ ID NO: 417022 - DNA, 578 bp, Homo sapiens
tttacaagcaaaaagaaccctattgttatcaaatattattaatagaggaaatgctttttaataactgtctcagccaacttgaaaaactaatttttgaaacaagattccaaaaccattattttggatgcaaggaaaagtttgttgaatgagtacaygcaaactttttataacgcaatgtgctatgaaccaatatatatgtccacaaacagaaaaacattgaacatctcaaaaataggacagtttttttcctgtataactgttattaccagcttcataatgtgaaaaagttacaaacaagactagcatcctttttgaccaagatgcagtattagctctataatccttttctgttagacacatacatccaatctcatcttctcagaaaaagaacactttatttgtgattatcagcactaggctaaaatatatattttcccactgcagccagatcttgctgttcaacacttctactcattcaattccatcagatatctctattctacttctcagcatgattagctactcatttctgcaataggaccttatagccagtgactcagaaactgtaggaaaggagg

SEQ ID NO: 417023 - DNA, 502 bp, Homo sapiens
ccttttattacactttttagtgtacatgtgagtgtattaataaaaactctttaggtacttttaattaatttgtacttcaatgaaatgatgttgctgaaattgtaatttgtagtataaggggcattataaagtttgaaaagcattttctgaaaataataatagacaataacaataccgctctacaatagtacaagtacaatattaattgcaaactgaaaattaatgagacaaacttaaggttaaaayttagtagtataaattagaaattcagcaatttcttaataaatatttccaaaattttgatcttttcacatttatgctcatgcctcaaaacaacatatgtcattttatataacctctttttctactccaaacattattctgaatgatagactattcagtatatatatgtgtacacatatctatacatgtgtgtaataactgtcatgtgtatatgtatgtattgtttactaatacagctataagagccattaccaccatg

SEQ ID NO: 417024 - DNA, 502 bp, Homo sapiens
ccttttattacactttttagtgtacatgtgagtgtattaataaaaactctttaggtacttttaattaatttgtacttcaatgaaatgatgttgctgaaattgtaatttgtagtataaggggcattataaagtttgaaaagcattttctgaaaataataatagacaataacaataccgctctacaatagtacaagtacaatattaattgcaaactgaaaattaatgagacaaacttaaggttaaaatttagtagtataaattagaaattcarcaatttcttaataaatatttccaaaattttgatcttttcacatttatgctcatgcctcaaaacaacatatgtcattttatataacctctttttctactccaaacattattctgaatgatagactattcagtatatatatgtgtacacatatctatacatgtgtgtaataactgtcatgtgtatatgtatgtattgtttactaatacagctataagagccattaccaccatg

SEQ ID NO: 417025 - DNA, 479 bp, Homo sapiens
cagcaactggcacagatatgaaagtatcttctgtttcctgttcacttaaggaatacttgtcttacaggagtttgttggattcttttatgctcacagttcttcgatggatttaaggcaaagaataacatttttgtgtatcattaacttcttatttcagtggttgtgacagaattttgtttttctacatcctaactaaaagtagatcattatacatataaattttaaaggcaataaaatgacagagattgatgtttttgtcttttaaaaaatttatgcatatttacttatttaatacgtgggtgtgggtgtaacaaactcctgtaagacaagtatgtgcgctctctctctctctttatatatayacatttatttgtaaatatatatgcacatttatttatttaccttttccaaggaataaacaactttgagagagattcgatgacaagatttggtcataatttagagtttcatattgacat

SEQ ID NO: 417026 - DNA, 508 bp, Homo sapiens
tgaatttttcacaaatggagtcatatatatgacactctgctatgtctggctcctttcagtcaatgtcaaaataattgttctctattacaaggaattccttagaagaatagaaataaaagaaggaaaaatataataattatagccactaggctgagcctgatacaaaggtcagtatgacatggacaatattcctcaaatctgagatgtaaggtgcattttgagttctttgtgtgaagtcaggtaatttaataatgttcaataaattacttgattattgatctcaatggtttttgatgtaagagatacaaactcataagacagaagtaacataattatttcatgtgcttctaatgatacaaagtctttgaggggtgacaagtttgcagaakttgatagggtaaagtgtgcattaaatgagaaaaatagtaaataaagggttagaggaaactgaaataataaaaaagttacagaaaagctattttttttacttttaaagacattattacat

SEQ ID NO: 417027 - DNA, 464 bp, Homo sapiens
tttaatacgaataccatgttgttttgatgactatggccttatagtatatttcatagtttgtagcaggtaatgtaatgccagatttgtcctttttgcttagtcttgctttggctatgcaggcttatttttggttccatatgaattttagtttttttttatagttttgtgaagaatgatggtggttttctgatagaaattacgtttaatttatagatttcttttggcagtatggtcattttcacaatattgattttatccatctgtaagcatgggatgtrtttccatttgtttatatcctctatgatttctttcagcagtgttttgtagttttccttgtagccgtctttcatctcagttaagtatattcctaagtattttatttaatttttgtagctattgtaaaaaggattgagttcttgatttgattctcagcttggtcctattaatgtatagcagagctacta

SEQ ID NO: 417028 - DNA, 602 bp, Homo sapiens
tcagctgtgaatccatccggtcctggacttcttttttttttttttggtaactttttaattaccatttcaatcgtgttgcttgttattggtcggttcaragtttctatttcttcctggtttaatctaggagggttgtatatttccaggaatttatccatctcctctagattttctagtttatgcacatgaagctgtgcatagtagcctttaatgatcttttgtatttctttggtattggttgtgatatctcctgttttatttctaattgagcttatttgtatcttctctcttcttttcttggttaatcttgctaattgtctatcaattgtatttatcttttcaaagagccagatttttgttttatcttttgtatttttttgtttcaattttatttaattgtgctctgatattgcttatttctttttttctgctgggttggggtttggtttgttcttttttctctagctccttgaggtatgaccttatattgtttgtttgtactctttcagacttttcgatgtagtcatttaatgctatgagctttcttcttagcagtgcctttgctgtatcccagaggtttggataggttgtgtgactattat

SEQ ID NO: 417029 - DNA, 560 bp, Homo sapiens
ctcaaaaacttcattgtggcctatatgctactggatagtaaaaactaacctaaataaactaaaaagcaaagaaaccagtgttgtaggtggtcagttcaggttcttgactttgccacacaaaagaatttgtgagtccaaagtaagagtaagcaaagaagtttattgcaaagcaaaagtaacactctgagaggcagagcatcttatacgtctgtaaagattctaaaacacaacttctaatatctggcttccaccaaattatcaaaaaatacatattctatgtcttcttcctgaacctaatgaatcaggattattaaagagggtacccagatattgtatgtagttttattccacctcagtatttcwaactcttatgcatgaatgtcctttgagtactgctgctttactgtaacccatttaggatggaaaacaaatgagaaatcaaaagaactgttacactaacagccaagtacactgtacttcctactatgaagattaccttgatatattgaaagaaataagaactaagcctacttaatgattttaaattattagtcacaaaa

SEQ ID NO: 417030 - DNA, 560 bp, Homo sapiens
ctcaaaaacttcattgtggcctatatgctactggatagtaaaaactaacctaaataaactaaaaagcaaagaaaccagtgttgtaggtggtcagttcaggttcttgactttgccacacaaaagaatttgtgagtccaaagtaagagtaagcaaagaagtttattgcaaagcaaaagtaacactctgagaggcagagcatcttatacgtctgtaaagattctaaaacacaacttctaatatctggcttccaccaaattatcaaaaaatacatattctatgtcttcttcctgaacctaatgaatcaggattattaaagagggtacccagatattgtatgtagttttattccacctcagtatttcaaactcttatgcatgaatgtcctttgagtactgctgctttactgtaacccatttaggatggamaacaaatgagaaatcaaaagaactgttacactaacagccaagtacactgtacttcctactatgaagattaccttgatatattgaaagaaataagaactaagcctacttaatgattttaaattattagtcacaaaa

SEQ ID NO: 417031 - DNA, 542 bp, Homo sapiens
cttcatccctgcttagagacagtatcattactattcttggtttgggaaaggaaggactggagggcaggtgggtgtcattggctstacaagtaaaactttctggagaaaattattactgtaatgcctaggctgagagatgagatggacacaggtggagaaattccacaaagcccaaagtaggaaaattcatcagttactgcattaacattttattccattatacctgattatgtattattacttgtattccaatactgaacaagaagtatgacaagcataagattcagtcagacgatttaatgaacaactaaaagttttcttgtgacatatcacacctgttcacaagtattatattttgaagcagaggagtttaatgtaatataattagtatagaaatagtttatagtctcattattttctgtcaatatatacacattggtaactattctcaataatctatttgctattatataggtaaaactgtaggttaataggaggtattcataacatttttggtagtttgctgcaattagtctaattta

SEQ ID NO: 417032 - DNA, 542 bp, Homo sapiens
cttcatccctgcttagagacagtatcattactattcttggtttgggaaaggaaggactggagggcaggtgggtgtcattggctctacaagtaaaactttctgragaaaattattactgtaatgcctaggctgagagatgagatggacacaggtggagaaattccacaaagcccaaagtaggaaaattcatcagttactgcattaacattttattccattatacctgattatgtattattacttgtattccaatactgaacaagaagtatgacaagcataagattcagtcagacgatttaatgaacaactaaaagttttcttgtgacatatcacacctgttcacaagtattatattttgaagcagaggagtttaatgtaatataattagtatagaaatagtttatagtctcattattttctgtcaatatatacacattggtaactattctcaataatctatttgctattatataggtaaaactgtaggttaataggaggtattcataacatttttggtagtttgctgcaattagtctaattta

SEQ ID NO: 417033 - DNA, 531 bp, Homo sapiens
tacgtatttttgaaaacaatactgcggcttctcagctactttagatcatatggaagacagaaaaaagtattagacatagatgctgaatttgatgagattaagttgtattaatttttattctccaagtgtttgttgtttcatgctacatgaaaaaagcactgtggcccagccaagagaaacacaaagcatgccaatgtgcttgcacttgaactggtgaaacaaattttaagtacatgacatttccaaataagagcacagagcagtgtgtgaatacttgaaaaaaaatcctgctggaaatagggtattgctgtggaaattcagaagaggaatagattagtgtgaatagcagtggatgatgtggaatttgagttatactttaaaagtcagaaggtagaagaagtctaggtagataacggaatgagttggcagtctatggtaggaacatctcactaatatctcttcttagggacttcagagaatttattttagaatatcycttaagtatgaaagaatcataaatcaattacaaag

SEQ ID NO: 417034 - DNA, 464 bp, Homo sapiens
ttcctgtaaaatctgcggaattgtgatccaattaaacctctttggtttataaattacccagtctcagrtatttctttatagcaactcaagaatggcctaacacaaagcctaacctccaatatgatggtatttggtgatgaagcctttgtgaagtttagggttagctgaagttatgagggtagggcactcatggagaaagtcatggctttatttgaagagaaagagagaaatcctgctctgtcacgtgagccaaaaggtaggcctctgaaagccaggaagcgagccttcaacaggaagaccctagtaggccagcaccttaatcttggactacccgggctccagaattgtgagaataaacatctgttgtgtaagccatccagtatacagtgcttcagttttactctcttgagagcatgttccttcagtagacttttatagtcactcttcttcttgtaagttgagat

SEQ ID NO: 417035 - DNA, 464 bp, Homo sapiens
ttcctgtaaaatctgcggaattgtgatccaattaaacctctttggtttataaattacccagtctcagatatttctttatagcaactcaagaatggcytaacacaaagcctaacctccaatatgatggtatttggtgatgaagcctttgtgaagtttagggttagctgaagttatgagggtagggcactcatggagaaagtcatggctttatttgaagagaaagagagaaatcctgctctgtcacgtgagccaaaaggtaggcctctgaaagccaggaagcgagccttcaacaggaagaccctagtaggccagcaccttaatcttggactacccgggctccagaattgtgagaataaacatctgttgtgtaagccatccagtatacagtgcttcagttttactctcttgagagcatgttccttcagtagacttttatagtcactcttcttcttgtaagttgagat

SEQ ID NO: 417036 - DNA, 464 bp, Homo sapiens
ttcctgtaaaatctgcggaattgtgatccaattaaacctctttggtttataaattacccagtctcagatatttctttatagcaactcaagaatggcctaacacaaagcctaacctccaatatgatggtatttggtgatgaagcctttgtgaagtttagggttagctgaagttatgagggtagggcactcatggagaaagtcatggctttatttgaagagaaagagagaaatcctgctctgtcacgtgagccaaaaggtaggcctctgaaagccaggaagcgagcyttcaacaggaagaccctagtaggccagcaccttaatcttggactacccgggctccagaattgtgagaataaacatctgttgtgtaagccatccagtatacagtgcttcagttttactctcttgagagcatgttccttcagtagacttttatagtcactcttcttcttgtaagttgagat

SEQ ID NO: 417037 - DNA, 600 bp, Homo sapiens
gacccgctccattattaaacactgttttccagatctaygcacatgttgctgcagtgctagagtgaagtaatgtatctattaagcacttagatgaaatttcactaatccctatatactcagatcaacctaccctctaaatctagctttttctgagcccctaagtagatgtgatcatggcttcctttacagctctcttaacacccttacctaaggctcccttgttttagacgtgtaaccattttatttggctacttgattataattcccagagcattagttcctaagacagccacatttgtcatgtattcatcttttcatttcctatagtaagtaacacaattgcttgcacattataggtgcacggtatgaaattaaacttgggttttgttttggcagtaagctagagagtaataaaatattaatttcaataaaaagttagtaggaacttatgacctattctacttgtttgtcttatccttctcattgggcagtttaatggcaaaaaattattttcatacaacaaaatataactgaatttattattaaaaacaaattatttcagacaatggtggtataaactttaaacttgcaaactaaaat

SEQ ID NO: 417038 - DNA, 600 bp, Homo sapiens
gacccgctccattattaaacactgttttccagatctacgcacatgttgctgcagtgctagagtgaagtaatgtatctattaagcacttagatgaaatttcactaatccctatatactcagatcaacctaccctctaaatctagctttttctgagcccctaagtagatgtgatcatggcttcctttacagctctcttaacacccttacctaaggctcccttgttttagacgtgtaaccattttattyggctacttgattataattcccagagcattagttcctaagacagccacatttgtcatgtattcatcttttcatttcctatagtaagtaacacaattgcttgcacattataggtgcacggtatgaaattaaacttgggttttgttttggcagtaagctagagagtaataaaatattaatttcaataaaaagttagtaggaacttatgacctattctacttgtttgtcttatccttctcattgggcagtttaatggcaaaaaattattttcatacaacaaaatataactgaatttattattaaaaacaaattatttcagacaatggtggtataaactttaaacttgcaaactaaaat

SEQ ID NO: 417039 - DNA, 600 bp, Homo sapiens
gacccgctccattattaaacactgttttccagatctacgcacatgttgctgcagtgctagagtgaagtaatgtatctattaagcacttagatgaaatttcactaatccctatatactcagatcaacctaccctctaaatctagctttttctgagcccctaagtagatgtgatcatggcttcctttacagctctcttaacacccttacctaaggctcccttgttttagacgtgtaaccattttatttggctacttgattataattcccagagcattagttcctaagacagccacatttgtsatgtattcatcttttcatttcctatagtaagtaacacaattgcttgcacattataggtgcacggtatgaaattaaacttgggttttgttttggcagtaagctagagagtaataaaatattaatttcaataaaaagttagtaggaacttatgacctattctacttgtttgtcttatccttctcattgggcagtttaatggcaaaaaattattttcatacaacaaaatataactgaatttattattaaaaacaaattatttcagacaatggtggtataaactttaaacttgcaaactaaaat

SEQ ID NO: 417040 - DNA, 569 bp, Homo sapiens
tcaagtgccctgtttgaccttggacttcgggttttacatgytggcctacttttggaatcttgcatcccttctccccgattcttcccttgggatgggttgtttgcatttacaatggcctgctaatgcttgggaggggagcatgtgcagtgtgtttactggagatgtatgcatgctcacctgaggcgttcttccctttccctgtggaatgaccctgaaaggtcatatgccagttaaagtacaccatttgacctcttagtgcacatgtgtgagcccactcacccaccccctgagatcaccagtttctggtttttttctatttaatgggagactgcctttctctgatgttggctacaaccaattactattttagaaaggcagtgtgacaacttcctgaccattatctgatggtcacctgactttccttgtgggctctggggaccttctcctgccctgttcatgtctgactggctatccactgtaaaacactaatattgaaccctaaggccagttttaatcacagaacattgaaatcaagttaacaagaaatacaaaaaaataagaagtacaaa

SEQ ID NO: 417041 - DNA, 656 bp, Homo sapiens
ctaatttttagtagaatattcatttacttttgagttgaagtaataagcctatatcaatatacattcataacacataccaatgaagtaattgccattcttttatataaataagtttgtatgtcaccactacatgtaagtatacatgagctaatcatttggatgtctgattcctcatttcatctattgaggaaaaagggaagtaaaattaatcattcttttctcattaaggcaacatgacaagctctgaaatgttgataatggactttcattgaatcactgtcattctggccttctgaaagcttttaagaccctgtaaacatatgttgcagtgctactggttcccaaggtggtcataaatgtgcatgctataaaagaacaatcagccacactcaaaaacatttattttaatatagccccttaataacaatacaaggaatctstatagaatttcattttagtgaccacttcttactgtcataactgggcaggaacattcaaaggagcaaaggggcagaaataatcaaaacaatgaatctgaatattctaccaagcaggttttcaaactagtgatatatctcattaatatgggcccacataaaaaatcaatgaaattgatagaaataattgcatgtgatatcttcataaagagatctgct

SEQ ID NO: 417042 - DNA, 532 bp, Homo sapiens
ctctgaaatgttgataatggactttcattgaatcactgtcattctggccttctgaaagcttttaagaccctgtaaacatatgttgcagtgctactggttcccaaggtggtcataaatgtgcatgctataaaagaacaatcagccacactcaaaaacatttattttaatatagccccttaataacaatacaaggaatctctatagaatttcattttagtgaccacttcttactgtcataactgggcaggaacattcaaaggagcaaaggggcagaaataatcaaaacaatgaayctgaatattctaccaagcaggttttcaaactagtgatatatctcattaatatgggcccacataaaaaatcaatgaaattgatagaaataattgcatgtgatatcttcataaagagatctgctgtgttgtcatagaatggggaaaagctaggaagaatttagtgagcagatggagaaaacagcaactgttttctcacttttggtgttggaaaatagtttaccaaaaaacaaaaacaaaag

SEQ ID NO: 417043 - DNA, 619 bp, Homo sapiens
tatttttagggaatctgtaatatcaaacttaatatttaaaaaaagagtttatttgatattagcaaagatagtaaaaaactaatagtgggtaaaactgctagtgccttagcataaatccaggcagtggtaccaaatcatcattgtattctttaccatcatgcacttgcagataaaaaaagaaaaaagaggatagttttgcctaagaatgctccaatgaagtactaaaattgctaatgttgttaaatctcaatccttgagtatatatctattctcaatatatatatatacacattctcaatatatctcaatatacctcaatatatagatatctatatattctcaatatatagatatataccttgagtatatatctaatctcaatccttragtatatatctattctgttttacaaaatgaaaaacacacataaagcattctgtaggttaatatgttggttaactcaagaaaaagcatttgtgtggttatctgattaataagatgaactagtcacttttttcataaagcaccttttttatttgaaagaataactcccagtctaatggttaagactttggtatctggcagatattttctggaaattgaacttagtgagcctgtc

SEQ ID NO: 417044 - DNA, 569 bp, Homo sapiens
attataattatgtcctttgcagcaacatggatggaaccggagttcatgtgaagtgaaataagtcagacactgaaagatgaattttgcatgttttcactcatatgtgggagctaaaaaaattgatctcatagaggtagagtgtagaataatagttatcatgggctgggaagggtgtgtagatgggagaggggatgaagagatgcggtcaataggtacaaacrtacagtaatttagaaggcataaattctaatgtttgatggcagtgtaagaaaattagagtttgcaacaatgtattgtatattttaaagtagctagaagagagaacttgaaatgtttccaacatagaaataataaataccaaaggtgatgggtaccccaaataccctgatttgattattacacattctatggaagtaacaaattatagcatataccccataaatatgtaaaatcttatatatcaattaaaaattaccacagactcccagttacttttgacaccagactcaaattctgctttgttttcaagtctctttatatccattctgcgtgttgtcagtttgtacctt

SEQ ID NO: 417045 - DNA, 607 bp, Homo sapiens
tggatttcccacttgctgttctcattatagtgagtgagtgctcttgagatctggttgtttaacagtgtatagcacctcacccctctctcttttcctccttcttaggccatgtaaaatgtgcctgcttcccctagacatgcataccttctgtcatgattgtaagtttcctaaagcctccccagtcatgcttcctatgcagcctgtggaaccgtgagccaactaaacctctctcctttataaattacccagtctgaagtagttctttatagcaataaaagaatgaactaatacaagatatcaggcaatttttgttctattatttacctgtataaaygcttattaaatatctataacacaaaaaaatgcttggcattatgaagatacaaaataatacttgatgaccctcttcttccagcatgatttactggtgtaaaatttgttctcaaaatgactccagagattttttaaaagctataataaaacaggacaagaagctactgtataagttgtttatattaaatcctcacaaaacgcttgtgagataggtattttgcatgccaatttgaaaaaaaaaatgtgtatcctgagactttatagtaacaaaaac

SEQ ID NO: 417046 - DNA, 639 bp, Homo sapiens
ttgtcactgtttagtaggagttttgaatatttactcattccttcctttataaatctctgtttaaaatatgcatcatcacataaaaatatttgtaaagaagtaaggggatctggggaaggtaggcaatggtagtttacagaaggaaaccatgaagaatagataagtgtagtgatacaggaaggttttgaaaaatctttcagagggattatgagaagcaaggagtcaaaatatttattccaaaaagattttctgagcatctgacaaggtatggtgtatatcgagtatatgaaggratccaagtaaaagtctcaatcctaactatcaaggagcttctaacccatttgaggtataagataacaatagcttcagaaagccctaatgatatgggtaaatctccccaataaaatattgaatgagagaagccagatacaaaaaaatgacttagatagcagtggtttaattaacataaaagcttaaaataggcaaaaccaatctttcttttagaaagttggaagagtggatgcccttggtggaggttgttatagaagatggcacaagaggggccctggggtattagctgtattctgtttcttgatctgggtattgggttcagagttatgtgcattttgagagaattaa

SEQ ID NO: 417047 - DNA, 381 bp, Homo sapiens
ttctgtttcttgatctgggtattgggttcagagttatgtgcattttgagagaattaatcaaggtatacatttattatgtgctyggagatttttgttctgtatattacatttttaaaaatgtattgagaagaaccaaaattagtttgggattaagcatctcatttaaaggaaatttttaaaagaacattttgagcaaattgttaaagtgctaaatggtgaggaaaggctgaaagttatttttggttgaaaaagtagggaattatttccttagaggcaggatatatgcaagaaacttgagtaataaaaactataataattataataatgacagtaacaaaaatgactattatcatttttactattagttggacacatctaagc

SEQ ID NO: 417048 - DNA, 605 bp, Homo sapiens
aaattgttcactaaaagggtggctggtattataaaatgttataacaatttataatattagcaatgcagaagcatgtttacttcttatgattaatttgttaatatctgggtgagaaaaaattggcatctcaatgttgctttatttaaatttccctgaataattatgttaggttatactttagcaaatgtagtggcttgtgtcattttttactctgagagtaagctgtttatctttttaaaaaatgttaattgatttgtagaagacttttcaacattgaatatcatagcacatataatagagaattatttatgtagccacatgaattatcttttctgaaatttttgcattttgtatttacgtagaaagccttcatgcaaaactctctttctaaattatatttctctgatcaaatatgtttggatatgtcctttaatatmtatatatatttatgtatattaaaccatacagataattctaaatgaactgaaggtaattgtgaatccatctggaatattctaaacagtttgaataactaataggacattaattgaataacttacagttttcctactggtttgcaattatacttttttttttgagacaga

SEQ ID NO: 417049 - DNA, 605 bp, Homo sapiens
aaattgttcactaaaagggtggctggtattataaaatgttataacaatttataatattagcaatgcagaagcatgtttacttcttatgattaatttgttaatatctgggtgagaaaaaattggcatctcaatgttgctttatttaaatttccctgaataattatgttaggttatactttagcaaatgtagtggcttgtgtcattttttactctgagagtaagctgtttatctttttaaaaaatgttaattgatttgtagaagacttttcaacattgaatatcatagcacatataatagagaattatttatgtagccacatgaattatcttttctgaaatttttgcattttgtatttacgtagaaagccttcatgcaaaactctctttctaaattatatttctctgatcaaatatgtttggatatgtcctttaatatatatatawatttatgtatattaaaccatacagataattctaaatgaactgaaggtaattgtgaatccatctggaatattctaaacagtttgaataactaataggacattaattgaataacttacagttttcctactggtttgcaattatacttttttttttgagacaga

SEQ ID NO: 417050 - DNA, 605 bp, Homo sapiens
cctctgtggcaccagcagaattctgccgtgttgtgcttcactgtgacacagaagtaccgagttccaatgcaaaattcctcactcatgtggctctctcccccaagcacacagattgtctctcttcargacactgccagggtagatgggagaggactggtgtaggcaatgcaagacttgtctttcctacccttttcaatgcctttttccttggtattatgttaaatcaagattatgtgatcactcacctgatttttgcttcttatgaaagtgcttttttgtgtggataggtatttaatttggtgttcccacagggagatacttgcaggagtatttagccatctttctatacatttctctctcttacaataatatttgaaccttggaaaacatgtttcactcattgcttatcttttgaacaaatatgtaagatatttattttcatttttttctttcaaatataattagcattacacaaattcccattgtggacttgttcagaagtacattgaatatatttatttatttgggtaaattggcatctttagaatttttggtctttttatccagggttttgacatgtctctgtctcttagatcttttagtga

SEQ ID NO: 417051 - DNA, 605 bp, Homo sapiens
cctctgtggcaccagcagaattctgccgtgttgtgcttcactgtgacacagaagtaccgagttccaatgcaaaattcctcactcatgtggctctctcccccaagcacacagattgtctctcttcaagacactgccagggtagatgggagaggactggtgtaggcaatgcaagacttgtctttcctacccttttcaatgcctttttccttggtattatgttaaatcaagattatgtgatcactcacctgatttttgcttcttatgaaagtgcttttttgtgtggataggtatttaatttggtgttcccacagggagatacttgcaggagtatttagccatctttctatacatttctctctcttacaataatatttgaaccttggaaaacatgtttcactcattgcttatcttttgaacaaatatrtaagatatttattttcatttttttctttcaaatataattagcattacacaaattcccattgtggacttgttcagaagtacattgaatatatttatttatttgggtaaattggcatctttagaatttttggtctttttatccagggttttgacatgtctctgtctcttagatcttttagtga

SEQ ID NO: 417052 - DNA, 610 bp, Homo sapiens
catttacccaaacagggaatattaatataccatatgctagggagcttaaataatttctttataacatcatagtaggtagctcagtagtgaaaattaacaggaaaaaaatggatgaaaatcaaaagaaaagcctggcagcaatgggagagtgaatgatacagaggtgaaaccagaagcaagcacttcaaatgaaaatgtgtcttttgccagaattgttccccatgtaagtttataataaccctggaaatgactgaattgtgtgaaccaaactagataattggagcaggtgtctggcattagaagagatgaaaatggttttctcttctctcctataaagatgaagaagacataataggaatacatatcgattccaaggagagcaccatgccaactctattgcagatggaattgtgtgaggcatcccaatgattaagaatgaaaaatagtcaaaactaggatgcatgatttaccaaaaaaaaacataactcttagttttcttcttgaatgtccattctgtttcacagatgttgaaaccagaaagtggctatgtttccaatgctaayaaaaatatgtgataaattgaaggttagtatgaatatttttcaatagg

SEQ ID NO: 417053 - DNA, 502 bp, Homo sapiens
atcaccaatttcaaggtcatctagactttcttctatgttatattctatgggttctatacctctgtgttttacatttatattttagatccagtttgagtttttgtgtttgtagagggttgtcaggtctgtgtccagatttactttttgcatgtagatgtccagatgttcccacagcatttattaaaagactatcttttctccattgaattgtctatactccwttgtcaaagatcagttgactatatctatatgtatctagctctgggctctattatgttccattgccaattttttttctatttatgttctttcatcaatatcacactgtctagattaccatagtgtgtcttgaaatccagtaatgtcagtcatctaacttggtcttattttttctattattattttgtaaaagtagtagtatgccagtaatgattggtagacattacatgataatactcaaaatggaatatgatttcaggaaaataataaacatgttattctt

SEQ ID NO: 417054 - DNA, 575 bp, Homo sapiens
tcctttgttgacattcagtatctcaaataacacctgtatatactggttgattaagaattgtcctataactatatgttgaataaataatcttaaaagttcaattcacttactttctgaaaaattatatttatatacatgcatataaatagaaagatacatacatatattatatatatgttattcaaaatcaccatagtagaggttttattaaatgtatgtgtgtgctacagtttgtttatatatactatattaatccctcatttttccagttagtcttattgaatctagaagatctaaataaaatgtactgaattgagartgtcaaatagtattcgaagacagtgtatgtcataagcttagaactaccacagtgttttggaaaatggtcaataaataacattaagcttcaacttcagtgcaggagaatgcaaggttgaaagtcactcaccctctattttgacgtaaaccattaatgaatcttaatcagacagagaacttcatcatacactttggtgtaataagattttacttgtcataatactttgttaacaaagaaaaggctagagacatcacac

SEQ ID NO: 417055 - DNA, 575 bp, Homo sapiens
tcctttgttgacattcagtatctcaaataacacctgtatatactggttgattaagaattgtcctataactatatgttgaataaataatcttaaaagttcaattcacttactttctgaaaaattatatttatatacatgcatataaatagaaagatacatacatatattatatatatgttattcaaaatcaccatagtagaggttttattaaatgtatgtgtgtgctacagtttgtttatatatactatattaatccctcatttttccagttagtcttattgaatctagaagatctaaataaaatgtactgaattgagagtgtcaaatagtattcgaagacagtgtatgtcataagcttagaactaccacagtgttttggaaaatggtcaataaataacattaagcttcaacttcagtgcaggagaatgcaaggttgaaagtcactcaccctctattttgacgtaaaccattaatgaatcttaatcagacagagaacttcatcatacactttggtgtaataagattttacttgtcataatactttgttaasaaagaaaaggctagagacatcacac

SEQ ID NO: 417056 - DNA, 633 bp, Homo sapiens
  misc_feature (1)...(633): n = A,T,C or G
nnnnnnnnnnnnnnnnnnnnnnnnnnnnnngaagggctactcaaacatagttcaaatatgaattaaagtcctacctagctccatcacacacacacacacacacacacacactcgcacaaatgaatgccttcctatttagagattaatcaaatcaagtaatcaaatcaaccatattgtatgttttagttttagaaatatactgaaattttgaaaggtggggaaaaaagtgaatgagaattactcaacatgacaatttacaacaaattatctatgaagagaaatgatattatcaggtgaccacaggtaaagtgtctcctaaaatattttattacagcccccaaaccaccacctggtatttatggaagcaatatctctttcagaattattttaaagttaattataatcacataatcaagtaattaactacttcatttagatcattgctaytcaaagtatggttgctagatcagtattattgacatcacatagaagcttgttaaaatctggaatctcaggctccaccctagacttactgaatcagaatttacagtctgattaaatccacaggtgatttttatgcacacttaagtatgagggcactaatacagggcaatgtttctcagtatgggcttc

SEQ ID NO: 417057 - DNA, 603 bp, Homo sapiens
catattataggccctttaaattgtacacatccagaacagaagtcattaactttgctcaaacgaggtctcctccaaagatgtttatatcagtaattgacgctaacattcaatctacaaggaaggcttctttgtaatctcttgcatcttaaatcctgtttcaaaccacttggtcctttttatactgttttctgagtatcgcgggaatctgccaacayttcttcttctcccttttcatcgtgaacctaatattgcctggcagagtggtctgtgacgctgatgtactgaagcatgagtagaatgaggactagaggagcggaagcataaggtatttgggcataactgcaaaagttaagacatgggaacaggaatttaagtagtatatttagaagatggtgtagacaacaaattaattggaaaagtcactaaattaagtcactaaatttagatacatttaaagttttacaaaggcaaactgatttatttatctcattaagattttactaatttatctatattggatgcatttgtattagttaaaagcagccttcagcataaaagtacattattatcccaaatggccaatttcttcatgattatttcaag

SEQ ID NO: 417058 - DNA, 603 bp, Homo sapiens
catattataggccctttaaattgtacacatccagaacagaagtcattaactttgctcaaacgaggtctcctccaaagatgtttatatcagtaattgacgctaacattcaatctacaaggaaggcttctttgtaatctcttgcatcttaaatcctgtttcaaaccacttggtcctttttatactgttttctgagtatcgcgggaatctgccaacatttcttcttctcccttttcatcgtgaacctaatattgcctggcagagtggtctgtgacsctgatgtactgaagcatgagtagaatgaggactagaggagcggaagcataaggtatttgggcataactgcaaaagttaagacatgggaacaggaatttaagtagtatatttagaagatggtgtagacaacaaattaattggaaaagtcactaaattaagtcactaaatttagatacatttaaagttttacaaaggcaaactgatttatttatctcattaagattttactaatttatctatattggatgcatttgtattagttaaaagcagccttcagcataaaagtacattattatcccaaatggccaatttcttcatgattatttcaag

SEQ ID NO: 417059 - DNA, 520 bp, Homo sapiens
gcttgggtttaattttccattctgtcttcctgtatacctccatcattattcctaggctggtcatgtaccttgacataaatactcagatgctctataatcaatgtaattattgcacgattggctaaatggcgagctccttaagggtaggggctataggatttcatctttgcattcccagtgtcagacatggtgccttgaaagtatgagggttttttcccccaaatttatgaagatccaagggactgagtaggcctgaagtagttttagatgttcaaagaaagtttaaaatatgggctgcataattttatactacatgtcctttagtctacttatttgaaagcacataattcaacccaaaagttctattaaactgagtamgttatttagtaaaacatctcatttcttagccatgccagatggtagtttactatagaaagtgatgttgctagtgaggttggcagatgggagatgttgaagtgattgtcagttgtccttagcattgggtccccccagccccaac

SEQ ID NO: 417060 - DNA, 600 bp, Homo sapiens
attagtttatatctaaataacactatatttccatatgcatgcacatggacatagagtcaaatgtttccttgaggaaacatttagctgcacataattgctatggaaagcatttctgtcctaatgggcctgattatttataaattatcttattaattgttagatttaagttgtcagatcaaaactagaaaacattatgtctgtaaattatggtgctaagttgttattcaaactaatgaaagagagaattaaagagaatagtatattcttattccccaaataaaattttgctgaatcatgattcacataactcacataaatcatgacccacataaaagtagattgaattattatttttaaatgtcttataaaattacyatttagagaaaagcttgtgcccttttattaaactggcttatatcagtttttgtaaaacagatgaaaaaatggcctaatccaatttttctgctaaactcattagttgtatctgatgagttgtcattaagtcataagtttttagataaatatagacaaaacactacacctaaatattacccatacagaaacagcacacacacacaaacacacacatgcacgcacacc

SEQ ID NO: 417061 - DNA, 576 bp, Homo sapiens
ggataaagtgcataaccttggagtcaggctgcctgcattgaatcaaaactccatcatttactagatgtgtgaatttgcagttacttcagtgcttcaggtttctcacctgcaaaaataaaatgttaacaccgtcctcaaagtgattatttgatgtttatatgaagattgatgtcttgtacactgcttaaatcataatggaacagwgtaaacactcattaaatgttagccattgttatcagatgttttcttggattccatcatgaagagggcataagtcagctgtgtgtcttggagagtcagccaatgggtccttttcctcatggggtcagtcatttttaatctgagtcttattgggagtggccaggtaacaaggattgggcagcagaactacaatgtgattgttgggtactcataaatcaggctatctgagcaacacaaaggtatttagccttctagggccttaatcagtctaggtaaaaaaaatccctgaagctgtcttaaaacacatcagtaaaatatcctcaaacgaataccaactattctgaccatgactcatagtaagaaatatatctaaca

SEQ ID NO: 417062 - DNA, 599 bp, Homo sapiens
gtgtttgtgtcttccatagtccctaggatatgactctgcatataatgggcaatcaataaataattcttggattaatgtttgaatgacttttatttgactaaaggaagaaattaagctcaataagcactgctgattttttttctctttactgaatgcagatataagattaaggggagatgtaggagatttcaggctaagaataatctttgggctaattcctcttttagcttaatttattttaatttatcaaactgcttttattctgtttttctttcctaggagttcctcacttatatcagaaaatactgttagtgcctagctatttcaacaaagaataaratttaatataatttatatgacctacacctcatctaaagatagcaatactggagatatccaaccaggaaggagcaatttttgcttgataattccaacaaaaattgtttgatttccatttcaataatgaaaatattgataatggcctgtttatgagattgcataacacttttgataaaagtaaaattaaccttatggaataattcttacagatattttaaatgattcctttttgtgataagacactaaatatacaaatgaaa

SEQ ID NO: 417063 - DNA, 600 bp, Homo sapiens
tgttcatgtttcatccaagttatatactccaactctattctttttactaagtctttttactcactttaatatgccttaagggttcttgatttacactacctctttcatagtcctacttctttatttggattataataagggtctctacccacagtatttctagatttctccaccccacaaattcagctaagagtgtgaaaccataagccctttgatacatytactttataaagttaaaaagattctcattttacaaagtcctccctgctttctttccctccatagaatgctgggaggcaaagcctctgccttcaccacatccagagtgacttctggtatttatttccaatttccagtcatggattaaaccagagagaacatggggacaggcaatggtgtgatttgttacctaacacagctactgatcaaagtcagtaggagaatttatgaggtactgctacccaggagccccttttcagtgcacaaactcaaactagtcttttatacacaggtgagattcttcctcttcatgaaactgttccttactgacagcccaatttcttccctaacatggctgagaactatccctcaagataaggc

SEQ ID NO: 417064 - DNA, 552 bp, Homo sapiens
atttttttgctattgggttgcttcctaaaaattttagcttcattgtcacatggctatctgaaaggtttaaaggcawcttgttttcttatcattcatcaatcacactctgaactgtcaagagtaagttctgactagatagaaatagaagcaacatgcaattcagacagtttttgattcattgtcttgtgtaattagaattgtacactctctgctcaatggacattcagctttaagtgcccaggtgccacaatccttatgtgccatctattaagggcaagttatttaccttcagatggtgactcaagagaactcttctatctgtctgtctacgtatctggataaagaagcatttgtgttattctacccagagtgatctgtttagaatagctatccaagttcaagttcaaacaactgataagtcacagaaccttaatagaagcttaggatgccaagtcttctttcaattattctacttatctacctttttaattcaacttatctgatgttaatacatagcatatacttgtaactcgtgtcaaagagtacacctta

SEQ ID NO: 417065 - DNA, 404 bp, Homo sapiens
tatggtacattttgtatcaacatccataattgactatgatttccagtaacatttttaaagaggagaaaaggatttcatctgtttttttgcatttatcctgtatcttacaatttccccccctgaactgaactgttattccaatagaggaacactgaaattactggtrtgataggaattccctaggatattgtcctcctctttatagatttttgtggggagttgctattgtaacctataatctgcagcccagcattccttttttactggacagataattttgtgagatgaggcctgtaaagtgcttggcattgtgctcaggccactttatttctcaggcactggagcagagtgctaggggactataggtttttcagtgactgtaaaagaaaaagtttgagatgagg

SEQ ID NO: 417066 - DNA, 553 bp, Homo sapiens
tacctcatgagggctgacttttcttcccttgctcaaacctccatgggtatctctaaatcattgtcagtcaattctggmataaaattgtgaatttggcctacagaaggtggtttagggcatgacttaaaatatacaaacatatctattatgtaaatgtcaagaatcaccttttccatgtgagtgtattgaaaaaactgttatacaccataattccctggtcacaatagctcctgaacaagtcaaatctatatcaagtccaagtctagcgagcattgctaagtgctcacattaattccaaagtacagtttgtatttacttaaatcctactttaaataaaagaattaaatgaccagatagatatgatgaatctatatgtgactttactcgatattttcagttgtttttctgtgtgttgccaataattacaaatggtgttcataaaatcccaatatttccaatacggatatactttaaattttaaaatgtatttcttgtatatgcagtaccatggaaaggaggagaatataatattgaatatagtatatttaaacaa

SEQ ID NO: 417067 - DNA, 553 bp, Homo sapiens
tacctcatgagggctgacttttcttcccttgctcaaacctccatgggtatctctaaatcattgtcagtcaattctggaataaaattgtgaatttggcctacagaaggtggtttagggcatgacttaaaatatacaaacatatctattatgtaaatgtcaagaatcaccttttccatgtgagtgtattgaaaaaactgttatacaccataattccctggtcacaatagctcctgaacaagtcaaatctatatcaagtccaagtctagcgagcattgctaagtgctcacattaattccaaagtacagtttrtatttacttaaatcctactttaaataaaagaattaaatgaccagatagatatgatgaatctatatgtgactttactcgatattttcagttgtttttctgtgtgttgccaataattacaaatggtgttcataaaatcccaatatttccaatacggatatactttaaattttaaaatgtatttcttgtatatgcagtaccatggaaaggaggagaatataatattgaatatagtatatttaaacaa

SEQ ID NO: 417068 - DNA, 568 bp, Homo sapiens
ttaatatgcaataaatgcaaccattttaagtgcacattttgcaattttgacaaatttataactttatatatttagggtataggacatttctatcacaccagaaatgtcccttgggctccttctcagtcaacttcaaactctaccccaggcctttctggtttctatgattcagtgtatttttttttccttcagtttaagtggaagagtccttgacatgttcatgcaatgcagggtcttccctagtgttgtttcctctgcctgggatcctcctctctgcctctaatgccaaacacatacccaattgcccaccaactcttatccatccattttcaatttaaacatcatttcctgagtcatttggaagagtgcctggccacatayaaagcactcaagaaatgttagttattataatgaattataaattggtagcttgaaacctattgggttttcctgcaataaaattatagaaaaatggataacagtttaaaataaaaatactaatttgcatctattgagatgatcatatgatttacaaagtgagacagttttgatgagggtatattgttca

SEQ ID NO: 417069 - DNA, 482 bp, Homo sapiens
attttaggaaatcttcttggtgggatatcccttctggtgattaataaatcataaagctcaaagaagacagttgaaggagcagctattaaaccaatgtgatcctattaaagggaaactgagaaaaatcrttttagccagaatttgacattaaactttgtaaataaattaaaaattttaaaataatttttttctaaggaaattgaagaaagtctcatataataaagctggatactcttccacaattaaagataaaaaagagaagaagttggaagtgtgttatgttagtgactgatgtgatttgtatttatgtgctctccaaagaccttgtgtagcctggaaacattcatttgttaaaatgctaaaaagtaaaatatttattgtttcatataaaatcctctatgagatgaaaataaaggaagattatttgctttaatcataaattgtgctataatattttactctgaatatttgtgattgtactg

SEQ ID NO: 417070 - DNA, 535 bp, Homo sapiens
ttggtcctgcaaaaaaaaaaatctagggaagaattattgatataaaatagatttgatttttttatggcatttcctgaatcagaatcaaattgtttggccgaagatgtgtttggttccatcttaactgttgctgamttcagtcattgctgtttgaaatttcccttaggccgaacctagcctatagctcactgcttgcactatcatcctgtggggaagcaaaacaaaacaatactggcacagaaatcaaccttctcccataataatgtccttaggaacaggcctgatagccacattgaaaaaagcatagttgcaccatatctgatgtagccatttcttgcactatgaactctgaggaatttaggctggaccatcgatttgaaaatacatcagtgtcagtgcagtgaggccagggcagtttgaatggtcgtcttcatgctaaaatctgattgtttttattgaatgcttttattttttaacctgttgtaaatttatatttgcataatataaatttgcaatttaatattttatatcctct

SEQ ID NO: 417071 - DNA, 626 bp, Homo sapiens
ctccaaactgatctataaattcaatataatctcatttaaataccaagcaggctttttttttgtagtaactgatcagcagattatgaaattcacatgggaatacaaaggatctaaaatagccaaacttcaraaaagtctgtataagttgaatgacttatacaacctaactttcaaaacttattatagagccacggtaatcaagacagtgtggcactgacatcaagatgaaacagtctatgaatacttatacacacatggccaactgactttcaataaagttgcaaaagcaattcagtggagaaaggatagtcttttccacaaatggcaatggaaaaattaaaaaactatatgtcaaaaataaaatttaaaaaggaattttaatctgtccctggcaccataaacaaaaattaactaaaaatcgatcctagacctaaacataaaacctaaaactataaaacctctggaggaaaacagaagaaaatctttgtgaccatggggtagatcaagatttcttgggatttcatcaaaattatgtctcttgctcttcaaaagaaactgtgaagacaatgagaaagcaaaccagagactgagagaaaatatttacaaataactgataaagttctcat

SEQ ID NO: 417072 - DNA, 621 bp, Homo sapiens
cgggcactgaatgaagtaaggctacctgggttcaaattttggtgtgaacttaggttgggttgcttaacttctttatgcttctgtaaaatagggacaatgttagtacttagcttctcaggttggctggaagcaacatctgatataatacatggaagagcctagcacacacagtcagtatacttctatctgttacatcctaaagctgtatgagtgagtcaaaattttacacatttttgagaagataaaagcccgaaccctcctcagaacatagcatacagcactaatagtctgaagaactgcacaacagccccactctaacatctctaatggtagctgagccccatgctagtgagaagtgaggtggtgggcagaaggaatctcactgacttatttcaattaatgtgagcagggcaagaacaacttttttttggcctggagctgaagattattggagatgaaaaaagttgtaggctctgtcagcataaaaggacacasagtgaagtctcttaaagtcagcagggacaattctacaattaatagaccttattaccaatggggaccctccataaagtaaattgtaatgagacttgtggctgccagatttgggtatcataagaagtt

SEQ ID NO: 417073 - DNA, 592 bp, Homo sapiens
gaagaggttttagggctaatatgaatttttggtaggctatctggttatgtatgtatgtacacacatatacatacatatgtacatatgcatatacacatgtatgtatatacgtgtgtgtgtgtgtgtgtgtatagtagcattcttagaaaacaaaaaccagctagagaatgtaatggaaaaaatatccctttcacaatcacaattaaaaatacagaaacctgggaattaacttagcagaaaatgtgctgaactatatgaaaaaagcaacaatactttytaagggataagaggagacttcaataagtggagagacagaccatatttctggatgaaaagactcaaaattatgaaagtgtaaattttctctaaattcctctacaaattaaattgtaaccaaattaattgtaaccaatgacagatgttgaaaatttggcaacatgattctaaagtttagatggagttgcaaacattcaaaaaagtaaaatatatctaatgaaaatattttaaaaagtgatgaagggagacttgtcctataagttattaaaatgttacaaagctgtagtaatttgttctacttagaactggtttagaa

SEQ ID NO: 417074 - DNA, 567 bp, Homo sapiens
tattttcttcatccctagtaaggaagctgaattcctgacaaaggggtgccaaaacctggcctcctgtggactcctgtacctatctttcctcccttgccctgtcctccactagatttgggaaacttgaagtctttcctcataagctcagagatgtttttaaaaagaggctttgaatcctataaactaattggagtgggctcctcagctataacctagggggacaaagagaaagccagtggtttatttgggaggaaagaggccattggtcccccaaggcatacacattgatttgtaaacctgagttaggcaagaaaaactaccctgtgagagatttagtggccaagggagagagttgacattctaacattttatgagtgccaattgaggttgcccacacacgttgtggttgctttctcccacctcrtccccactcttccaatagggctagcagcctgcacaaactggacccctgttgataacttcagtcagctaggtggggacataggcccaggaaattgactcgggagagtttgtaccatctgcaaagaaaaagatcagcagctgcaa

SEQ ID NO: 417075 - DNA, 577 bp, Homo sapiens
atatttttacatactagcaattgggaaaaataaaacaataaatgtataggatcaaaaacatataatgttaacaaaatacatgtaaaacttctcgctacacagtatattgaaaaatatatctaagaaaaattttgaaattgttaaatgtatgaaaaagtaaatcatgatcatgcgttagaagaytcaatattaagatatcagttgtctccaaattgatacataggtttaatgcacttccaatcaaaaccccataggcttttttcaccaggaaattaacaaggtgattctaaaatttatatggaattacaatacacctagaacagccaaaaaaaatcttgaaaaggtagaaccaagacagaaaaattataataaccaatatcaagactcactataaagctacagtaatcaacactttttgtggtgttggtataagaataggaaaaaagatcaattaaacaggaaagataattcataaatagatgtatatatgtgtggtcagttgattttaaacaaaggtgccaaggtaaataactgggtaaaagaaaacctttccaacaagtggttaaaaaaaataaaa

SEQ ID NO: 417076 - DNA, 467 bp, Homo sapiens
gaagctctaggggggaatctgttccatgcctctctctgagcttctggtaggtggtgggcaatccttggcattccttggcttgaagtaacatcattacaatttccgcctccatcatcaratgtccttgcctgtgtgtctctgtgtatctgtcctcttcttatcaggataccagtgattggattcagggtccactctaatccagtaggacctcatgttaacctaattaattacatctgcaaagaccctatttccaaataaggttaggtaccaggggttaagatgtgaacgcctttttgaaaacacaattcaactggctacactggaagaaaaatgtccagcaaaaagcaaatgaataacaatatacagtatatccatacaatgggattactacttagcaataacaaagaacaaactactgacacaaacaacaaacaacatgaaattataccaggtggaaaaagctggaa

SEQ ID NO: 417077 - DNA, 467 bp, Homo sapiens
gaagctctaggggggaatctgttccatgcctctctctgagcttctggtaggtggtgggcaatccttggcattccttggcttgaagtaacatcattacaatttccgcctccatcatcagatgtccttgcctgtgtgtctctgtgtatctgtcctcttcttatcaggataccagtgattggattcagggtccactctaatccagtaggacctcatgttaacctaattaattacatctgcaaagaccctatttccaaataaggttaggtaccargggttaagatgtgaacgcctttttgaaaacacaattcaactggctacactggaagaaaaatgtccagcaaaaagcaaatgaataacaatatacagtatatccatacaatgggattactacttagcaataacaaagaacaaactactgacacaaacaacaaacaacatgaaattataccaggtggaaaaagctggaa

SEQ ID NO: 417078 - DNA, 544 bp, Homo sapiens
gaggcagaacttggttttgccaacctctagcaaaaagtgttggaatcaggatgcctttacattcttaattgctattgagaaccccaaagagtttttgtttatgtagttatatctactgatatttatcattttagatattaatattgacaaaaataaaatattcatttattaatttatttaaagtaactcatccattatacactaatataagtcacatattttataaaatataactagattttccaagacaatgttattttagaaaacagagtgggattgttcttcatttttccaagtctctttagtacctgacttaacaaaggacagctggattctcatgcctgcttctgcattcagtctgttctaatatcacatgttgtacastctctagaaaaccccgctgtttattcatacaagagtaagagtgaaaaagacaaatagcatgttagttacagtatgaaaatagagttttggcttcatggagtcccctaaaatgttacagagagccttagcgtcaccggaagcacattttgagaaccatttc

SEQ ID NO: 417079 - DNA, 584 bp, Homo sapiens
caaggcatctggaaaaagtgcccagaggatgtaatgtgtctcggtgaccaattggcagactgtatcctgttctctcattcttttattccctccagacatcctccgtttcttttcctgccctgaatagtaatgacttcttcatctggcacagccactgaagagggagagtgagggccttcccaggccacaccagccatgccttatttctattggccaaaagagatgatggatgaacggcagatgctgctgtcagcccagctcctttgctcagcctctggagattattgatactcaccggagaccagtcagctgctcagtgaaggtgccctagggtcaacatggatccyaaatccaggaaaatatgccggtatacacatagtcatcaaatcaaaacttgaggttaaatacgccccccaaaatctgcactctcagagaagcagctgtgtaaaatttactcatctccccattccagagactctaagaggtcccagcaccaatgggatattacctctttcctgtcccacttctttattactcacactctatttcacagattcagtgaatgcagtgtttctaagacacac

SEQ ID NO: 417080 - DNA, 614 bp, Homo sapiens
tgttgggattgttgacagccaacaactcccagctaagttattctttgggccttgcctcagctgaagagagccacctggcccaggatcgtattggggtcatctttgctagccagtcagctggtgattcagctccaaaatctcattttagggcctgctctctccatttctggcaagaagactctgaggcagatatttgcattcaggaaattactggggaggcctcttggggtcaatgcctttaggagagtgagggaagagggactgcacagagaaacaaagtgaggagggaygaagttgtaacaaagacctcagcaaattctagaggagctctggagctaggatagcccttcacaattgttccaagttttggaggaggagctgtgtcttttacactctttaattgaccaatgtaggataccgccaaagctataaggcatgcactggtgagaggttcaccagcattaaagataagtcaattatggcagtactttgtaggccaacatgaacagtagaagatgctgtatcagaatgatacagtgaagacaataggatgccaaaatgatagaagccaggtggtagcacttagccatcagaaataaggtgagtgtagttat

SEQ ID NO: 417081 - DNA, 614 bp, Homo sapiens
tgttgggattgttgacagccaacaactcccagctaagttattctttgggccttgcctcagctgaagagagccacctggcccaggatcgtattggggtcatctttgctagccagtcagctggtgattcagctccaaaatctcattttagggcctgctctctccatttctggcaagaagactctgaggcagatatttgcattcaggaaattactggggaggcctcttggggtcaatgcctttaggagagtgagggaagagggactgcacagagaaacaaagtgaggagggatgaagttgtaacaaagacctcagcaaattctagaggagctctggagctaggatagcccttcacaattgttccaagttttggaggaggagctgtgtcttttacactctttaattgaccaatgtaggataccrccaaagctataaggcatgcactggtgagaggttcaccagcattaaagataagtcaattatggcagtactttgtaggccaacatgaacagtagaagatgctgtatcagaatgatacagtgaagacaataggatgccaaaatgatagaagccaggtggtagcacttagccatcagaaataaggtgagtgtagttat

SEQ ID NO: 417082 - DNA, 579 bp, Homo sapiens
cccttctttcttgttgagagaaccctgatttgacatatacttgttttgggaggtatcctkacttccattattattactaaataataataatgtcttttagtatataagcaattactcccttatcttccctgctaacacttttccatttgcacctgcccctcccatcaccacatgcacatgtctcaatccactacctgttcttatgtgtgtatttcagagctcctgctctgctatgatagcagagataatgcaaatcccagtacaaagtcagaggaccatctagcccagttcttgatcatgagtctatggctttttcctcctgcttgttcagggcaaaagctttaataaagatatagtcagggcagcaagtcaacagcaatcatttcactctccttgtaggcatgagagccccagaaaagccaagcctttcagtaagtgagcccagctcaggacttttagtcttattcccctgtaggagcccaaagccttatggccatcttccaacccagagcccagcaagcccatggtaccaactctgcttatcactttgtgtcttttggttatggtttgaatgtgttc

SEQ ID NO: 417083 - DNA, 276 bp, Homo sapiens
ctccttgtaggcatgagagccccagaaaagccaagcctttcagtaagtgagcccagctcaggacttttagtcttattcccctgtaggagcccaaagccttatggccatcttccaacccagagcccagcaagcccatggyaccaactctgcttatcactttgtgtcttttggttatggtttgaatgtgttcatgtatgttggaaacttaatccccaaagcaacagtgttgagagatatggaactctcaaaggtgattaggtcatgagggctctgcac

SEQ ID NO: 417084 - DNA, 561 bp, Homo sapiens
caccagcactgatttctacaaagcagagattcacattattaggtaactgcaatctggccacagacaagctggtataaaaatgcctcacctcagcagcagccccagtcagggcgttatagataaaactcccaactccctgggacagagcacctgggggaaggggcagctgtgggcatagcttcagcagacttaaacgttcttgcctgccagctctgaagagagtagcagatctcccagcacagtgytcgagatccgctaagggacagactgccccctcatgtgggtccctaactcccatgcctcctgactgggagacacctcccagcaagagtcgacagacttcatacaggagagctcacctggtgtctggcgggtgccctctgtgtatgaagcttccagaggagagggcaggcagcaaactttcctgttctgcagcctctgctggtgatacctgggcaaacagggtctggagtagacctccagcaaactccagtagaccagcagcagagggacctgaatgttagaaggaaaactaacaagcagaaagcaatagcatcaaca

SEQ ID NO: 417085 - DNA, 552 bp, Homo sapiens
tatagcagcacccaactctctgtggtaccagtttactatattagtctgttctcctgctgctataaagaactgtccaagactgggtactttagaaaggaaagaggtttaattgactcacagttctgcagggctgaggaagcctcaggaaacatacaatcatggcagaaggggaagtaaacacatcatttttcacgtggtgacaggaaggagaaaaatgagaactgagcaaagggtaaagccccttataaaaccatcagaycttgcgagaacttacttgctatcatgagaacagcatgggggaaactgcccttatgattcaattacttcccaccgggtccctccatggcatgtgaggattatgggaactacaattcaagatgagattcaggtagggacacagccaaaccatattagtgtaagaaactatggtgcagaggccttgacagaggatctctcactcatgcatttgctttcagggtatcacaacctttaaatagatttttggttttaagactagccattactaaatggatccatagtaaaaatcttaca

SEQ ID NO: 417086 - DNA, 369 bp, Homo sapiens
ttttaaaagaagtatttgaacaaggaagaacaaacatcataagccctgttctctatgtttcttaccaatatctgtctgtcagcgacctattgtcagtttctgagtgtagagaagaaactgcctgaggtaaaaacgggatttcacactccacaaagcaaggtggaatactactaatacagcaccttcaggcagtgcttctaaagatatcaggaaattccataaaaaagctggtacaatgggaaaaaagtcatttgatactagagggaaaaaatccaatcacttatacmttgggtataacagattatacattgggtaaaatactcttagaagaagaaaacgtgaaatagggttgtaccggtaaaaataaat

SEQ ID NO: 417087 - DNA, 573 bp, Homo sapiens
ggtcatcataaagcaaatgatcactgtctagtgtggagaattcaaaatgggattattagtttaatgagcacaaaaatgaaagaaaattttcatagatataatttgaaaaagtaattgttattcatttcaactggcctgtaccagggataaaagtcatgttgaaaattcacattgatttcatgtacttttaagctactagagaagaaaacaagaatatcacaattaattagtatttccttggttctgaattatgygaagaatgagaaaataaatttagggatcaatttttaaagttttaaaggggaagcctaagataatgacactaacgttgctggtgaagaaaaacgtgtagaaaccagaatcttagctgaaaaccagaaaacattctttccgccaggtacaatgcatactttgaatttgttactaggagacataaactctactgtgaagataataaatctggggaataattttaacaactacgtacaatattttctggatctgctcaaagatagaacatcttgattaaaagaatgtgacttttaaaccactctcaaacacatgacaggaatt

SEQ ID NO: 417088 - DNA, 585 bp, Homo sapiens
acacctaagcagctaggtttagagctgagtttgacctcatagctgggctcagggcagatatatttttaaaatcagactccaagggtaaagggcacccaagtccagatagagcctgactgttccttgcctgagaatccagggcagaagcacaggatacaggataaacatcctcctgatgaaataggagcggggggcaaccccctacccctacaaaatccactccctgmaactaggaatgtgtgaaggaaagcaacaggaatgtaaaggaagaaatgccacaaaaagtttgaaataattacatttagtaatgaattgtgtggggtaaaaatctggggtaacatgactggggaaacacggatcattttaataaatgcaagttgatttttttttttattatccctatatcagtttttaaacagatcttctctttaataacgaaagaccagtggattacgagtatttccacccccatcatctccacacacattgaggaaatgataaaaaggagcagacagaagaaagttaagatcctggctgtgaggtggggtaaatcggtatgtctcatagtgattttaaaaagcaggc

SEQ ID NO: 417089 - DNA, 585 bp, Homo sapiens
acacctaagcagctaggtttagagctgagtttgacctcatagctgggctcagggcagatatatttttaaaatcagactccaagggtaaagggcacccaagtccagatagagcctgactgttccttgcctgagaatccagggcagaagcacaggatacaggataaacatcctcctgatgaaataggagcggggggcaaccccctacccctacaaaatccactccctgcaactaggaatgtgtgaaggaaagcaacaggaatgtaaaggaagaaatgccacaaaaagtttgaaataattacatttagtaatgaattgtgtggggtaaaaatctggggtaacatgactggggaaacacggatcattttaataaatgcaagttgatttttttttttattatccctatatcagtttttaaacagatcttctctttaataacgaaagaccagtggattacgagtatttccacccccatcatctccacacacattgaggaaatgataaaaaggagcagacagaagaaagttaagatcctggctgtgaggtggggtaaatcggyatgtctcatagtgattttaaaaagcaggc

SEQ ID NO: 417090 - DNA, 495 bp, Homo sapiens
cggggtcctttaaagttttggcaactttggggacaaggactcgttggcgctaagaagaagcatactaggacccgtacacagagaggtcttttgctgcctattcagccggtaataccagctgcgatggtatgtttcattttggagagctggaagtatatgcactccaactataaaaccttcacccctttctctctccggccctccctgagaggtctgctggcttcgccctccttcctgcgaccctacccatccttctcaagcctaccccccaccaagctctctggaaagggggtgtaacagtggagtcttcmgttctataagtttaggaatgcattgagacaaggctatctccatggctgggtcaggtgacggaaggggcattacgggaatagaggcgggccagacttggggggaccaagggaacaggttgggagcattaagagtctagactcaagaaagaggcagcatggatttcaaaccctagttattccccag

SEQ ID NO: 417091 - DNA, 564 bp, Homo sapiens
caacacctcctgttcccccattccaatccatagacatttcattcatttatttattacataaatatttaatgtgctcctctgggtcagacaccatgctagatcaatagagaggcaagagccccaggccctggctctgaggcactgagtccagtctgttccagttagtcatggacataaggtccctggagaacaggcaccttggcatctctgggggtatcagggcaagcttcctaaggaaggcagattagggcaaatcttgaatggccttctcaggtctccttttttttcttcactcagataacttttgaatatttttcctttcactgaaagaataaaaaattaccttttttcccctccaacttgtctatgtagaagagaatgttatgtgagtagttgtaaatacttcaccattgaggtttgcatgaggtcattaataatgtcccaactgccaaatttaaaggwcttttgtaagtgatattttttgacatcgattatatgaattatctgacatggtgtaccatcatctgaaaacccctcctcttgcctgcaatggcactagatttt

SEQ ID NO: 417092 - DNA, 556 bp, Homo sapiens
ttacaatggttgggagtttctatttgttcctgactgtcactgtttaaaactgctatcacacatatgccaaagaaatgattatgcatctattagtgactttttgtaaggacaagcaaaacaatgcctgtcttaktctcatcacctttctcccaaagtcatgctttcagaataatctctgagagtcttactattaagaattcttcattggtttgacctgtgagagaggtacttattcaaaaagcacagtggatttagttcctgccttgataagtaaaattttagttattaatagcaagaatttgccctggatcaatagcatcaaagaatagtaaggaatagcaatattaacagcttcttacaaaccttccttctttttttctggtatatgtaaatgttctctctctctttctttctccctctccgtctctccacaaacagatgcttctcaccttagataaggttataacccaacagactcattataagttcaaaatatcctaacttgaaaatgcatataataaacagaacactatagcttggcctagcccttatacat

SEQ ID NO: 417093 - DNA, 565 bp, Homo sapiens
ggggttggtgggtggaagcggcggaagcaagctccactagcatgtccaaccaatgcatggaaaccctgcttttgtccttgctcaccttccagtagctacctcctattcccagtacccggtcactttgacatttttaaattttacgatggctatagtactagaagacctttttatttatttatttatttgcaatttccagagaaaatcatgacaacctctccaagtccaacaaggcccaacagaaagttattttcggaaagattacaggaagaacgattttgcgtatctcagacgaagaaatygaagagaacattattctagttgcctaaggctgctttacattcacattactcaatctcctcttacttgaaacaattttaaaaatctcactgaagctaagcgagggtatggactgcacaggagttcgaaggaacacaaggaattgggtcagtgagcatcaatctagaatttaggaaggaaaccattttattccccctaaatccacagtgaagggagaaaaacaaacatcccagagttttaaaacacgtcccaaagattggagaat

SEQ ID NO: 417094 - DNA, 589 bp, Homo sapiens
ggttggtgggtggaagcggcggaagcaagctccactagcatgtccaaccaatgcatggaaaccctgcttttgtccttgctcaccttccagtagctacctcctattcccagtacccggtcactttgacatttttaaattttacgatggctatagtactagaagacctttttatttatttatttatttgcaatttccagagaaaatcatgacaacctctccaagtccaacaaggcccaacagaaagttattttcggaaagattacaggaagaacgattttgcgtatctcagacgaagaaattgaagagaacattattctagttgcctaaggctgctttacattcacattactcaatctcctcttacttgaaacaattttaaaaatctcactgaagctaagcgagggtatggactgcacaggagttcgaaggaacacaaggaattgggtcagtgagcatcaatctagaatttaggaaggaaaccattttattccccctaaatccacagtgaaggragaaaaacaaacatcccagagttttaaaacacgtcccaaagattggagaatgtttcgtcttttctctatgtctgaaa

SEQ ID NO: 417095 - DNA, 441 bp, Homo sapiens
tgggcaaagctaggtcagaaaaatcaagtgctttcaacttgtgaagtttggaatacgtattagacatttaattacagaattcaggaatttagaaagatatctaggctggagatggagatgtacatttgggagttgtgtggatggtgtttagtcctgagaccagataagatcacctcaggaatgaatatagatagggaagraaaaagacctgagaactaaaccatggaatattccaaaatttaaaggtcaggaagatgaagagaaacaagcaaaaaggtcagaagagcagtagctgagaaaataggagaaaacctgagcgagtggtgtcctagaaggcaagtgaagaatttcaagaaataaaggaatgaactaatgtgtcaactgctgcccatgggtcgaagaggatgaagatggaggacagaccaagggcatgacaacacg

SEQ ID NO: 417096 - DNA, 441 bp, Homo sapiens
tgggcaaagctaggtcagaaaaatcaagtgctttcaacttgtgaagtttggaatacgtattagacatttaattacagaattcaggaatttagaaagatatctaggctggagatggagatgtacatttgggagttgtgtggatggtgtttagtcctgagaccagataagatcacctcaggaatgaatatagatagggaaggaaaaagacctgagaactaaaccatggaatattccaaaatttaaaggtcaggaagatgaagagaaacaagcaaaaaggtcagaagagcagtagctragaaaataggagaaaacctgagcgagtggtgtcctagaaggcaagtgaagaatttcaagaaataaaggaatgaactaatgtgtcaactgctgcccatgggtcgaagaggatgaagatggaggacagaccaagggcatgacaacacg

SEQ ID NO: 417097 - DNA, 441 bp, Homo sapiens
tgggcaaagctaggtcagaaaaatcaagtgctttcaacttgtgaagtttggaatacgtattagacatttaattacagaattcaggaatttagaaagatatctaggctggagatggagatgtacatttgggagttgtgtggatggtgtttagtcctgagaccagataagatcacctcaggaatgaatatagatagggaaggaaaaagacctgagaactaaaccatggaatattccaaaatttaaaggtcaggaagatgaagagaaacaagcaaaaaggtcagaagagcagtagctgagaaaataggagaaaacctgagcgagtggtgtcctagaaggcaagtgaagaatttcargaaataaaggaatgaactaatgtgtcaactgctgcccatgggtcgaagaggatgaagatggaggacagaccaagggcatgacaacacg

SEQ ID NO: 417098 - DNA, 566 bp, Homo sapiens
gacagaccaagggcatgacaacacggaggtcatgatggccttgagaactgtgtgtagaggaatgtggatgtaaactgattggagtgggtttgagagaagcaggaggagagaaagcaaggatgacaagtataaagaactctttgaagcatcttagttgtctagggggaaaaaatcctttgcctccttgaacatatagaatacaattataataaatgaatgttttaacatcctgtaattactaattcaatcatctgtgtcacttcttggtcaatttcaattgattgatttttctctttattatgtgtagtatttgcctgcttcgttgcatgcatggtaatttttaatgggatgtaatacataaatttttccttttgaggaactagaaatttctgtattcctataratgttcttgaacttttctctgaggcacagataagttgttagttatttgatccttttgaagcttgcctttaagctttgtgatgcaggaccaaagtagtctttaatctagctttgcttagaatactgctgaggcaaatccctgaattatgagattttctgattct

SEQ ID NO: 417099 - DNA, 434 bp, Homo sapiens
gacttgaaactcaaattgaaataatctagaagaccagccaacctgccctctcttggtcaacctggtaagcagccatagataggctggcaaagatggctttccctttctctcctggccaaaagcttcctggaggagaacttgttgtctcatcgtccctttgaggtagattccaaatatctatcaggagtccccttactgttatcatatacgaaatcttctgctatcgtccagaacagcatgcattcccaacattcaagcttcattcaaatccttgttgtttttggcctgatttcttgaagctccctaaggctgagggttactgctaagtgctgccttatccaattatcaatcctgtacagcctcatgacattttgtagctgaaacagaccttagatatcayttccttgaacctgctcattactctgtcacccctc

SEQ ID NO: 417100 - DNA, 583 bp, Homo sapiens
taagtgctgggaagacagcagtgaataaaacagacacagtatgagccactctcaagaaacacacccgtctagagtaggagatagtcatggggaaaagcaattgcaatgcaacataataggagcacatacacagactagccttagaaaatctggacgcgtcgctggaggtgacaccaaaaccaagacctgaagcacaaccaggagagtgccaaattttacagtaaattccctcacaccagagaactgagtgcattggtgaacacaattttctgrttaactgaaataactcaagtatctgacctacacattttctatttcctcccataatctaaccttatttgcacttctctctagattaccttttgcaatctccaatcagtgaccatgctgctaccccacagacttattccctcatgctctgcacctttgctcagctccttcagttgccttttctccatgccctccaccttgttaaatctgacttacactgtgcctattatgcatctcagcagagtttgctcaggagagaactgagatgcagagaggtttagcaactagtctgaggtgacagacaaaattcaaa

SEQ ID NO: 417101 - DNA, 633 bp, Homo sapiens
agatgtttgtcaccaaaagaaaacaagagaagtggtgtctggggcaaggagtccagacagacacgtttctttgatgtttgttcacttattttttggttttagttaatgagaacatgaccatawttgtcaggtggaaagaagagtcccatagttctggagatacttttattgatgtaaaatgcaaagggaataagcagcagagcaagatcccaggagaagcagaaaggcacgagattaaggaggctaatagggaagtagagtaatgcctcttttccagggactagaagtcaagagcaaaaaaatgggtgaagatgatgagaaatattagagagaagaaagtccctcacttacaatggtagagaaggctcaattcacctctagagtcaaaggttgatgcccaggctcagagagctcacagaccacgagatactttagaatcaagactcagcagaatgtgtgaaggagtgtaaaagagagggacaaagtactgtgcagcagcatggaagaccccatgacagaccatgtatttaacacactttcatttaagctctgggatttgctttgtgacttaactctgtgaattgtcagcagcctgcaaacaaaagagaataaaaatatccaaaattacaatgc

SEQ ID NO: 417102 - DNA, 633 bp, Homo sapiens
agatgtttgtcaccaaaagaaaacaagagaagtggtgtctggggcaaggagtccagacagacacgtttctttgatgtttgttcacttattttttggttttagttaatgagaacatgaccataattgtcaggtggaaagaagagtcccatagttctggagatacttttattgatgtaaaatgcaaagggaataagcagcagagcaagatcccaggagaagcagaaaggcacgagattaaggaggctaatarggaagtagagtaatgcctcttttccagggactagaagtcaagagcaaaaaaatgggtgaagatgatgagaaatattagagagaagaaagtccctcacttacaatggtagagaaggctcaattcacctctagagtcaaaggttgatgcccaggctcagagagctcacagaccacgagatactttagaatcaagactcagcagaatgtgtgaaggagtgtaaaagagagggacaaagtactgtgcagcagcatggaagaccccatgacagaccatgtatttaacacactttcatttaagctctgggatttgctttgtgacttaactctgtgaattgtcagcagcctgcaaacaaaagagaataaaaatatccaaaattacaatgc

SEQ ID NO: 417103 - DNA, 566 bp, Homo sapiens
aatggtagagaaggctcaattcacctctagagtcaaaggttgatgcccaggctcagagagctcacagaccacgagatactttagaatcaagactcagcagaatgtgtgaaggagtgtaaaagagagggacaaagtactgtgcagcagcayggaagaccccatgacagaccatgtatttaacacactttcatttaagctctgggatttgctttgtgacttaactctgtgaattgtcagcagcctgcaaacaaaagagaataaaaatatccaaaattacaatgcagagctattagcttctgtgtgttgctgtttcccagtgtcctttttagctggtgggaatagcaggtggtcaatgggtcagggaaatcaaaagtgatagcaagagtgttgctgaaattcttagccttgaactccctctggataaggaggtgagtgaggtccaatgcacaggacctgatggccaaacactgtttctgaataatggtaaggggaagaagtaggtgcacataaggtcaagtctctacacttcatccattctagaaatatggggttacaggcacaagaga

SEQ ID NO: 417104 - DNA, 559 bp, Homo sapiens
ggatggattgaggataaatccccagctattagcctggggaatggatggttgatggtggaatcaccagctacagtgaagttcccgggaggaggccaggagagccagcaaggtgtcatatgaatgtgagtgaatacatgagtgaatgaatttttattcctgtttgtataaaattactaagtaataagtcaggaaattccatagatatggtttatttggatcttgacaaactttcaaagcctctaagtcagaccatgtctgaagattctcacagggttctggggagtaatcactaaggaagcccattcagaagaggatgactagagtgctgaaagacgatgtgaagatcatataactgtgggtacttaagacagagtatgtaaaacataaggaagaaaaaagggccaccttcaaaatagaggtgggggctgttctcaatttctctggcacatatwgctctgtccttctcgttcataggcaaaacactagactgtctagtaatacaatacaacacagactgggccatatttgctggaaggtaacaacactgtagtgttaaggg

SEQ ID NO: 417105 - DNA, 570 bp, Homo sapiens
tcttctccattctgctattgagcctatccagtgagattattattattttttaatttggtcattggttcttcatgtctcctattttatttttttcttgcaaaagatatactttgtcatttgtttcaagcatgcttgtaaattacttaatacaatatttttataatggctgctttaaaatccttgtcagagattttcagcayctatgtcatctggtgaattattgactatattttcttatttaagttgcaatttgtctggttcttgttatgacatcaaagtgattttttttaccgtaccggtgcattttgggtatttcattatgagaccatggatcttagttaaatcttttgttttagttggcgtcctctaaaggaaggcgttacgtcattactgacaaatggtagtagagtccagggtccctcttcaacctcttgtgacacctcagttggggagggatttctcattattgttaggcagagttggaagttctggctctccattaagtcttcactgataccatgctggctgggaagggcagaagtgctttattactgcttcttactagcttcc

SEQ ID NO: 417106 - DNA, 574 bp, Homo sapiens
ttgttcaatatgaggacaaatctaaatgacaactgtctgtataaaacactatctgaatgttgactatatgaaatgataatgtcctggtgatttaaaatatatataaaattaaggcagattgttgggaggtgggtaaatggcaacaaagtgttttattaacttttccttgtttaggaacagggcaaaaataccagctaccatcatattctagtgagtagcagattataatctctttgttcactactaaaatacagtaaagaaagccttttcttggtgagggggaggggaaaggagagtgaacaagatcaatctagatgaagggaagaaaggagaggaaaatgttacrttacaaaagctggtggggaaaaatggaagtcatggtaaattatagtagatttagtctctgttatattagtaattatattacaggtaaatcggcccaattctataattaaaatgtagagatcagttgggtaaaatgaaagcaaccctatatgtgctgtttgtaagaaatgcctcaaaaatgtaagaatccttaaattacaagcaaaattatttaaaaaattaataccac

SEQ ID NO: 417107 - DNA, 609 bp, Homo sapiens
aaaaaatgctattatttagactacagatcactatcactgtaaaattccacaagactctactataaaactattattaactttagaaccagtgattactttcctcaagccaacaataatgcagactaaattagtatttcagtaaaattgaaagttgggctacccaagataaaacttcaatgggggcaccaataaatatgcaaatggtttccaaattttcagcatttatttaaatcctttcagaactactattattttactttgatagttatttgatagcaaataatagaaattcaatttagctatatataaattccaaagagaagaaaatgttttagtcatcataattttgtgcagactatcttaaaatcacrtgagtcatagaacccatcaaacttccagaaatagagccatagaaaagaatagtatcaaaataaattaaattcacttttatacagcttgattcattagctcagtcatatcagcataacttttgcctattaaaactcaacaaattaatttttttcagtttatcccacaactttgtaatactcagcttttttaatctacatatgtgcaatgagaaattagtaatgaacatatttgttgagt

SEQ ID NO: 417108 - DNA, 583 bp, Homo sapiens
tgtgcttttgtggtgaggacttcagtgtgtgtggtctggagaatggagcagatgggcactcgtgggacaggcaaatcccttcaatggtagataagaactttgtggactttccctgctaaggttttgagaaatgccattgctctagaactctagtctctacaaggcctcatgctagtacactcttgccgagtctgtcctgcagactctggctgagcaacaggtgaaagaagtacacagacacaggtattttgcctgagagtgcggctaggggactgcatggcctagcactgccaagcactgccaactagagtgyagccccgataagccggagctgtttgtacttatttagtacagctttaatgacaaaggcctgaagccaacacaacctgtggataattaacattgtcctccccgcttgcagggagcagtcttgcatgcagatgatcaaaggttgttttccagacaacataagtaaataaacttatctagataaactcccttacgtttgcttgcacctacttcttgccctctgcttcagggtaatagaattaactgccttcagcttttattctctcctgaagct

SEQ ID NO: 417109 - DNA, 610 bp, Homo sapiens
ttgtcctccccgcttgcagggagcagtcttgcatgcagatgatcaaaggttgttttccagacaacataagtaaataaacttatctagataaactcccttacgtttgcttgcacctacttcttgccctctgcttcagggtaatagaattaactgccttcagcttttattctctcctgaagctttgcaaaacctcckggccttccaagaaggtttgcatttttccttataacttttgccaccaccctgaccaatctcctacacactcttcttgtattctatgagatttgccattcctcattttttctttttattctaaaataactccacttcttacttaagataaactgagtgaacctagcaaaaacatctatgattaaataagtatttaacttttatgtatctatattgggatggagaatttggctttggtaatggaataaattgtcaggcaaacctatcagcctagtctgtagagatatttttgcaaaataagatgcttgtgctcaggtattcaattgtaacttgcttctttcactcctccctaattgctaacttctttgcctgttaaatttgtgattatattttaacaaaaaagtaaatagtgaaatta

SEQ ID NO: 417110 - DNA, 610 bp, Homo sapiens
ttgtcctccccgcttgcagggagcagtcttgcatgcagatgatcaaaggttgttttccagacaacataagtaaataaacttatctagataaactcccttacgtttgcttgcacctacttcttgccctctgcttcagggtaatagaattaactgccttcagcttttattctctcctgaagctttgcaaaacctccgggccttccaagaaggtttgcatttttccttataacttttgccaccaccctgaccaatctcctacacactcttcttgtattctatgagatttgccattcctcattttttctttttattctaaaataactccacttcttacttaagataaactgartgaacctagcaaaaacatctatgattaaataagtatttaacttttatgtatctatattgggatggagaatttggctttggtaatggaataaattgtcaggcaaacctatcagcctagtctgtagagatatttttgcaaaataagatgcttgtgctcaggtattcaattgtaacttgcttctttcactcctccctaattgctaacttctttgcctgttaaatttgtgattatattttaacaaaaaagtaaatagtgaaatta

SEQ ID NO: 417111 - DNA, 610 bp, Homo sapiens
ttgtcctccccgcttgcagggagcagtcttgcatgcagatgatcaaaggttgttttccagacaacataagtaaataaacttatctagataaactcccttacgtttgcttgcacctacttcttgccctctgcttcagggtaatagaattaactgccttcagcttttattctctcctgaagctttgcaaaacctccgggccttccaagaaggtttgcatttttccttataacttttgccaccaccctgaccaatctcctacacactcttcttgtattctatgagatttgccattcctcattttttctttttattctaaaataactccacttcttacttaagataaactgagtgaacctagcaaaaacatctakgattaaataagtatttaacttttatgtatctatattgggatggagaatttggctttggtaatggaataaattgtcaggcaaacctatcagcctagtctgtagagatatttttgcaaaataagatgcttgtgctcaggtattcaattgtaacttgcttctttcactcctccctaattgctaacttctttgcctgttaaatttgtgattatattttaacaaaaaagtaaatagtgaaatta

SEQ ID NO: 417112 - DNA, 610 bp, Homo sapiens
ttgtcctccccgcttgcagggagcagtcttgcatgcagatgatcaaaggttgttttccagacaacataagtaaataaacttatctagataaactcccttacgtttgcttgcacctacttcttgccctctgcttcagggtaatagaattaactgccttcagcttttattctctcctgaagctttgcaaaacctccgggccttccaagaaggtttgcatttttccttataacttttgccaccaccctgaccaatctcctacacactcttcttgtattctatgagatttgccattcctcattttttctttttattctaaaataactccacttcttacttaagataaactgagtgaacctagcaaaaacatctatgattaaataagtatttaacttttatgtatctatattgggatggagaatttggctttggtaatggaataaattgtcaggcaaacctatcagcctagtctgtagagatatttttgcaaaataagatgcttgtgctcaggtattcaattgtaacttgcttctttcactmctccctaattgctaacttctttgcctgttaaatttgtgattatattttaacaaaaaagtaaatagtgaaatta

SEQ ID NO: 417113 - DNA, 534 bp, Homo sapiens
aatcattcaagtaacatttattatgtgttaagtacagttctaagcactttgtaaacgttaacccatttaatctttgtaaaaattgtgtgagataagtactaccagtattcctatttcacatgggagaaaattgaagcacagagaattttagtaatttgctcaacatcacagttaataagttagaggacctatgatttcaaccccggggctggtaccaaatagtagtaaccaccactaaagctataggctacttctcctgggttgaaggatgcttggcattttatgtgcacagtgtttgcagaytttatacccaaagtttttgtcttctgagtagccaacattaggactgctgaagacagaagggagaccaaggtgatcccaactagggagggagtaggggttagagtgtggagatgggcgagaatgtgccctgtgaaggcacaaaacagggaagatgagagaaaaccaggaaacatgcctgagtgaggacccactcctaccgattttagtgagagatgcacttcatgacctgac

SEQ ID NO: 417114 - DNA, 533 bp, Homo sapiens
gagttatataaaactataaatcagtggcactgaaaggttaactaagtagctcaacatcacacatctgtcaggtggggaaaccagaatccaactctgatctctgagatgcagaaacctgattttgaaatccaatgctcttccacctccctaacrttgttgaggttattgaatgccaggctggagaatttctacttacctgggagaacactgagtaaccatggaagttcctgagacaactgaggtacaacagagaagcctcaggttggtgacactaacaagaaaaaagagaatgtttacactgtaagcaaagcctggtttggaaatatcagaggagctcagccatccaaggccctgcttagatgctcctagtacatcgatagtcaatgcatggtaactggttggggagctctaaaattgaaattcaggttccaattcagtaatcagacaaaccttggtcagagtcctggccccattattaggttttttggagctgaatgagttacctccattctctgagcctcaggcatgttatt

SEQ ID NO: 417115 - DNA, 533 bp, Homo sapiens
gagttatataaaactataaatcagtggcactgaaaggttaactaagtagctcaacatcacacatctgtcaggtggggaaaccagaatccaactctgatctctgagatgcagaaacctgattttgaaatccaatgctcttccacctccctaacgttgttgaggttattgaatgccaggctggagaatttctacttacctgggagaacactgagtaaccatggaagttcctgagacaactgaggtacaacagagaagcctcaggttggtgacactaacaagaaaaaagagaatgtttacactgtaagcaaagcctggtttggaaatatcagaggagctcagccatccaaggccctgcttagatgctcctagtacatsgatagtcaatgcatggtaactggttggggagctctaaaattgaaattcaggttccaattcagtaatcagacaaaccttggtcagagtcctggccccattattaggttttttggagctgaatgagttacctccattctctgagcctcaggcatgttatt

SEQ ID NO: 417116 - DNA, 636 bp, Homo sapiens
ggcatgttatttgtagcaattcaagttaattcacagggttgttataaagaytaggagagctaacaggttgaaataactttgccttttgcctgacatgctcagtgtacattagctggtatcagggaagcctggaactatatcttgggcacatgtggtctgacccttttttaaggtcccacaaaatttagcctcttcaccagcttccacaaaaaaattcaagcatatcaagcatgttgttgctttattgaagatttgtggggctaatatacagagtgaatatggaggtacattcttggtaatgtatgtcctcataagacctgcttctcaaaccctttcttactctgctgtcagagttttataagaccaacagatgaaaaacagtggtagtagggccacagtgggaatatactctggcatgtgtggaacaagacctgctttcctcctgcttttgaagatgttctaatggaagtcccactgaggaccaagttcatgggtgctgctgttgcattttggtatgagcaggaatatacaaaaggcagaaaggacatgtttactaaaaggcaagctcatagagtaatctggaaattaagggagccagctgcacatgccttggatttttacctgttataaaatatt

SEQ ID NO: 417117 - DNA, 590 bp, Homo sapiens
tttcagtttttctcttctcttttattctgaatattgcaaatggttagaaaaaccaaacttgcatttayattgctctttttatcggcagatttctcagagctttaaaagcatttattaatatttatgatagcatttcaacctacaaaaattatccacattaaagctccttgaagacacatatactacaatggttttacaatatgcagcaaaaatttcaaatataaattggatgttttgattaaacccaataaactgactaatggtgaattcctacaggaaaaacccatcattctaaactcaacaacaacaacatcttttgaaagcataggtgaatttagaaggctgctctttcaaaactcaaggatttgaaatacttgcaaaagaacaggataacatttgctcagctatttctaacttcttgagaaatgtaattgaatctttagccctacattttttcctaatctatgtatataaagctataaatttttctttaagcacaagattttactataccctgcaaattttgatatgctatattttagttatttttacttcaaaaatattttttaatttccactttagtttttttc

SEQ ID NO: 417118 - DNA, 590 bp, Homo sapiens
tttcagtttttctcttctcttttattctgaatattgcaaatggttagaaaaaccaaacttgcatttacattgctctttttatcggcagatttctcagagctttaaaagcatttattaatatttatgatagcatttcaacctacaaaaattatccacattaaagctccttgaagacacatatactacaayggttttacaatatgcagcaaaaatttcaaatataaattggatgttttgattaaacccaataaactgactaatggtgaattcctacaggaaaaacccatcattctaaactcaacaacaacaacatcttttgaaagcataggtgaatttagaaggctgctctttcaaaactcaaggatttgaaatacttgcaaaagaacaggataacatttgctcagctatttctaacttcttgagaaatgtaattgaatctttagccctacattttttcctaatctatgtatataaagctataaatttttctttaagcacaagattttactataccctgcaaattttgatatgctatattttagttatttttacttcaaaaatattttttaatttccactttagtttttttc

SEQ ID NO: 417119 - DNA, 629 bp, Homo sapiens
aagtagttggaatctcacagaagagaacaaagagagtggggcagagaatgtttttagaagcagaaaactttccaaatttggtgaaagacataaatttacagatttcaagaagctccacaaattccaaatatgataartatgaagaaactcatagcaaggatgctataccacacacttctgaataatccacaggtcaaagaagtcagactctccggtctgacatgtaaagggcctggaagtcgtcactcccatcctcacagcagcgacaccggcaaggagaacaaactgcaagtcccagctctgcttagacccctcagagagctgagatcacaggacacactgctgcccccaaactgcagaggcagacaggcaaatgcagagaatcgcagtttaccaggaacagaagatgatgccagagcctgcaactgataggttatgcctggcttttaagaaaaaatactggagtcccctccttatcctcaggggacacatgctgagacctcagtggatgcctgaagccttgaataatacccaaccttatctatattgtttttccctttacacatgtacctatggtcaagtttaattgataagttaggcagagtaaggttaacaataaaacagaacaa

SEQ ID NO: 417120 - DNA, 629 bp, Homo sapiens
aagtagttggaatctcacagaagagaacaaagagagtggggcagagaatgtttttagaagcagaaaactttccaaatttggtgaaagacataaatttacagatttcaagaagctccacaaattccaaatatgataaatatgaagaaactcatagcaaggatgctataccacacacttctgaataatccacaggtcaaagaagtcagactctccggtctgacatgtaaagggcctggaagtcgtcactcccatcctcacagcagcgacaccggcaaggagaacaaactgcaagtcccagctctgcttagacccmtcagagagctgagatcacaggacacactgctgcccccaaactgcagaggcagacaggcaaatgcagagaatcgcagtttaccaggaacagaagatgatgccagagcctgcaactgataggttatgcctggcttttaagaaaaaatactggagtcccctccttatcctcaggggacacatgctgagacctcagtggatgcctgaagccttgaataatacccaaccttatctatattgtttttccctttacacatgtacctatggtcaagtttaattgataagttaggcagagtaaggttaacaataaaacagaacaa

SEQ ID NO: 417121 - DNA, 564 bp, Homo sapiens
acacatttaggaaatatttgaaataagaagtagggaaaggagggacttctgaacaaataaaaaatgatctagaaagcaaacctgcaatccagcatgggaatttttatacaggcaaactaaaaaatagggccatygaggttttttaaaatacaagagggagcaaggaataacaacaatcttatgccagtgaggtattatcttgaatggaaaaaagcaattgtgataaataaattattagttaaagatatgaaacaataatagggtcagctgtagaacacgttaaaattcagaaatctatagaatgatcctttacatgtattctgcttctgttgagttcagatcaaaatctacagccttcattaaattaatgtcttatttttaaaatattctccatggcaccatggagaattaaattaggcattaaattaatgccttatttttaaaatattctccatggtgcctgaataagacagaggagtaagtctaaattgggcccttatgccatacatatttatttcattaaagtaggagaatctgaaataaaatttaaattacaaatatgga

SEQ ID NO: 417122 - DNA, 564 bp, Homo sapiens
acacatttaggaaatatttgaaataagaagtagggaaaggagggacttctgaacaaataaaaaatgatctagaaagcaaacctgcaatccagcatgggaatttttatacaggcaaactaaaaaatagggccattgaggttttttaaaatacaagagggagcaaggaataacaacaatcttatgccagtgaggtattatcttgaatggaaaaaagcaattgtgataaataaattattagttaaagatatgaaacaataatagggtcagctgtagaacacgttaaaattcagaaatctatagaatgatcctttacatgtattctgcttctgttgagttcasatcaaaatctacagccttcattaaattaatgtcttatttttaaaatattctccatggcaccatggagaattaaattaggcattaaattaatgccttatttttaaaatattctccatggtgcctgaataagacagaggagtaagtctaaattgggcccttatgccatacatatttatttcattaaagtaggagaatctgaaataaaatttaaattacaaatatgga

SEQ ID NO: 417123 - DNA, 511 bp, Homo sapiens
attgggcgattaagttttgggtgagggatgagtagattttgcgttcataaaggatgtggatcattgtcaaaaagaaagcagacactagttatttacaaagatggtctgaaaatgagccatacttctcaatattcataatacattctgtcccctcccctagaatctgggctggctcagaattttgaccaataaaayggtcaaatgttcctatgtgatttccaaggcttggtattaagaaatcttcagctatacctgggtctcttggaacacactcttggatacacccagtgggaacttaactcaacttctgtacagtgagagactcaagacacatggagagaacatggatatgtattcctattaatacccctaggtgagcttccagctaatagccagaatcaattgcttgccattgagtgaggcttgttggaaacccagttcactggaactttcagatgtccccagcccagctgataacaggttataaccatatcagaaatctcaactcaaa

SEQ ID NO: 417124 - DNA, 511 bp, Homo sapiens
attgggcgattaagttttgggtgagggatgagtagattttgcgttcataaaggatgtggatcattgtcaaaaagaaagcagacactagttatttacaaagatggtctgaaaatgagccatacttctcaatattcataatacattctgtcccctcccctagaatctgggctggctcagaattttgaccaataaaatggtcaaatgttyctatgtgatttccaaggcttggtattaagaaatcttcagctatacctgggtctcttggaacacactcttggatacacccagtgggaacttaactcaacttctgtacagtgagagactcaagacacatggagagaacatggatatgtattcctattaatacccctaggtgagcttccagctaatagccagaatcaattgcttgccattgagtgaggcttgttggaaacccagttcactggaactttcagatgtccccagcccagctgataacaggttataaccatatcagaaatctcaactcaaa

SEQ ID NO: 417125 - DNA, 598 bp, Homo sapiens
gcatttacatcctgtaatcaaatttcaggtgtatttttctactgaacttttctaaattttttctgtcgctcactgatagaaaagtgtggaaagaagagtactctggtggcgggaagataggattatcacccaggatctgataggagtatgatattgatgagaggcaagtcattttattattgtgcttataaaatgagataacatataacatttttataaactattaagatggcagctttatatattaacattattaataatttgagtcagccctgtaatttttgtttcttagtattttcttacaattttcctgttactattcttaaaataratttagtttttccaagaatgcctagtgagtacagaaattttacttttacttcctttaactttatccacattaccaagggtatttctatccatccagtatttattgatgaattacaagtagttcaataggtattatggacgttcactgatatttggaagccatctgacccgttgctgtttatcatcttactttcttttatcagatgctcatagtaaacttggcatgatagttcaattacaagatttcttttaatgaatcaatcaatta

SEQ ID NO: 417126 - DNA, 598 bp, Homo sapiens
gcatttacatcctgtaatcaaatttcaggtgtatttttctactgaacttttctaaattttttctgtcgctcactgatagaaaagtgtggaaagaagagtactctggtggcgggaagataggattatcacccaggatctgataggagtatgatattgatgagaggcaagtcattttattattgtgcttataaaatgagataacatataacatttttataaactattaagatggcagctttatatattaacattattaataatttgagtcagccctgtaatttttgtttcttagtattttcttacaattttcctgttactattcttaaaataaatttagtttttccaagaatgcctagtgagtacagaaattttacttttacttcctttaactttatccacattaccaagggtatttctatccatccagtatttmttgatgaattacaagtagttcaataggtattatggacgttcactgatatttggaagccatctgacccgttgctgtttatcatcttactttcttttatcagatgctcatagtaaacttggcatgatagttcaattacaagatttcttttaatgaatcaatcaatta

SEQ ID NO: 417127 - DNA, 347 bp, Homo sapiens
agatatatgcatcctctcgggtaaactagattccagaatcgaaggcatgagaaaactttctaaatagcctatgaaaacgctccaaaaggtactcarctttaatcttctagggatccacttaggctcactgactttaacaacattccaatcccagagaacatgaagccaaacagctcggtaaaaattgtcctatcctctttacctctttcccttgcctcctagcttcaatcaaaatatttgcagctaaaagaaaagaggagagcaaagagagagcaggtagcagaagcagcatgtctgccgtctccacaccagcttccaaccaactccaaagggaagataaaatttaa

SEQ ID NO: 417128 - DNA, 347 bp, Homo sapiens
agatatatgcatcctctcgggtaaactagattccagaatcgaaggcatgagaaaactttctaaatagcctatgaaaacgctccaaaaggtactcaactttaatcttctagggatccacttaggctcactgactttaacaacattccaatcccagagaacatgaagccaaacagctyggtaaaaattgtcctatcctctttacctctttcccttgcctcctagcttcaatcaaaatatttgcagctaaaagaaaagaggagagcaaagagagagcaggtagcagaagcagcatgtctgccgtctccacaccagcttccaaccaactccaaagggaagataaaatttaa

SEQ ID NO: 417129 - DNA, 570 bp, Homo sapiens
ttgcttgctggccaaatttcagatcaatagagcagctgggcaggagccaagattcagaagcttgcatggtgagagaggctacagatcattaaagatgaacagagccataaaacaccaacacaactggcacaaccaattgcagtgcttttggcaggctctgcacagagtccatggattgaacattccgggaaaytaggacaaccctcttcacacagagagtgggtggagccctctcaacttacttgcaaggtgcactgtgggctcaggcagggaagctcattttgcctctcagggtgattgagcctgtgtgttgcatatagtgcttgagagctgtgtgcttgtccaaaacaattcatttacatagcagcagttaaacacaaaggtctagagtccttttcaaattcatcacacctagaaataattaacaaataacagtttaatattttgaagcagttgttacaaatcatagcttgatacctacatgagtttttaatacatgctactatcaatttactgcaaaaatggcagtttccaggtggaggcatgttatttctcatttgtaaacataaa

SEQ ID NO: 417130 - DNA, 643 bp, Homo sapiens
gttttcttaaaagagcaataagttattttaggtaaccccctcatgcatttgattaaggagaaaaaagagtgaaaactatgcacaatcaggaatgagtaaagaaatacaataatagatttaaagagtagttaccccaaaaaaactacatgcaactataacagtaattataaaatctagatgaaatggatagttccttagtaaaatataaattaccaaaatttaactaaggaaaaatctaaaaccttgaatcaattgtttaccatagaaatgattgaaaatataattaaaaatctattattatataagatattagaatcagatgggttcacagctgaattctacatcactcataaaaaacagataattttaatattatttaaactaacctgcataaagagaagaaaaktttttcatttaattttatgagtctccctaaagttaataccatctgaattatatatatatatatatacacacacacacatagacatacacacacacacacatatatgtataaagactagtggttgctaggggttagaaggaaggagggattaaatggcagggcacagggatatttagggcagtgaaactattctgtataatactatattggtggatacgtgtcatttttaaaaagcaa

SEQ ID NO: 417131 - DNA, 621 bp, Homo sapiens
ttcattttacacactctaggaagtacgcttggcacagtatacttacctaagcccactccctctatcatcttaaccatggatcttgcacacagtatggacttcacaaaggaaaagatgaacatctagattcctgctgcttgtttgcttctctgtgccaacagcttaacttccattatggttttgcttaggccagtcggggaatcatttttggcctctgaggagtctcttaaaaacaattaacaatatcttcatttctctgatattatgcagcttattgtagaacctaattaccaatcattgttgagtcatcrgttctgttattcctattgatacatttctgttagctatccttggatgtactatgttgtcacatctatgcttcccacacttaaaattctctaaaatgctattataatcagggtaaaagttgtccttttaaaacattttctgactcccctcaccattgagcagattttcgtgagactccatgagcttctctgtgagatcacactctacttgtcctaggctgacaagtgacttcacagcaaccatatggtggtaaagccattcatataaaaaagcctttttcatgagctgtaagttggtctgtaaaaatgtgtt

SEQ ID NO: 417132 - DNA, 587 bp, Homo sapiens
aatgtgatatatcatattaatagaatcaagaataaaaaccatatgatgatttcaattgctgccaaaaaaagtatttaataaaatttaacatcaattggtgataaaaacccttatcaaactggatatagaaggaatattcctcaaaataataaaggctgtatatgacaaacccacaactaaaatcatactgaatgcggaaaaaactgaaggaatttcctctaagatctggaaccagtcaatgatgcgtgctttcaccatttttattcaatatagtattagaagtcctggccatagcaattaggcaagagaaagaaataaagggcatccaaaytggaaaggaagaagtcaaattagccttgttaattcatgacatgatcctctacttagagtaatctgaagactccaccaaaaatctgatagaactaataaattcggtaaatttacagaatataagattgacatataaaaattagtagcatagcatttatatacatcaacagtgaacaattgaaaaaagaaatcaagaaagtagtctcatttacaatagctacaaaaatataaaatatctagaaattaatctaaccaaa

SEQ ID NO: 417133 - DNA, 548 bp, Homo sapiens
aacattaattgtgaagatttcatgggcatttatcagttcccaaatacttttataatttcttatgcctgtctttaatctcttaatcctgttatctttgtaggctgaggatgtatgtcacctcagaaccactgtgataattgtgttaactgyacaaattgattgtaaaatgtgtgttttgaacaatatgaaatcagtgcaccttgaaaaagaacagaataacagtgatttttagggaacaagggaagataaccataagatctgactgcctgtggggttgggcaaaaaaagccatatttttcttcttgcagagagcctataaatggacatgtaagtaggagagacattgtgaaattcttttcctagcaaggaatattaatattaataccctgggaaaggaatacattcctgggggggaggtctataaacagccactctgggaatgtctgtcttatgcggttgagataaggactgagatacaccctggtctcctgcagtaccctcaggcttactagggtggggaaaaactctgccctggtaaatttgtggtc

SEQ ID NO: 417134 - DNA, 548 bp, Homo sapiens
aacattaattgtgaagatttcatgggcatttatcagttcccaaatacttttataatttcttatgcctgtctttaatctcttaatcctgttatctttgtaggctgaggatgtatgtcacctcagaaccactgtgataattgtgttaactgcacaaattgattgtaaaatgtgtgttttgaacaatatgaaatcagtgcaccttgaaaaagaacagaataacagtgatttttagggaacaagggaagataaccataagatctgactgcctgtggggttgggcaaaaaaagccatatttttcttcttscagagagcctataaatggacatgtaagtaggagagacattgtgaaattcttttcctagcaaggaatattaatattaataccctgggaaaggaatacattcctgggggggaggtctataaacagccactctgggaatgtctgtcttatgcggttgagataaggactgagatacaccctggtctcctgcagtaccctcaggcttactagggtggggaaaaactctgccctggtaaatttgtggtc

SEQ ID NO: 417135 - DNA, 498 bp, Homo sapiens
ttagttcctgcaagagttggttgttcaaaaggacctggcacctctctcccccttgcttccactttcactatgtgatctccaaaattgccaacagccaaatatgcattatttttaggtccacatacaaacatttaccatgatagccatatttgtgggtaaagayttggaaagacactttaccaaaaaagttatatagtgacaaataactgcatgaaaaaaaaatgctcaacattattagtcattaagaaagtgaaatttaaatcacaatgggatactaccatatacccaacagaaaagctagattttgaagattgaccatatcaagtgtcgataaagagatgggacagatgtatgtaatggaaagcttttggaatgttttaagtaggaaataaatatgatatggttatgtctaaagccattaataaattatagccattgtaacattatcataactataacagatacatgttattcaataatccttttgagtccaacaac

SEQ ID NO: 417136 - DNA, 498 bp, Homo sapiens
ttagttcctgcaagagttggttgttcaaaaggacctggcacctctctcccccttgcttccactttcactatgtgatctccaaaattgccaacagccaaatatgcattatttttaggtccacatacaaacatttaccatgatagccatatttgtgggtaaagacttggaaagacactttaccaaaaaagttatatagtgacaaatarctgcatgaaaaaaaaatgctcaacattattagtcattaagaaagtgaaatttaaatcacaatgggatactaccatatacccaacagaaaagctagattttgaagattgaccatatcaagtgtcgataaagagatgggacagatgtatgtaatggaaagcttttggaatgttttaagtaggaaataaatatgatatggttatgtctaaagccattaataaattatagccattgtaacattatcataactataacagatacatgttattcaataatccttttgagtccaacaac

SEQ ID NO: 417137 - DNA, 442 bp, Homo sapiens
gcttcttttggatgaggaattccaccgtcatactcataacagaatgacagctggttctatcatcctaatgatgatattaaaacatttccagtgatggggacactctacctcagaaggtagctacttgcttggataaatatttctggtttctagaagactttttcttacatttcaacaatcttagttgtccacgtgcaggtaagaaaatgtcaacttaacrgcagtcctttggatttgaaaagaaactacttgagtttcactactcatggttttaagggtatctcaaaaatttatttctgactttgtttcttaaacatagtttcatcctgaatatgtaaaatactatggaaatagcaataatattctgtatttgttactgctttgccctttaaaaaacattttcacatattttctaatgcctcttaatcttcagagtaacttc

SEQ ID NO: 417138 - DNA, 642 bp, Homo sapiens
gtgtgtttaccatactgtataattccatttacatgaagcatccagaaaagataaatgtatagggacaaaaagtagattaatgtttgcaaggggctggggctggaagctggtagtgactgctaatgggcatgaggaatcttacagtgatggaaatgctctaaagttggattgtagagatggctgcacaactcagtaaatgtactaaaaatcttttaactttaagtcaaaacagatacattctatagtatgtaaattatatttcaacaaagctgttttaataaaaaaggaaaaatgtttactatatcggcttagaaacatgcctcatttctaggaaataaaagaggtgagagatgatttactttgagaaaagacattgtgtcacctatgaaattttattaggcacagagtcatattttaaggtagatagttctgtaytgctgaaatagtaattttaatgtctttatattgccacatgttaagaccataatgtagttataaatggaaatgtttacacctgaagtattttcaaattaaaatttaattaagtgattttcttcgacacttaattctagattccccagatgaattgaagtgtattgctgtgtcttgtagtaccttgctttaactagctttttatgtatt

SEQ ID NO: 417139 - DNA, 642 bp, Homo sapiens
gtgtgtttaccatactgtataattccatttacatgaagcatccagaaaagataaatgtatagggacaaaaagtagattaatgtttgcaaggggctggggctggaagctggtagtgactgctaatgggcatgaggaatcttacagtgatggaaatgctctaaagttggattgtagagatggctgcacaactcagtaaatgtactaaaaatcttttaactttaagtcaaaacagatacattctatagtatgtaaattatatttcaacaaagctgttttaataaaaaaggaaaaatgtttactatatcggcttagaaacatgcctcatttctaggaaataaaagaggtgagagatgatttactttgagaaaagacattgtgtcacctatgaaattttattaggcacagagtcatattttaaggtagatagttctgtactgctgaaatagtaattttaatgtctttatrttgccacatgttaagaccataatgtagttataaatggaaatgtttacacctgaagtattttcaaattaaaatttaattaagtgattttcttcgacacttaattctagattccccagatgaattgaagtgtattgctgtgtcttgtagtaccttgctttaactagctttttatgtatt

SEQ ID NO: 417140 - DNA, 642 bp, Homo sapiens
ttggatgagacacaggcctcaaagaagaaattatttcaagtggaaagtcaagtatgtatggaatttaacatgtcaacagttattctgtagctagttgaattatataacrtgttttaggatactaattttggcagaagcttgattttttattttcattataatgaatgatttccattttactatctttataattatttttttatgttgtgactttcattctaccattttgaaaaaccattgcataccttttctcttacaatatgtacccttggaaaagttgagaattatacatcattcctcatagaaaattgacttttttcctgttaaacagtatttttaagtaatttttgtatttctctgatgaggcaggccagattaaatcagaggagaatgtttcatggaatgttccagaaaattgtcttatttcttcacttttgtgaatggacacagaatctgtgtctatttgtttcacagattctaggttaacttgtacagaaaggccgttatactattctttgaaatgtgcatgttttaggttaatttacaaactatttgaaaagttaggcattttctttatctatcttttatttaaaatatactgtaaaactgtagaaatatttagatttgatatagcatgtacat

SEQ ID NO: 417141 - DNA, 642 bp, Homo sapiens
ttggatgagacacaggcctcaaagaagaaattatttcaagtggaaagtcaagtatgtatggaatttaacatgtcaacagttattctgtagctagttgaattatataacatgttttaggatactaattttggcagaagcttgattttttattttcattataatgaatgatttccattttactatctttataattatttttttatrttgtgactttcattctaccattttgaaaaaccattgcataccttttctcttacaatatgtacccttggaaaagttgagaattatacatcattcctcatagaaaattgacttttttcctgttaaacagtatttttaagtaatttttgtatttctctgatgaggcaggccagattaaatcagaggagaatgtttcatggaatgttccagaaaattgtcttatttcttcacttttgtgaatggacacagaatctgtgtctatttgtttcacagattctaggttaacttgtacagaaaggccgttatactattctttgaaatgtgcatgttttaggttaatttacaaactatttgaaaagttaggcattttctttatctatcttttatttaaaatatactgtaaaactgtagaaatatttagatttgatatagcatgtacat

SEQ ID NO: 417142 - DNA, 642 bp, Homo sapiens
ttggatgagacacaggcctcaaagaagaaattatttcaagtggaaagtcaagtatgtatggaatttaacatgtcaacagttattctgtagctagttgaattatataacatgttttaggatactaattttggcagaagcttgattttttattttcattataatgaatgatttccattttactatctttataattatttttttatgttgtgactttcattctaccattttgaaaaaccattgcataccttttctcttacaatatgtacccttggaaaagttgagaattatacatcattcctcatagaaaattgacttttttcctgttaaacagtatttttaagtaatttttgtattkctctgatgaggcaggccagattaaatcagaggagaatgtttcatggaatgttccagaaaattgtcttatttcttcacttttgtgaatggacacagaatctgtgtctatttgtttcacagattctaggttaacttgtacagaaaggccgttatactattctttgaaatgtgcatgttttaggttaatttacaaactatttgaaaagttaggcattttctttatctatcttttatttaaaatatactgtaaaactgtagaaatatttagatttgatatagcatgtacat

SEQ ID NO: 417143 - DNA, 642 bp, Homo sapiens
ttggatgagacacaggcctcaaagaagaaattatttcaagtggaaagtcaagtatgtatggaatttaacatgtcaacagttattctgtagctagttgaattatataacatgttttaggatactaattttggcagaagcttgattttttattttcattataatgaatgatttccattttactatctttataattatttttttatgttgtgactttcattctaccattttgaaaaaccattgcataccttttctcttacaatatgtacccttggaaaagttgagaattatacatcattcctcatagaaaattgacttttttcctgttaaacagtatttttaagtaatttttgtatttctctgatgaggcaggccagattaaatcagaggagaatgtttcatggaatgttccagaaaattgtcttatttcttcacttttgtgaatggacacagaatctgtgtctatttgtttcacagattctaggttaacttgtacagaaaggccrttatactattctttgaaatgtgcatgttttaggttaatttacaaactatttgaaaagttaggcattttctttatctatcttttatttaaaatatactgtaaaactgtagaaatatttagatttgatatagcatgtacat

SEQ ID NO: 417144 - DNA, 365 bp, Homo sapiens
gtagtcttctaagtgcttcatgttagtccccagttaaacacctggttttggaaggctgaggcaggaggattgcttgagcccaggagtttgagascagccagagcaatatagtgagaccctgtctctaaaaaaaaaaaaaaaaaaaaaatttttttaaacacttagctgaggcatggtggtgcatgcctgtagtcccagctacattgggaggctgtggtaggagggtcgtttgagcttggaatattgaggctgcagtgagcagtgatcaagccactgcactccagcctaggtagcagagggagactctgtctcataaataaaacatgttgtatagattcccatagaagtgagttagatatcagaca

SEQ ID NO: 417145 - DNA, 365 bp, Homo sapiens
gtagtcttctaagtgcttcatgttagtccccagttaaacacctggttttggaaggctgaggcaggaggattgcttgagcccaggagtttgagagcagccagagcaatatagtgagacyctgtctctaaaaaaaaaaaaaaaaaaaaaatttttttaaacacttagctgaggcatggtggtgcatgcctgtagtcccagctacattgggaggctgtggtaggagggtcgtttgagcttggaatattgaggctgcagtgagcagtgatcaagccactgcactccagcctaggtagcagagggagactctgtctcataaataaaacatgttgtatagattcccatagaagtgagttagatatcagaca

SEQ ID NO: 417146 - DNA, 365 bp, Homo sapiens
gtagtcttctaagtgcttcatgttagtccccagttaaacacctggttttggaaggctgaggcaggaggattgcttgagcccaggagtttgagagcagccagagcaatatagtgagaccctgtctctaaaaaaaaaaaaaaaaaaaaaatttttttaaacacttagctgaggcatggtggtgcatgcctgtagtcccagctacattgggaggctgtggtaggagggtygtttgagcttggaatattgaggctgcagtgagcagtgatcaagccactgcactccagcctaggtagcagagggagactctgtctcataaataaaacatgttgtatagattcccatagaagtgagttagatatcagaca

SEQ ID NO: 417147 - DNA, 584 bp, Homo sapiens
attgtagaacatgttaaccatttattaattgatttaacgctaattttacttgactaaaacagatacaaattcattttatgtttgcattttcataattaaatgaattctattttaaaatgtatttcagaaactcacagcacaactttttagacatgtgtgtcatggggcgggagtcagctgagctgctggggcaaggtgaaattttttttgaatgccaaaatattctttttttttttttttttttttttttgaraaaaagtctggctttgtttcccaggctggagtacaatggcgtggtcttggctcactgcaacctatgcctccaagcaattttcctgcctcagcctcctgagtagctggcattacaggcatgtgccaccacacccggctaatttttgtatttttagtagagacggggttttgccaagttggtcaggctggtcttgaattcctgacctcgtgatctgcccgcctcggcctcccaaagtgacatgagccaccatgcccggccacttattctttaatgattttgaaaacaatgaccatgccttggacatatagtgtccggtgcactcttcattatc

SEQ ID NO: 417148 - DNA, 584 bp, Homo sapiens
attgtagaacatgttaaccatttattaattgatttaacgctaattttacttgactaaaacagatacaaattcattttatgtttgcattttcataattaaatgaattctattttaaaatgtatttcagaaactcacagcacaactttttagacatgtgtgtcatggggcgggagtcagctgagctgctggggcaaggtgaaattttttttgaatgccaaaatattctttttttttttttttttttttttttgagaaaaagtctggctttgtttcccaggctggagtacaatggcgtggtcttggctcactgcaacctatgcctccaagcaattttcctgcctcagcctcctgagtagctggcattacaggcatgtgccaccacacccggctaatttttgtatttttagtagagacggggttttgccaagttgrtcaggctggtcttgaattcctgacctcgtgatctgcccgcctcggcctcccaaagtgacatgagccaccatgcccggccacttattctttaatgattttgaaaacaatgaccatgccttggacatatagtgtccggtgcactcttcattatc

SEQ ID NO: 417149 - DNA, 537 bp, Homo sapiens
atcatgtaattttggaaaatattgataatggaaaacccaaattctgccaaaatatgttgagaaaatagagggcaaatatatattttcagactttcaatgcctcaggctcttagttaatcttccccagatctgggaagacctagaaggkgagagattgggctacgttaatgagggccatttcaatctcttggccctgcagcagccatttcaaaatatgacaaaaaaatatatttgggggtaaaatattttgatttccttcagcttcttctctctgtgatgctgcaccagaatcaggttagaaaggaagccacattataggagttaataaaacccatctgatgagatttgatagtttgaagggtgtgattcccagaccgtttagatagaaattggggccaaagaaaacaaggtcttattcctcaatataaatctgtcagtgctttaagcagtgaaagatttttcatttaattttacagacttgaaactaatgaaaaggatagcttttaaaatataaatctctttttctatgaaaaggac

SEQ ID NO: 417150 - DNA, 577 bp, Homo sapiens
tgaggaatgataatgagggaaggtggttagacactttttactaagagataacttaagtgccatctaaggaggaacaaaaatgaattatcagaaaaataaaagtaagatgaagtgcaaaagttctgtggcaaagatgatgatagyaaataatatatttctgtgactcatggtaactttaactttgttcttaaaattctgagtaatttaagggttcacatttgaagaatccactgcattacagataacattttattgcaagtaaatgcatttcaaaatttgctattggttttgtattagattattctcagcctacttcattatcaagctgtattattttattcatgcagtttgatgatcttacggcagagaaggaagctttatcttcaaaatgtgtcaatttggctaaagacaatcaagttcttcaacaggagtttttatctatgaaaaaagtacaacaggaatgaaaaacttgaggaggataaaaagatgttgaaagaagaaatattaaatcttaagacacatatggaaaacaatatggtagaacttagtaaactacaagaatataaatcggagctag

SEQ ID NO: 417151 - DNA, 577 bp, Homo sapiens
tgaggaatgataatgagggaaggtggttagacactttttactaagagataacttaagtgccatctaaggaggaacaaaaatgaattatcagaaaaataaaagtaagatgaagtgcaaaagttctgtggcaaagatgatgatagtaaataatatatttytgtgactcatggtaactttaactttgttcttaaaattctgagtaatttaagggttcacatttgaagaatccactgcattacagataacattttattgcaagtaaatgcatttcaaaatttgctattggttttgtattagattattctcagcctacttcattatcaagctgtattattttattcatgcagtttgatgatcttacggcagagaaggaagctttatcttcaaaatgtgtcaatttggctaaagacaatcaagttcttcaacaggagtttttatctatgaaaaaagtacaacaggaatgaaaaacttgaggaggataaaaagatgttgaaagaagaaatattaaatcttaagacacatatggaaaacaatatggtagaacttagtaaactacaagaatataaatcggagctag

SEQ ID NO: 417152 - DNA, 577 bp, Homo sapiens
tgaggaatgataatgagggaaggtggttagacactttttactaagagataacttaagtgccatctaaggaggaacaaaaatgaattatcagaaaaataaaagtaagatgaagtgcaaaagttctgtggcaaagatgatgatagtaaataatatatttctgtgactcatggtarctttaactttgttcttaaaattctgagtaatttaagggttcacatttgaagaatccactgcattacagataacattttattgcaagtaaatgcatttcaaaatttgctattggttttgtattagattattctcagcctacttcattatcaagctgtattattttattcatgcagtttgatgatcttacggcagagaaggaagctttatcttcaaaatgtgtcaatttggctaaagacaatcaagttcttcaacaggagtttttatctatgaaaaaagtacaacaggaatgaaaaacttgaggaggataaaaagatgttgaaagaagaaatattaaatcttaagacacatatggaaaacaatatggtagaacttagtaaactacaagaatataaatcggagctag

SEQ ID NO: 417153 - DNA, 577 bp, Homo sapiens
tgaggaatgataatgagggaaggtggttagacactttttactaagagataacttaagtgccatctaaggaggaacaaaaatgaattatcagaaaaataaaagtaagatgaagtgcaaaagttctgtggcaaagatgatgatagtaaataatatatttctgtgactcatggtaactttaactttgttcttaaaattctgagtaatttaagggttcacatttgaagaatccactgcattacagataacattttattgcaagtaaatgcatttcaaaatttgctattggttttgtattagattattctcagcctacttcattatcaagctrtattattttattcatgcagtttgatgatcttacggcagagaaggaagctttatcttcaaaatgtgtcaatttggctaaagacaatcaagttcttcaacaggagtttttatctatgaaaaaagtacaacaggaatgaaaaacttgaggaggataaaaagatgttgaaagaagaaatattaaatcttaagacacatatggaaaacaatatggtagaacttagtaaactacaagaatataaatcggagctag

SEQ ID NO: 417154 - DNA, 624 bp, Homo sapiens
tctttaaatttttttttttttgcagactccatcccagacacagcataccagagtctccaaagggctaagctcagcaatctrttctcaagctcccaacaggagtcttatatagtcaggcaggcaatgatcatatatggggaccattagaaataatctaatgcataccctctgaacttcaaatttttagtattctcattttctgctcaagctcaatttcaacacagttcacagtttctcatatccaccatggcattctgccaaggaactacaactcgtgttctctaaacccatctgttctaagaatgctgggctggttatcaatttctaatgtacctgcttaaactttcctctctcaatgtgtccctgactgaactgcagaagacagaacaactgtactagccatctctttctgcatatcccatgtccccacagaggccactatgtcttcataaagctaactgccacgattttcacaagtgatatttttccttcatgattttccattttctacttgagcattaaaataccagggagaaaaggaagataatcgtttagcagctgggaaaacaagatatgtgccccagcacagtacatgctaagtattcagaatgtatagttatagta

SEQ ID NO: 417155 - DNA, 624 bp, Homo sapiens
tctttaaatttttttttttttgcagactccatcccagacacagcataccagagtctccaaagggctaagctcagcaatctattctcaagctcccaacaggagtcttatatagtcaggcaggcaatgatcatatatggggaccattagaaataatctaatgcataccctctgaacttcaaatttttagtattctcattttctgctcaagctcaatttcaacacagttcacagtttctcatatccaccatggcattctgccaaggaactacaactcgtgttctctaaacccatctgttctaagaatgctgggctggttatcaatttctaatgtacctgcttaaactttcctctctcaatrtgtccctgactgaactgcagaagacagaacaactgtactagccatctctttctgcatatcccatgtccccacagaggccactatgtcttcataaagctaactgccacgattttcacaagtgatatttttccttcatgattttccattttctacttgagcattaaaataccagggagaaaaggaagataatcgtttagcagctgggaaaacaagatatgtgccccagcacagtacatgctaagtattcagaatgtatagttatagta

SEQ ID NO: 417156 - DNA, 624 bp, Homo sapiens
tctttaaatttttttttttttgcagactccatcccagacacagcataccagagtctccaaagggctaagctcagcaatctattctcaagctcccaacaggagtcttatatagtcaggcaggcaatgatcatatatggggaccattagaaataatctaatgcataccctctgaacttcaaatttttagtattctcattttctgctcaagctcaatttcaacacagttcacagtttctcatatccaccatggcattctgccaaggaactacaactcgtgttctctaaacccatctgttctaagaatgctgggctggttatcaatttctaatgtacctgcttaaactttcctctctcaatgtgtccctgactgaactgcagaagacagaacaactgtactagccatctctttctgcatatcccatgtccccacagaggccactatgtcttcataaagctaactgccacgattttcacaagtgatatttttccttcatgattttccattttctacytgagcattaaaataccagggagaaaaggaagataatcgtttagcagctgggaaaacaagatatgtgccccagcacagtacatgctaagtattcagaatgtatagttatagta

SEQ ID NO: 417157 - DNA, 606 bp, Homo sapiens
ataaagctaactgccacgattttcacaagtgatatttttccttcatgattttccattttctacttgrgcattaaaataccagggagaaaaggaagataatcgtttagcagctgggaaaacaagatatgtgccccagcacagtacatgctaagtattcagaatgtatagttatagtagataactataaattagataactattaaaatagttatattagataagtaatatttttctcatcttcaagacttaaaaagttaactgttttaagtggtattcaaaaaaggaaggtactcactcacatcaacccaattaaaaccacatttctatagctggatgtaacaatcttaatccaaatcattcaccaaagttgtttaactttcttaaagtaaggctctagacatttgcttctttacaagtatcttgcaaagccattatggggtagaagaaaagtttaaatgcaccacattttcctactgcattgtaactaaaattactactcacaggacgtgtatagcttctgcattttggtccatcacattttccaccatcaaatgagtgtactcttaaggttctcactttatcatcagcataacatattttgcttcc

SEQ ID NO: 417158 - DNA, 624 bp, Homo sapiens
tctttaaatttttttttttttgcagactccatcccagacacagcataccagagtctccaaagggctaagctcagcaatctattctcaagctcccaacaggagtcttatatagtcaggcaggcaatgatcatatatggggaccattagaaataatctaatgcataccctctgaacttcaaatttttagtattctcattttctgctcaagctcaatttcaacacagttcacagtttctcatatccaccatggcattctgccaaggaactacaactcgtgttctctaaacccatctgttctaagaatgctgggctggttatcaatttctaatgtacctgcttaaactttcctctctcaatgtgtccctgactgaactgcagaagacagaacaactgtactagccatctctttctgcatatcccatgtccccacagaggccactatgtcttcataaagctaactgccacgattttcacaagtgatatttttccttcatgattttccattttctacttgagcattaaaataccagggagaaaaggaagataatcgtttagcagctgggaaaayaagatatgtgccccagcacagtacatgctaagtattcagaatgtatagttatagta

SEQ ID NO: 417159 - DNA, 606 bp, Homo sapiens
ataaagctaactgccacgattttcacaagtgatatttttccttcatgattttccattttctacttgagcattaaaataccagggagaaaaggaagataatcgtttagcagctgggaaaacaagatatgtgccccagcacagtacatgctaagtattcagaatgtatagttatagtagataactataaattagataactattaaaatagttatattagataagtaatatttttctcatcttcaagacttaaaaagttaactgttttaagtggtattcaaaaaaggaaggtactcactcacatcaacccwattaaaaccacatttctatagctggatgtaacaatcttaatccaaatcattcaccaaagttgtttaactttcttaaagtaaggctctagacatttgcttctttacaagtatcttgcaaagccattatggggtagaagaaaagtttaaatgcaccacattttcctactgcattgtaactaaaattactactcacaggacgtgtatagcttctgcattttggtccatcacattttccaccatcaaatgagtgtactcttaaggttctcactttatcatcagcataacatattttgcttcc

SEQ ID NO: 417160 - DNA, 606 bp, Homo sapiens
ataaagctaactgccacgattttcacaagtgatatttttccttcatgattttccattttctacttgagcattaaaataccagggagaaaaggaagataatcgtttagcagctgggaaaacaagatatgtgccccagcacagtacatgctaagtattcagaatgtatagttatagtagataactataaattagataactattaaaatagttatattagataagtaatatttttctcatcttcaagacttaaaaagttaactgttttaagtggtattcaaaaaaggaaggtactcactcacatcaacccaattraaaccacatttctatagctggatgtaacaatcttaatccaaatcattcaccaaagttgtttaactttcttaaagtaaggctctagacatttgcttctttacaagtatcttgcaaagccattatggggtagaagaaaagtttaaatgcaccacattttcctactgcattgtaactaaaattactactcacaggacgtgtatagcttctgcattttggtccatcacattttccaccatcaaatgagtgtactcttaaggttctcactttatcatcagcataacatattttgcttcc

SEQ ID NO: 417161 - DNA, 606 bp, Homo sapiens
ataaagctaactgccacgattttcacaagtgatatttttccttcatgattttccattttctacttgagcattaaaataccagggagaaaaggaagataatcgtttagcagctgggaaaacaagatatgtgccccagcacagtacatgctaagtattcagaatgtatagttatagtagataactataaattagataactattaaaatagttatattagataagtaatatttttctcatcttcaagacttaaaaagttaactgttttaagtggtattcaaaaaaggaaggtactcactcacatcaacccaattaaaaccacatttctatagctggatgtaacaatcttaatccaaatcattcaccaaagttgtttaactttcttaaagtaaggctctagacatttgcttctttacaagtatcttgcaaagccattatggggtagaagaaaagtttaaatgcrccacattttcctactgcattgtaactaaaattactactcacaggacgtgtatagcttctgcattttggtccatcacattttccaccatcaaatgagtgtactcttaaggttctcactttatcatcagcataacatattttgcttcc

SEQ ID NO: 417162 - DNA, 560 bp, Homo sapiens
gactgtttttaaccagaaggaggcaaatggcttccagatggttgtgtagctggttttaacagtagcctgcagtggctttttgacagacataaaccttactagttattattaggcttcagagcattagtatgaagttttaatttgcttatgttagggatgagaaggtagcactatcctagatgccctaaatattgctccttgtcacttttcccccactgaattcagaggtaatctggggactgtgtctaaaatggtcttatattcatgtgtttgccatgggtttctgaagctttcattctgaacatggtctcaacttggctcttgaggactaatttcattacacatgatcataggcataaatttaaatttgtggagaattgttttgtacatcccacatgaaggggtgacctgcccctccacacctktgggtgtttctcattgggtgggatgagaggctgagaaaagaaagagacacagagacaaagtatagagaaagaaacatgggcccagggtaccggcactcagcatatggaggatccacgctggcactggtctctgag

SEQ ID NO: 417163 - DNA, 618 bp, Homo sapiens
aacagtctgatctctctttcttttccccacaccacagaatctggattcactaccaagagactgtagcatttatcaaaaagaagataaagagaaataagagttcttgttgtctagggaatatatcatcttctttgggtaatgcctattaatgctcctcaaaatagctagagcattcaagctttgtaacgagttcacaatgagagaagtagcttctactagaaattaaatatgttacttctttcaatgagtaactattgctacaagaatatgtttgctgaataaattagcacatttattgacataattgatttgcatactgtggcagcacttcatggaccaaaccctaagtcccatgaaaaattgaatagaattatttgacagtgaagtatcattggaaaagcctggctctasttctcaggaagcaatctggttgattatgtgttttcagtgtgtagtcataatacaactgtatatcactagtgtacatcagacactttgtgcactctacatatattttctcatttgatccttcaatacatgcataagagaagaaatagacgtggatttaattcgccgctagggtcaaagaccaaaaacctcattacaatgccaatgtta

SEQ ID NO: 417164 - DNA, 613 bp, Homo sapiens
gtgaggcaccacacccgaacgatagttttataaaacctggatttaaggcagaatttagaaacagaaactctaataggaaaacctttttctatattattatttttttttaatttaaaagtaaactttagtgtcgaaaatgcaaacttggggagggcagaaagatcacacataaggctgccacttcacacctggagggttgcatgttggctgggcagaggcactcctcacttcccaggggctgtgtatgaatcacaatgtaggggataaagccgttagataaaaatcttgaaagtaaaagtggataagagaaaaatgcaaaagagtttagagtgatgtgtgaaagaattcaataatagattatcttttacagacaagaatgaagataaaaatatggtttcaaaatacttaccataaacaatgtatggatttgtgtaacaggttaytgtatatgatagttgaaagaaaataatgatttgagatgggagggaatcatttttattaagacataataattttgaatttaatggctgaacatttatgtggcttttaaagagtcagtgcatttccaaagtggtactgcaatatatggaaaatgtcagtactggagacgttg

SEQ ID NO: 417165 - DNA, 258 bp, Homo sapiens
ttcctttaattttactatttttgtgaacaaaaatgtcagaagatgaagtattttaagtcaatttttttttaaatggtgaaaaattttaaacactgtgaggggccaataaaagagattattttcattgtgagggacattttagcatgagtcaaatcacatgacagtcaattttgttctttgattaatgtacaggtacaatgaatttcagttatggkagaacttctctttctcctttgacttattctctcaatttttgca

SEQ ID NO: 417166 - DNA, 559 bp, Homo sapiens
tgtgcttttattcccatccactctttgctatctggtataaatttttatgctatctggctggcagaaacagagaaataaaaagacacaggcataacatatgtcttctgtctttactacctggattttacatgaaatagccagattaagaggatgtgacmttgtaggccttcaggaacagtaaagaagttttcccttttctgtactgagctactcttttccccactgccttttatctctctttttttttttttttttttgaatcctgtgatatcaaaaaagtaaaaaaagtaaaggttctctttgaattatgggaaccaacgtttgccacaacacaagaagcagagtgaaactgctgagtttctagtgccgaattctggaaaatgagatgcttcccagatttcacattcaattaccacaaaagtttataggtggaaaacatatggtacagttacctactttaactgcattatctactgataatgggagtcaaaccaaccaagacatattaaatgtttcatccagagctcttgaggtggcattcactagcatttcatggcac

SEQ ID NO: 417167 - DNA, 559 bp, Homo sapiens
tgtgcttttattcccatccactctttgctatctggtataaatttttatgctatctggctggcagaaacagagaaataaaaagacacaggcataacatatgtcttctgtctttactacctggattttacatgaaatagccagattaagaggatgtgacattgtaggccttcaggaacagtaaagaagttttcccttttctgtactgagctactcttttccccactgccttttatctctctttttttttttttttttttgaatcctgtgatatcaaaaaagtaaaaaaagtaaaggttctctttgaattatgggaaccaacgtttgccacaacamaagaagcagagtgaaactgctgagtttctagtgccgaattctggaaaatgagatgcttcccagatttcacattcaattaccacaaaagtttataggtggaaaacatatggtacagttacctactttaactgcattatctactgataatgggagtcaaaccaaccaagacatattaaatgtttcatccagagctcttgaggtggcattcactagcatttcatggcac

SEQ ID NO: 417168 - DNA, 559 bp, Homo sapiens
tgtgcttttattcccatccactctttgctatctggtataaatttttatgctatctggctggcagaaacagagaaataaaaagacacaggcataacatatgtcttctgtctttactacctggattttacatgaaatagccagattaagaggatgtgacattgtaggccttcaggaacagtaaagaagttttcccttttctgtactgagctactcttttccccactgccttttatctctctttttttttttttttttttgaatcctgtgatatcaaaaaagtaaaaaaagtaaaggttctctttgaattatgggaaccaacgtttgccacaacacaagaagcagagtgaaactgctgagtttctagtgccgaattctggaaaatgagatgcttcccagatttcacattcaattaccacaaaagtttataggtggaaaacatatggtacagttacctactttaacygcattatctactgataatgggagtcaaaccaaccaagacatattaaatgtttcatccagagctcttgaggtggcattcactagcatttcatggcac

SEQ ID NO: 417169 - DNA, 559 bp, Homo sapiens
tgtgcttttattcccatccactctttgctatctggtataaatttttatgctatctggctggcagaaacagagaaataaaaagacacaggcataacatatgtcttctgtctttactacctggattttacatgaaatagccagattaagaggatgtgacattgtaggccttcaggaacagtaaagaagttttcccttttctgtactgagctactcttttccccactgccttttatctctctttttttttttttttttttgaatcctgtgatatcaaaaaagtaaaaaaagtaaaggttctctttgaattatgggaaccaacgtttgccacaacacaagaagcagagtgaaactgctgagtttctagtgccgaattctggaaaatgagatgcttcccagatttcacattcaattaccacaaaagtttataggtggaaaacatatggtacagttacctactttaactscattatctactgataatgggagtcaaaccaaccaagacatattaaatgtttcatccagagctcttgaggtggcattcactagcatttcatggcac

SEQ ID NO: 417170 - DNA, 391 bp, Homo sapiens
catgcttctgtagttgttagcactgggactgccatatagtggctkctggaataaacgctgtattggttttctgttttcattaagtatctgtagcagcagaaatactgtggctttctatctgaatcatatgcttcatttctttggggtgggtaaacaacaaatcaaaaagactttctggatctctagactgaagccaatgcctaatgtccaatttccaattagtggtatctgggtttacattttttgccatttgcatgtcaaactcttaatcatctttcatttcaatcataattactgggttccttaattttttggtttctgtatcattacaaaaattttcatcatctgtgttagaaacaagctatgtgtctggtttgctatcacttttata

SEQ ID NO: 417171 - DNA, 391 bp, Homo sapiens
catgcttctgtagttgttagcactgggactgccatatagtggcttctggaataaacgctgtattggttttctgttttcattaagtatctgtagcagcagaaatactgtggctttctatctgaatcatatgcttcatttctttggggtgggtaaacaacaaatcaaaaagactttctggatctctagactgargccaatgcctaatgtccaatttccaattagtggtatctgggtttacattttttgccatttgcatgtcaaactcttaatcatctttcatttcaatcataattactgggttccttaattttttggtttctgtatcattacaaaaattttcatcatctgtgttagaaacaagctatgtgtctggtttgctatcacttttata

SEQ ID NO: 417172 - DNA, 391 bp, Homo sapiens
catgcttctgtagttgttagcactgggactgccatatagtggcttctggaataaacgctgtattggttttctgttttcattaagtatctgtagcagcagaaatactgtggctttctatctgaatcatatgcttcatttctttggggtgggtaaacaacaaatcaaaaagactttctggatctctagactgaagccaatgyctaatgtccaatttccaattagtggtatctgggtttacattttttgccatttgcatgtcaaactcttaatcatctttcatttcaatcataattactgggttccttaattttttggtttctgtatcattacaaaaattttcatcatctgtgttagaaacaagctatgtgtctggtttgctatcacttttata

SEQ ID NO: 417173 - DNA, 306 bp, Homo sapiens
caaatcaaaaagactttctggatctctagactgaagccaatgcctaatgtccaatttccaattagtggtatctgggtttacattttttgccatttgcatgtcaaactcttaatcatctttcatttcaatcataattactgggttccttaattttttggtttcwgtatcattacaaaaattttcatcatctgtgttagaaacaagctatgtgtctggtttgctatcacttttatagtctgatttattttcatttaaatgaagcttagaagatgactggtaactgtatttcagggacctggagtatga

SEQ ID NO: 417174 - DNA, 306 bp, Homo sapiens
caaatcaaaaagactttctggatctctagactgaagccaatgcctaatgtccaatttccaattagtggtatctgggtttacattttttgccatttgcatgtcaaactcttaatcatctttcatttcaatcataattactgggttccttaattttttggtttctgtatcattacaaaaattttcatcatctgtgttagaaacaagctatgtgtctggtttgctatcayttttatagtctgatttattttcatttaaatgaagcttagaagatgactggtaactgtatttcagggacctggagtatga

SEQ ID NO: 417175 - DNA, 593 bp, Homo sapiens
agtatctttttaacaagacactaattgagttggcagttactaataatttgcaaaattattgttgttcataccttaattagtgtgcaccccattttttacatcgcaaatgttttcccctactattctgaaaaatctattttcatcttttaagactcagaaagtaggctgggcataatagctcacatctgtaatcccagcactttggaaggccaaaatgggagaattgctcaaggccaggagtttaagaccagcctgggaaccatagataaccttgactctacaaaaaattggacaggtatggtgatatgtgcctgtagtcccagctactcaagaagcttaggtgagaagatycctcgagcccaggagtttgaggttgcagtgagtctcgatcacaccatcgcactccaccctgggtgatagagtaagaacttgtctccaacaacagaaaaagaaaaaaaaaaggctcagaatgctgtgtgaagtcttccttgattctagctatctttctccacacacacgggtatctgcttcattggagtcccttagtactttgtcaatttttccagtgtcactttaccacctgaactgcacat

SEQ ID NO: 417176 - DNA, 492 bp, Homo sapiens
gcatttatacttcgtcatcactactctagaagattatcatcatgttatgtaaaataaaatgttaattctagacataaggggaaaaagaaattaaaactataggggtgaaaaaatattgcataatttattactgttgacctgaycatatgactgattaagggcactgaatttaacttgtatgtgaagtagaccccatattagctgcagttaatcaatagaccaggtattctagcagaattaaatttgatgctcctgtgttatctttaaatgatacagctcttctgaaaacccatactcatagtgcatgattatccattaagacaaggtgatggaatgtgtgaatacagctgaggagacaccacaaggcaaacgctcaatggttcccattaatattggggaaatcaacattataatacagaaaaccataggcattatttaatatttggttttggaaggtatttttagtgacagtgcatacagttgtacctaata

SEQ ID NO: 417177 - DNA, 492 bp, Homo sapiens
gcatttatacttcgtcatcactactctagaagattatcatcatgttatgtaaaataaaatgttaattctagacataaggggaaaaagaaattaaaactataggggtgaaaaaatattgcataatttattactgttgacctgatcatatgactgattaagggcactgaatttaacttgtatgtgaagtagaccccatattagctgcagttaatcaatagaccaggtattctagcagaattaaatttgatgctcctgtgttatctttaaatgatacagctcttctgaaaacccatactcatagtgcatgattatccattaagacaaggtgatggaatgtgtgaatacagctgaggagacaccacaaggcaaaygctcaatggttcccattaatattggggaaatcaacattataatacagaaaaccataggcattatttaatatttggttttggaaggtatttttagtgacagtgcatacagttgtacctaata

SEQ ID NO: 417178 - DNA, 492 bp, Homo sapiens
gcatttatacttcgtcatcactactctagaagattatcatcatgttatgtaaaataaaatgttaattctagacataaggggaaaaagaaattaaaactataggggtgaaaaaatattgcataatttattactgttgacctgatcatatgactgattaagggcactgaatttaacttgtatgtgaagtagaccccatattagctgcagttaatcaatagaccaggtattctagcagaattaaatttgatgctcctgtgttatctttaaatgatacagctcttctgaaaacccatactcatagtgcatgattatccattaagacaaggtgatggaatgtgtgaatacagctgaggagacaccacaaggcaaacgctcaatggttcccattaatattggggaaatcaacattataatacagaaaaccataggcattatttaatatttggttttggaaggtatttttagtgacastgcatacagttgtacctaata

SEQ ID NO: 417179 - DNA, 580 bp, Homo sapiens
aaggcacactgtgtttgagtaggaaatctgtagacgtctagctggttttctattccaggcccaaaattctaaatataatcatggtacccgcacacaaatttatgttaaataccaacttcaatgaaattactctttctcctcattctctttgttatttatatgttgctttccttaagggaagaatacaaatgccttgctaagaagcattctgtttggttgtaggctgcataaagggagtaaacacaaagyacatttgaccacaaaatgactttttaaaagctagaactatggtagcatgaagccaactgaggtaatctagaataaaattttctatgtttgtttcccttctttgctctctttctactctaataactgcgattcacagaggtaatgaagagtataattccctgataaaaacacagctccaagattaatcctttctttaactatgaagttcgcgggtccaaagtcttgtagttgctgtctgatttttgatcatggatggtgatacagatatttatcatcaactcataacttcccaaatctttgaaaagtcttactattgatggttcaactagta

SEQ ID NO: 417180 - DNA, 553 bp, Homo sapiens
acaatatcatttgctattttcagttttcttttytgagaacagcacaacaaacttcttcagagaaatgaatcgtcctaacttcataggctaaaggctcatgagtcacagttctaagggcatttataaaatatggtggtgcatgcttgtattctgaacttttcaactttaaactctcatatagtaaatattaataaatacaaactgattaaagaaaagcccacttaatctgacattatttttatttttctttctttcttcatttatcagcaacaggagagtctaactaaatgtggtaaagtggtataagggaatacaatgaaaagtgtaaaatgaattaaaccagagataatcatatcaatgtggatacatctggaaaatataatacaaaatacaccaaagaaagtggcagaaaggtatgtaaagtgtataaccactcacataccattttgggacacaaataaaaaattctgcatattatttctgagcatcacaatatagttaaagatttcaaaagggcattgaaatgaaaaacaaccaacttatgatgtcggta

SEQ ID NO: 417181 - DNA, 553 bp, Homo sapiens
acaatatcatttgctattttcagttttcttttttgagaacagcacaacaaacttcttcagagaaatgaatygtcctaacttcataggctaaaggctcatgagtcacagttctaagggcatttataaaatatggtggtgcatgcttgtattctgaacttttcaactttaaactctcatatagtaaatattaataaatacaaactgattaaagaaaagcccacttaatctgacattatttttatttttctttctttcttcatttatcagcaacaggagagtctaactaaatgtggtaaagtggtataagggaatacaatgaaaagtgtaaaatgaattaaaccagagataatcatatcaatgtggatacatctggaaaatataatacaaaatacaccaaagaaagtggcagaaaggtatgtaaagtgtataaccactcacataccattttgggacacaaataaaaaattctgcatattatttctgagcatcacaatatagttaaagatttcaaaagggcattgaaatgaaaaacaaccaacttatgatgtcggta

SEQ ID NO: 417182 - DNA, 553 bp, Homo sapiens
acaatatcatttgctattttcagttttcttttttgagaacagcacaacaaacttcttcagagaaatgaatcgtcctaacttcataggctaaaggctcatgagtcacagttctaagggcatttataaaatatggtggtgcatgcttgtattctgaacttttcaactttaaactctcatatagtaaatattaataratacaaactgattaaagaaaagcccacttaatctgacattatttttatttttctttctttcttcatttatcagcaacaggagagtctaactaaatgtggtaaagtggtataagggaatacaatgaaaagtgtaaaatgaattaaaccagagataatcatatcaatgtggatacatctggaaaatataatacaaaatacaccaaagaaagtggcagaaaggtatgtaaagtgtataaccactcacataccattttgggacacaaataaaaaattctgcatattatttctgagcatcacaatatagttaaagatttcaaaagggcattgaaatgaaaaacaaccaacttatgatgtcggta

SEQ ID NO: 417183 - DNA, 553 bp, Homo sapiens
acaatatcatttgctattttcagttttcttttttgagaacagcacaacaaacttcttcagagaaatgaatcgtcctaacttcataggctaaaggctcatgagtcacagttctaagggcatttataaaatatggtggtgcatgcttgtattctgaacttttcaactttaaactctcatatagtaaatattaataaatacaaactgattaaagaaaagcccacttaatctgacattatttttmtttttctttctttcttcatttatcagcaacaggagagtctaactaaatgtggtaaagtggtataagggaatacaatgaaaagtgtaaaatgaattaaaccagagataatcatatcaatgtggatacatctggaaaatataatacaaaatacaccaaagaaagtggcagaaaggtatgtaaagtgtataaccactcacataccattttgggacacaaataaaaaattctgcatattatttctgagcatcacaatatagttaaagatttcaaaagggcattgaaatgaaaaacaaccaacttatgatgtcggta

SEQ ID NO: 417184 - DNA, 567 bp, Homo sapiens
aaaatgtatgggtataaaattttctacaaatcttgcttcacttctaatgaaagttgtccttgaaaggaatctctttgagaggctaaacatttattcagagtatgttttgcttagtcattttacaagattactttttgaattgctttcagaactttttaccaaattagctctttttacttgattatccatttgttatttttattttccttctctttgggcatcacctggttagcmttcttatcatctgccctaccactttgattctgccactggtgcctacagctttgttgtgctagcaaagacaagagagactccagagatgactcagagggccttggaggatgtggaccttgtctaggaatgtgaatcgaggagcatttcattaagcaaataaaaaacatatggtctagacaacattcatttcaaaatgttgatgtctattttaagtattgtaaatactttgatgcaactgacttccagaaatgggaaacatttaataataaagtgtttattcactcagcatagttctaggagctaggtataggtcactggttaagacagaggagg

SEQ ID NO: 417185 - DNA, 567 bp, Homo sapiens
aaaatgtatgggtataaaattttctacaaatcttgcttcacttctaatgaaagttgtccttgaaaggaatctctttgagaggctaaacatttattcagagtatgttttgcttagtcattttacaagattactttttgaattgctttcagaactttttaccaaattagctctttttacttgattatccatttgttatttttattttccttctctttgggcatcacctggttagccttcttatcatctgccctaccactttgattctgccactggtgcctacagctttgttgtgctagcaaagacaagagagactccagagatgactcagagggccttggaggatgtggaccttgtctaggaatgtgaatcgaggagcrtttcattaagcaaataaaaaacatatggtctagacaacattcatttcaaaatgttgatgtctattttaagtattgtaaatactttgatgcaactgacttccagaaatgggaaacatttaataataaagtgtttattcactcagcatagttctaggagctaggtataggtcactggttaagacagaggagg

SEQ ID NO: 417186 - DNA, 476 bp, Homo sapiens
tggtgtcacatcactatggcaattgycgcccagggcaggaatgcagagcagctgtaattgtgcaacgccttattgctggtgcatgtcaatcagaacctatgaattgagaaaaatttgctctgttcattctgttaaatgatgtatccaattaaacctgttagaattcatgatcttcagtcaaggttaaatgaaagtagttactcctgtcagctaggtgattaaatgctgcctacatcaggcacatttatgtgcaaaattaaaattttggtataaagcatgaatctttatgcatgccagttaattatcttgcggttcctccagttattaaatgcccactgcatttcttcttaatcatcagcttcctttcaaaacttatttcatacttcacattacaccagatttcaatgtttaaatgaaatgccttaccaatgaaaacttcctctttttgagggcttggctgtactatgctactgaaa

SEQ ID NO: 417187 - DNA, 494 bp, Homo sapiens
ctgaaatgcaaagagctaaagaacagagaagcgctctctgtcctcagatgccctgcgtgcatttccttttcatggcatctcccttttgatccgtgcaccgataacctccattagcacctgcagcactccccagagtgggcctaaacttcctaagccccgcggtatccttgacctcctctcagggtttcctaggccatagactgcttctgaaactcagtccttgcaactgctacctcagttcaccttagcaatgctcatcagacatagtgttcccaacctatcctcttcactctggcaaagtaagtctagggctgtttagggataagggatggaagcaggaagctgagcaaatrgacaatgttcctgtgatgaatcatttggttcctgggtaaacctctggttttccttagatctccatggccggatatctcagatcctactgttcctttttgccagtaactccaggcagggactctatgtctaaagccctggca

SEQ ID NO: 417188 - DNA, 472 bp, Homo sapiens
gacacttgaaactgtaaaactactagaagaaaacgtaaagggaatgctccacaatattgttctgggggcaaacatttcttggatgtgacccccaaagcacaggcaacaaaagcaaaaaataaacaaaaagtatgtcatcaaactgaaaagcttctgcayggcaaaagaagcaatagaatgaagagacaactcatggattgggagaaaatatttgcaagccacatatctgataaggggctaatatccaaaatatataagaaactcaaataactcaattgcaagaaaataaagaacccaatttaaaaaatgggcaagagacttaaatagacatttcttaaaaaaaaaagacatgtaaatggtcaacagatatatgaaaaatcatcatcttcactaattatcagggaaacacaaattaaaactgcaatgagatatcacttcatacctgttagaatggctattttagtaaaaagat

SEQ ID NO: 417189 - DNA, 581 bp, Homo sapiens
ataccactgcactctagtctgggctggtttcacagaatgagaccctgtctcaaaaaaaaagttcaatgacattggtctgggcaatgatgttttggttttttgttttgttttgttttgttttttaaaatagagcctcactctgttgcctgggctggagtgcagcagtgtgatctcggctcactgcaacctctgcctctcaatttcaagtgattctcgtgcctcagccaccaagtagctgggattacaggcgtgcaacaccaggcccagctaatttttgtatttttagtagagatggagtttcaccatgttggccaggctggtcttgaactcctggcttcaagtgatccacctgcctyggcctcccaaagtgctgggattatgaaagtgagccaccacacccagcctattatttttttatatgacttcaaaaccatgggtaacaaagctgaaaatagataaatgggattgtatcaaactaaaattcttctgcacaatcaagaaaacagtcaacagagtgaaaagacaacctatagaatgggggaaaatattttcaaactacgcatctgataaaaactgatatg

SEQ ID NO: 417190 - DNA, 581 bp, Homo sapiens
ataccactgcactctagtctgggctggtttcacagaatgagaccctgtctcaaaaaaaaagttcaatgacattggtctgggcaatgatgttttggttttttgttttgttttgttttgttttttaaaatagagcctcactctgttgcctgggctggagtgcagcagtgtgatctcggctcactgcaacctctgcctctcaatttcaagtgattctcgtgcctcagccaccaagtagctgggattacaggcgtgcaacaccaggcccagctaatttttgtatttttagtagagatggagtttcaccatgttggccaggctggtcttgaactcctggcttcaagtgatccacctgcctcggcctcccaaagtgctgggattatgaaagtgagccaccacacccagcctattatttttttatatgacttcaaaaccatgggtaacaaarctgaaaatagataaatgggattgtatcaaactaaaattcttctgcacaatcaagaaaacagtcaacagagtgaaaagacaacctatagaatgggggaaaatattttcaaactacgcatctgataaaaactgatatg

SEQ ID NO: 417191 - DNA, 581 bp, Homo sapiens
ataccactgcactctagtctgggctggtttcacagaatgagaccctgtctcaaaaaaaaagttcaatgacattggtctgggcaatgatgttttggttttttgttttgttttgttttgttttttaaaatagagcctcactctgttgcctgggctggagtgcagcagtgtgatctcggctcactgcaacctctgcctctcaatttcaagtgattctcgtgcctcagccaccaagtagctgggattacaggcgtgcaacaccaggcccagctaatttttgtatttttagtagagatggagtttcaccatgttggccaggctggtcttgaactcctggcttcaagtgatccacctgcctcggcctcccaaagtgctgggattatgaaagtgagccaccacacccagcctattatttttttatatgacttcaaaaccatgggtaacaaagctgaaaatagataaatgggattgtatcaaactaaaattcttctgcacaatcaagaaaacagtcaacagmgtgaaaagacaacctatagaatgggggaaaatattttcaaactacgcatctgataaaaactgatatg

SEQ ID NO: 417192 - DNA, 467 bp, Homo sapiens
tgtaataaacagcagttttgctgattgcggctgattatgttaagcagcttgtactgtgggtgtcagaggagacttaatagctcctataactaatctccacgactgacctctcccctcggctgatgaagcctattcaaaaatctgctgccctttgctcattttcagatcttatatttctgaactgtttggatcgtgcatatatttgctaaagttgttgtgtacaggatttgtgtgtgtgtgtgtgtttaaaaaaatatacaatccrtgaagaaagattcctgccagggctgtcttatgcattatttaaaaaaaggaacaaactacacaaacagtaaaaacaacgcatatttacaacattcatatcagatactgtgtcatttattatagcttaagaccgtttctgtattgaaagtgtgcgaagaaatatagggccaacattttttactctaactttaaaataaagggta

SEQ ID NO: 417193 - DNA, 569 bp, Homo sapiens
cagtctgggtaaggggtacatggcctggactctagaatggaggggagtcaggagggaggagatgggaaaatggaaagatctagagcatattttgggaactaggtcaacaggacccaatcctgatggcctgaatatgagggcaaaagaaagacaggtgtggggcttaagcaactgagtaaatggtgagaaattcctattagacacacccgtttagacatcaagcagttggttggatatacaaatttgaaattctggggccagttcaggactgaagatagagatctggaattgatcagaatataaatgatgtttaaacccacaggactggataaaatcagcaggaaagggagaatagatagaggaagaaagtggacccagtcttggctgctcagcatttcaacacggggaagtagggcagccaggaatgggtgagggaggctgagaaggagcagccaggaagtaggagaaatctaggagagtgtggtgtccaaaagccaagagaagaactgtttygccctgaagaattgtatctaggctcaactctgagctggagttattcacaaacaccc

SEQ ID NO: 417194 - DNA, 539 bp, Homo sapiens
tctggagtatgtgttttcttacgacagagcccatagtctattccatgcctaaaatgggactatactcagagtccagtgttacataagtctctaaatgatagaatgaatgtataaatgaattaattctagcagaaacaaataaatatttaatactataccacaagtacacagataatctatgattcattcaataatctttaaggatatcttcttcaactcagaaaagaaggcttcttaggaaacaatggcattgccccagaacgtactgattctcagcccaaggaagacarggtatagctcaaagacatatgtaggtatggtgtttgtctaatggagtggattgtaacttactacaaagtatgcttaaattttaataatggaattgttacaacttgggctaaaaggaacagagatactcaacatgatagaatgcatggtgctggttcagaatgactaagtattcaatggatatttactttatttggggggaaattgcaaggatgtttaacataagctcatttgatttcaattttgtgtag

SEQ ID NO: 417195 - DNA, 409 bp, Homo sapiens
tgatgtgtctgtttttctattcccctatggcatattacatttggatcaaagtgtatattatctggtttagtaaacaaagcaataagtaatttgctagtattaattttatattattttgaaatactgacaacctttttaaacaaatgctttaatcttaatattttaatgatacaaattaatcctaaatagaaaagaatctcaaaacaagtaatggattgaatttaatcaatcaattgaattgtactttagaaacactaccagccaaatctatgtaatcaacaataaaactcacatacaaatttacattaattgttttcaataagaacgagccattgactatatcctctcaagacaacaaggcactttggtattaaaatataattttttwaaaagtcacattcaatccatt

SEQ ID NO: 417196 - DNA, 452 bp, Homo sapiens
ttttcaaacttgaaatgtgaaattacccatcacaaatgcattgtgtttttttctcatgaagatatgcaaggtagaggtcacgttctatctgtccacgtaacaagcaactgaaaaaaaattttaagctttcaaaaataatagcatttacacatgctgagttctgttaaaaagcatcatgatatcaatttaattcattctgtgagttttgaaaatacatataaagtttataacaatataygtaactgtgtattcaatacatacaatatgcttttcaaaacgtctttgtctcatggctaaccttgttgctataatgtatgtgacaccaggaacattgttttgtctctctatacaaaatcttttcttataacttttggtagctatgcacatcaagaaagcaaaatatattgaaaataaggtatttggtagaaggttgtatgccttcctattctgca

SEQ ID NO: 417197 - DNA, 619 bp, Homo sapiens
gtacactatatagttatgaagtatatttcagaagaattcatcaacattttacttagtttttccttataaaggacaaatattaccttgtcttatttatatttacactactcattcattaaaagaggtctagaargtaaaaaaccaagtaccaaagatttttaaccatggtttttcatttgccattaagaactttttctcattctacccatccaggaagcattattctgcctcatctatatttcatatgtttttaaacttcctttacttttctcaaaagcctttcaataagctctgaagaattctaccatgaaacaatattcctcttattttcctggaaatgtaccacttctttataatttctattttattgttggcctttattgtttcctatggtaaaaacttatgtgatcaataggaacttcatgtagcatataaaataaaatttataattacaacagaatatttatcaaaggagcacatcaaataccaatagcaagacaaacagccttcttgttaaaggttaattatcagagtttcattcaaaatgtatatggtggaaaaaaaaaaaaaaggtcaaggaagagactcaaagacttaggaatttggtagtagtcactag

SEQ ID NO: 417198 - DNA, 630 bp, Homo sapiens
aactctggtcttcaaatgagtacactatatagttatgaagtatatttcagaagaattcatcaacattttacttagtttttccttataaaggacaaatattaccttgtcttatttatatttacactactcattcattaaaagaggtctagaaggtaaaaaaccaagtaccaaagatttttaaccatggtttttcatttgccattaagaactttttctcattctacccatccaggaagcattattctgcctcatctatatttcatatgtttttaaacttcctttacttttctcaaaagcctttcaataagctytgaagaattctaccatgaaacaatattcctcttattttcctggaaatgtaccacttctttataatttctattttattgttggcctttattgtttcctatggtaaaaacttatgtgatcaataggaacttcatgtagcatataaaataaaatttataattacaacagaatatttatcaaaggagcacatcaaataccaatagcaagacaaacagccttcttgttaaaggttaattatcagagtttcattcaaaatgtatatggtggaaaaaaaaaaaaaaggtcaaggaagagactcaaagacttaggaatttggtagta

SEQ ID NO: 417199 - DNA, 630 bp, Homo sapiens
aactctggtcttcaaatgagtacactatatagttatgaagtatatttcagaagaattcatcaacattttacttagtttttccttataaaggacaaatattaccttgtcttatttatatttacactactcattcattaaaagaggtctagaaggtaaaaaaccaagtaccaaagatttttaaccatggtttttcatttgccattaagaactttttctcattctacccatccaggaagcattattctgcctcatctatatttcatatgtttttaaacttcctttacttttctcaaaagcctttcaataagctctgaagaattytaccatgaaacaatattcctcttattttcctggaaatgtaccacttctttataatttctattttattgttggcctttattgtttcctatggtaaaaacttatgtgatcaataggaacttcatgtagcatataaaataaaatttataattacaacagaatatttatcaaaggagcacatcaaataccaatagcaagacaaacagccttcttgttaaaggttaattatcagagtttcattcaaaatgtatatggtggaaaaaaaaaaaaaaggtcaaggaagagactcaaagacttaggaatttggtagta

SEQ ID NO: 417200 - DNA, 551 bp, Homo sapiens
atgttatgaactatttaataccaggtattggggatatagaattaaaaaaaaggggcaataacacttgtcctcacgaagctcacactctactgggtaattgctaaccaacacttatttgacgcatagaatgtcaggcattgttctaaatgcaatattcatatataatacatcaatattcatatatatatartatatgtctattattaaatacacacacactacgtatatacatgcactctcacttaaacttgacaaccacaaccacttcatgggacagataataaaaactgatatttctattactttaagcatattacctgtaggcattaagtaacttgctcaagatcccacaggattagaagaaaatatgtaaagtgctcagagaattgcctgttacaaagaaagagacagatatatagataaattcatttttgcttaatattgttatgtatttttccttcaaaaatgtgaaagtattcaaacaacacagaaatatgtgaagtaaaaaaaagagtcatttctactgttaagtgtttggcttttaacttata

SEQ ID NO: 417201 - DNA, 593 bp, Homo sapiens
tctcctttccccaagtggacagtgtctctctcagcactgcaatacctagggttggaggaggagtgatgtaggcaattccatggtcacagagactgacacagtcctagtttgccaaatcctactgccactgacaccagtgcagccctagagcatgcccaaggcctgcagcctgcctgccacttaattcagggcccaaggccactgtattcagctgatgatgatgcaggtcggatcttgagtatatcccactgggacaacaggtacctgtctcttgccagggtggatccatgagtgttagcctgatgtctaggactagaggcttttgcctagtgcagggtttcactatggcagsccccctacagggttccaaggcaaaatcttatgcttatatttttttccttccctcaagcaaatggtatctctctctgctttactgcctgggattcggggaggggtgatgtgggaaatgtgaggctgtccattctactgccttcaattagtcttttcctgttattatgataagaccaggtagtactgtgatctctcttctggttttcttacatctcatgaagatttgtttgagtgtggatagt

SEQ ID NO: 417202 - DNA, 587 bp, Homo sapiens
tcttactctgtcactctttatacatatttcaaaaygccatataaacaccataaatacatacaatttttatttgttaattaaaattaattaatttttttaaaggaaaagataaaaaaattgacaagtggaaagaaattgtgtgagttaaaccaaagtaattctgagcatgttattatagtagtctttatattttattacccttataaagggttgtttaattatagctctctcaaaacagattcagcttatctggaacctcaggcatctaaataaagagtggatcatacttacatgagtgtcaatacatgctatatcatgattctcagaaagagggagaagatgaccttccatttaattatgtaatgagattcatcactagaaaattaattgacatgtctcctgtgacactgtctaatcaatgttgaagacagttgactatcatttaatttaactcatttaatattataaacacacttctcattttaagcctttgttggcttctatctatacagtgctctatatttttttcaaatatactcattccatctatattcctttattctgcagatggctattgaatgcctact

SEQ ID NO: 417203 - DNA, 587 bp, Homo sapiens
tcttactctgtcactctttatacatatttcaaaatgccatataaacaccataaatacatacaatttttatttgttaattaaaattaattaatttttttaaaggaaaagataaaaaaattgacaagtggaaagaaattgtgtgagttaaaccaaagtaattctgagcatgttattatagtagtctttatattttattacccttataaagggttgtttaattatagctcyctcaaaacagattcagcttatctggaacctcaggcatctaaataaagagtggatcatacttacatgagtgtcaatacatgctatatcatgattctcagaaagagggagaagatgaccttccatttaattatgtaatgagattcatcactagaaaattaattgacatgtctcctgtgacactgtctaatcaatgttgaagacagttgactatcatttaatttaactcatttaatattataaacacacttctcattttaagcctttgttggcttctatctatacagtgctctatatttttttcaaatatactcattccatctatattcctttattctgcagatggctattgaatgcctact

SEQ ID NO: 417204 - DNA, 631 bp, Homo sapiens
accattttaaaatatgggagtgctgtgttcttccttaaaaaaggcctattctcaggaaaaactatttcatcagtgactaacctgctggggttttatcaagcttgagggaagggaaatgcccaacttcagccaactcttgccattctatcttacttaaaagaggtgaaaaaaaactgagaaaaacttgtgacgttcacagtccagaggcataaactcatgaaaagactgagagctaataataggactatagaacacttctccccaccccacctttaactaccatgttttaaaaacatgtttaccrcagtacttcttagccagtacatccaattaagccatcaagaaaaattacaaggcatactaaaagtcaaaaaacataatctgaataaacagggaaagcatcagaaccaggcatggcagagatgttggaattaaaagactgggaatttaaaacgactatgagtaatatgccaagggccctaatggataaagtagagagcatgcaagaacagatggtcaatgtaagcagagagataaacattctaagaaaaaaaaggattaggattaaaaaacaacataacaaatgaaggatgcttttgatgggcatattagtagactggacatcactaaa

SEQ ID NO: 417205 - DNA, 481 bp, Homo sapiens
gttagttaattagagacagggtcttgctctgttgcccaggctggagtgcagtggctcaatcacagctcattgcagcttcgacctcctgggctcatgcaatcctcccacctcagcctctcatgtagctgggaccacagatgtacatcataacattttgtttttgcagagatgaggtcccactgtgttgcccaggctagtctcaaacccctgggctcaagtgatccttcttccttgacctcccaaagtacttgaattacaggcgtgaaccactgtgtccagcccaagaaacccactgtaaatrtagacataggttgattaacagtaaatggatagagaaagatatttcatgccaataaaaaattgaaagaaagtagaaatagctatattaatttcagacagagcagatttcaaagaaaaaaattatcaggtttaaaccggggcattatgtaaaaaatataagggtcaattatccaagaagaca

SEQ ID NO: 417206 - DNA, 467 bp, Homo sapiens
gttttacaaaatgttggcaatttcagttaggttattttcttttagaatatggacatatttttaccattttaccaatatgttttgtttccatctactatcttgttagttttctgtttatcccacctggttttttggtttcttttttctactttttctgattttgtttggatgaattatgcaggatctgtgttacattttatcttttctagtgattkattaacaacaacgtttagttttatttattttgtagttttgttaggatttacagtatgcctcttttaaacactgactaccatcaaataatattcatcaaatatcaaataatatataatgtaagaaacttaaaagagtaaactatcatttctgcccgccttactttgtgatcctcatcatacatttcacctctgcatatgttaactatacaatgtagttattatttttatttaaataattaatttgcccttaaa

SEQ ID NO: 417207 - DNA, 621 bp, Homo sapiens
tcaaaaagaaaggaaatggcttgctcagtgttaagccaagcacatattttaagtgttgtatgatttggacaggacaataaaaagggatatccggtaaaaaggaagaatagataagaactatctgccaaaactaaactttaagagatgtygtcatgttacctctttttttaataccttgaacatcttggttacaatttaatcttactatagcctgagagtttaaatgccaatacatgtttatagccctagccctgacactaagtagatttgtggtcttcagaattcctttacaattcaatacaatacatatattgattgtctaatacatgccaggtgctgtgatgggcattggaagtatgaagataaattaaacatggttttgccctaaaggatttcactgaggatctggttaagtcatcaagcttctttgagtgccaccttctcatctgtaagagtggggcacggaaataaatatttcatctgctccagaaacttttattgagcacgcttgtcttgccatacactctaggagatatcaaggaatgaaaataggactgtatcactataacaattcaattacaaagcatgcctagtctctgcccttcgaagaggtcacaatta

SEQ ID NO: 417208 - DNA, 621 bp, Homo sapiens
tcaaaaagaaaggaaatggcttgctcagtgttaagccaagcacatattttaagtgttgtatgatttggacaggacaataaaaagggatatccggtaaaaaggaagaatagataagaactatctgccaaaactaaactttaagagatgttgtcatgttacctctttttttaataccttgaacatcttggttacaatttaatcttactatagcctgagaktttaaatgccaatacatgtttatagccctagccctgacactaagtagatttgtggtcttcagaattcctttacaattcaatacaatacatatattgattgtctaatacatgccaggtgctgtgatgggcattggaagtatgaagataaattaaacatggttttgccctaaaggatttcactgaggatctggttaagtcatcaagcttctttgagtgccaccttctcatctgtaagagtggggcacggaaataaatatttcatctgctccagaaacttttattgagcacgcttgtcttgccatacactctaggagatatcaaggaatgaaaataggactgtatcactataacaattcaattacaaagcatgcctagtctctgcccttcgaagaggtcacaatta

SEQ ID NO: 417209 - DNA, 587 bp, Homo sapiens
tgtccagctgcacacaaaaacaaggtcaatatgtttaaaacagcgttattcagaatagcaaaaacaacaacagcaacaaatccaaatgtctacctgtggtagacagataaataaagtatggtatarcagcacattgtacaccaatgaaaatgaataaaccacagctatactagcaacatagataaatctaaaaaaaagttcagccaaaaaagcaagtcattgaggaatacattctgtatgattcactacataaagtccgagaccaggaaaaataaatggacaaaacaacaaaaaagaaagtgattaacattaagtttagcttaaaaagttcctctagtgtggagggggagatgatatcagggatgaccatacacgagggttttaaagttcatgcactctttcatatgtgtgatgtgtttcaaatgaaaaaaagattaaacaaacactacctcatttcacctcccaaatctctagcattgagtcacaaaagacacagaatgaaatttataataccatatgatttatataagttaaagacatatacacacccaagccaacactacatattttacaagtaagcataaata

SEQ ID NO: 417210 - DNA, 597 bp, Homo sapiens
taaggacatatttcaaactcattaacatgaaggcctgtggcaagaagggaagtaggaatcagacagggggaaaagatagaatgggtcaagagaagtgccatgaatgaattgtttttaagttatgtagggttatttattccaactatgttcccaaaaggatttcaggaggcagaaaacatggcaaaaatattattgtagttctccaatccatgttccgcatctttgaggcatttaattttctagattccatggaggtcaacaggaacgttctatattgtaaaggaattcaaatgattttgacaaggagcagtttattttctgaaagctaagctgggtattagggaatggcaggccttggaattagagagggaagctgaggacagaacgtgtgttgggcatgactagggcatttycacgcttcattcctatcccacgagctctgtttttcctcaccctgtcaggactgaagggaaggagaaagcaggtgccccctttcccagtctaatattacacaattgatcatacagaatggagtcccttgccaagctagatggaatgcaggttttttggttgccctggtagagccacagctgattg

SEQ ID NO: 417211 - DNA, 588 bp, Homo sapiens
aagataaagaagctgaaattagagtgcccagcaaatagatttttcatttgctttgaactaaactttaataacccatgacctccgacctaactgaatattctctcattttgatataaatgggagcattatttttggtgattttctgcagtcctaaccatttaatacgtttagtctacaagataattttttagggatagcattaggagatatgcctaatgtaaatgatgagttaaggggcgcagcacaccaacakggcacatgtatacatatgtaacaaacctgcatgttgtgcacatgtaccctagaacttaaaataaaaaaagaaagaaaaagaaagaaagagaaaaaaaaaaagaaataaaggcaaaaagagatgaggaaacatctcttctatatcaacatagagtgctaaactatatattgcctttaagaaaagttcctttttacacttttcttattatcttggatcatgtccaatctgtaaggaaataaacatgtgaagaaagagttctgtggaatgttaactgctctgctatttttcttctttttatcatggcccaagattcaccaaagttgagataaattcac

SEQ ID NO: 417212 - DNA, 588 bp, Homo sapiens
aagataaagaagctgaaattagagtgcccagcaaatagatttttcatttgctttgaactaaactttaataacccatgacctccgacctaactgaatattctctcattttgatataaatgggagcattatttttggtgattttctgcagtcctaaccatttaatacgtttagtctacaagataattttttagggatagcattaggagatatgcctaatgtaaatgatgagttaaggggcgcagcacaccaacagggcacatgtatacatatgtaacaaacctgcatgttgtgcacatgtaccctagaacttaaaataaaaaaagaaagaaaaagaaagaaagagaaaaaaaaaaagaaataaaggcaaaaagagatgaggaaacatctcttctatatcaacatagagtgctaaactatatattgcctttaagaaaagttcctttttacacttttcttattatcttggatcatgtccaatctgtaaggaaataaacatgtgaagaaagagttctgtggaatgttaactgctctgctatttttcttctttttatcatggcccaarattcaccaaagttgagataaattcac

SEQ ID NO: 417213 - DNA, 528 bp, Homo sapiens
tttttgataaccatctgactagaattgaaattttcctattcatctttgtttccaactaatttcttttgttgacttttccagtcatgtcaaccatccaaccactgaagaacccagactctattgttcatcacttttatgccagttttttaaagttgtaaaccacaaatttaaaaaattttacattattataagcaggtaagtttaccttaagtaagtaagaaagctccccaaaatcacatttttgattatgagagacattgtatattttaaatcttatagaaattacattattaccaaaaagttcatgaaaaacggataacaatgatgagggaaaaggatgaatgatacctgacactgaaatttaagcctgaatccctggggtatattggtacaatgatcacagaaakgtatgttgttttgagaaaaaccaccattaatggttctctccttataggcgctaaattgtataatgacacactttggtttatgatttctatgaaaacagagaatttcatgtaaatattataa

SEQ ID NO: 417214 - DNA, 514 bp, Homo sapiens
gttgtaatttagaaggacatttccttgcagatatattctggaagatgtcactatcagcagcagaaattcagctgtcctgaccaataagaaacattccgttggtctttgcacaagaatgtgcccacttggactgtttaatgaattgtaggtctcacaaattgcagccactgtgtctaaggaatgttctctctcattaaacaaattatattatttctaggcctcccccacactcaaaacatactcaattttcttaatgactctgtaagacaaggtttagataatacagaaggcatggatatagtatgatactgaggtcataacaaatattcaaagtgactcatggagtgttagccacagggatttgcctcctctctgagggattttgtttttgtaggttcactcataaagattaaaagaaataggcaatgggayagtaaactggaaaatatatttgaagacataattcaatttctatccagtggcaaaaaaaaaaaaccagctaagacgttataat

SEQ ID NO: 417215 - DNA, 484 bp, Homo sapiens
cagtatctacttaccaaggttgtgcgaagatcaaatggataatatatgtaaagtaactagtatagttcatggtacatcgtaagtgatatgtaaatgttggctgtcgttgttattgtgcttgttattattattattagctggagtttgtatccctagctggctggccartatgttgtattcagtccctgatgccaaagtgatttatccctaatggaacagagactatttaaactttattgagggacatccaaatctttcactgggctctcaagagagctctccagaagactgttaaaatatagtcagataatatctgctgtggaactcatacaggggagtttaagcttctgccactcagggttcaaacatgagatggccaaaactcctccataagaatgagtttcctgcctttcctgccacagccagggacccaggttctggaccttgctaatgaagcctgggtgatacatggagggataagcag

SEQ ID NO: 417216 - DNA, 634 bp, Homo sapiens
cagtttgcttgtttttattaagaattttaaatgatttacactaaatacccaacatttaaatttaaagccatttagtctaaaaatttaaaaattgcaaaaatttatttaaaatataatattgaaccaaaaggcaatgattatttaaatacattatgatggatattatagatttcacaaaaatcatgtttttgaatgatatatatacatataaaaggctcatgataaggtattaatggttttaaaaagaaacatgttaagtggtataaccagtattatttttgcaattttttaatacattaaaattaattaaatattgactgagagtggagtctgaatcaaatggactaggtttgaatcttgactccaccatttggttattggttacatgacatacaatatataaattatttaacttaccaatgcttccatttttcttccrtgaaattgacatagtagctgcacctgccttataacattactatggaaattaaatgagggattgacttattactcataaaagtaattgaggagccaggcgcggtggctcatgcctgtaatcccagcacttcgggaggccgagatgggcagatcactagaggtcaggagttccagaccagcctggccaacatggtga

SEQ ID NO: 417217 - DNA, 506 bp, Homo sapiens
tagaccttcacttgtctactaacctcaaatgtgatatttggttaaagtgcctaaaaatgtctgaagttaatgaaactgtccagtttagtctttccttcttttttgatctttgttatagaaatactgtttatccctgggttgggctcctggattatcaagttgtccataatagctgatttacatagatgagacatactgaattaggatcaatcaggaacctgtattatctagtttattttctgaataatactaggagaaaaacagtgctaatttcccagtgctgagcaagatattaaacatgatcagtgatcaggataatgggtgtgacaagataataggtatataatgattattactcttgtaataggstttcttactaactaggaataatgagaaggcatgagagatggcagatctaaatggatgctactaaagtgatcagggagtaatcagagatagaaattagcatggaacattaagagctctcagggaccttacgagccttc

SEQ ID NO: 417218 - DNA, 611 bp, Homo sapiens
atgcagtctgagacacagtggcaacctggtatccttctattcatggtaggacctctgctaaaccacagcamtgtttcattgttttggttgaagtccatgctgcccatatggcaaagcttctggcttgattcctatttgagtcatcggttcctcctttctgtatacacttatcacagaatactcttacatcagatctcctaggtgcattgttactggtcacattcaaggaacaagaaagaagctgtggatccattatgatagcaataaatctgctgccacagctgggaattctgtattttatattatccacagatcccatgaaaacttaacgctgctgattgcagcttttatttgttcatttgtttactaatttatcaaatatttatgatgtgtctagtgtgagacagaatatctacctggtacaaaagattcaaagatgaataaaagtgccatcatcaaagaactcatgttctagtgagaaccaaagatataaaaactgtcaattataatataatctaatgaatataatagcagaaatatgcatagggtattccagggacaccaaagagagatacctaacccagatgggatatgagacaagtaaggctttc

SEQ ID NO: 417219 - DNA, 603 bp, Homo sapiens
ggctgggaagaaggggaacaatcaccgaatcaccgttttctttgatctacaccgttttctttgatctacactgagctctcctcaatggcactgacaaccaatgagtagcaaaaaatagctgaagtgaactattccttaggtgaattatttgttgtcagtgtggmcagagaggcaccactggcatcccggaatctctcagatgtctccaaggactgaaataatgccaaaaatttagcctgatgattctgtacaagagaaaagttagtcttcaccttgctttctttgtattgcaaagtgataataaaggctgacataaaaaataatttaatgacaatggatcttttcaagtatgtacatagctgaataataataaacattatgtgacacctagagatcatctgcatagataccatcaagaccagattgccttatccatcaatctacctcttcccagtctgactattgcatcattgtcttttcaaaccaagtgaaagtttgatagacactcatacagatatcatttgaggaaaattatgacacctaaaatgtatttcttcacaagcaatttgtaacaaacagtctaatgagagcaatacaacctgt

SEQ ID NO: 417220 - DNA, 553 bp, Homo sapiens
tagtaaattatgacttattcaacactttgtaaggaaaaggagttgattttagattgaaagcacagccggacctagggatattgtcagaacttgtacacttaactgcattaatttctgccaggacaatcagagaacaaagtaaagtaagaagtaaagtaaatctgactggtcagcttaacttgctaatgtcatttttttttaaaaaaggcaagacaccaacagaatgagttgtaacaggtttgattatatgggcacaggcacctgttagtatgactgaaacacagaacctgggcactcycactagaggccacaatgaccgccaacttttatcacttacttcttcattgattcctcaataactaagttggtcatttaatttgacattagctgatatgctactatacatttttttttcattatttcacatttatatgctttgatattttctactcccctcattctttcttgagggccaaacagaggcaatgcttattgaatgtctatgtgatcttctagggagagtggaggaatgaaatttttattcatttagtct

SEQ ID NO: 417221 - DNA, 553 bp, Homo sapiens
tagtaaattatgacttattcaacactttgtaaggaaaaggagttgattttagattgaaagcacagccggacctagggatattgtcagaacttgtacacttaactgcattaatttctgccaggacaatcagagaacaaagtaaagtaagaagtaaagtaaatctgactggtcagcttaacttgctaatgtcatttttttttaaaaaaggcaagacaccaacagaatgagttgtaacaggtttgattatatgggcacaggcacctgttagtatgactgaaacacagaacctgggcactcccactagaggccacaatgaccgccaacttttatcacttacttcttcattgattcctcaataactaagttggtcatttaatttgacattagctgatatgctactatacatttttttttcattatttcacatttatatgctttgatattttctactcccctcattctttcttgagggycaaacagaggcaatgcttattgaatgtctatgtgatcttctagggagagtggaggaatgaaatttttattcatttagtct

SEQ ID NO: 417222 - DNA, 619 bp, Homo sapiens
accatggagtccttatgcttcgttcagatattgccaatataataacctttagggaataagtttccattcagtaacacatgttgcctttacttgtcctctctcgttcaatctgacacagttcctccatctcttctcgactttcgtaatctcaatccttttgaagactacagttattttatagaatgtccctcaatttgagtttgtctgatgtctcttcaggttatscatttttattagaaacgtcacaaaaaatatgctcttttcttctcactgtatcttagtcagtggtacaggatctctgtaaaggtaatttttgctgacgtttactttgatcacttgattaaagcatctgtcaggctttccactgcaatattattctctgtcttgtaattagaaagtattttgaggggaggtattttgaagttatagcaatatctcattcttcattaaatttatttttttcaattctcaatttatattaatttgaactcaaggtttcctattttgttcaacaggatacaaaatattactaccactgtttattggagctctatgggaccttctcgctactttgttgtcagttgtctcttttccaggaaatgaattaagagtgatgaca

SEQ ID NO: 417223 - DNA, 619 bp, Homo sapiens
accatggagtccttatgcttcgttcagatattgccaatataataacctttagggaataagtttccattcagtaacacatgttgcctttacttgtcctctctcgttcaatctgacacagttcctccatctcttctcgactttcgtaatctcaatccttttgaagactacagttattttatagaatgtccctcaatttgagtttgtctgatgtctcttcaggttatccatttttattagaaacgtcacaaaaaatatgctcttttcttctcactgtatcttagtcagtggtacaggatctctgtaaaggtaatttttgctgacgtttactttgatcacttgattaaagyatctgtcaggctttccactgcaatattattctctgtcttgtaattagaaagtattttgaggggaggtattttgaagttatagcaatatctcattcttcattaaatttatttttttcaattctcaatttatattaatttgaactcaaggtttcctattttgttcaacaggatacaaaatattactaccactgtttattggagctctatgggaccttctcgctactttgttgtcagttgtctcttttccaggaaatgaattaagagtgatgaca

SEQ ID NO: 417224 - DNA, 598 bp, Homo sapiens
gaaaatggttttcatgtatctaaaataaatrgtaatttgaaaaaggtcagttctccaaaggactgaaacctagatttaaattacttcatcctaactgaatttaggtgaatttctcctaacctttacccttgtctatctcactgcccaaaacaaagaatatattatctggaggaaaatcacacaacatccagagcctcgagtcatctctaaaattttgaatacgcaatgtctggcattaaaccaaaaattaataaatatattgaaaggtaagaatttactgaaaaccataaaaaccaaggaaaaaaacagggaacataaatagaaccaagaagtgtaatggaattaacaaaaatgattctaaattgtgattaatatgttcaaaaaataaaaggacaatatagataacttttttaaaaaatgtaaaactttaaaattagtgaatataagtttttgataaatgaaaaataacatgtttcaagccttggaagacagatgaacatccaaatatatgaagctcaacaatctccaaacagagttaacccaaagaggtccctttataattactgtcaaaaaccaaagacaaatgatattaaaagca

SEQ ID NO: 417225 - DNA, 587 bp, Homo sapiens
tagagactccaatatcaaaggtatttaaatataagtagaaaaacctgttattgagagtgtcctatagtgaattcaagcaataatgggtaattgaactgtattagcccattttcatgctgctgataaagacatacccgagactaagcaatttacaaacgaaagaggtttaattggacttacagttccacatggctggggaagcctcacaattatggcggaaggcaaggatgaccaagtcacatcttacatggatggtggcaggcaaaaaatgagagagcttgtgcaggagaatgcctgcttttaaaaccatcaggtctcatgagacttattcactatcactagaacagcataggaaagacttgcccccatgattaaattacctgccaccaggtctcttccacaacacatgggaattcaagatgagacttgggtggggacacagacaaaccatgtcaggaactaatgtggtttttcccaatcctgaaattctttgatggacaagttatcatcagaagacaggataatcagaaytcaacatacttgatttgacagagcatggaatagaaacctgatgccagatagtgata

SEQ ID NO: 417226 - DNA, 558 bp, Homo sapiens
gacctaagatctaaatgtaagagctaatattrtaagtatcttcaaagaaaacatggcgtaaatctttctgactttgaattaggcaatgatttcttaaataaatgacactaaaaacacaagcaacaaaagaagaaaataggtaaattaaaattaaaaccatttgtgtttccaaggacaatatcaagaaagcaaaaatacaacccacagaatgagataattttttttaaaatcatgtattagttaagggaggaatttgtatttagaatatgtaaagaactgttacaataataattaaaaggcatataattcaatttttaaaaatcaacaagagatctgaattaacagttctccaaagaagatacacaaaaggccaataagcacatgaaaaggttctcaacatcactagccatcagggaaatgcaaatgagatctacaatgagatatcacttaacactcactggaatagatatataatcaaagtgataatatcaagtgttggtgaggatgcagagaaattggaaccctcatgcactgttggtggatacccacgtgatataa

SEQ ID NO: 417227 - DNA, 526 bp, Homo sapiens
cattgcagtcaaatagaactgggttcagatttgcctttgggtgactcagcctcagttttcacctctgaaaaatgagttgtttcatggattaaagataatgcccagtacaaggcactgggcacatagtaggccctgaaaaaatgattgtatatttccttattagtttagtgatcaagcttactgtgattatttgaatatatatgatatatttattcaaatataacagtgattctctctacttgggagatttgtatttgtgtttgtgtgtatgtgtgaaagagttggacctagagaagcttgcaacagcagtgaataatgagcctgagcattgtcagagcagaaagaaatgtatattctctgcaaaacagacaaatatgtttctgttgtcattcaaattattaataaaataataaacaagaaagaacttattgttgaactacattatataccactagaaatacaactatgaatgaatatmaaatgacaatgattacccagtaatttttgggtcaggttgcttagccac

SEQ ID NO: 417228 - DNA, 567 bp, Homo sapiens
ttattgctcctagactttgcagaaagcagtgtgtgattgaaaggcatacagaccatgtttcccattgcatatatatatgtaggtatacatataatttaatgatgttatcttcacacacacacatgcatacacacacaaataccctcacaaaaaccatatcctacattattcaaatcaatattgattagaattttgtaattcaagttctatgaaaatacttattaacatttcatcattttatayctcagataagcacacaatgcttttccaaactattcagttttgctgtggaacaaatatctttattaaatgaatattcatcaataatgaaacactaactatagtgtttgaatattttaaggttactaatgtactgctagtcaaaaatgttttagaaatccaaacttttgcaaatatgcctctattcacaacaaagtatttatatgtgaatgtcatgatatctgggattttctttaaaatactcctccagcacctctcccaaatagtggggaggatagatgaaacaagatccccaaaatgttataatttatcaaagccaaatgatgg

SEQ ID NO: 417229 - DNA, 529 bp, Homo sapiens
cctggccaatgtaatgaaaccctgtatctactaaaaatacaaaaaattagctgggcgtggtggtgggtgcctgtaatcccagctacctgggaggctgaggcaggagaattgcgtgaacctggaaggtggatggttgcatgtgagcccagatgcgagcgccgttgtactccagtcgtgggcaacaagagtgaaaatctgtctcaaaatataaaaaaaaagaaaaagaaaaaaaaaagtcaccgtaagrttttaggccaaatatagcctctctttatctattccagtcatttactctgaccgtggaagaacttttatcagtgccagcttccttcgatactggcagaactaaagccactcagaagtttcaggctcttagctttctattgtacagatgaagacatgtaaataccaacaaaatattcaggccaaggaattgcaaagacatacttaagtagggaaacagaaaaaaagtaccactcatctacgtgtcttaagttttaggatatgcagaatttctgatatgactctg

SEQ ID NO: 417230 - DNA, 529 bp, Homo sapiens
cctggccaatgtaatgaaaccctgtatctactaaaaatacaaaaaattagctgggcgtggtggtgggtgcctgtaatcccagctacctgggaggctgaggcaggagaattgcgtgaacctggaaggtggatggttgcatgtgagcccagatgcgagcgccgttgtactccagtcgtgggcaacaagagtgaaaatctgtctcaaaatataaaaaaaaagaaaaagaaaaaaaaaagtcaccgtaagawtttaggccaaatatagcctctctttatctattccagtcatttactctgaccgtggaagaacttttatcagtgccagcttccttcgatactggcagaactaaagccactcagaagtttcaggctcttagctttctattgtacagatgaagacatgtaaataccaacaaaatattcaggccaaggaattgcaaagacatacttaagtagggaaacagaaaaaaagtaccactcatctacgtgtcttaagttttaggatatgcagaatttctgatatgactctg

SEQ ID NO: 417231 - DNA, 625 bp, Homo sapiens
tggccatatgtttatttatggaaggtgagtgaggagtatgygggtgatgttatagtattctctctaatttagtttaggtttaaaatttctattgcaaatagttaaaagaatcatttgtggtcttgttaaaaattcagattcctggactccaccacagatcttttaagtcagagtctcaaggatgaaagatagaaaatggcttttaaagtagtccacttgtgctcactgaagtttgaggatcactggtaaaaagtttccttatgtacctcactcattgtgtatccatgtcatccgtgtgtatttagtgtttttcatcattcaccctattttcccatttgcggaatgcaatagcaagttaaagcaattatactgaatttggataattcaaactttaaaattttgtttcaaagcattcataaagtgaagccaaataaaatttaaaaaacctttatttttaactgaaataatcaaataaatacgttggcttttttttccactttcagctgggaatggattacttttgtgaatgtcttaaatttcttctcttaccagggcatcagcatcctattccagacatctacttgctttcaccagtagttccttgttctttctcagatgtaccata

SEQ ID NO: 417232 - DNA, 330 bp, Homo sapiens
gaatttctgtattttaagtcttttccacactaaatttcattatatatrgaattagaaattgatccttctgtaaggactgttgaccttttaagataaaaaaattgaaactttctagcatatattgaaaggaaatgaaaatatgatatactaatttaactcgttttaatatataaacatatatttaatatatgaatttaaataaagattatttctatttctaatctaatgaaataaaggttaaactaaaaagatgtcagtaactttattaaatataatacagcagaatgaataatcttcatactttatcaacatccaagtcccaataatttt

SEQ ID NO: 417233 - DNA, 330 bp, Homo sapiens
gaatttctgtattttaagtcttttccacactaaatttcattatatatggaattagaaattgatccttctgtaaggactgttgaccttttaagataaaaaaattgaaactttctagcatatattgaaaggaaatgaaaatatgatatactaatttaactcgttttaatatataaacatatatttaatatatgaatttaaataaagattatttctatttctaatctaatgaaataaaggttaaactaaaaagatgtcagtaamtttattaaatataatacagcagaatgaataatcttcatactttatcaacatccaagtcccaataatttt

SEQ ID NO: 417234 - DNA, 545 bp, Homo sapiens
ttttatgggagtgatatgacaggtaagtggtagagttgtgagccttcagggagagaactaacttaaaagcactctgaaatattgccaaacrgcattcatatgtaaggcattagaataataatgataattattgcttgtagtaactgatgtctgagagggcatcaacctggtatggtagcaggtgacacagaaggagaagagaccatgaacatacaatgagctcatttctcttctgctcaaggaacccaagtaattacaaaacttcagcatatgttttgcattacacatgtggctctgtcaaaaatgatggagtggtgtcactttatgtctctttgaactaaatgagagagagagatgagaagtaagtaggcaagagactgtatttgattttatctttctgcttaaactgtgttttcaatttataaaccaattggatacaaaatacttattacagaacatgactctttccttttatattagaggagttatcaacagagtggtttcttgtgcttattagaatctttgttcaaataaagccaagtaag

SEQ ID NO: 417235 - DNA, 545 bp, Homo sapiens
ttttatgggagtgatatgacaggtaagtggtagagttgtgagccttcagggagagaactaacttaaaagcactctgaaatattgccaaacggcattcatatgtaaggcattagaataatawtgataattattgcttgtagtaactgatgtctgagagggcatcaacctggtatggtagcaggtgacacagaaggagaagagaccatgaacatacaatgagctcatttctcttctgctcaaggaacccaagtaattacaaaacttcagcatatgttttgcattacacatgtggctctgtcaaaaatgatggagtggtgtcactttatgtctctttgaactaaatgagagagagagatgagaagtaagtaggcaagagactgtatttgattttatctttctgcttaaactgtgttttcaatttataaaccaattggatacaaaatacttattacagaacatgactctttccttttatattagaggagttatcaacagagtggtttcttgtgcttattagaatctttgttcaaataaagccaagtaag

SEQ ID NO: 417236 - DNA, 567 bp, Homo sapiens
gatttgcatttggggaagttcattctggtagccaggaggaggaggctgtagcagacggggtgagcatagaggcagagaggcctgaggaccctgctgctgtacccaggaggaaagacggtgatgtggctgtgggctgggaagaaggggtggaggtggagaaatgaaggaggggaaatttgctcctgagacctggctttgttggctgggggagggccggaaagggcgggaaggagtcaggatagagagggggccttgctgcacacagaccgctgggtttaatccctgggagaaggcctttctgcacagagcccawtctaataccctataggtgtttattgaaaatgggttcttaagggcactctggcagagcacagctgttagtacatgtcatacttaaagcaatttattcctccctccaaatcataaaagtttgctcgtttcacgtggggagagcagcacattggcattttgttgctctaatgggtaattactgtccagcgactgatgggggccatattttctgaactaaaaaagcggtgcttccgggctctgtccattggaaacagc

SEQ ID NO: 417237 - DNA, 596 bp, Homo sapiens
aagcatcctaaaattaggctggagtcctgcaaacaatctgtacacagggagaccctccccaaacattcgactttcccgcctggagtctgtagaccagaaggtatgggagtgagcctcttcctgcatctaaaacctcttcacggatctggagtttscacctcctggcctgcaggccaggcccaaagtttccgctgctggcggagtcagcgggaccctggtcattttcctgggaagcccacactgggaagcatgttttgcaccggccgccttcccttgctctccctctcacatgtcagaaacggcgatcgaggtgtgtgcctcagctgaggaggggcagacaggacctcatggggtggtggctgtggtatgtatctgtccctccagggaggcagcctttggagggtgtcaggagggtgcagagctgacctggagcaggctggactcctctgactgtctgctgagagggtcgagggtcaggacagagaggtgtgatctgggtcttgcttcctgcttcagactccgcctggctgtgccttcccagggtccccacccccaacttgtgtcctaataacccttcgagaccccctgtggacatc

SEQ ID NO: 417238 - DNA, 590 bp, Homo sapiens
acctacctggccattccaactcctacaggtgcractgtgacagacagctcaccacctccactcccaccgcccgcttcggccacacggggggggtcacctcaaattagggtcatcctgttacttctttttaaaatatgctttgggggtaaaatctaacaatgggaattcagtcccaattttcaaggaaggcctttgattccactcttttattattggttattcttgaacctcaaaatagatactaatattcccccaggccttttccaggttgttgtcagttagaaaaaaacagcctaggacagtggttctcaactgagggttgttttgcccctccaggaaacctgcggcaatatttggagatatttgtgattgtcaagactgaaggggcttgggcttggggtgctactggcatctagtggggagaggccagggatgccactgcacatctacgatgcacaggacatctccccaacaaaggatgagccagtccacatagcaactgtcccaaaagtgggcagccctgggcacacccgtcaacttaaacactggcttccttgtggggaccgcacctaaatctaaaaaaaaaaaaa

SEQ ID NO: 417239 - DNA, 463 bp, Homo sapiens
aaacatctctctacaataagcactttaaaatccttcagaatcttccatttaaaaattaaaaacaggccaggcatggtggctcacacctgctgtcccagcacattgggaggccaatgtgggcagatcgcttgagtataggagttcaagaccagccagagcaacatggtgaaacccatggctacaaaaaatgcaaaaaaawtagccaagcgtggtggcccatgcctggagtccaggaggtccaagctgcagtgagccacgattatgccactgcagtccagcttggatgatttccttaatggagccacatgtcttcagatcggtgtatgtctagaacaaagtttcttgaccttggcagccttgtccaagccaccagcatctccggctacaaaagcttttataactgtgcttctatcccgtcactgtgtcttgccccacagcagtagaatgatcattaaaaaaacaa

SEQ ID NO: 417240 - DNA, 622 bp, Homo sapiens
taggaaacaagttaattctatacagcatgttaaacctgcatcagcagattccagaaaattcaaattagcaaagacagccaggggcaggaggtggttaatttgtttaacgtaacaagggaattgacttttttctgaacttttaaaatcattttatctatcttggtctgtaagaattttcatgttgagctttctttccttagcagctaatatctctgatctttagtgagccttttttataaaaygagcatcccaaggtcacagtttgaatttttttcagtgttgcctttatttatttttaatcatagagggaggaaagcctccatcaaaattctgtctgtcatagaaggtaatattattactgtgtcagaaaggtctaagtaaatgtttgattaaaatgccagaagaggtgctgttggtaaaaactgctaaaccatagcatgctgtgttaagagacactattcttaggaggaggtatgatttctatttaaagttataggtgatggtttatgtgcacaatttggaggacaagataaaggacaaagcaagaaagtgttggaataaaatgaggctgcataaattgaagttgtaaaactggcttaaagggaaaggggaagttaaaaat

SEQ ID NO: 417241 - DNA, 598 bp, Homo sapiens
gataacttttcttctctaatctattacttccagattatacctaacaaacaacaaataatcaacagaacaataaaatacattgacaagccttgtgatgtttatttatttaaacaatgtaaaaatattgaattttatgattggctttttttaattctcagaaattagtttatctgaaactgaaacaaatcattatgctgcctgtatgggctttttcactttttcattgttataggtattagtattataagttatctcaatatgcttggagcaaaaatctcaagtttaacataaagccatgtataatgaaattagctcttcaagtcttgatacctttatgacaacaggcaagaaatagaggcagtgtaatsttacttacaagagagtaagatgttttaaaatgttgcttctgcactaagacattcaaataaaaatatcttctaaataatttgtgtaaaataattgatatttttatgctaaaatgttttatcagagtcacttttccactaggcttttgtgtgcaccaaatgaattgctaggctattaaaaagattatatctctctatttgtcctaagtgttgtgaggttcagagctggtgaa

SEQ ID NO: 417242 - DNA, 598 bp, Homo sapiens
gataacttttcttctctaatctattacttccagattatacctaacaaacaacaaataatcaacagaacaataaaatacattgacaagccttgtgatgtttatttatttaaacaatgtaaaaatattgaattttatgattggctttttttaattctcagaaattagtttatctgaaactgaaacaaatcattatgctgcctgtatgggctttttcactttttcattgttataggtattagtattataagttatctcaatatgcttggagcaaaaatctcaagtttaacataaagccatgtataatgaaattagctcttcaagtcttgatacctttatgacaacaggcaagaaatagaggcagtgtaatcttacttacaagagagtaagatgttttaaaatgttgcttctgcactaagacattcaaataaaaatatcttctaaataatttgtgtaaaataattgatatttttatgctaaaatgttttatcagagtcacttttccactaggcttttktgtgcaccaaatgaattgctaggctattaaaaagattatatctctctatttgtcctaagtgttgtgaggttcagagctggtgaa

SEQ ID NO: 417243 - DNA, 569 bp, Homo sapiens
atgagcacagttttttatatgatgagaatgaagttagcagttwgtgattgtttggctagccatggagagccttctactccaaatgaggagtttatctagttatgatgaaatattttggggaagagggataaaatagaaaaaaaattagcaataggtttaaaaaatctttcatatgacatattttcttcttgattcttagaggatgaagcacctatcaccgcctgttacattgatttagataagccccaagtgtctaatccccaaacataaaacattcggttgtctcatggtatcttgccactcaaaatgtggtccagaggccagcagtatcttatcacttgggagctagttaaaaatgtagaacccatacatccagcaagtagctggattgtatgctctgagtgagggtccgagccacctgccattttgctggaggagccccttggggtgtaataaatatttataatgtctttcatctttgagtggatctgcagtggcttcagcagtgtgccccaattcctaggactcaacaagaaatctggaaaacttttattcgtaggtttaaacaa

SEQ ID NO: 417244 - DNA, 569 bp, Homo sapiens
atgagcacagttttttatatgatgagaatgaagttagcagttagtgattgtttggctagccatggagagccttctactccaaatgaggagtttatctagttatgatgaaatattttggggaagagggataaaatagaaaaaaaattagcaataggtttaaaaaatctttcatatgacatattttcttcttgattcttagaggatgaagcacctatcacckcctgttacattgatttagataagccccaagtgtctaatccccaaacataaaacattcggttgtctcatggtatcttgccactcaaaatgtggtccagaggccagcagtatcttatcacttgggagctagttaaaaatgtagaacccatacatccagcaagtagctggattgtatgctctgagtgagggtccgagccacctgccattttgctggaggagccccttggggtgtaataaatatttataatgtctttcatctttgagtggatctgcagtggcttcagcagtgtgccccaattcctaggactcaacaagaaatctggaaaacttttattcgtaggtttaaacaa

SEQ ID NO: 417245 - DNA, 569 bp, Homo sapiens
atgagcacagttttttatatgatgagaatgaagttagcagttagtgattgtttggctagccatggagagccttctactccaaatgaggagtttatctagttatgatgaaatattttggggaagagggataaaatagaaaaaaaattagcaataggtttaaaaaatctttcatatgacatattttcttcttgattcttagaggatgaagcacctatcaccgcctgttacattgatttagataagccccaagtgtctaatccccaaacataaaacattcggttgtctcayggtatcttgccactcaaaatgtggtccagaggccagcagtatcttatcacttgggagctagttaaaaatgtagaacccatacatccagcaagtagctggattgtatgctctgagtgagggtccgagccacctgccattttgctggaggagccccttggggtgtaataaatatttataatgtctttcatctttgagtggatctgcagtggcttcagcagtgtgccccaattcctaggactcaacaagaaatctggaaaacttttattcgtaggtttaaacaa

SEQ ID NO: 417246 - DNA, 560 bp, Homo sapiens
accaatttgtattttctttgaaaaatcagcacaggaaaaacaaatgtatttttcatgtcttatatgtttcattgtttataaacttgcaggctataaaaagtggcgtaaggaaactatagcttattacctttgataagaaagcttcacatttttagtaacttatatttgattaaatgtaaaaaataaaaaggtttacataggctaaatgaaggatatacaacctgwttgcatagtgataaagtagacatcatttattgtgtctttattctgcattagaaacctgatagatttatatacaattttaaaaatctttataataaaattgcatgaatggcagattgtttttttcattttacttatgtggaaactgaggctcagagagattaaatgatctgtctggggtcacaccactaacaccttgccctgctgggaaacatagtaaccaccaccttatcatatgtcttagtcaagcttcttttacttataaaaagtagaaaatgaactcaaagtgtttaagaaaaaaaaatgggaggatgttattataaatctctgtaagatct

SEQ ID NO: 417247 - DNA, 533 bp, Homo sapiens
ggaaggttggagggggtgaaatgtgagagagacaggcagacagacaacacaggcctggaggaattctacattttattctacatataaggggacattatttgagtattwcaaagagattggcataatttgatttttaaggaataattctttagctatatagagagtagattaataataaaaatgataaagaataatggctgacatttatgtattgcttactatttgccacactgaattcaaaatgccttacttacattgtgtaatgaagttctcacaacagctctatgagttagatacactatcttcatcattttacaggtgaggaaactgagcactaagacactaaataacttgcccagggtcatacgacaggtaagtggctgatttaggatgtaaatccttgcaatgcactttcaaaatctgtgcttttattcccaagctctattgtaggggtgacagagtgtgtgcagggatgtcagtttgcaatagtttgggtgagtgaagttggcagtttggacaagggtggtagtggt

SEQ ID NO: 417248 - DNA, 511 bp, Homo sapiens
ctctgggcactatttctatttggagctgattattctctgatgtggcgtctggcctgtatactgtagggtttctagagcagggtttctcactctgggcactatttctatttggagcagattattctctgatgtggggggtggcctgtacactgtagggtttctagagcagggtttctaactctgggcactatttctagtttggagcagattattctctgatgtggcggctggcctgtacactstagggtttctagagcagggtttcttactctgaacactatttctatttggagcagattattctctgatgtggcggctggcctgtacactgtaggttttctagagcagggtttctcactctgggcactatttctaatttggagcagattattctctgatttggcggctcgcctgtacactgtaggatttctagagcagggtttctggagcctgtacactgtaggatttctagaggaaggcttctcactctgggcactatttctattttgca

SEQ ID NO: 417249 - DNA, 511 bp, Homo sapiens
ctctgggcactatttctatttggagctgattattctctgatgtggcgtctggcctgtatactgtagggtttctagagcagggtttctcactctgggcactatttctatttggagcagattattctctgatgtggggggtggcctgtacactgtagggtttctagagcagggtttctaactctgggcactatttctagtttggagcagattattctctgatgtggcggctggcctgtacactctagggtttctagagcagggtttcttactctgaacactatttctatttggagcagattattctctgatgtggcggctggcctgtacactgtaggttttctagagcagggtttctcactctgggcactatttctaatttggagcagattattctctgatktggcggctcgcctgtacactgtaggatttctagagcagggtttctggagcctgtacactgtaggatttctagaggaaggcttctcactctgggcactatttctattttgca

SEQ ID NO: 417250 - DNA, 552 bp, Homo sapiens
tgatgaaaaactaaaaactgaacacgtcatctttacactgtccgactcccatttcatttataaaaagagtgtgactctgatgtagagctatgaaacgtaacgagaaatgaaaagaaatctaacctgaacgtggggcacggagacttacgtgccatcttaatgstgtcaaacacctttgaaattgaccctttgctgtatagaaatttattaaatctgacctttttccttccttctattcctttcttccttgcttcctttctttcttatttccatccttcctttctgttctgggatactgctgtcccccttcccccacctccccaaaacacacacacattttaagtatcttaatactgttgtttttctgccttcattctcacgttgttaaagatgtattttatttctcaactgataatatttcttcagtcatttaaatgatagaatcaatgtgcttttaaaaatgtatttcatctcatttcaaaaaaaaaaaacctcgcagattttcagatggattactatgctgtgaattcttagataatgctatcaaattat

SEQ ID NO: 417251 - DNA, 507 bp, Homo sapiens
acattgtttaatatttatggtaaatgttgmctatggcaacttagcaataaggtaaaatcaacacatcctgagaacggtgtatgatatttaaatgtcatatacagcttcgctcttaacttccatacaactcaactattatcactccagtaatttctataaagccacaaattaaacaggaaatttgttccagattctcaaattattacgtgaacattctaatgttaaaaagtgactgtgtctgggcgcggtggcctgttcacgcctgttatcgtagcactttgggaggccgaggcaggtagatcacctgaggtcaggagtttcagaccagcgtgggcaacatggtgaaaccctgtctctactgaaaatatgaaaattagccgggcatcgtgacgcatgcctgtagtctcagctactcaggaggctgagtcaggagaatcacttgaacccgggaagcataggttgcagtgagccgagatttctccactgcactccagcctgggcgacaga

SEQ ID NO: 417252 - DNA, 507 bp, Homo sapiens
acattgtttaatatttatggtaaatgttgcctatggcaacttagcaataaggtaaaatcaacacatcctgagaacggtgtatgatatttaaatgtcatatacagcttcsctcttaacttccatacaactcaactattatcactccagtaatttctataaagccacaaattaaacaggaaatttgttccagattctcaaattattacgtgaacattctaatgttaaaaagtgactgtgtctgggcgcggtggcctgttcacgcctgttatcgtagcactttgggaggccgaggcaggtagatcacctgaggtcaggagtttcagaccagcgtgggcaacatggtgaaaccctgtctctactgaaaatatgaaaattagccgggcatcgtgacgcatgcctgtagtctcagctactcaggaggctgagtcaggagaatcacttgaacccgggaagcataggttgcagtgagccgagatttctccactgcactccagcctgggcgacaga

SEQ ID NO: 417253 - DNA, 507 bp, Homo sapiens
acattgtttaatatttatggtaaatgttgcctatggcaacttagcaataaggtaaaatcaacacatcctgagaacggtgtatgatatttaaatgtcatatacagcttcgctcttaacttccatacamctcaactattatcactccagtaatttctataaagccacaaattaaacaggaaatttgttccagattctcaaattattacgtgaacattctaatgttaaaaagtgactgtgtctgggcgcggtggcctgttcacgcctgttatcgtagcactttgggaggccgaggcaggtagatcacctgaggtcaggagtttcagaccagcgtgggcaacatggtgaaaccctgtctctactgaaaatatgaaaattagccgggcatcgtgacgcatgcctgtagtctcagctactcaggaggctgagtcaggagaatcacttgaacccgggaagcataggttgcagtgagccgagatttctccactgcactccagcctgggcgacaga

SEQ ID NO: 417254 - DNA, 507 bp, Homo sapiens
acattgtttaatatttatggtaaatgttgcctatggcaacttagcaataaggtaaaatcaacacatcctgagaacggtgtatgatatttaaatgtcatatacagcttcgctcttaacttccatacaactcaactattatcactccagyaatttctataaagccacaaattaaacaggaaatttgttccagattctcaaattattacgtgaacattctaatgttaaaaagtgactgtgtctgggcgcggtggcctgttcacgcctgttatcgtagcactttgggaggccgaggcaggtagatcacctgaggtcaggagtttcagaccagcgtgggcaacatggtgaaaccctgtctctactgaaaatatgaaaattagccgggcatcgtgacgcatgcctgtagtctcagctactcaggaggctgagtcaggagaatcacttgaacccgggaagcataggttgcagtgagccgagatttctccactgcactccagcctgggcgacaga

SEQ ID NO: 417255 - DNA, 634 bp, Homo sapiens
gttataaactatcagagaggaaactataaattttctaatgtcaagttaattttatatggccatggtgcatgttaactggttacttgtaaagctgattcttctccaaaatgcacactttttccttasctcatagaaattcataaaatatgtaacaaattttaatggcattcaaaatatttaaatattctttggagaatagtttcaacatatttcatatgctttgacatccatacttagatttttgaaaacagggctagacttaaaaagcagacaaatggaaatttaatttagtttctggcaattgtacttgactgaccttaattcacggaaattttctcaaccttagtttattaattcccccaaaaggaacgataattcctacactaaaacactgttgcaattcctagggaagataacacagagtatggcaggggctcaatgctattcaaatgtttacgtgtgtaaagaaataagacacagttatatctattttctggcatagagaaaattacaattctttaataaggttaatttataaataaatacataaataataatgggtccacaaccttgaaatgtcttcagagccctgagaagatacccctggaattacatattaatattgccagcatat

SEQ ID NO: 417256 - DNA, 508 bp, Homo sapiens
gacaaatggaaatttaatttagtttctggcaattgtacttgactgaccttaattcacggaaattttctcaaccttagtttattaattcccccaawaggaacgataattcctacactaaaacactgttgcaattcctagggaagataacacagagtatggcaggggctcaatgctattcaaatgtttacgtgtgtaaagaaataagacacagttatatctattttctggcatagagaaaattacaattctttaataaggttaatttataaataaatacataaataataatgggtccacaaccttgaaatgtcttcagagccctgagaagatacccctggaattacatattaatattgccagcatattatctcaggaataaatcaaagctgcatttgtttgcttgtgaatgtgtttttcttggtaagtatgaaaaaggaattttatacagttgaacagctgcactttaccacatatgtccggttacaaaattgattatagttagcaggta

SEQ ID NO: 417257 - DNA, 508 bp, Homo sapiens
gacaaatggaaatttaatttagtttctggcaattgtacttgactgaccttaattcacggaaattttctcaaccttagtttattaattcccccaaaaggaacgataattcctacactaaaacactgttgcaattcctagggaagataacacagagtatggcaggggctcaatgctattcaaatgtttacgtgtgtaaagaaataagacacagttatatctattttctggcatagagaaaattacaattctttaataaggttaatttataaataaatacataaataataatgggtccacaaccttgaaatgtcttcagagccctgagaagatacccctggaattacatattaatattgccagcatattatctcaggaataaatcaaagytgcatttgtttgcttgtgaatgtgtttttcttggtaagtatgaaaaaggaattttatacagttgaacagctgcactttaccacatatgtccggttacaaaattgattatagttagcaggta

SEQ ID NO: 417258 - DNA, 566 bp, Homo sapiens
ccctgggccagtcagcacaccctcaggaagcaggcacgccctgtaggttgccttatcttcccctgttaagtctgatttcatagaactaagacgtcattccatttaaagacacaggctgaaaacttaatctttctaacttctgyattagactttccaggattcatcagtaaaaagaatgaatagctacgattgtagtgtgtctaaagtcatgtatatgatgcatttcattatcagtgtacctattaatagaaagaaatgtactgtataaagttccactctctgctatgtactttcagtattcaaattttatctatagttctgggatctatggctgcaatatggggccctaccaacttcttaagcacaagatgcatctttgtacaaaagaacacttatctctacaaacacctgctggtacggataacctgcgttttggaaaagtgatactcattctttatatcttgacactgacaactcaccaactttgcaaacaggatctgccagaaggataggtaaaggcaattgcatggcctaaaataagttcagaaaaaaggtataaaatgacc

SEQ ID NO: 417259 - DNA, 518 bp, Homo sapiens
acatttatttcatcaacatgactcactatatgtaataaatacttcactaggtggcactgaaaaacccaaaccaaaccaaaaaaaaaaaaaaaaaagaccaagtgtgatgaaaaatggtcatgaaaatgcagggttcataccctgctgtcatgttttcccatcacatatcccgtgggcttcaccaacgtggcctcactcagctgtcctgtttcagccacaagcatcacctactatctgtgcagaaatcaactcttgaatactagtgtatattttctgctattgtttgaaaacagaggaatacatcttctttctattgcstttttcttgcttttaacagtagaatagtacctttttactagcaggttgttaacacatatttgtccactagatgggtatttcattttttttttttgagtgttgtcttcattctttatacacttcaatgtttaatatataaatatattttaatttccccctagcttcccccactgctttctttatacatacaaatatgatgc

SEQ ID NO: 417260 - DNA, 631 bp, Homo sapiens
aagatagtatgcatatgtgggatgtaaaatatatcttttaagacattttcagtctaaatagacttcccaatctctttcactaagcccatggatcagcaggaatgtttttggagtgttcccacagaatcatcatttcatttatgatggcattacatttttagtcagtcttcaaaaactcatctttgaaattgtgtgaaaaaaatataagcaaatatctttcccccaaaatcctctaatatttcattagccttacagaatgagttaacatatttagcaaacttccaacatttttctcatgttacactggcttataatgttaaaagggacttaggaaaaaagagtttgatgtaccacaggtggactgcaaatttaaatggtaaaataaytgagaatattgtttattaagattatagtaggggaaaatatcctagctctatccttgaattattgtgattttacggaaacaaaatgttttatctttagtcacttagaatacaatactttctgatagttttaatctggtttattttccatatgggttaagcattatgtgtatgaaatagttttcccaaactcttttctgggtcaccttctgcctcaagacaggaaccccagagaggttgggtgtgcg

SEQ ID NO: 417261 - DNA, 588 bp, Homo sapiens
gatcaattggatgtccatagcaaatagtaagtttaacaccttatataaaaattacctcaatgtggattacaaatataaatgtaaaatgtaaagcaattagactcttaggaaaaaaataggggaaaggcttttgagtctagggctagacagagtttctatgcttgacaccaaaattacaaaccagaaaaagataagttaataaattggatttcataaaaattaaraactttggctgcaaaagaccgcattaagagaataaaagtgtatgctgcagactgggaaaacacattcgcaagccaaatatctgacaaaagacaagtatctagaatataccatgaactctccagactcaacaacaaaaggcaaacaatccaattagaaaataggcaacaagcagaaaagtcaggtgacctaaaggacatccagacggcaaataagcccacgaatatttactctacatcaatagacatcagaggaatgcaaattaaaaccacagagaaataccgcacatgatatttcagccaatcagaatagctgaaataaaaataaataatgacaacatcacatgctggctagaatgtggagaaa

SEQ ID NO: 417262 - DNA, 505 bp, Homo sapiens
tgtctctttctgtctctgccatgtgaggacacagctagaaggcaccatctataaataagaaagcagggtctccccagacatcgaatttgctggcaccttgatcttcgacttacagcttccagaactgtgagaaataagtttatgttgtttataatccaacaacttaatggtattttgttacagcagctcaaaatgaataagactccctgggagctgaaatgccctgaaagacctctacttcatataaccacaggagtagttaacatgtgtaaagtgcttatgatatccaagtgtattctgaacacttgacatatagaaacttgtttaatcctcacaataacctgtggggggcttgatctcgttgcctctgttttacagagggcagaggtgaagtagtatgctcaaatgaatattcacaaaataaamtagtggtgacagtagtcaccctactctgaatcaaacattggatttctacaatgtttttaaactgctggagtcggcagca

SEQ ID NO: 417263 - DNA, 666 bp, Homo sapiens
ctgggctggagctaggtccaaagcctcagggaagccgtgagaccatccactttgggggtgttgtcctggagagcttctctagcaggtatggaaaggtagtgtttttcakaatggggttatctagtgcctaatattttattgttctttgccatgcgatgtgatgggctactgcctctcctccatcatcatgactcctctggaaaggtctaatatggtgaaatcactgcaggtagagtgatacgaactgagaaaggtaaaggaagtgtttcacaccgaagacagtgtgaggcagagagataagaacatacgccagaggaaggacctgagtcgggctgaaagtttggcgtctgagaatcagtacatgatgtctccatgagaatgtaaatctgtggagaatcagagaagacgtggggctgctttggacttaatggacacgtaaaagatggaggactcaactaagttttagtttcactttaaagggcacatgataccaaccgcccatagcgaatttcgacgtggtttccaacggagacagtttgtttaggccaccagacaaggacttagtaaacttgacccatgttgtgacctgacagtgaccgggaaaaatttattcttatcatgtctcaattacctcaaacacattgggagggaatggcaatagacaat

SEQ ID NO: 417264 - DNA, 627 bp, Homo sapiens
ttattttatctctctagatttgtgacaggtttgaagtcaagagccccaacatcataatgaaaaccagaaatctacagccttttactggggtgggggaagaggtgtagaaaccatctaaagcttgcttccagaaaattataattatttgtcatactgatagcaccctaaaaaatcctcatttgcagggatttcattgatttgacctgaatctgatgctacctaatgtagcttttgcctcaagaacccttcacaaaagcaatcaatggtgatggtttaatatcccagatgccagacatgscaagaatgggtgaggcaaacaaaaaactgaacaaaaacaaaaaataaaaagctatgggatgagatgtccatagagagctttaaaaatgctgacatgaccaggcacacctgtaatcccagcactttgggaagccacggcaggcagatcacctaaggtcaggagttcaagaccagcctggccaacgtggggaaaccccatctctactaaaaacacaaaaattagctaggtgagcacctgtaatcccagctacttgggaggatgaggcaggagaataccttgaaccagggaggcaaaggttgcaatgagccaagatcacatcactgtactcc

SEQ ID NO: 417265 - DNA, 627 bp, Homo sapiens
ttattttatctctctagatttgtgacaggtttgaagtcaagagccccaacatcataatgaaaaccagaaatctacagccttttactggggtgggggaagaggtgtagaaaccatctaaagcttgcttccagaaaattataattatttgtcatactgatagcaccctaaaaaatcctcatttgcagggatttcattgatttgacctgaatctgatgctacctaatgtagcttttgcctcaagaacccttcacaaaagcaatcaatggtgatggtttaatatcccagatgccagacatggyaagaatgggtgaggcaaacaaaaaactgaacaaaaacaaaaaataaaaagctatgggatgagatgtccatagagagctttaaaaatgctgacatgaccaggcacacctgtaatcccagcactttgggaagccacggcaggcagatcacctaaggtcaggagttcaagaccagcctggccaacgtggggaaaccccatctctactaaaaacacaaaaattagctaggtgagcacctgtaatcccagctacttgggaggatgaggcaggagaataccttgaaccagggaggcaaaggttgcaatgagccaagatcacatcactgtactcc

SEQ ID NO: 417266 - DNA, 578 bp, Homo sapiens
ctgggaagggtactggggaggtgaggggagggggacactggggatgattaatgggtacaaaaagcagttagaaagaatgagtaagacagtatttgacagcacaacagagtcaataataatttagttgcacactttaaaataactaaagaagtatgttagtgacctactcctttagttgtgatgtttgtgacacaatgcataaatgcttgatgtgatggataccccattcagcctgatgtgaatactacatattgcatgcctgtgtcaaaatatctcatgtaacccttaaatatatgcacctattasgtagcaataaaaactaaaaatggaacatttaaaaacaaaaaaagaaaagacaagatttagttggggtatatggcctcattttctacctggttatgtcctgatttgtaaacacacatgtcaaaatatggactgagaggaagagagtttgtcacaggggacattaagtaaggtttcatggagaaagtggcttgaaagcttaaagatagctacggtggaacacgcatatgaagatagatgggaaggaagaacagtaaaaacagaggaaatagcac

SEQ ID NO: 417267 - DNA, 578 bp, Homo sapiens
ctgggaagggtactggggaggtgaggggagggggacactggggatgattaatgggtacaaaaagcagttagaaagaatgagtaagacagtatttgacagcacaacagagtcaataataatttagttgcacactttaaaataactaaagaagtatgttagtgacctactcctttagttgtgatgtttgtgacacaatgcataaatgcttgatgtgatggataccccattcagcctgatgtgaatactacatattgcatgcctgtgtcaaaatatctcatgtaacccttaaatatatgcacctattaggtagcrataaaaactaaaaatggaacatttaaaaacaaaaaaagaaaagacaagatttagttggggtatatggcctcattttctacctggttatgtcctgatttgtaaacacacatgtcaaaatatggactgagaggaagagagtttgtcacaggggacattaagtaaggtttcatggagaaagtggcttgaaagcttaaagatagctacggtggaacacgcatatgaagatagatgggaaggaagaacagtaaaaacagaggaaatagcac

SEQ ID NO: 417268 - DNA, 578 bp, Homo sapiens
ctgggaagggtactggggaggtgaggggagggggacactggggatgattaatgggtacaaaaagcagttagaaagaatgagtaagacagtatttgacagcacaacagagtcaataataatttagttgcacactttaaaataactaaagaagtatgttagtgacctactcctttagttgtgatgtttgtgacacaatgcataaatgcttgatgtgatggataccccattcagcctgatgtgaatactacatattgcatgcctgtgtcaaaatatctcatgtaacccttaaatatatgcacctattaggtagcaataaaaactaaaaatggaacatttaaaaacaaaaaaagaaaagacaagatttagttggggtatatggcctcattttctacctggttatgtcctgatttgtaaacacacatgtmaaaatatggactgagaggaagagagtttgtcacaggggacattaagtaaggtttcatggagaaagtggcttgaaagcttaaagatagctacggtggaacacgcatatgaagatagatgggaaggaagaacagtaaaaacagaggaaatagcac

SEQ ID NO: 417269 - DNA, 493 bp, Homo sapiens
cagtgcactcctgtggtggcagtggctgtgggtgtgaggggggaagagcgggtttcgtttccatccttgttgatctttgcaaaaatcacattgtagaatttaatggttggctctagtatgtacatttacattttgccccatttgctaagtatgaatgtgaaccataatgaagaagttgagttgcatgccagccatgaaactgagttactagcaaccttacaccctttctttacattgggatgattaccaaatgaggaatgcaaagctaaacttcatatcttattatccatatgaacaacactaataggagaaataaacgtttggttttacacttaatattatgagaacattgaatgctttcatatttattcaaaaatctcaccgtttatatttagtatattgaccataytcgaaaaattagtatcagaaaatatatagtatttctatatcttatttctgctttatttctggtgaaaatattttatatgtatgt

SEQ ID NO: 417270 - DNA, 580 bp, Homo sapiens
gctttacataagtgaatttccccaagacatgaagtgttacttgcagtgattatttatagtgttttgtagttaaatccttcaaaaagttattatgtatcctattgtctaatttatttttgctcttaaatgattcaggatccctaatatgaacataatatgtcacagatcatgcagacagtagacaagcattatttttcycttcgaattatctttgtaataaccgtagctattattttaacctgaaagatactaaaaatttttacattatagggaatgcgtgaattggggtagtcaggaattgaagctacacagtaattaaaagagaaaagttttaatataaacattattaactatatacaggggattaaatactgagaaaagataggacagaacaccaaaaaaaatgccttaggactgagaggaatatccaagtatgaaacaaacttggaaggcacttcccgccatgctgggattcatgcctcactggggaaggtgtatttgaagaccacagattgcagaaagctcactggatttcccaagacttccccaggcatccctccctgggttccccttaagctga

SEQ ID NO: 417271 - DNA, 580 bp, Homo sapiens
gctttacataagtgaatttccccaagacatgaagtgttacttgcagtgattatttatagtgttttgtagttaaatccttcaaaaagttattatgtatcctattgtctaatttatttttgctcttaaatgattcaggatccctaatatgaacataatatgtcacagatcatgcagacagtagacaagcattatttttctcttcgaattatctttgtaataaccgtagcyattattttaacctgaaagatactaaaaatttttacattatagggaatgcgtgaattggggtagtcaggaattgaagctacacagtaattaaaagagaaaagttttaatataaacattattaactatatacaggggattaaatactgagaaaagataggacagaacaccaaaaaaaatgccttaggactgagaggaatatccaagtatgaaacaaacttggaaggcacttcccgccatgctgggattcatgcctcactggggaaggtgtatttgaagaccacagattgcagaaagctcactggatttcccaagacttccccaggcatccctccctgggttccccttaagctga

SEQ ID NO: 417272 - DNA, 589 bp, Homo sapiens
ggcttgtgttcaagtcacccttatttgacttaacaatggccccaaagagtaagagtagcaatgctggcaattcggatatggcaaaaagaatccatacaatgcttcctttaagtgagaagatcaaagtcctcaacttaagaaaaaagttatatgctgaggctgctaagatctacagtaagaacaaattttctacccataacattgtgactaaggaaaagaaatctgtgctagtttggctgtcaygtctcaaactgcaaatgtcatgggcacagtgtgtgataaatgatgttaccatggaaaagataataaatgtgtgggtgggagacccgaacagacatgtggtccatggatggcaattgggtttggtaaaagcacagttttaggcatcagtgggggtcttagactatatcccccacagatgagggggaacagctctatcgtacatggagtctaacattttgacctttgccgagccttctgagcctttcctgctgtgccaaggaagttctccatctccgtttactcaaggacaaactgatatccacagctcactggatcttacccacaaactatcaggaccagctggtcc

SEQ ID NO: 417273 - DNA, 520 bp, Homo sapiens
gttgcttacttcaggtctttttttctattttgttttaggtgtttattacygaaaattttctttttagtgcctgcatttcatacgttttggtatgttgtcctatcattttcatttgtcatatttttttatttcccctataatttgttctttgaatgattatttgttcaaatgtacattgtttcattttcattttgtgaatttccggtttttcttttggtattcgtttctagtttcatttcatttttgtcataaacaatgcttggtatgattttgattttcacaaatttattaaaacttgttttgtggcctaacatatgatctcttctagagaatgttccaagtgcacttgaaaaggatccatattctgccttttttgggtgaagtattctgtgtatgtgtgtctgttgggtgcagttggtcgatagcattgtttaatcttttgtttccttattgttcttctgtctggttggtctattcatattcaaagtgaggcactgaaatttcttaccattaatgtatt

SEQ ID NO: 417274 - DNA, 520 bp, Homo sapiens
gttgcttacttcaggtctttttttctattttgttttaggtgtttattaccgaaaattttctttttagtgcctgcatttcatacgttttggtatgttgtcctatcattttcatttgtcatatttttttatttcccctataatttgttctttgaatgattatttgttcaaatgtacattgtttcattttcattttgtgaatttccggtttttcttttggtattcgtttctagtttcatttcattkttgtcataaacaatgcttggtatgattttgattttcacaaatttattaaaacttgttttgtggcctaacatatgatctcttctagagaatgttccaagtgcacttgaaaaggatccatattctgccttttttgggtgaagtattctgtgtatgtgtgtctgttgggtgcagttggtcgatagcattgtttaatcttttgtttccttattgttcttctgtctggttggtctattcatattcaaagtgaggcactgaaatttcttaccattaatgtatt

SEQ ID NO: 417275 - DNA, 518 bp, Homo sapiens
gtgtgataaatgatgttaccatggaaaagataataaatgtgtgggtgggagacccgaacagacatgtggtccatggatggcaattgggtttggtaaaagcacagttttaggcatcagtgggggtcttagactatatcccccacagatgagggggaacagctctatcgtacatggagtctaacattttgacctttgccgagccttctgagcctttcctgcygtgccaaggaagttctccatctccgtttactcaaggacaaactgatatccacagctcactggatcttacccacaaactatcaggaccagctggtcccaggggaccttgacatggaatcaagaacctggagagatgggctccttgacaataaattctccccatccagccgtgtatttctcttcctacctagttccatcaatattccttctcatacatattttcttggttgctgctagcatgaattagccagatcctgaactcgtccagtgtgtaaggtattttctcccagaaaagggaa

SEQ ID NO: 417276 - DNA, 518 bp, Homo sapiens
gtgtgataaatgatgttaccatggaaaagataataaatgtgtgggtgggagacccgaacagacatgtggtccatggatggcaattgggtttggtaaaagcacagttttaggcatcagtgggggtcttagactatatcccccacagatgagggggaacagctctatcgtacatggagtctaacattttgacctttgccgagccttctgagcctttcctgctgtgccaaggaagttctccatctccgtttactcaaggacaaactgatatccacagctcactggatcttmcccacaaactatcaggaccagctggtcccaggggaccttgacatggaatcaagaacctggagagatgggctccttgacaataaattctccccatccagccgtgtatttctcttcctacctagttccatcaatattccttctcatacatattttcttggttgctgctagcatgaattagccagatcctgaactcgtccagtgtgtaaggtattttctcccagaaaagggaa

SEQ ID NO: 417277 - DNA, 518 bp, Homo sapiens
gtgtgataaatgatgttaccatggaaaagataataaatgtgtgggtgggagacccgaacagacatgtggtccatggatggcaattgggtttggtaaaagcacagttttaggcatcagtgggggtcttagactatatcccccacagatgagggggaacagctctatcgtacatggagtctaacattttgacctttgccgagccttctgagcctttcctgctgtgccaaggaagttctccatctccgtttactcaaggacaaactgatatccacagctcactggatcttacccacaaactatcaggaccagctggtcccaggggaccttgacatggaatcaagaacctggagagatggsctccttgacaataaattctccccatccagccgtgtatttctcttcctacctagttccatcaatattccttctcatacatattttcttggttgctgctagcatgaattagccagatcctgaactcgtccagtgtgtaaggtattttctcccagaaaagggaa

SEQ ID NO: 417278 - DNA, 543 bp, Homo sapiens
ttccaactctgggccatctttgcatattagctgttcaatgccatgtctgccacactcattcrtgtcattctctgggtgtgaagtacccttctgtctttcgcaaccaaatccacactcatttccacgtgcttcctccaccatgaagccatcttcaatcgataacctaccccaggaagattgttttgtaattggttaaagaccaattccacttgtgtcagcaataataatgtgtattggtaaatcattttatatttagagttgcaacataaattatgtcttattatcttaatgtggctataattttcacaaaacactttcatgtatgacgaaagttgatcctcaaagccacctcattagactatagggcgggtggggacttgggaaaacagggatgagggaagaacaatgatgattaatagaggtagctaaaatgactcattcacagccctcaatatgaaagtcatgaatagagtccaatccactgcctgcaggggcagtagaggaaatggaatcaagaaacagaatcttcatttggggagtgcc

SEQ ID NO: 417279 - DNA, 543 bp, Homo sapiens
ttccaactctgggccatctttgcatattagctgttcaatgccatgtctgccacactcattcatgtcattctctgggtgtgaagtacmcttctgtctttcgcaaccaaatccacactcatttccacgtgcttcctccaccatgaagccatcttcaatcgataacctaccccaggaagattgttttgtaattggttaaagaccaattccacttgtgtcagcaataataatgtgtattggtaaatcattttatatttagagttgcaacataaattatgtcttattatcttaatgtggctataattttcacaaaacactttcatgtatgacgaaagttgatcctcaaagccacctcattagactatagggcgggtggggacttgggaaaacagggatgagggaagaacaatgatgattaatagaggtagctaaaatgactcattcacagccctcaatatgaaagtcatgaatagagtccaatccactgcctgcaggggcagtagaggaaatggaatcaagaaacagaatcttcatttggggagtgcc

SEQ ID NO: 417280 - DNA, 584 bp, Homo sapiens
gcactaagctactgtaaatatcaaaggagccctccaatcggaaattatctaattgatayaattatttttgttacataaataagtggcacacattttcttcaaattcactttccacggaaggattccatttcagataagatttttctccaagaaaaaacaaaaatgaaaacagaacaaaacataacaatttgtaactgttggtaagattttccttagttattttgaggagggcataaagatgttccttattaaatttacccaggactttgggaattgagaaagtttaacctcctaaaagaaataaagagactgcaattaaactactttctcagggtcacatatctagtaggaggctaaatagaaaagtgacattgttttctttctaatactaaaaactactaagggcagcaagctctgtgcctctctcctatgagtggatatagttgcaacaaacatttgtatgtcaaattggagatgtgtagagcgtgaatgaatgcatggaaagctggatgcaaaaagattcctcggacctaccagtctatgagtgcattgcctctttgctttgtggccagatactgtttttg

SEQ ID NO: 417281 - DNA, 584 bp, Homo sapiens
gcactaagctactgtaaatatcaaaggagccctccaatcggaaattatctaattgatacaattatttttgttacataaataagtggcacacattttcttcaaattcactttccacggaaggattccatttsagataagatttttctccaagaaaaaacaaaaatgaaaacagaacaaaacataacaatttgtaactgttggtaagattttccttagttattttgaggagggcataaagatgttccttattaaatttacccaggactttgggaattgagaaagtttaacctcctaaaagaaataaagagactgcaattaaactactttctcagggtcacatatctagtaggaggctaaatagaaaagtgacattgttttctttctaatactaaaaactactaagggcagcaagctctgtgcctctctcctatgagtggatatagttgcaacaaacatttgtatgtcaaattggagatgtgtagagcgtgaatgaatgcatggaaagctggatgcaaaaagattcctcggacctaccagtctatgagtgcattgcctctttgctttgtggccagatactgtttttg

SEQ ID NO: 417282 - DNA, 584 bp, Homo sapiens
gcactaagctactgtaaatatcaaaggagccctccaatcggaaattatctaattgatacaattatttttgttacataaataagtggcacacattttcttcaaattcactttccacggaaggattccatttcagataagatttttctccaagaaaaaacaaaaatgaaaacagaacaaaacataacaatttgtaactgttggtaagattttccttagttattttgaggagggcataaagatgttccttattaaatttacccaggactttgggaattgagaaagtttaacctcctaaaagaaataaagagactgcaattaaactactttctcagggtcacatatctagtaggaggctaaatagaaaagtgacattgttttctttctaatactaaaaactactaagggcagcaagctctgtgcctctctcctatgagtggatatagttgcaacaaacatttgtatgtcaaattggagatgtgtagagcgtgaatgaatgcatggaaagctgsatgcaaaaagattcctcggacctaccagtctatgagtgcattgcctctttgctttgtggccagatactgtttttg

SEQ ID NO: 417283 - DNA, 562 bp, Homo sapiens
caactccttgttatttatttatttattttgtctgcatttccaatagagtagaagctcaaactggtcagctgtttgtcatggcctactgtttcttctggaggaatatttctgcattgagaaccttgcccgctaacatacagaagcctaagtttaactgggaagagcaacaggcagcacgaattccagaagcgggtcactgggagccctcaataagaggcttcgcctcggagctctgtattctaaccaatgggacatgcaccatactcagcaatgggttccatgcccttactgaggacttatctcagaggacagggcttcaaccctccaaggcwttgccctgaagatgaccattagctgagtactctgtctgctcaacagcttctctgtagtgagacacatagcaggacagatggattccatggccagaaaccccgatgtgatgtctgctttgtcttcaaatgagtctgttgttctggggcaatgactcattagatatgacatcgatggagaaagctttctacaacccttcggttgaaggtaattccaggcagattgctatcag

SEQ ID NO: 417284 - DNA, 612 bp, Homo sapiens
agcaaagcattttgtcttcaatcatatataaaatccaagccacattttcctttcagaccctgttattattttaatgctgttacattgtacaaaattatttttttaaatgctcagatttaaactctcaggaaagtggatataaatagatgtagaaagaagatacacaaagaatagctgagtgacacaatgaagaagcactcaaatgaaaaatgcaagcacttgaagttgctgagcctcaacgcrcttttgaccaaggacagcctttctgtgggcatatatttctcttgttttttattgtaataatcagtttccttttatgaaatcatatttacatatgtagactgagtaaacctctttcttgaaatgaatctactaaccaaaactctatggcttctgatttttcttatatgtaatttgcttgtgtattttttcccttaattatgttagtgtatccatttaaagacaccatcaattttaaggaacactatcatttgactagtaaattggaaagggaaaaatgaaatactatcaattaaatatacataactattgtatgcgaacccagaattctaaaaatgaattctttagtgaaaagatagatatgcattttag

SEQ ID NO: 417285 - DNA, 619 bp, Homo sapiens
gatatgcattttagaatttagaatatagagatattatgctagaagtctgagtattttactgattttccaytttaagaataaattatcatgacaaattttaagttacatatattattttattgctaaactttttaaaaacattatcagcttaccttggcatttcttttctttttttaatctctctttttacgttgtggacttttagtaaattaatttgtactcatttttatttaattaagaaagctaagaataaatgctagtgtctgattaaactatttcccagatctcaaaagttttgatgtaaagtgtccttattgctattttatataaatttattcatgtgtttattttaaaattggtgtctatattccatatggcagacactatgctaagcgtttggaataatgtgaggaacaaaaatgaaattcgacagacattttagtagggcatgctgctattaaacacattgtcatgcacgatatgtaaaaatgaaaatgtgatatgtgaccaagcagaaatgcatggtgtttggaagtcactatgtatcaacatgtacccctgggatttaatctctggagtgatacatcaagaggctaaagccagtgaccaagaagttatt

SEQ ID NO: 417286 - DNA, 619 bp, Homo sapiens
gatatgcattttagaatttagaatatagagatattatgctagaagtctgagtattttactgattttccattttaagaataaattatcatgacaaattttaagttacatatattattttattgctaaactttytaaaaacattatcagcttaccttggcatttcttttctttttttaatctctctttttacgttgtggacttttagtaaattaatttgtactcatttttatttaattaagaaagctaagaataaatgctagtgtctgattaaactatttcccagatctcaaaagttttgatgtaaagtgtccttattgctattttatataaatttattcatgtgtttattttaaaattggtgtctatattccatatggcagacactatgctaagcgtttggaataatgtgaggaacaaaaatgaaattcgacagacattttagtagggcatgctgctattaaacacattgtcatgcacgatatgtaaaaatgaaaatgtgatatgtgaccaagcagaaatgcatggtgtttggaagtcactatgtatcaacatgtacccctgggatttaatctctggagtgatacatcaagaggctaaagccagtgaccaagaagttatt

SEQ ID NO: 417287 - DNA, 425 bp, Homo sapiens
caacatttttaatactatgcctagttcatagtaagacctaagtaaattgttgttgcttaaaaaaarataggtgaatgaataaagtgattattattattattaatttcaaattaagcctctagagtttatctctttcaaaatatctctaacttttgccttaggtgatattaaaataaaatattacatattaataattttgctcctgtgaatgtaagatctaaaaaattggattcaattagatttaccaccgagtttctgcaggtggtaagaaaggctgttgaaagaactacacagtggaatattgcttagcctttaagaagcaggaaactctgccatttgcagcagcatggctgaacctagaggacattctgccaagtaaaataagccaggcacagaaagacatataccacacaatatcacttctg

SEQ ID NO: 417288 - DNA, 586 bp, Homo sapiens
  misc_feature (1)...(586): n = A,T,C or G
gaaccaaatgaaatggcttactactctgacatcattctaaaaagaatgatggtacaaaaggaaagatagacactaaaaatcatacaagcatgatgagagctgtggaggtggcatttaagctctcatgaaggcactgatcatgggaactaaagttgcccagggaagttgtcagggaagsctcctccaaggacctgtgttttaaactaacagatgaggtgagcctgtcagctggtcagatgatgactgagtgacattgcaggcaaagtgaatatcaatgcctaggctctgcggctgtgaacatagtaaacagtgtgcttaaagtatgacaagaagtatgctttacctggggtggagtgagcagggaagagagctgcatggggtgaggacagagaggaatcccacacctccatctcactaattaagagcttgcacattaagaaaattggatcgtatctttaaacagtttnggaagacttttattcttttttttaattcttagtttatctgccatactttcagcttttatatagttgaaaacattttctttggcgatcatacccttataatcccctctttctccataata

SEQ ID NO: 417289 - DNA, 586 bp, Homo sapiens
  misc_feature (1)...(586): n = A,T,C or G
gaaccaaatgaaatggcttactactctgacatcattctaaaaagaatgatggtacaaaaggaaagatagacactaaaaatcatacaagcatgatgagagctgtggaggtggcatttaagctctcatgaaggcactgatcatgggaactaaagttgcccagggaagttgtcagggaagcctcctccaaggacctgtgttttaaactaacagatgaggtgagcctgtcagctggtcagatgatgactgagtgacattgcaggcaaagygaatatcaatgcctaggctctgcggctgtgaacatagtaaacagtgtgcttaaagtatgacaagaagtatgctttacctggggtggagtgagcagggaagagagctgcatggggtgaggacagagaggaatcccacacctccatctcactaattaagagcttgcacattaagaaaattggatcgtatctttaaacagtttnggaagacttttattcttttttttaattcttagtttatctgccatactttcagcttttatatagttgaaaacattttctttggcgatcatacccttataatcccctctttctccataata

SEQ ID NO: 417290 - DNA, 586 bp, Homo sapiens
  misc_feature (1)...(586): n = A,T,C or G
gaaccaaatgaaatggcttactactctgacatcattctaaaaagaatgatggtacaaaaggaaagatagacactaaaaatcatacaagcatgatgagagctgtggaggtggcatttaagctctcatgaaggcactgatcatgggaactaaagttgcccagggaagttgtcagggaagcctcctccaaggacctgtgttttaaactaacagatgaggtgagcctgtcagctggtcagatgatgactgagtgacattgcaggcaaagtgaatatcaatgcctaggctctgcggctgtgaacatagtaaacagtgtgcttaaartatgacaagaagtatgctttacctggggtggagtgagcagggaagagagctgcatggggtgaggacagagaggaatcccacacctccatctcactaattaagagcttgcacattaagaaaattggatcgtatctttaaacagtttnggaagacttttattcttttttttaattcttagtttatctgccatactttcagcttttatatagttgaaaacattttctttggcgatcatacccttataatcccctctttctccataata

SEQ ID NO: 417291 - DNA, 586 bp, Homo sapiens
  misc_feature (1)...(586): n = A,T,C or G
gaaccaaatgaaatggcttactactctgacatcattctaaaaagaatgatggtacaaaaggaaagatagacactaaaaatcatacaagcatgatgagagctgtggaggtggcatttaagctctcatgaaggcactgatcatgggaactaaagttgcccagggaagttgtcagggaagcctcctccaaggacctgtgttttaaactaacagatgaggtgagcctgtcagctggtcagatgatgactgagtgacattgcaggcaaagtgaatatcaatgcctaggctctgcggctgtgaacatagtaaacagtgtgcttaaagtatgacaagaagtatgctttacstggggtggagtgagcagggaagagagctgcatggggtgaggacagagaggaatcccacacctccatctcactaattaagagcttgcacattaagaaaattggatcgtatctttaaacagtttnggaagacttttattcttttttttaattcttagtttatctgccatactttcagcttttatatagttgaaaacattttctttggcgatcatacccttataatcccctctttctccataata

SEQ ID NO: 417292 - DNA, 610 bp, Homo sapiens
taatagaattctaagatttctgatttctcaccaggaactctatttcaaactgtggctgttgtttgcttgcaatcttccttgcccctttcttaggatactaagagcatttcttttgttctgttcctagctgcatggacaatgcaactcttagaggttttaagttcttaaaggtttttataccattcacgtgttccaactctgcttcacagaaacctgagctctcatttcctgtacctacttatgaattaatgccatttctcctaattcctgcttgcaggtccaaagcctcctgcagcaagtctttactctcttagctttgaacacacacttagaaatgcatttgatttttttgtctggtttggaactcagctrtcttatattttatcaaacatgtctatgtgtttggaagagagggcaacccatccacgccagtttagttcagtactgtcacctatatgatgtgtaagagatagcactctcccaagtctgtgaacaggaaacctgaaactattctaaataattctgtttaatagacttttttctcttctaagatgaccagcagaatatgacagtttgtgtttttaatgggcagaaggggaattgaatagtt

SEQ ID NO: 417293 - DNA, 533 bp, Homo sapiens
ttccacctagtttaaagatgtttatagtatttttaactgatatgcttttctgatataactaaacatttctggaaattttctgtcaattcccacttctttgttccacagagagtttaaattttatgtagtcagtgtcttgccttatgaactgtatgtctgggatctcatttaacaggttctacaccagcaaaataaaataaagatattctctgatattttttcaactctatttgtatttttgcttttacatgagaaaagtaaattctatgaggatatttaatttatgagaatcttacttttgaatattatgtaaggtaggtaggtactcttatttgcaactcagagcttttatcccaacatgattaatgtagcgtttcagattttagtttacatagttgtatgtgtatacatgtatatgtgtatatgtatgtgtatacatgtatatgtgtatatgtatgygtatacatgtatgtgtgtacatgtgtttatatacatatagacacaggtaagtcttatgtcaaggtttgtgcaca

SEQ ID NO: 417294 - DNA, 533 bp, Homo sapiens
ttccacctagtttaaagatgtttatagtatttttaactgatatgcttttctgatataactaaacatttctggaaattttctgtcaattcccacttctttgttccacagagagtttaaattttatgtagtcagtgtcttgccttatgaactgtatgtctgggatctcatttaacaggttctacaccagcaaaataaaataaagatattctctgatattttttcaactctatttgtatttttgcttttacatgagaaaagtaaattctatgaggatatttaatttatgagaatcttacttttgaatattatgtaaggtaggtaggtactcttatttgcaactcagagcttttatcccaacatgattaatgtagcgtttcagattttagtttacatagttgtatgtgtatacatgtatatgtgtatatgtatgtgtatacatgtatatgtgtatatgtatgtrtatacatgtatgtgtgtacatgtgtttatatacatatagacacaggtaagtcttatgtcaaggtttgtgcaca

SEQ ID NO: 417295 - DNA, 444 bp, Homo sapiens
attgagtgttgttatgatatgctctattacatatttcatgcatcgtttatgaattattgcatcctgccttatgggcataattgtgagtgtgtacatctacacacacaacacactcaggcatgtactttaccaatgtcatcttaatttccctacaaatttatttaaagtcatttaaatatcattcatattttgtaatwaataaagttgcaaggctgagtatagtagtcttcaaaaacacaaactctatttcaagctatatttctgtgtttagtttttaaatttccgtattgacttgacatcctttcttgcctgcattttctttgggcgttaatatctccaaaaattttgcttttaatgactcatgtttatccttgaaagaataagcatgttccagaggttcaaactcagctctggagactaaagtctcatagctttaatctgccg

SEQ ID NO: 417296 - DNA, 622 bp, Homo sapiens
tctacacacacaacacactcaggcatgtactttaccaatgtcatcttaatttccctacaaatttatttaaagtcatttaaatatcattcatattttgtaattaataaagttgcaaggctgagtatagtagtcttcaaaaacacaaactctatttcaagctatatttctgtgtttagtttttaaatttccgtattgacttgacatcctttcttgcctgcattttctttgggcgttaatatctccaaaamttttgcttttaatgactcatgtttatccttgaaagaataagcatgttccagaggttcaaactcagctctggagactaaagtctcatagctttaatctgccggccattaacttttgcttgtccataggcaaataatttatcaaagtgtctgtttctttacctgagaaataggcacctattcataaggaacttacccagaaagccagtgtttctactagtaatttttttctgtgtaaagaagtttaaaatgtaaagtggaatgtatatgctatttaagttttcagattcaaataaatttctactctttctttattgagactgtgatacttttaatacaaatgtgctgtgtttgtgaacttatcatggctgtgaaac

SEQ ID NO: 417297 - DNA, 622 bp, Homo sapiens
tctacacacacaacacactcaggcatgtactttaccaatgtcatcttaatttccctacaaatttatttaaagtcatttaaatatcattcatattttgtaattaataaagttgcaaggctgagtatagtagtcttcaaaaacacaaactctatttcaagctatatttctgtgtttagtttttaaatttccgtattgacttgacatcctttcttgcctgcattttctttgggcgttaatatctccaaaaattttgcttttaatgactcatgtttatccttgaaagaataagcatgttccagaggttcaaactcagstctggagactaaagtctcatagctttaatctgccggccattaacttttgcttgtccataggcaaataatttatcaaagtgtctgtttctttacctgagaaataggcacctattcataaggaacttacccagaaagccagtgtttctactagtaatttttttctgtgtaaagaagtttaaaatgtaaagtggaatgtatatgctatttaagttttcagattcaaataaatttctactctttctttattgagactgtgatacttttaatacaaatgtgctgtgtttgtgaacttatcatggctgtgaaac

SEQ ID NO: 417298 - DNA, 622 bp, Homo sapiens
tctacacacacaacacactcaggcatgtactttaccaatgtcatcttaatttccctacaaatttatttaaagtcatttaaatatcattcatattttgtaattaataaagttgcaaggctgagtatagtagtcttcaaaaacacaaactctatttcaagctatatttctgtgtttagtttttaaatttccgtattgacttgacatcctttcttgcctgcattttctttgggcgttaatatctccaaaaattttgcttttaatgactcatgtttatccttgaaagaataagcatgttccagaggttcaaactcagctctggagactaaagtctcatagctttaatctgccggccattaacttttgsttgtccataggcaaataatttatcaaagtgtctgtttctttacctgagaaataggcacctattcataaggaacttacccagaaagccagtgtttctactagtaatttttttctgtgtaaagaagtttaaaatgtaaagtggaatgtatatgctatttaagttttcagattcaaataaatttctactctttctttattgagactgtgatacttttaatacaaatgtgctgtgtttgtgaacttatcatggctgtgaaac

SEQ ID NO: 417299 - DNA, 485 bp, Homo sapiens
ggtggatggtaattaatattgtaacctattttaacgtaacttttcctggtaaagtgggtttgttaattatctaattataatcaaaccaacccccacaaaatgacaaaaagagtaaaaacaaaacctacacaaaatctatattaaaaaaaagaataccaagaagacaagtacacatgaccagtgagaaaacacagtagcccatcaagctacagacatcattgcacttccaagacaggcaatgctctaacagcgacgagcatcatctgctggggtaatttccaaggtccgttgcctcatgccaaagaaatcaaggacacagacacacaaggagtgagtttaagagcagaggtttaataggcgaaagaaagagaaaagctctctctcttgcagagagaggggctcccaartgggtgtcctggttcaggggtgaaatgcattgggttttatagactagttcaaggctgtgatatctgatttacataggg

SEQ ID NO: 417300 - DNA, 611 bp, Homo sapiens
ttaatcactgcacaccaagcctggaggctgtttatctgctccagtgaaaatatcccatctggctgtcaggacacccgctgagatttgtgtcagagtgttctcagtttagggtagtctaccatcatcttccaggatacatgttatttttgcaaaggcaaaattgaaggaaaatccattgaatgaagatggataggaaccaacgctgctcagttcttcagatttactgtgggggctcttgtttcttcggttccttggggaatatggtagtgcttctgactttttcttcttgggagttgaaggacttgcacttttacatcttctaccttaatgtcttttcctccattggtcagggaaccaaggtaaaattatttcagtttctaattatatctcttccaaatttgcatttttggcagagaaatcaccccaggcaggtgcacataatcactggatccactgatagagaaaaatcttcatttttcaccttgcttctatatgccaccattgtatctgtaggatgattakggcgttcagatatcctgacttcagtggcagctcagatatgtgtctaataatcctccaaatctcattatctcacatccttagtgtagaga

SEQ ID NO: 417301 - DNA, 635 bp, Homo sapiens
caatgctaacattgaatgtaaacaggctaaatgtcctatttaaaaaggaacagagtagtcagctgaaaaaaaaaaaacagtaagactcaatggtgtgctatcttcaagaggagagacccatctcatacataatgacatcaacagggtgaaaataaagggagggaggaaaacctaccaagcaaatggaaatcagaagaaaacatgggttggtatcctaatttcagrcaaaatagactttaaaccaacaaagattaaaaaaaagacaaagaatgtctttacataatggtaaaaggttcaattcaacaagaagacctaactatcctaaatatatatgcacccaatacaggagcactcaaattcctaaagcaaattcttggagaccttcaaatatacttagactcccacactactataacaataataggaggagacttcaacactaatagtattaaacagatcatcaaggcagaaaattaacaaaggtattcaggacctgaattcaacattggatcaaatggatctgatggacatctacagaactctccactgaaaaccaatagaatatacattcttctcatcactacatggcacatactttaaaattgatgacacaattgaacataaaacaaccctga

SEQ ID NO: 417302 - DNA, 635 bp, Homo sapiens
caatgctaacattgaatgtaaacaggctaaatgtcctatttaaaaaggaacagagtagtcagctgaaaaaaaaaaaacagtaagactcaatggtgtgctatcttcaagaggagagacccatctcatacataatgacatcaacagggtgaaaataaagggagggaggaaaacctaccaagcaaatggaaatcagaagaaaacatgggttggtatcctaatttcagacaaaatagactttaaaccaacaaagattaaaaaaaagacaaagaatgtctttacataatggtaaaaggttcaattcaacaagaagacctaactatcctaaatatatatgcacccaatacaggagcactcaaattcctaaagcaaattcttggagaccttcaaatatacttagactcccacactactataacaataataggaggagacttcaacactaatagtattaracagatcatcaaggcagaaaattaacaaaggtattcaggacctgaattcaacattggatcaaatggatctgatggacatctacagaactctccactgaaaaccaatagaatatacattcttctcatcactacatggcacatactttaaaattgatgacacaattgaacataaaacaaccctga

SEQ ID NO: 417303 - DNA, 574 bp, Homo sapiens
tcttcctataataagcaaacatctgttaccctaaaattcagtttatcttttggaaaagatgcagtaggagacttgatatgagtgaatttgcttacctcctggaattgtcatggaaaagacccaacataagcattaaaatatgtagattgcaaaacaggaaattaaactgctttcctaactttgaaaatctgaaagagtatgtttaggtttagagctgctggttacagatgagaaagtaggctctgagatgttgaaaaatgattcaagatcaaatagatagctaaagcgagccaagattaaaacccagggctcttaactcctagaacacacttcttctaatacacaattgtaatgatgttgattttttttttagtaaaaaagtaattattgcctttaaagaagcatagactcaccaaagcatgttttttcccttttatgtktctgttacttcaatcgccagtttttttttttttttgcataataaaacccaattggccatgcacacaaatgtatttcatcagtaaaatgactgcataaaatattttgaagatttggtattcttcattttataacc

SEQ ID NO: 417304 - DNA, 587 bp, Homo sapiens
ggagccaaaaaaaagctgaatttgtcagcagtcaagcaacagaaggaagcagagcactaatattacaacatttaaacattttgacttcgttcaggctgaagccagataaacaccctggacttttcggtttcacaaaatccctttgttgacctatgagttagaggaagaaatgaggtgagaagtcaccacatatcattcttaggtccaaaccagcttgataaatcctagaacagactaactttaaaatgattattggactagaaagactgattcatttcaagatacattaatttagcacccactgtgtactatgtacttatcattaggacawaatctcagctctggacagccattcatcttcaatggacattcacaagtgaagtgtaaataattcagcaaggcctaggtgaaatgcctgatgtaaagatccatctatatattcaaattttacaaaagtatgtttcccttttatcaacttgcagttttcctcacaaagctatatttcatagctgcctaactgtatactgcattctgacacccttttcaacaaatggtgctgcgataactggctagccacatgtaagaaa

SEQ ID NO: 417305 - DNA, 540 bp, Homo sapiens
taataaaacccatctacaacaaacccagagccaacattatactgaatgaggaaaacctgaaagtattccctctgagaactggaacaagacaaggatgctcattttcaccacttccgttcaacacagtactggaagtcctagccagaagaatcaaacaagagaaagaaataaagggcatccgaatcaaactgtcactgtctgctgatgatatgatcgtctaccaagaaaaccctaaagactcatccaaaaagcacctggaactgataaatgaattcagcaaagtttcaggacacaaaattagtgtacacaaatcagtagctctgctatacaccaacagcaaccaagttgagaatcagatcaagaatgcaaccccttttacaatagctgcaaaaaaatataaamtacttaggaacatacctaaccaaggatgtgaaagtcctctaaaaggaaaactgctaaatactgctgaaataactcacagatgacacaaccaaatggaaacacatcccattctcatggaggggtagaatcaatattgtg

SEQ ID NO: 417306 - DNA, 540 bp, Homo sapiens
taataaaacccatctacaacaaacccagagccaacattatactgaatgaggaaaacctgaaagtattccctctgagaactggaacaagacaaggatgctcattttcaccacttccgttcaacacagtactggaagtcctagccagaagaatcaaacaagagaaagaaataaagggcatccgaatcaaactgtcactgtctgctgatgatatgatcgtctaccaagaaaaccctaaagactcatccaaaaagcacctggaactgataaatgaattcagcaaagtttcaggacacaaaattagtgtacacaaatcagtagctctgctatacaccaacagcaaccaagttgagaatcagatcaagaatgcaaccccttttacaatagctgcaaaaaaatataaaatacttaggaacatacctaaccaaggatgtgaaagtcctctaaaaggaaaactgctaaatactgctgaaataamtcacagatgacacaaccaaatggaaacacatcccattctcatggaggggtagaatcaatattgtg

SEQ ID NO: 417307 - DNA, 561 bp, Homo sapiens
tattatgtcatcaatgataaatatgatttttggtttaaaagtggtaaatcatattcttactctccagagaattctggtgttacattttgtaacctttatacccccatccccagattccataatagtgtccagacctgagatttttatatttgaacacccatttctgaagtcacaggtaatttgtccggagtgctttgcactctgcccctgctgtrattccccttatctttgtgctcaacagagctgtactgagcacctagtccaggagtttacagagaaggggcatcgccttgtcccaggaacaagtacattacctcatgaagggactttcaaagtggtacatatgacacagaagaaaagacacatggctgtgactgctcagtgcttaccctctagcccctcaccgagagaaaacaaatggaaacaaaagtaaagtaaaagtgaatgcaaaaaaattcctcaatattcagtatgttcttctacctctgtttttggggacaccaacttgtaagacacctggtctgtctccttgagaaaggtaaattttagccctcagtgtaa

SEQ ID NO: 417308 - DNA, 590 bp, Homo sapiens
tttgatatggtttggctctgtgtctgcacccaaatctcatctcaaattataatcctcacattttgagggagggagctggtgggggtgattggatcataagggtggtgtctcccatgtagttctcatgagagtgagggggttctcacaagtgctaatggtttaaaagtgtttgscactttccccctctctctgtctctctcctgccaccatgtgaaggaggtccttgtttccccttcatcttccactatgatcataagtttcctgaggccttcctagccatggggaacagtaagtcaattaaccttttttcttcagaaattacccagtctcaggtagttctttatagcagtgtgaaaatgaactaatgcagtgatatgcatgcagttgtcagcccagctgagcttcccaattgtttccaagatgtcccttccctctccaaccctctctatataaacccaccttactaatatcccaacacacaacctccccagcctagctttgctgcctgtactgagactatattatttactcattcacaaatcttcaaactttaaccctgagctttcttcgtagcacaacttaatagctac

SEQ ID NO: 417309 - DNA, 572 bp, Homo sapiens
tactcaacttttgggaggtcaaagcagaatatcataatcaaatgtaagactgaggattctgctagccacaggagaaaggactgggggacacatgacattgaaaagagagcagcaagcattgggagatacattgaggaggcagtgtaagagctaaagaaagaagaaagaaacatgaaatgtggctcaacagtcaaagatagatttattttagagaagtaaacctgagaggggcttctggttgatttcagttaggagtgctctctctttcagactaagarcatagattggttttagggtgaaggggcttatcacaagcttggaatgtttctgtgtgggggagaagtttatggcagagttggaatgtttctgggaggaggggaggttatcctgtacctgacatctttccagctggaggggaggttgtctcggagctggcatgtttctggtcagggaggggtttggaatgtttctggttggagatattatttgcggtttatggtcatgctgtccttagccataaggatgatgcccttttggattcaggttggttttgatcaaggaaacttaaaatg

SEQ ID NO: 417310 - DNA, 572 bp, Homo sapiens
tactcaacttttgggaggtcaaagcagaatatcataatcaaatgtaagactgaggattctgctagccacaggagaaaggactgggggacacatgacattgaaaagagagcagcaagcattgggagatacattgaggaggcagtgtaagagctaaagaaagaagaaagaaacatgaaatgtggctcaacagtcaaagatagatttattttagagaagtaaacctgagaggggcttctggttgatttcagttaggagtgctctctctttcagactaagaacatagattggttttagggtgarggggcttatcacaagcttggaatgtttctgtgtgggggagaagtttatggcagagttggaatgtttctgggaggaggggaggttatcctgtacctgacatctttccagctggaggggaggttgtctcggagctggcatgtttctggtcagggaggggtttggaatgtttctggttggagatattatttgcggtttatggtcatgctgtccttagccataaggatgatgcccttttggattcaggttggttttgatcaaggaaacttaaaatg

SEQ ID NO: 417311 - DNA, 504 bp, Homo sapiens
aatacttggaaaacaagaattaagatcctttatccacggtaatccccagtgggaaatacgccagaatctgagcagaaggtaataaaataaaggaagccccctaatcatccacatttattggctcagatatgaatcgtggttcctggacttctgactgttgcatagctgcttctgacgtggatgttgtcagagccagagcgttggcctaytgaaggcacagtggaaagatgagggtggatggaataacaactcaagacgctacttgaaaccattaaggtttatgagcacgttttaatctaatacatattaaaatgattatattctattttatctcattataaatttagcttattttttctcattgtaaaaataaataatagaaatttttgacactccaaactattttaaaaaagaaaactttacattttatcatcagaagaaaactactgttaacatttttatagttacatctagtctctatctgtctctcgtcatattaacata

SEQ ID NO: 417312 - DNA, 615 bp, Homo sapiens
acgcacacacagtgtcttcatgaggtgacagatatgttaatttacttaattgtagaaatcactttttatgtatttgtaattgaaacatcatgttgtataccttaaatatatacaagaatacagggacaaatacaaagaaatttaaaaggctaaattaatgattagtgctctgaatccacattttcagaacaaaaatctgtgcccagtgccatcaggtgttgctggttggcacagggagtagaaacagtggcatggcttcccattgagagcctgtgcactgctgatggtggataattaaaaaattaaaatcaagacatgggagactattgcaacttgggaattatttctctttgtcactggggttgagatccaggaattgtgtgatctctgcctgtcagtcagtcaggagcatttcctggaggcctgctgtgtggggaacacttgattagctactgtcaattggctcatttacatatttatcagaaattgagagtatcrtgcccttttctatttgtaagacaaataaatcatttacttcacagcctcatagagacactacttcagaccctgaatatgggaagctggtttgtatttattagataaatattctgtatt

SEQ ID NO: 417313 - DNA, 578 bp, Homo sapiens
aaggatgatttccttcctgcatcaacggagtggtgtttcgggtttgactcttgctatctggtagattgataatggagattaatttacttatctcttagctgcataaattagtgtatagaaaaaacatcttgcagctgcccagaatctgtcattaaagatgccttagttagtctcccctcttgggcaatgaagtatgtggaaagacacatagcatgattagcatatactgcttttctctatctctctttattctcaaaaattctagggcaatggatagacaacaaacacgtgtgaactgtttaacagtgattcaaattattgcattatttttttcttgctttgactgtaactagatcaggtttggcaccatacaggtagattrtgatcacgacagattcaatttgcttattattcctggcagaaataaaataatttaagaaaaccttgagtaaccaatattgatattttgataaacacttgacttactaattatgattctgaatgtaagactaattcttaaaacaagcaatactaaacaaaacagagacagtgatttaggtctacgaaattaacagaat

SEQ ID NO: 417314 - DNA, 596 bp, Homo sapiens
gcttattattcctggcagaaataaaataatttaagaaaaccttgagtaaccaatattgatattttgataaacacttgacttactaattatgattctgaatgtaagactaattcttaaaacaagcaatactaaacaaaacagagacagtgatttaggtctacgaaattaacagaattaattacccaccagtggagagggaggaagttctttaaggcactcattacgtagttctggtggcaaatgtgacacagttctagtggtgcaacttatttgtgaaatgaattttaaaaatttatagactgttttgccagttgtgttacttctgtcacatgttcttgcttaacacaagctgtttaacygcagtcctgacatgttcatctgaacaacagtgtaccccatcctcacaaggagggagtggatcagaaggcaatcctccaagcctttgactgcaagtttgcactgtccagtcagggtcagaccttcaggaccctgggcttagttcacatttataagccttgattacctcaacatgaacccaaaagtacacccctaaatcacaaggcattgtggagaataaatgaattagtgcatgtaaa

SEQ ID NO: 417315 - DNA, 580 bp, Homo sapiens
catcatcattaattgattcaaagaaaagtctctgcttctagtttatataacaaaacagccagagcctgcattgcagaaagggtcttagcaatgttataaattttggggttagagaaattgagaagtttaactaaaagaattggtctcagaagacccactcctacttaaaagcattaccctgaggattactgcccttgttggttgatgtttaatgtgtcattttagaatcaatggatgaaatttgggctggaaggcacacagggctgcatgtaggggaggggcagtgaggcacagaggaggaattgctgggagtcagcacatgtagctcgacattgcatggccagctctgtcattaggaagcatccgcaggggtcacaagtgtgtcacgwggcgagatgtcttagttttatctgtagaagttggggtaatgataccatatcagtcaggattctctagagaaacagaaccaacaagagattttatatgtaaatgagatctatcatagggattggctcacatggaggcggagaagtcccataatctgctgtctgcaagcttgctggagagccaggaagtggat

SEQ ID NO: 417316 - DNA, 653 bp, Homo sapiens
tagatacggaggatcaccagtaaattattactttaagaatcatggttactgtcttcatagagtttatagactggaggagagtcattaatcaaataatcacatggataatgtaaaatttcaactgtaagagcgcacgaaggagacgaaagcatattctatgcgagttgacaagatgtggcttattctrtacagacttgtaatttttcatttcctcccagtttttgtgtttctgtcacataaacaaaatgtattttcagagcctggaggcaaaggagggatcttgaatcatagacaatagtcagttggcctgagattgctgtgtatttttcaggaacaactgactctgacacctgagaagagcaaacacagatttttacttccttccatgctcttggcagtgcaggttcctattctgggcctttggggtcacactgcaggtctagttactattttccagaaatgcattcctagctaagtatctactaagcctaacagggagaagaaaacatgtaagccaaccagccaaacaaaaacacaaaataaaaacaccttctccataggactatgtgatctgcaaacaaataaaggcctgaaattgtaagatgtaagtcaatttttcattatcagtattagggtggaggaaagctacctag

SEQ ID NO: 417317 - DNA, 567 bp, Homo sapiens
agttaaaaaagtttacggtgccgggcatggtgctcacacctgtaatcccagcactttgggaggccaagatgagcagatcacgaggtcaggakttcgagaccatcctggctaacatggtgaaaccctgtctctactaaaaatacaaaaaattagtcaggtgtggtggcagacgtctgtagtcccagctactcgagaggctgaagcagaagaatggcatgaacccggaaggcggagctggcagtgagccgagatagtgccactgcgctccagcctggacaacagagcgagactccatctcaaaaaaattaaaaaaaaaagtttatggtataaatttgtgatatgtacctatataaatatatgtaaataacatttactttcacagatttttagaaagtttgtggaaacatgaagtatgtttcttactcatatacacagcttcaaatatattttctcacgtatcaaaaataagaaatccagctcagttgccaaggttcatggctgtaatccctgtgcttttggaggttgaggcaagaggatcgctggaagcaaggagtttgagaccagctt

SEQ ID NO: 417318 - DNA, 567 bp, Homo sapiens
agttaaaaaagtttacggtgccgggcatggtgctcacacctgtaatcccagcactttgggaggccaagatgagcagatcacgaggtcaggagttcgagaccatcctgrctaacatggtgaaaccctgtctctactaaaaatacaaaaaattagtcaggtgtggtggcagacgtctgtagtcccagctactcgagaggctgaagcagaagaatggcatgaacccggaaggcggagctggcagtgagccgagatagtgccactgcgctccagcctggacaacagagcgagactccatctcaaaaaaattaaaaaaaaaagtttatggtataaatttgtgatatgtacctatataaatatatgtaaataacatttactttcacagatttttagaaagtttgtggaaacatgaagtatgtttcttactcatatacacagcttcaaatatattttctcacgtatcaaaaataagaaatccagctcagttgccaaggttcatggctgtaatccctgtgcttttggaggttgaggcaagaggatcgctggaagcaaggagtttgagaccagctt

SEQ ID NO: 417319 - DNA, 567 bp, Homo sapiens
agttaaaaaagtttacggtgccgggcatggtgctcacacctgtaatcccagcactttgggaggccaagatgagcagatcacgaggtcaggagttcgagaccatcctggctaacatggtgaaaccctgtctctactaaaaatacaaaaaattagtcaggtgtggtggcagacgtctgtagtcccagctactcgagaggctgaagcagaagaatggcatgaacccggaaggcggagctggcagtgagccragatagtgccactgcgctccagcctggacaacagagcgagactccatctcaaaaaaattaaaaaaaaaagtttatggtataaatttgtgatatgtacctatataaatatatgtaaataacatttactttcacagatttttagaaagtttgtggaaacatgaagtatgtttcttactcatatacacagcttcaaatatattttctcacgtatcaaaaataagaaatccagctcagttgccaaggttcatggctgtaatccctgtgcttttggaggttgaggcaagaggatcgctggaagcaaggagtttgagaccagctt

SEQ ID NO: 417320 - DNA, 567 bp, Homo sapiens
agttaaaaaagtttacggtgccgggcatggtgctcacacctgtaatcccagcactttgggaggccaagatgagcagatcacgaggtcaggagttcgagaccatcctggctaacatggtgaaaccctgtctctactaaaaatacaaaaaattagtcaggtgtggtggcagacgtctgtagtcccagctactcgagaggctgaagcagaagaatggcatgaacccggaaggcggagctggcagtgagccgagatagtgccactgcgctccagcctggacaacagagcgagactccatctcaaaaaaattwaaaaaaaaagtttatggtataaatttgtgatatgtacctatataaatatatgtaaataacatttactttcacagatttttagaaagtttgtggaaacatgaagtatgtttcttactcatatacacagcttcaaatatattttctcacgtatcaaaaataagaaatccagctcagttgccaaggttcatggctgtaatccctgtgcttttggaggttgaggcaagaggatcgctggaagcaaggagtttgagaccagctt

SEQ ID NO: 417321 - DNA, 628 bp, Homo sapiens
tatatatgtatatctcatataaatatatatgtatatctcatataaatatatttgagagagagatatatatatagtgagatttattatgatatatgtgagagatatatatatctacacacaccagttggtctgcttctctggagaactctgactaatacgtgggccaataattaaatcaaaaagtactgcccyaactatagtgacaacagtatttgaaaatagatttttctatttcgatttatgttgctttgcaatgggctgcagtgctcagcccaggattcccagaatttaaaaacttaactggtccatcttggtatctgcttttgaaacaacaggcttgggtatatattgtccaatatagcaggcctcatgtgctccttaaaccagggctacttcaaatagagttgccctttacagttggataatggttaactttaaatagcaagatgtatctagcaagagggtttctgaaaacccctgggtttctttcttatattgtcctctatttcctaaatttcattttttaacttactttagcttggagacagagtttgttgtttttgtttagttgttttataatccaacagtctgcaagattttatcacttgctcaatgttaactgcagatt

SEQ ID NO: 417322 - DNA, 622 bp, Homo sapiens
ccactttcgtttctagatctattattggagacatatgatttccagatactaattgttcaattaatcaggagactttaaattgcaatttacagaaatcaactcaatgtagcttaagtaaagtagaacttccttgagctttgttattgaaagatcctgagacagattttcttcaggcatagcaggatcaaggctctgtcagtttcatcaatgcagtttgcttttcgcagaattagtttcatttcccgggagtatttttttgtctaagtggtgggagtgattgccatctgtagctccctgcttatatatatttttttctatggcttaaactctcaggaaaagtagagtggctttcccactaatattcatgaaagtcctgaggaagatgctaacttgtgttcatccctgaactattaatctctttagaggaaggtaagattcagagtattcaggctgccatagtggggcacagatgaggattcggtttagttcyatctaaaagaaagtattttgtagaattatgaaattgtggaaacattggctcatagatagaaggaatataggcaaaaaaataaacatataaaaaaatgggacaaaggaagaaagaagaaaaagaaagaaagag

SEQ ID NO: 417323 - DNA, 622 bp, Homo sapiens
ccactttcgtttctagatctattattggagacatatgatttccagatactaattgttcaattaatcaggagactttaaattgcaatttacagaaatcaactcaatgtagcttaagtaaagtagaacttccttgagctttgttattgaaagatcctgagacagattttcttcaggcatagcaggatcaaggctctgtcagtttcatcaatgcagtttgcttttcgcagaattagtttcatttcccgggagtatttttttgtctaagtggtgggagtgattgccatctgtagctccctgcttatatatatttttttctatggcttaaactctcaggaaaagtagagtggctttcccactaatattcatgaaagtcctgaggaagatgctaacttgtgttcatccctgaactattaatctctttagaggaaggtaagattcagagtattcaggctgccatagtggggcacagatgaggattcggtttagttccatctaaaaraaagtattttgtagaattatgaaattgtggaaacattggctcatagatagaaggaatataggcaaaaaaataaacatataaaaaaatgggacaaaggaagaaagaagaaaaagaaagaaagag

SEQ ID NO: 417324 - DNA, 535 bp, Homo sapiens
caattaacaagcacttagtttccatgaaaaacgctcctttcccccttggtttctatctctgccaatatccctccagcaaatccagtttgcacctacaaaaaacatactgcttttcatgtatggtttcaaaaggaaagtgagcttgacaaagctaagaaaataaaacaaacaagacaggaagtttttaatatttttaaaagctaaagatatataggttacttatttgtaaatattcttagttcaatacccatacttattaacagtatcactccagtcataatcatacctaaatgtctccatatmcttcaggaatgttattgtatccctgacctgtagtggtaatttctaaccttttatttctgtctctctgcaaattaattaatatttgattaattagtatgtttcctaagggggagccatgcaatatgttgatctattaacagatattatggtttctccttaggcttctgatgcaaacatttgtttaaggtgaggtttacacatatttaattttaaaccattttctagttacttt

SEQ ID NO: 417325 - DNA, 578 bp, Homo sapiens
acaataaatagagtgaaaagacaacctgtagaactggagaaaatatttgcaagctatgcatctgaaagtatctagaatatatagggaactcaatagcaaaaaaaacacaatttttaaaataggcaaaagaactaaaaagacacatgtcgatggaagacatacaaatggccatcatatatgtgaaaaatgcttttaacatcattaatcataggggaaatgcaaatcaaaaccatgaaataccaccgtatcccagttagaatggctactgttaaaaagacaaaaaataacaagtactggtgaggctacggagaaaagagaactgttayatgctcctggtgggattgtaaattagtatagaaattatggaaaagagcattagggttctttaaaaaattaaaatagacgtgccatatgatccagcaatcccactactgggattcattcaaaggaaatgaattcagtatatccaggagataactgcagtcccatttttattgcagcactatttgcaataggcaagatatggaatcaaccaaagtgcctatctacagaagaatggataaagaaattgtgatata

SEQ ID NO: 417326 - DNA, 627 bp, Homo sapiens
catgaaaaataacacagataaggaacctagtaaactaggaatagtaataaccaggcataacccctgaaactggctttgaggtgtggggatttccattgaaagaaaacacaagagtggaacttttataactgggcatcattactaataggtcaaactatggaaatattcctcccaaaarggagagctataataaactggtgataagctgtaagcacaacaccaataaccaggaacaatacaaaatatgtcaggtttagagtagaagaaaatagataatggtgtggatgaagaaaagagtgaaaaaaaataatgaagtgataagcaggaacaatatgactaagacgttttctccaatcttgatgtcctttagggaaatcctaatgtgacagggcagactgagaatgtcaggatttctaaagagcatttaaagtgatgataaatagtccctttaatacttgcaataatcactactacggaggcaaattaaatgcatgcacatacagtaatgaaatatacttgtctctaaagtacaaataccatgtagcatatactgtaatgtatatgaaaggattaaacaattagcctctctgcactgctggctgccagaaagatatttcgatggtacta

SEQ ID NO: 417327 - DNA, 470 bp, Homo sapiens
attttagaaattcaaaaagacaataagaataaaacaaagtaatgtgagttcgactggcaaggagtgaggaataatttaaattggatcatcagggaagtatttgcttaggcagagatattccagtgacacctaaattctatgaaaaaccagaatgtgaagacctggggaaaacatttccaataaagggatgaggttggttcatgttacaaaagaggacaaataccattggtgtttgtcactattatcagtcaggtctagtcaggaaaataggaagaataccaattattttaataagtacaaattaattttgaaatattctaatgacgtggtagaagactacacaggcaaaaaggaattgctgtattaacacagaggaagctacygcaggaggcagttgctacttttagggcagtgagaaccaaaggagtagggttcatacaagttcaaggtctggaagaggggccctagct

SEQ ID NO: 417328 - DNA, 559 bp, Homo sapiens
gagtcacatattatatatgtgtgtatatatgtgtgtgtatacacatatataatatatataatcatatataatctatatatggattttatttttgagtaactttaggcttacagaaaaaaattagagaaaagtatagagttcccatacacccctcctacctcagtttctcttattattaacattttgaattagcctggtgcatttgttacaattattaagccaatattgatacattattagccaaaatctatgatttacattagggttaactctctatgttatgcatattatggcttttgacaaatgaatactgaaatgtacatatcattacagcatcatacaaaacagtttcactgccctaaaaatccacctgtattccacctattcatccctccctctccacaaatccctagmaacctctgatcttttttccatctgtaatagttttgccttttccaggatgtcatatagttggaatgatacagtaggcaccctttacagataggcttctttctcttggcaataggtagttaaggctccttgacgtcttttttggttt

SEQ ID NO: 417329 - DNA, 567 bp, Homo sapiens
agaatttctttatgagcttatttcccatctgtatatcttctttggtgaattgcctgttcaaattatttacctatcttttaattgaattgtttcttttcttgatactgagttctgaatcttctggttacaaggcctttgtcagttatgtgatttgcaaatagacaattctctctgtatccatgggtgattggttccagaactctctgcagataccaaaatctgcaaatgcgcaagtcgcctatataaaatggtatagtatttgcctataacttatgtatactttgttgtatactttaaatcatctctagattacataaaatacctaaaacamtgttaatgctatgtaaatatttgctatactgtattgtttagggaaaacttacaagaaaaaaatgactgtacattttcagtacaggtgcaaccatcctttgtttctcccaatatttttattaagaaatttgctgaatccacatatgaggaacccatggatatgaaaggctggctgtatttttctctcagtataactagtttgtctcttcatccttgtagcagtgtatttcaaagagc

SEQ ID NO: 417330 - DNA, 653 bp, Homo sapiens
cacacagtctgatctgttgtgtcatccaagcattacttattcaattctgttgggattaagtggatctttatattttaaatctattaagtttaattcaaacaaacttttatcactacaagtcctatccttcataatgaaatgagctgtcatactgtgtacaatttttagaaggttgttatatttagcttagtgaaccatcctggtttctactgattgacttatatttaaattttaaagaaccagtcataatgatagattttaaaactctgctccctattaagtccagttcattttayataccccaaattcattttccatacccatgggctctatcttttatccatattttacatgtttgagctccttattttttattttttaaatgtttgaatcttaccattgtagtcttaaaacacctcttcaattttagtgatcatttcacattctttggattccttgtgatttagtgtgcccagaacagttgacaaactcttttaatgcaacaaggtgctgtcttatcatttcttctaagtttcagtttaagtttctttattccaaatgtttattttaccctcttaataagataattattctccttgacagtaaagtcagaagcaaatggggagctaaataactgtgtattcccacctaca

SEQ ID NO: 417331 - DNA, 583 bp, Homo sapiens
aggttgattggtagcaaaacagtccttaatrgaagtcttattagtaagacataccctcactatggaaccattaaaatttgataaaactttccttattattttgaatatatggattataaatttgttctggcttaggacattagtgatacgctcataagctttattttctgttataattccatttaattcagcattcttctttatttaatgttctatatgatatagatggtggtgagcagtattcattgattccacctttggtcatatagttaaatgtaggtgtacatacatgagaaatcaggccacatactagagatttggggttaataaatgaaacatactaagtcactgttagcttagatttaggaataacctcaatcttagaccagtattattttatgtgataatgctagcacattcacatttaatattataaatattatctaactctgacttgctttcaagactgatagacacactttaccatttagtattgtagttgctttaccagattctggaaagaaaccaaagataaacaagaactggtccttattctggagaagttcacatcttttacagccat

SEQ ID NO: 417332 - DNA, 606 bp, Homo sapiens
tttcactttatcattcctggtttcaggttccagtctaatctccatagaaatggaattccgattggacctcagagatatcttacaagtacactgtaatcccaacttgagggagaagttcgagttaactgaaattcagtttaccctcatgggagcagttgggctgaactactaagaggaaccaaatttaagttcttaaaaatggccaggatgaattctaaaataaaacaacagagctaatattaaaatataaagaaaaatccttctttctttctttctttctttctttctttctttckttctttctttctttctttctttctttctttttcttttctttcttctctttctctttctttcttcttcctttcttctctctctcctctttctctttctttccttactattttttttttgtttttaccctgagcagcctatctctctctttttttttttttttcacaaatgtgaagtgattatgagaatgcagaggaaaaaaaatgccggtaaacaacaacgagtaaatcatctttataatcagtaaaacacatatttaataacaattctaacacaaggacttatgtgcctaagatagccacagatacccag

SEQ ID NO: 417333 - DNA, 569 bp, Homo sapiens
gtgtgtgtgtgtgtgtgtgtgtgtgtgtataagcattagttcattctcacactgctgataaagacatacccaagactatttataaaggaaagaggtttaattgactcacaggtcagcatggatgtggaggcttcagcaaacttataatcatggtggaaggggaagaaaacatgccctttttcacatggtggcaggaaggagaactgccaagcaaaaggtgaaaaagccccttctgaaaccatcagaactcatgagaacrcattcactatcacaagaacagcatgaaggtaattgaccccatgattaaattacctcccaccaggtccctccacaacacatggagattatatgacacatacaattcatatatgaattcatttttaggtggggacacagagtcaaaccatatcacttcaccccagctcctcccaaatctcatgtcctcacatttcaaaacacagtaatgctcttccagcagtcccccaacaatcccccaaagtcttaactgatttcagcattaactcaaaattccaagttaactcaacattccaaattaactcaaaagtcca

SEQ ID NO: 417334 - DNA, 574 bp, Homo sapiens
tattctagggcctggaggacagtggctcccttctcatagctccactaggcagtgcccaatggggactctgtgtcggggctccaactccacatttcatttctgcactgccctagcagatgttctccataaggctctgcccctgcagcaaacttctgcctgaacatccaggcatttccatacatcctctgaaatctagtggagcttctcaaacatcaattcttgacttctgtgcacctgcaagcccaacacctcatgtaagccaccaaggcttggggcttgcaccctctgaagcaacattctgagttatatgttggctcctttaagccacctctggagctggagcagctgggatgaagggcactatgttccaaggctgcataaagcagagggatcctgggcccagygcatgaaaacattttttccctcctaggcctccagacctgtgatgggaggggctgctgtgctgtggtgtgagggacttgtgatgagaggggccgcacaggtgattaacattctgctccgcattacttatgcaaatttctgcagctggtgtgaatttctccccagaatataa

SEQ ID NO: 417335 - DNA, 628 bp, Homo sapiens
ggggcggggtggggctggagctcctgtctcttggccagctgaatggaggcccagyggcaacacaggtcctgcctggggatcaggtctgctctgcaccccaccttgctgcctggagccgcccacctgacaacctctcatccctgctctgtagatccggtcccatccccactgcccaccccacccccccagcactccacccagttcaacgttccacgaacccccagaaccagccctcatcaacaggcagcaagaagggccccccgcccatcgccccacaacgccagccgggtgaactgtagcgttggcaggtcctgaggcagctggcaagacgcctgcagctgaaagatacaaggccagggacaggacagtcccatccccaggaggcagggagtatacaggctggggaagtttgcccttgcgtggggtggtgatggaggaggctcagcaagtcttctggactgtgaacctgtgtctgccactgtgtgctgggtggtggtcatctttcccaccaggctgtggcctctgcaaccttcaagggaggagcaggtcccattggctgagcacagccttgtaccgtgaactggaacaagcagcctccttcctggccacaggttccatgtccttatat

SEQ ID NO: 417336 - DNA, 500 bp, Homo sapiens
ggggtggcttttaggatggcaagggacttcctgtaacaaygcatctcatatttggaatgactattaaaaaaacaacaatgtgcaatcaaagtcctcggccacattgtgaactttgggggatgctcgctccaaccgactgctgtcaccttcaccgttccagtttttaaatcctgagtcaagccaaaaaaaaaaaaaaaaccaaaacaaaacaaaaaaaacaaataaagccatgccaatctcatcttgttttctgcgcaagttaggttttgtcaagaaagggtgtaacgcaactaagtcatagtccgcctagaagcatttgcggtggacgatggaggggccggactcgtcatactcctgcttgctgatccacatctgctggaaggtggacagcgaggccaggatggagccgccgatccacacggagtacttgcgctcaggaggagcaatgatctgaggagggaaggggacaggcagtgaggaccctggatgtgacagctccc

SEQ ID NO: 417337 - DNA, 632 bp, Homo sapiens
ccgcgctcggtgaggatcttcatgaggtagtcagtcaggtcccggccagccaggtccagacgcaggatggcatgggggagggcatacccctcgtagatgggcacagtgtgggtgaccccgtcaccggagtccatcacgatgccagtggtacggccagaggcgtacagggatagcacagcctggatagcaacgtacatggctggggtgttgaaggtctcaaacatgatctgtaaggcagagatrcaccatgtcacactggggaagccactggggacagccaggccagacgggggacatgcagaaagtgcaaagaacacggctaagtgtgctggggtcttgggatggggagtctgttcagacctactgtgcgcctacttaatacacactccaaggccgctttacaccagcctcatggccttgtcacacgagccagtgttagtacctacacccacaacactgtcttagacacctagtcagagagacaaacaccagaaaaagagctcatctgggaaaaagcaaatagaacctgcagagttccaaaggagactcaggtcagagaagagagtcctacggaaaacggcagaagagagaaccagtgagaaagggcgcagctccgggaggccaggaaggag

SEQ ID NO: 417338 - DNA, 347 bp, Homo sapiens
aaaagagtgtttcaaaactgctcaatcaacagagacattcaactatgtgagatgaatgcacacatcacaaagaagtttctcagaatgcttctgtgcagtttttgtgtgaagayatttcattttccacagtacgcctcaaagcgctccaaatatccactcgcaggttctgtaaaaagagagattccaaactggtgaatcaaaagataggttcaacactgtgacttaggtgcacaattcacaaagatgttcctcagaaatcttctgtgtagtttttatatgaagatatctcctcctccaaaacagatctcaaagccctccaaatattcacttccagattgtacggaaag

SEQ ID NO: 417339 - DNA, 347 bp, Homo sapiens
aaaagagtgtttcaaaactgctcaatcaacagagacattcaactatgtgagatgaatgcacacatcacaaagaagtttctcagaatgcttctgtgcagtttttgtgtgaagatatttcattttccacagtaygcctcaaagcgctccaaatatccactcgcaggttctgtaaaaagagagattccaaactggtgaatcaaaagataggttcaacactgtgacttaggtgcacaattcacaaagatgttcctcagaaatcttctgtgtagtttttatatgaagatatctcctcctccaaaacagatctcaaagccctccaaatattcacttccagattgtacggaaag

SEQ ID NO: 417340 - DNA, 347 bp, Homo sapiens
aaaagagtgtttcaaaactgctcaatcaacagagacattcaactatgtgagatgaatgcacacatcacaaagaagtttctcagaatgcttctgtgcagtttttgtgtgaagatatttcattttccacagtacgcctcaaagcgctccaaatatccactckcaggttctgtaaaaagagagattccaaactggtgaatcaaaagataggttcaacactgtgacttaggtgcacaattcacaaagatgttcctcagaaatcttctgtgtagtttttatatgaagatatctcctcctccaaaacagatctcaaagccctccaaatattcacttccagattgtacggaaag

SEQ ID NO: 417341 - DNA, 347 bp, Homo sapiens
aaaagagtgtttcaaaactgctcaatcaacagagacattcaactatgtgagatgaatgcacacatcacaaagaagtttctcagaatgcttctgtgcagtttttgtgtgaagatatttcattttccacagtacgcctcaaagcgctccaaatatccactcgcaggttctgtaaaaagagagattccaaactgstgaatcaaaagataggttcaacactgtgacttaggtgcacaattcacaaagatgttcctcagaaatcttctgtgtagtttttatatgaagatatctcctcctccaaaacagatctcaaagccctccaaatattcacttccagattgtacggaaag

SEQ ID NO: 417342 - DNA, 623 bp, Homo sapiens
ataaaataccattccaacctagaagaataatgtaaaagtgtaatttttaattggaaagatgcccattatgcattttgtattaagaaaaatattaaataaccaatttatattatttgagcaaatctttgtaaaatataagtatgcatgtttgtgtcaatttcaaaatgcaaagacaagaatgtggaagattacaaaccaatgctaaaagttaattgacagaaagcaaacattacggctggctacttatgtattattctaaatgtaaaaataagcaatttttgtaacaaatgactgaagtaaatgcattatacagataaaatataaatatttctgaaaggcaagtaagcccccatttgtgaattactgaagtatataacagtgtcayatttatttttagcttagactttattagtttttgagctaggaaaaagtatatgagtgtattagtccattctcatgctgctaataaagacatacccaagactgggtaatttatttaaaaaaaaaagagatttaatggattcacaagtccacatggctggggaggcctcacaatcatgacagaaagcaaagaaggagcaaaggcattgtcttacaggcaagagaacatgtgtaggggaacc

SEQ ID NO: 417343 - DNA, 551 bp, Homo sapiens
agatttaagaataacaaatatggttaaatgattaaaacaatcatttctaagaaaaaatattacatattaagcatcactaattcaaaaatccaaaatctgaaatgctctaaaattcaaacctatttgagtgtcgacatgacatgaccacatgtgcaaaattctacacstgacacttttgctttctgatgactcaatatcacagtttgtttcatgcacgaaattatttaaaatattccataacattattttcagtctatttgtataaaaatataaaaaacataaattttgtgtttagactttggtttcaaatagctcatttatgcatatgcaaatattccaaaatctgaaaaaaataaatcccaaaaacttctggttataagcatttcagatgagggatactaaaactgtattttatctatgatgtttttaaaaatattgttcttatcttatgctgctttatcaaaataaatttccatacaagataaaaaaagatattttttcaacagacacacacacatgctaagcaataaagaactggcttgaattaattc

SEQ ID NO: 417344 - DNA, 551 bp, Homo sapiens
agatttaagaataacaaatatggttaaatgattaaaacaatcatttctaagaaaaaatattacatattaagcatcactaattcaaaaatccaaaatctgaaatgctctaaaattcaaacctatttgagtgtcgacatgacatgaccacatgtgcaaaattctacacctgacacttttgctttctgatgactcaatatcacagtttgtttcatgcacgaaattatttaaaatattccataacattattttcagtctatttgtataaaaatataaaaaacataaattttgtgtttagactttggtttcaaatagctcatttatgcatatgcaaatattccaaaatctgaaaaaaataaatcccaaaaacttctggttataagcatttcagatgmgggatactaaaactgtattttatctatgatgtttttaaaaatattgttcttatcttatgctgctttatcaaaataaatttccatacaagataaaaaaagatattttttcaacagacacacacacatgctaagcaataaagaactggcttgaattaattc

SEQ ID NO: 417345 - DNA, 593 bp, Homo sapiens
ttagcacaacctggcctaacaaatattaattttttkctgtaaataaacttatctccatatgacaaataatgtgaatactgtggcttgagtttttgtctgcctatcttaagaggaaataaatctgtgtcctatcattccctactttgcaccaccacccccgacacacacacacaaatgtaatagaattgaaagtgagaatagcataaacaacaggaaggatgaacatgaaagacaatctgaatcctgatggaagagagagattcagactccttgtaattctcataaagcagtttcagaagttttatacccatcttgggtcatcactaattacaacgaggacaagtacagaaaagtcttggcactaaattggtgattaatagagtatcaattatatttctcttttcaagctgcctcattcttgtatactttacatataataaaatatattgattttaagtatactatttggtaaattttgccaaatctatacagtattgtacccatcatcagaattatgatacagaacacttccattaggccaaaagttttgttgtattttattgcagacaattccttatacccacctgagctcc

SEQ ID NO: 417346 - DNA, 593 bp, Homo sapiens
ttagcacaacctggcctaacaaatattaatttttttctgtaaataaacttatctccatatgacaaataatgtgaataytgtggcttgagtttttgtctgcctatcttaagaggaaataaatctgtgtcctatcattccctactttgcaccaccacccccgacacacacacacaaatgtaatagaattgaaagtgagaatagcataaacaacaggaaggatgaacatgaaagacaatctgaatcctgatggaagagagagattcagactccttgtaattctcataaagcagtttcagaagttttatacccatcttgggtcatcactaattacaacgaggacaagtacagaaaagtcttggcactaaattggtgattaatagagtatcaattatatttctcttttcaagctgcctcattcttgtatactttacatataataaaatatattgattttaagtatactatttggtaaattttgccaaatctatacagtattgtacccatcatcagaattatgatacagaacacttccattaggccaaaagttttgttgtattttattgcagacaattccttatacccacctgagctcc

SEQ ID NO: 417347 - DNA, 463 bp, Homo sapiens
agtatactatttggtaaattttgccaaatctatacagtattgtacccatcatcagaattatgatacagaacacttccattaggccaaaagttttgttgtattttattgcagacaattccttatacccacctgagctcctggaaaccatttgtttgcttcctgatgctrtagttctgccttagaatctagaatttcatagaaattgaatttcataatatatattcattcttttgtttggggcttcctttatttggcaatgtgcttctgtgattcatccaagttgttctatgtatcagtaattcttttgcttgtattattggtatttaattttatgtcaacatatgaaattttgtttacatattcacctctttttgaacaatggtatgtttccagcttttttagctataatgaataaaattgctatgggcactgaagtacaaacctttgtgtggacatatgtttt

SEQ ID NO: 417348 - DNA, 606 bp, Homo sapiens
attcacagagaatagttagttatcatttctccattttgttgcctcaatgttgcctgaaatcttaggtaatttttataaagacaatttgcatttcctgtgccttatgccaacaaagaggaaatgtattttaaatatacatagaatattttaaatttacatwgatgcacaattgatttgcagagacaggtattcatacttttaaaatgaggaagaacatatattaaaaaatgacagcataaataacatcttgactatatgatagaacttctaaagaccattcctatttattttttgagtgagtggttcaaagggcatatctcaaaaatatagtcagtctattgaatatgctgacattattacctgaactgaaatatcatgattttaattttgaagttttcttattaaactatgctgaaagcattggctagccaaacttgtaattttttctggcacatgatgatttttttgcttacaaacacatatttagaatatgttaagaaacatttaaattccataagaaaacatgaaaaaatgattttatgagctgaatagaatgaggaagcaataggaacataatgatgctatctcctagattgaaacagtcaa

SEQ ID NO: 417349 - DNA, 555 bp, Homo sapiens
gcagggaactagctagctcctatgatcttcttggagacacagcattggccccttctgccatgtgaggacacagcaataagatgacatcttggaaactaagagaggatctcaccagacaccaaacaatgagtttagggagagaagagagtttcaggagagagaaatgaatgtgagaagtacaggagtttccaggagtccagataatgagttcttttcaagggactatawatatgtcccttctctagctttgccaggagaagtttagaatatacaaattccatttcaaaataagaaacctcctgtacagttttgggggatgatagatatattatccaagcaatgcaaaatgatacattattagctggagtttttggctccgaagtctgagataaagctacgttaagcaggttgaaccatctgggacttcttcatatgctaaactcctaagcagtcttagactaaacatgacaaagctctatttatctccccctacattaattcacaaacctgactctcaggccaaaccactgtgatgcaaggaaatataaaaagcag

SEQ ID NO: 417350 - DNA, 552 bp, Homo sapiens
ttgtaaacatttgcactgacagattgctgttttggygaaatcctgttgggatatctactatgatgccaaaaaaagcataagcagatgtatctgcagctggagcaagatacccacacatgtggcatagtcacacttggcaatgaaagaggacattagagtctgcatgggctccgttttttgttcgtttatgtacttatttttctatttacttaacaagatgagagaagcctgaagtcccttcccaatgtacatcatgtacacagaagacaagctatggtatctaggaagcaaaagttgtctctaaatattgcttgaactcagtaattttacattttgaagtaatatccttggcacctagatttccattagctaataataatgtctcatataaaaaatttagaaacactttctattttaagcaattttacttctagaaattcaaggactgagagtgggaatctttactaagcttattcaaaaaaaaaatcagtgtaggagaaataattgggaaatttgtttttcagaaaaacatatatttagaaacacgaagag

SEQ ID NO: 417351 - DNA, 552 bp, Homo sapiens
ttgtaaacatttgcactgacagattgctgttttggcgaaatcctgttgggatatctactatgatgccaaaaaaagcataagcagatgtatctgcagctggagcaagatacccacacatgtggcatagtcacacttggcaatgaaagaggacattagagtctgcatgggctccgttttttgttcgtttatgtacttatttttctatttacttaacaagatgagagaagcctgaagtcccttcccaatgtacatcatgtacacagaagacaagctrtggtatctaggaagcaaaagttgtctctaaatattgcttgaactcagtaattttacattttgaagtaatatccttggcacctagatttccattagctaataataatgtctcatataaaaaatttagaaacactttctattttaagcaattttacttctagaaattcaaggactgagagtgggaatctttactaagcttattcaaaaaaaaaatcagtgtaggagaaataattgggaaatttgtttttcagaaaaacatatatttagaaacacgaagag

SEQ ID NO: 417352 - DNA, 610 bp, Homo sapiens
ctgtctaccttgtggttatgtaattttctctggtaatatgttttaattcggttgctttatattttcagagactctattacaggtttttgtgttgtggttaccataaggcttacaaaaaacaycttgtagatatagcaagttattttaaagaaatgacaccttatcttagatcacaaataaaagactagaaacataggcaaacacacaaaaattgtacactttacattttcttttctattattttgacttagttgcttaatttacatatttttaaattacctatcttttaacgggctgctgttgccattagtgttttggatagatttgtctctgtggtttcagaagagatttataagtagactgcacatcacaattacagtattagagtattatgggtttatccatgttcttaattttaccagtttttatcagggttttataccaaataaagttgtctttttgcatgtgagtgttttattttatttcagactgaagaaatccctttagtattttgtaggacgagtctggtggtgttgaattctctcagtttttatttgtctgggaaagactttatttctcctttatatttaaaagataatgttgttgcagg

SEQ ID NO: 417353 - DNA, 542 bp, Homo sapiens
attggtttttactgtatatatttgcttcacaaatcttgactgttaggtcttggcctttttttaagctctacttgatgtcttaagcccagtgctgcctatctcaaatggtagagatgcaaggaatcatcctggtagtgtggaaacactggctagcgttttgtggccaaggaacccatgggacatatcttctatagtgtggtactgctgaacaactattctgatttagcatttccttggtctgagttagagaagtttccagaggtagaaattatagtcccacttcccctttttgtctctgactgtccttaggaatatttcttcttcagacaatcacatgcttcccatgggttaaggcaaggacaggtctcctgccaggtaacccaagatggtgggaaagctggttaaccacctcaatctaasttttttcagcatagtaccatgaggtgggggatgatattttgtgtgcttcttacaggagcagaatcagagttgaggcacactactggtgtagaagtttgattctcctaccatctgcccagaag

SEQ ID NO: 417354 - DNA, 618 bp, Homo sapiens
taaagagattctgcacagcaaaagaaactatcaacagagtaaacagacaacctacataatgagagaaaatttttgcaatctagccatctgacaaaggtctaatatccaacatctataaggaacctaaacacaataaaacaagcyaacaaacccattaagatgcacaaaggacataaaaagacactactcagaagaagacatacatgtagccaacaaacatataaaaaagagttcatcactcatcactagagaaatgcaaatcaaaactttgagataccacttcacagcagtcagaatgattattattaaaaagtcaataaataacacatggtagtgaggttgtggacaaaaaggaatgcttatacgctgttggtgagagtgtagattcgttctgattactttttaatactaattaccagaaagtgttgtcttgcatcatgtaattttgatatattattgtgttgacaatatctcttttgctttcttctgtgttcatgatacttactttaatgtagggagagagtaaaaaccattccatgcttgtactatcacatactattataaaagatgtgttctgtcttcactaagttacctgttggagttacagttgaacaaaag

SEQ ID NO: 417355 - DNA, 618 bp, Homo sapiens
taaagagattctgcacagcaaaagaaactatcaacagagtaaacagacaacctacataatgagagaaaatttttgcaatctagccatctgacaaaggtctaatatccaacatctataaggaacctaaacacaataaaacaagctaacaaacccattaagatgcacaaaggacataaaaagacactactcagaagaagacatacatgtagccaacaaacatataaaaaagagttcatcactcatcactagagaaatgcaaatcaaaactttgagataccacttcacagcagtcagaatgattattattaaaaagtcaawaaataacacatggtagtgaggttgtggacaaaaaggaatgcttatacgctgttggtgagagtgtagattcgttctgattactttttaatactaattaccagaaagtgttgtcttgcatcatgtaattttgatatattattgtgttgacaatatctcttttgctttcttctgtgttcatgatacttactttaatgtagggagagagtaaaaaccattccatgcttgtactatcacatactattataaaagatgtgttctgtcttcactaagttacctgttggagttacagttgaacaaaag

SEQ ID NO: 417356 - DNA, 327 bp, Homo sapiens
gctaaacaatttgaccgactaactagtttgacttgaaactttcaattgargttaaatttgtatctactctgtgctttattagtgtgacagattatgctgttttattttcctgtcattcaatgcacaaagataaggtccccattattttcaaactattttattatgaagccagacttgacccatctgaaatgtaaacctctatgtttgtaacaaagatttgtgatgcagttaatataatttttgaaaatggtatagcatgttgtagtaggcagaaagatagcccctcgtagatctaaacctctggaaatattgccttacatagtaaaa

SEQ ID NO: 417357 - DNA, 327 bp, Homo sapiens
gctaaacaatttgaccgactaactagtttgacttgaaactttcaattgaggttaaatttgtatctactctgtgctttattagtgtgacagattatgctgttttattttcctgtcattcaatgcacaaagataargtccccattattttcaaactattttattatgaagccagacttgacccatctgaaatgtaaacctctatgtttgtaacaaagatttgtgatgcagttaatataatttttgaaaatggtatagcatgttgtagtaggcagaaagatagcccctcgtagatctaaacctctggaaatattgccttacatagtaaaa

SEQ ID NO: 417358 - DNA, 503 bp, Homo sapiens
tcaaaaaccaattattccaagtggctaccaggtgttgtggaaggaagttagtttggttttgggtttttttccaagtcacctttaggagtactccagagcttctgaaagtggcttatcactgcacatttgaatattttaattatacacttcaaaaaatacttgagagtcatttgactgaaagtgcaatttgtgtataacattttagtacttaaatcaactatgaaaagcattttaaattaaaatccaatacactttgcattcactctgttcaagaaaattgaagctaattataactctcaaattaagcaaatatgggggagctaacaaagcaatttttagaatataatacattattagatgtgaagataactatatttctatgcttaaaaaaaaaaaaaaaaaaaaaagaccggacctcccagtataataaggaaaaggtgargggtaggatagaggtagaaataattcttgtgagagttttgaagaataaatttccaaggatt

SEQ ID NO: 417359 - DNA, 560 bp, Homo sapiens
aggaccttggctctaacttcttaaattatccatgatttttcataaaaaattattttgtatttgcagctaagttgttttctcaactgtcttcatgcccatagaagtctggggactcaaagttctcttttcattttgtaatatctctttcccttaagtcctacagttgggcaaaatcatctaacacaaaggctattttacaatagtgttgaatatgttgtgtaatttattgaataccatactgaaaatgaaaaacaaaatggttttatggggatcagagtacaattctackgaatatgtttcactttcataccatcataaagctgaaaaatcacaagttgaaccctcaaggagtcagagaccatctttaattttgagacagttttgaaaacctagactaaacatgggaaaagtgaaaatacactaactggattctactaacaagaaattgacccagatagtaatgcatagaaaaaccaataaaatatatgagaggttttaaaaggcaatgggaaattattaacacattttttaataaattatgggaggagtttcaagaaaaa

SEQ ID NO: 417360 - DNA, 560 bp, Homo sapiens
aggaccttggctctaacttcttaaattatccatgatttttcataaaaaattattttgtatttgcagctaagttgttttctcaactgtcttcatgcccatagaagtctggggactcaaagttctcttttcattttgtaatatctctttcccttaagtcctacagttgggcaaaatcatctaacacaaaggctattttacaatagtgttgaatatgttgtgtaatttattgaataccatactgaaaatgaaaaacaaaatggttttatggggatcagagtacaattctacggaatatgtttcactttcataccatcataaagctgaaaaatcacaagttgaaccctcaaggagtcagagaccatctttaattttgagacwgttttgaaaacctagactaaacatgggaaaagtgaaaatacactaactggattctactaacaagaaattgacccagatagtaatgcatagaaaaaccaataaaatatatgagaggttttaaaaggcaatgggaaattattaacacattttttaataaattatgggaggagtttcaagaaaaa

SEQ ID NO: 417361 - DNA, 491 bp, Homo sapiens
aaataaaggtcagttactattacagtaatgctaaactttgagacatctaaaatgacaacatctaaaactaggaaaacatcaagttaccaagtgttgggagttctgttgactaagataaaaattagagcaagaaattcaacatgccggaaaacactaaattgatttttcatttttttaagaagaaaattatttggtcaagggcagtggctcactcttgtaatcctaataatttgggatgcagaagcaggaggcttacttgagggttggartttgagaccagtctgggcaacatagtgagaacctgtctacaaaaaaaaaatttaaagaattagccaagtgtcgtggcatgtgcctgttgtcttggctatttgggaggctgatatgggaggatcccttgaacccaggagtttgaggctgcggtgagatctgattgtgccactgcactccagcctgggaaacagagaaaaataaaaataaataaaataatttgt

SEQ ID NO: 417362 - DNA, 588 bp, Homo sapiens
aaatctactctgtctgtgctctgtaaatgaaacaacaaagcctggatgacagcatgtctatttatagtatggtttactgaatattttgagcccactactgagatctactgctaagaaaactatatacattttttttcaaaatgctagtgctcattgacaatgcatatgtcacacaagagctgtgacagtgatgtaaagggttattaatgttgttttatycctgctaagacaatgtccattctgtagcccatggatcaaggagtaattctgaatctcaagtgatattacttaaaaaatacattgatgtaatgctacagctgccatagatagtgactcttcaggatggttctgggcaaagtaaattgaaaaccttctgggtaggactcacaagtctagatgccgtcaagaacatttttgattgaagagatgaggttaaattatccacgttaacaaaagtgaagttgattccattgtccaatgggagaaagttgattccaaccctaatggatgactttgaggttcaagacttcagtggagaaattagctatagatgtatgaaaatagtaagaaaaatagaattaatagttg

SEQ ID NO: 417363 - DNA, 599 bp, Homo sapiens
agtataaagaaaagaaatttcttcttacagattgaaagcatgtataaaatcagaagacatctgtggatgatgataaatgatacaaattatatttcgattgttccctggagagccatataatgcttttcctcatttggctttaatttttcccattttctttatccttttgctgatccatagatgatatatatattaatattaatagtcatttttcagagaaacaaatattaattgtaacaaccaaagctgttgaatggcactgtgaaagatctgattttgtagaacgcaatgctccagaaattattttctcttaaacattgtgttttcaacttgaatactctatttcttaccaacatggttaagcttttcctatttattatgcttttgctatcaataacaaaaatattacttaaaaaaaagtaggcatgacatttggtagtaattatacctctgccaaggaatatgtctctgtatgtcatctccctgatctgctgtgcgcagcagttctccactttgtcgtattttcatwttctcagtgggaaatggacagcagtgacactttgccagtttggccgagacattaagagtttttccatgct

SEQ ID NO: 417364 - DNA, 407 bp, Homo sapiens
gagtaggcagaaaagcaatcatacgtactcatgtyggtgactttaataatattttggcttccatggggaaaatatatttttttacttttgagtaatgtgatcagtagcaattctgtacttcagatatctaagatgaaagtctgagtcttatgcactgtaatagaaaaagcttagaaaatctatctcatactctcaaacagacaatccacagataatcacagttcactgtcagaaatattgctttaacccacattttccatataataactcagtactattgaaaatgatactctgtagcagtcaggtctcgaatgattgtggtcagctacagaaaggaaaatgtccaaatgtattgttaaaaacataaagtaaggctttggaaacttaatggtaaatgattttaaaaa

SEQ ID NO: 417365 - DNA, 634 bp, Homo sapiens
tttggcttccatggggaaaatatatttttttacttttgagtaatgtgatcagtagcaattctgtacttcagatatctaagatgaaagtctgagtcttatgcactgtaatagaaaaagcttagaaaatctatctcatactctcaaacagacaatccacagataatcacagttcactgtcagaaatattgctttaacccacattttccatataataactcagtactattgaaaatgatactctgtagcagtcaggtctcgaatgattgtggtcagctacagaaaggaaaatgtccaaatgtattgttaaaaacataaagtaaggctttggaaacttaatggtaaatgattttaaaaaatgtataaaatatcaytacaaatcaagtttagctataatgaacagtgtgcatataatggctaaggtatttttaaaaatatttttagggtagtttgtttttcatcagagaagaaaaatgacggatatacaagtgagctataaagataaatttgttggcatgtaggttggttccacatttttgagagggtgagggacaaaacactacaaattgagatcagtgtatactgctcgagtgatgggcgcaccaaaacctcacaaatagccactaaagaacttact

SEQ ID NO: 417366 - DNA, 538 bp, Homo sapiens
tatatttgtttaccatatattatatamtgtgttattatatatgatagatgtatagatcatgtatatgctatactaatagcatattatgtcatatattacataccaaaaacatatttgttaattttaatgttaaaatatatgtcacaatagtatacaaaaaatcattataagatgtgtgaagaagaaagacatcaccgtaaaatatgaatatttggattaaaaagtctaattagtagttcattctacttttactcacagaactatattatttggagaagattctgttcacacaattcttacctcaaatataaatatagaattgtacttaccttcagaagacctaaaggattagagtaataatatatgattatactaatcttaatatttagtgaaatgttaacatacattattgatcatattcttcactgcaagtaaattggcagttttagtgttcttaactataatgcaaattgagttaaaaaaatagaacacttgaaggaaaaacatacactttcctgccatagcaactgatttaatc

SEQ ID NO: 417367 - DNA, 538 bp, Homo sapiens
tatatttgtttaccatatattatatactgtgttattatatatgatagatgtatagatcatgtatatgctatactaatagcatattatgtcatatattacataccaaaaacatatttgttaattttaatgttaaaatatatgtcacaatagtawacaaaaaatcattataagatgtgtgaagaagaaagacatcaccgtaaaatatgaatatttggattaaaaagtctaattagtagttcattctacttttactcacagaactatattatttggagaagattctgttcacacaattcttacctcaaatataaatatagaattgtacttaccttcagaagacctaaaggattagagtaataatatatgattatactaatcttaatatttagtgaaatgttaacatacattattgatcatattcttcactgcaagtaaattggcagttttagtgttcttaactataatgcaaattgagttaaaaaaatagaacacttgaaggaaaaacatacactttcctgccatagcaactgatttaatc

SEQ ID NO: 417368 - DNA, 619 bp, Homo sapiens
tcttgtttgcagatggcatatcatggaacttcttggtcataataattttatgagccaattcccataatatatctatcccctcatatatatttttatttgttatatatcttaacatctctttctatatatctagcaatttaaaatatctatcgatctgtatatctatctatctatctatctctctatcatctaaccatctatctatctctttatcaatccattctattggtcctgtaactctagagaaccctgactaagagagagagacataaacattcagaccatagcatatttgttctctaatttcttttcctttgtcccccaacccctatagctctcagaatacagtagctgtcacwgtcggtaagtcaataaagcctttaataataatgacatttttgtagttatttgatttattgaattcttgtacctaatatggtgcagaacaatgtgatactatatattataattatgtaagataattctaagaaggcatgtagcattttaaatgaataatatgtattacattatgatggaatcatgtgatgaatatagctttacagataaaaatatttatctttaagctacaatattgtaaaatatacaatgtatatatatt

SEQ ID NO: 417369 - DNA, 388 bp, Homo sapiens
ctgtaactctagagaaccctgactaagagagagagacataaacattcagaccatagcatatttgttctctaatttcttttcctttgtcccccaacccctatagctctcagaatacagtagctgtcactgtcggtaagtcaataaagcctttaataataatgacatttttgtagttatttgatttattgaattcttgtacctaatatggtgcagaacaatgtgatactatatattataattatgtaagataattctaagaagrcatgtagcattttaaatgaataatatgtattacattatgatggaatcatgtgatgaatatagctttacagataaaaatatttatctttaagctacaatattgtaaaatatacaatgtatatatatt

SEQ ID NO: 417370 - DNA, 567 bp, Homo sapiens
taattaaataactttaaagaattctgcatatgttattgaacacaaataagcaaatagcttatcttactttcaaaaaacaaatyggacatattaaacattaaagtcagtattgagaagtgggtgacttaaaacaaggtttggggttgttatgggctacatatttgtgtcccacctaaaatcacatattgaaaccctgctccccaatatgatggtatctgtaggttggcctttggaagctaattagatttagatcagatcataaaggtgggatcagtgccttataaaaagagagagcaaatagagctctctcactttctctctctctctctctctctctcctctctctctctctctctctcattctcttgctctttcttttcctctttgccatgtaaggatatatctgcaaagccaggaagaaggctcttaccaggaaccacactggccagcaccttgattttgatattcccagcctgcagcaccatgagaaataaatgtcttttttttttttaagcttttcagtttctggtactgtgttatagcatccagagccgactaagatggggg

SEQ ID NO: 417371 - DNA, 567 bp, Homo sapiens
taattaaataactttaaagaattctgcatatgttattgaacacaaataagcaaatagcttatcttactttcaaaaaacaaatcggacatattaaacattaaagtcagtattgagaagtgggtgacttaaaacaaggtttggggttgttatgggctacatatttgtgtcccacctaaaatcacatattgaaaccctgctccccaatatgatggtatctgtaggttggcctttggaagctaattagatttagatcagatcataaaggtgggatcagtgccttataaaaagagaragcaaatagagctctctcactttctctctctctctctctctctctcctctctctctctctctctctcattctcttgctctttcttttcctctttgccatgtaaggatatatctgcaaagccaggaagaaggctcttaccaggaaccacactggccagcaccttgattttgatattcccagcctgcagcaccatgagaaataaatgtcttttttttttttaagcttttcagtttctggtactgtgttatagcatccagagccgactaagatggggg

SEQ ID NO: 417372 - DNA, 553 bp, Homo sapiens
aattaaataactttaaagaattctgcatatgttattgaacacaaataagcaaatagcttatcttactttcaaaaaacaaatcggacatattaaacattaaagtcagtattgagaagtgggtgacttaaaacaaggtttggggttgttatgggctacatatttgtgtcccacctaaaatcacatattgaaaccctgctccccaatatgatggtatctgtaggttggcctttggaagctaattagatttagatcagatcataaaggtgggatcagtgccttataaaaagagagagcwaatagagctctctcactttctctctctctctctctctctctcctctctctctctctctctctcattctcttgctctttcttttcctctttgccatgtaaggatatatctgcaaagccaggaagaaggctcttaccaggaaccacactggccagcaccttgattttgatattcccagcctgcagcaccatgagaaataaatgtcttttttttttttaagcttttcagtttctggtactgtgttatagcatccagagccg

SEQ ID NO: 417373 - DNA, 614 bp, Homo sapiens
taagatgggggtttaataatgtgatacatttgggatgaatgcttaatactaggtattcatgtccacagtgcgtagtggaattctgagtattcttgaatcaagaaggttaatttagatgtgcatactggtcacatattgatccaagccagagakagtgggagagacagtccgtttaagcaactgaccagaaaggagtagcaagagttaaagtgtcacagttctgtgtcatgggctcccctttattcattggaaaagaaaactccttgtgtgcctagaagctgagctagaagacactgatgagggcagctccaatgtctggctgtcaaggaagctgacaggcataaatgggctaggttcccaaccattctaaaccctgatgcagaattcctgtcaagccagagaacaggagcaagatacattgacagatatcaccaactagaaggtgcgaacaatccccacaggccatagtctgtctgtcacggctctttaagggaaagcaaagatgggaccagcaggtgcagcaaattgaatccactttacttattaagacatgcccacatgggtaaacaggggccaagagatctctgaatttatcccagccagaataagtatcc

SEQ ID NO: 417374 - DNA, 614 bp, Homo sapiens
taagatgggggtttaataatgtgatacatttgggatgaatgcttaatactaggtattcatgtccacagtgcgtagtggaattctgagtattcttgaatcaagaaggttaatttagatgtgcatactggtcacatattgatccaagccagagatagtgggagagacagtccgtttaagcaactgaccagaaaggagtagcaagagttaaagtgtcacagttctgtgtcatgggctcccctttrttcattggaaaagaaaactccttgtgtgcctagaagctgagctagaagacactgatgagggcagctccaatgtctggctgtcaaggaagctgacaggcataaatgggctaggttcccaaccattctaaaccctgatgcagaattcctgtcaagccagagaacaggagcaagatacattgacagatatcaccaactagaaggtgcgaacaatccccacaggccatagtctgtctgtcacggctctttaagggaaagcaaagatgggaccagcaggtgcagcaaattgaatccactttacttattaagacatgcccacatgggtaaacaggggccaagagatctctgaatttatcccagccagaataagtatcc

SEQ ID NO: 417375 - DNA, 614 bp, Homo sapiens
taagatgggggtttaataatgtgatacatttgggatgaatgcttaatactaggtattcatgtccacagtgcgtagtggaattctgagtattcttgaatcaagaaggttaatttagatgtgcatactggtcacatattgatccaagccagagatagtgggagagacagtccgtttaagcaactgaccagaaaggagtagcaagagttaaagtgtcacagttctgtgtcatgggctcccctttattcattggaaaagaaaactccttgtgtgcctagaagctgagctagaagacactgatgagggcagctccaatgtctggctgtcaaggaagctgacaggcataaatgggctaggttcccaaccattctaaaccctgatgcagaattcctgtcaagccagagaacaggagcaagatacattgacagatatcaccaactagaaggtgcgaacaatccccacaggccatagtctgtctgtcacggctctttaagggaaagcaaagatgggaccagcaggtgcagcaaattgaatccactttacttattaagacatgcccacatgggtaarcaggggccaagagatctctgaatttatcccagccagaataagtatcc

SEQ ID NO: 417376 - DNA, 576 bp, Homo sapiens
actttgactctcaatgtatgtgcctttacatttmaacatgtaattattacataatttgtggtgtgagtaattggttttcatccattattaaaatgtctgcttttaaattagacaacttacactttttatatttagttaattgttaatatgattacacttatgtctgccattataaaatttattttttatttctctaatctcttttgttgatgtttttgtagttttctttgtctcatagttcctgcatcctttacggaggacattttagggatttttggtttacataacaattatatttctccattgcctttattgctatacttcaccatttttagtgactgctctaggatgaaaatatgcatccttaagttataactgtctacttagagtaaatatttaccatttcatatgaattttataagcatgaaactatatagttttatttagcattatttgttttcttatatagattataactacacatgttaaaaagcccataatatctagtaacttataatattctgtgacttaattcttccctatagatagataaacgtttttatcttgtgtcatttt

SEQ ID NO: 417377 - DNA, 524 bp, Homo sapiens
aatgtatgtgcctttacatttcaacatgtaattattacataatttgtggtgtgagtaattggttttcatccattattaaaatgtctgcttttaaattagacaacktacactttttatatttagttaattgttaatatgattacacttatgtctgccattataaaatttattttttatttctctaatctcttttgttgatgtttttgtagttttctttgtctcatagttcctgcatcctttacggaggacattttagggatttttggtttacataacaattatatttctccattgcctttattgctatacttcaccatttttagtgactgctctaggatgaaaatatgcatccttaagttataactgtctacttagagtaaatatttaccatttcatatgaattttataagcatgaaactatatagttttatttagcattatttgttttcttatatagattataactacacatgttaaaaagcccataatatctagtaacttataatattctgtgacttaattct

SEQ ID NO: 417378 - DNA, 576 bp, Homo sapiens
actttgactctcaatgtatgtgcctttacatttcaacatgtaattattacataatttgtggtgtgagtaattggttttcatccattattaaaatgtctgcttttaaattagacaacttacactttttatatttagttaattgttaatatgattacacttatgtctgccattataaaatttattttttatttctctaatctcttttgttgatgtttttgtagttttctttgtctcatagttcctgcatcctttacggaggacattttagggatttttggtttacataacaattatatttctccattgcctttattgytatacttcaccatttttagtgactgctctaggatgaaaatatgcatccttaagttataactgtctacttagagtaaatatttaccatttcatatgaattttataagcatgaaactatatagttttatttagcattatttgttttcttatatagattataactacacatgttaaaaagcccataatatctagtaacttataatattctgtgacttaattcttccctatagatagataaacgtttttatcttgtgtcatttt

SEQ ID NO: 417379 - DNA, 586 bp, Homo sapiens
acaaatagtaatagtagtatgaaatatgcaagatctatacagagaaaagtgaagacatgaggaggagagaaaggaaattgttccatatttttggataggaagactcagtatcagaaaaatgaaactgttcctcaaaataattgagaaaagtaacatattcttattagaaatgccattaytgattttaaacctctaagtagattctttagtttattgtgaaaatattatttaatgaagcaaactttcaaggaaaagtcagtaacagaaaagcaataaagatgggacctatggtatagtaagatttcagtaattaaaataatgtgatactggtatatgatggttaggccaatcaaataaacataatagaaagcaaaaaaaaaaaaagattctagtatgcatgccaatttataaaatgacaaaatggggactttacttgaataaggaaacaatggaactatttgagtaaagcattatatgattacttgttatttaaagaacgactatgttagcttcatacctcacagtcataaaccataataaattacaacttcattcaatattgaaatgcacaaacaaaagacaaaaa

SEQ ID NO: 417380 - DNA, 484 bp, Homo sapiens
ctggggtttaccaaatatttacctaactgttcaactccagtataaacwtacagcactacaagaattgctcatacatattccagtgagaatcaactttatcaactaaagtgcaatgcctatgtacacttctttttttgtcctttgtcttctatactccatttccaaacttttttgcgtcagcatgtctttctcaccctctttagtgaatgcttttcatatattcttaataaagttagataattttgttacacattgctttctgtcctgagatcttctgacctcctacatgtttttaaatttacatacactaaggttaactgtttgtggaataaagctctatgaattttgacacttgcattgtgtcttgaattcatcattacagtctcatgtagaatagtttcacaacccacagtatctcttgtgtttcacctattaaaccctctgccccttcccatgacaagctcctgaaaaccactgatctttt

SEQ ID NO: 417381 - DNA, 550 bp, Homo sapiens
ttaatctttgggacttgggaatgaaaaataaaagaattccctaaatwacagtttgttcataaactacttcaaatattcctcgtacttttcactcaaaatatagatcttaatatgcctactagtttgaaaatattgtttaataatatttaaaaagattttcagcctatagcaaagtttcaaaaactagaaaacaacagtaaatatcattggctagttttcaaatatgaacagtgagatgttttagcaaggttaaaattattttaccccccaagcatcttacttcttgaaacactgttataagatttgtataaattatagtacatatacaaactaatatccattttattggtatgcatgttcatgaccctgttttctgccaagggtgagtcatgaacatgcatagcactgaagcagcaataagcaagattgattggtcagattgtgacagattctaacctaagtgtttctatgctgttctcagaaatgtctacttaacctttgattctggatgtcaacatttcctgctcttgctttcaatgtgtcatagtgg

SEQ ID NO: 417382 - DNA, 550 bp, Homo sapiens
ttaatctttgggacttgggaatgaaaaataaaagaattccctaaattacagtttgttcataaactacttcaaatattcctcrtacttttcactcaaaatatagatcttaatatgcctactagtttgaaaatattgtttaataatatttaaaaagattttcagcctatagcaaagtttcaaaaactagaaaacaacagtaaatatcattggctagttttcaaatatgaacagtgagatgttttagcaaggttaaaattattttaccccccaagcatcttacttcttgaaacactgttataagatttgtataaattatagtacatatacaaactaatatccattttattggtatgcatgttcatgaccctgttttctgccaagggtgagtcatgaacatgcatagcactgaagcagcaataagcaagattgattggtcagattgtgacagattctaacctaagtgtttctatgctgttctcagaaatgtctacttaacctttgattctggatgtcaacatttcctgctcttgctttcaatgtgtcatagtgg

SEQ ID NO: 417383 - DNA, 550 bp, Homo sapiens
ttaatctttgggacttgggaatgaaaaataaaagaattccctaaattacagtttgttcataaactacttcaaatattcctcgtacttttcactcaaaatatagatcttamtatgcctactagtttgaaaatattgtttaataatatttaaaaagattttcagcctatagcaaagtttcaaaaactagaaaacaacagtaaatatcattggctagttttcaaatatgaacagtgagatgttttagcaaggttaaaattattttaccccccaagcatcttacttcttgaaacactgttataagatttgtataaattatagtacatatacaaactaatatccattttattggtatgcatgttcatgaccctgttttctgccaagggtgagtcatgaacatgcatagcactgaagcagcaataagcaagattgattggtcagattgtgacagattctaacctaagtgtttctatgctgttctcagaaatgtctacttaacctttgattctggatgtcaacatttcctgctcttgctttcaatgtgtcatagtgg

SEQ ID NO: 417384 - DNA, 564 bp, Homo sapiens
aatgataattacttacaaacaacaattctgctttacatgtatttgtgtaattayacattaagtgattagtaaatgtaattattaattaagtgatgagtcatctctctgatgagggcaataaacagaccacaactgccaaactgtagaactatgaaacagtatatattttctttaatgccttaataaccaagactagctcattttcggtgagtcgttttccttccagtatgtttttatttctaataatgcctcatggaactcatgggggcaaagataggggatgggaaataaaactcttgacctaacaacaaagtcttaaggaataaactactaatttgctcatcagacatggctgtgagcatcagacagaaagaccctggttgcaacacataggtgaaatattcatccccctcggtgactcaaaagcatggtttcagaggttctagacaaaaaaataaatcctcatgcatcacgagattttgaaattaaaaagtgaaagatatgtgcactatttctttctgtttttttattatactttaagttttagggtacatgtgcacaact

SEQ ID NO: 417385 - DNA, 564 bp, Homo sapiens
aatgataattacttacaaacaacaattctgctttacatgtatttgtgtaattacacattaagtgattagtaaatgtaattattaattaagtgatgagtcatctctctgatgagggcaataaacagaccacaactgccaaactgtagaactaygaaacagtatatattttctttaatgccttaataaccaagactagctcattttcggtgagtcgttttccttccagtatgtttttatttctaataatgcctcatggaactcatgggggcaaagataggggatgggaaataaaactcttgacctaacaacaaagtcttaaggaataaactactaatttgctcatcagacatggctgtgagcatcagacagaaagaccctggttgcaacacataggtgaaatattcatccccctcggtgactcaaaagcatggtttcagaggttctagacaaaaaaataaatcctcatgcatcacgagattttgaaattaaaaagtgaaagatatgtgcactatttctttctgtttttttattatactttaagttttagggtacatgtgcacaact

SEQ ID NO: 417386 - DNA, 564 bp, Homo sapiens
aatgataattacttacaaacaacaattctgctttacatgtatttgtgtaattacacattaagtgattagtaaatgtaattattaattaagtgatgagtcatctctctgatgagggcaataaacagaccacaactgccaaactgtagaactatgaaacagtatatattttctttaatgccttaataaccaagactagctcattttcggtgagtcgttttccttccagtatgtttttatttctaataatgcctcatggaactcatgggggcaaagataggggatgggaaataaaactcttgacctaacaacaaagtcttaaggaataaactactaatttgctcatcagacatggctgtgagcatcagacagaaagaccctggttgcaacacataggtgaaatattcatcmccctcggtgactcaaaagcatggtttcagaggttctagacaaaaaaataaatcctcatgcatcacgagattttgaaattaaaaagtgaaagatatgtgcactatttctttctgtttttttattatactttaagttttagggtacatgtgcacaact

SEQ ID NO: 417387 - DNA, 581 bp, Homo sapiens
tctgactgctcttcatatctagaaatgatcttttacagctacaaccccgctgcccctcccaagtttggaaagatgtgagtttcaagctgatttccataagagatgatggattgccctggactaatccaaacttctcagtaagtaaagctgatagtggggtggctagctgcaactcagacattctcactttggaattgaggagagctactgaaaatgcacatttttaagctactgtagtgtatagcgatgttattttagatattatgtaaaatatgctgtctctcaaaaaaaaagttaccttttgggattagaacttaaaatttttccattagcagtattagtttttgcactggactttcattattaagaggtttggaggaaaattttcacattactcatgacttttaataatattagaggtcagtgtgggtttgcctttggattatatttatatatagaactttaattggaaaatatggaaacacagtagtatattttatcatccaattaaagactatcctatcatttcactaaacaaaaawttaaatcagttttgtttccaaggctattttctcagacat

SEQ ID NO: 417388 - DNA, 644 bp, Homo sapiens
gtttgtaactcaagagataaacacttgagggaatggttaccccattccccatgaagtgcttatttcagattgcatgcctatttcaaaacatctcaggtaacccataaatacacttactgtatatccacaattttttaaataacttgaaaattaaaaaaataaaataaaaataaatgcacttaatatataaaaaataaactagatgttgtagtttattaatcgtttsttaatcattaggttaagacagatggtctcttgtttctaatattaaacttagaataaaactgttttttaaattattttaaacatcaaaatatttattcttttggcagggacttagtattaaacgacacttcaaattctttaaaagaaggtcttatagataccatcccttccttcatgccatttcctgaggctccactcaagtagttgtctttcactggtatttattttctcattgctacagatttgatttttgcttattggtcccagcttcctctgtgcatactttggctggattgttcacttgaaactggaagtaccacagtgcagccttcagggtttctttcagctagttaatgagtagtgtgtgtgtcacacacaagaccaatgtttgctccttgaaaattaacttcagttttata

SEQ ID NO: 417389 - DNA, 583 bp, Homo sapiens
atttttgcttttattgcttgtgcttttatcatgtctaagaaaaattattgtcaacaaggtttaacccctatgtttacttctaggagttttacagtttcagatccactgagttgatttttgtgattggtatatgggtccaatttcatttttctttcatgtgtgatagggaaaaagggagaagaaaaatgtaattccagcttaattcaccaatatgagagtagaaagagacaagatccataaaggtgatgaggactaaataacgcgatgtcttttaaactagaatmtaaactatattcatgagtttagattctactctactgattgatagaaagtgattgaggagacttttaaaaaaagaatgacctggtctaatttatctttttaaaaaattaccctggaggctgtacctatttacttcatcagaggaaaaccacctatatttttctatccctaatattatagctccatcccagacctttgtagtgaaattctttttggcatatcccgttgcctccttgacttccccctttggaacgttaatagacaacctaaacttatcttgtccacaactgagtcccttata

SEQ ID NO: 417390 - DNA, 635 bp, Homo sapiens
agtcaattaaacctctttttctttataagtttcccagtctattgaaacttaattgtctctttagatgttgaaaaatgaggtgctggttggctgtggagcagatggaaacatgataacttttataatagtaactgtgatcatgccaatctaaggattaaggtatgcatcactgattactaaattctcaaaaataaaaacataaaacattactgatgagtgtttagaaaagtagacaatcatattcattgaaattaggaggacaaawtcgtatggtatatattgatggtaatttgatatattatgctaataatattccttttttatccaggtttcatcattttaatattacttttgctttgatggttaattttaggtgcctacttaactggattaagagatacttagttggtaagacattgttttgggggaatggttaaggttgttctaggtgattcatgtgtgagttagtggactaagtggggaagatctggcctcaatgtgctcaggtaccatccaatcaactagggacacaaattgaacaagaaggctctctctctctctctcctgcagcttggacacccttttactcctgcccttggacatcagaactccaggttctctggcctttggactcg

SEQ ID NO: 417391 - DNA, 485 bp, Homo sapiens
ggattaagagatacttagttggtaagacattgttttgggggaatggttaaggttgttctaggtgattcatgtgtgagttagtggactaagtggggaagatctggcctcaatgtgctcaggtaccatccaatcaactagggacacaaattgaacaagaaggctctctctctctctctcctgcagcttggacacccttttactcctgcccttggacatcagaactccaggttctctggcctttggactcggggaattgcaccaacagcggctccccagattttcaggtcttctgcctctgacagagaattacaccatgggcgtctctagttctgaggcttttgggcttggattgagccacacttctagcgctcttgaktggccaatttacaaatggcctattgtggaacttctcagcctctataatcttctgagacaattaccctaataaatctcctctagtatatgtatagctagctagctagaaa

SEQ ID NO: 417392 - DNA, 620 bp, Homo sapiens
cagggagcatggctaattccacatgtccccaggccttatctaatgctccaaaataaattaaacaatttttaaaagtcaaagcagtttatgaccttaaagcatttaggaaacctaatatctgacctacataatttagaccaaatgttttatttttgccaataatctttaaagctgtttttattatccaaagattactaaagttrcatgaactaaaaggcattacagttttactttttctttctaaacatttgacttaagtgcttatttttgtttaagtcaattaatcagagctcttttatgtaactacacagacagacagatagaagattactatagtagttgtgttacaggggagtccttgttcccagagctcccaagatggtggcggcagcttccaaaatggtggcgggctgcttccaagatggtggcaagcctcgtgttctctgacctggggttcttggcctcacagattccaaggaatggaattttgggccatgcagtgagtgttatagctctattagaagccatgggtcatgaaacagaaccatggaacccagtgactagtgttcagcttgattaggatgaacctgggcacttagccatgcagagacaatggcaag

SEQ ID NO: 417393 - DNA, 549 bp, Homo sapiens
tgaacaattctgggttagagaaaacctgactctggtagctcaaggagttgagaggaatcttggaaaaccaggcttaggcaatgatcaggtaccaaaagaagctgagaggccagaaccacaggccaggtcatagcrcaggggtggttggctaggatgctgcaggcactgctggcactgttgcccgtgactcctctggcaccgtgcaggtgctgaggctgctgctggtgggcctggatgccactgtggtcatcaccaaaatgaattgtaaactttacttctttgaatcacttgcacctgattcaaagtcttaggcagttgcatctgctaggactagctaagatcacagggctgtgtctcggctgtcagagtttagagaatccacaaatttgggcctaatggcttctgtagaagtggatagagctttgtcccccacaagctctatccacttagagcttggggggaagaccctgttaagttcatggatggcctcctttcctgccattatgacccttctatttgtaggcctattaagaatgaactggggccaag

SEQ ID NO: 417394 - DNA, 643 bp, Homo sapiens
ctgggggacatttgtctttttttctgtctgtccagtgcctttggaacaccctttcaatgtttgggaagttttatgcctcactggtcttcattccccaaggtaaattgcttttccagattctacagaggaggatgcagaattcaccatctaatgagcttgtagggaaggcatctggcagagcccaggcctgtcrtcccgagagccagctgtaggcactgggcagtgctgtgtgaactgtgctgccagtgccgtggagttgacactggagctgcccttgcgggtgctgagtgtcaccctggccacacggctggtaaacctgttccccttggagacgctgtgcactgtgaaatcttctttgaataattagtctctgcttaagatgatcagagtggaatctgtcgtttgcaactaagtgccctgactgatggactggtttgtggtctctgtgtctctttttggtgcctctattacctattttccataccacagctagagtgatcttttaaaaactcaaacctggtcttgtcactgaggatgagcccccaagttctcaagtggcccacaacatccttatggtctgtacccagtggaggtgggagcactagtaattaccctgatccttaggctttccacaaggtgaagg

SEQ ID NO: 417395 - DNA, 643 bp, Homo sapiens
ctgggggacatttgtctttttttctgtctgtccagtgcctttggaacaccctttcaatgtttgggaagttttatgcctcactggtcttcattccccaaggtaaattgcttttccagattctacagaggaggatgcagaattcaccatctaatgagcttgtagggaaggcatctggcagagcccaggcctgtcgtcccgagagccagctgtaggcactgggcagtgctgtgtgaactgtgctgccagtgccgtggagttgacactggagctgcccttgcgggtgctgagtgtcaccctggccacacggctggtaaacctgtyccccttggagacgctgtgcactgtgaaatcttctttgaataattagtctctgcttaagatgatcagagtggaatctgtcgtttgcaactaagtgccctgactgatggactggtttgtggtctctgtgtctctttttggtgcctctattacctattttccataccacagctagagtgatcttttaaaaactcaaacctggtcttgtcactgaggatgagcccccaagttctcaagtggcccacaacatccttatggtctgtacccagtggaggtgggagcactagtaattaccctgatccttaggctttccacaaggtgaagg

SEQ ID NO: 417396 - DNA, 553 bp, Homo sapiens
ttatggtcttcactcctatagattctatttaattagtctggaatcaaggcttttttttttttttttttgagacagagtcccactctgtcgcccrggctggagttcagtggcgtgatctcggctcactgcaacctctgcctcccaggttcaagcgattctcctgcctcaggctcctgagtagctgggattacaggcttgtgccactacgcctggctaaattttgtatttttagtagatacaaggtttcaccatgttggtcagcctggtctcgaactcctgacctcgtgatccgcccgcctcggcctcccaaagtgctgggattacgggcgtgagccaccgcacccggctaatcacggcatttttataagccttgtgatttctgtgattctaatgtttagattctaatgcttagccagggttgagaaccaccgatttaatccaatcccttctcctagttttactaaagagaaaactataacctagaatggtgagcaacttgcccaaagtcacccaacatgttagtgcaaggtgcaccgagagagattgtaccagt

SEQ ID NO: 417397 - DNA, 534 bp, Homo sapiens
aactaactgtcaggaaataaataaataacggaatgtggcttttgagttttagtataatgtttcaataaccatctacgaataattagctgattcaggacaagtgttttcaaaagtgtattaaaatatagctctgatcgggcggggcatggtggctcatgcctgtaatcccagcactttgggaggccgaggcgggcagatcacgaggtcaggagatcaagaccatcctggctaacatggtgaaaccccgtctctactaaaaatacaaaaaattagccgggcgtggtggtgggagcctgtagtcccagctactcgggaggctgaggcaggagaatggcatgaacctgggaggtggagctcacagtgagctgatatcacgccattgcactccagcctgggmaacaaagcgagactccgtctcaaaaaaaaaaaaaaaaaaaatatatatatatatatatagctctgatcaattaattggcacaaattctccttcgacaaagctaatgaatcgtttttcatgcattagtaaatattaca

SEQ ID NO: 417398 - DNA, 534 bp, Homo sapiens
aactaactgtcaggaaataaataaataacggaatgtggcttttgagttttagtataatgtttcaataaccatctacgaataattagctgattcaggacaagtgttttcaaaagtgtattaaaatatagctctgatcgggcggggcatggtggctcatgcctgtaatcccagcactttgggaggccgaggcgggcagatcacgaggtcaggagatcaagaccatcctggctaacatggtgaaaccccgtctctactaaaaatacaaaaaattagccgggcgtggtggtgggagcctgtagtcccagctactcgggaggctgaggcaggagaatggcatgaacctgggaggtggagctcacagtgagctgatatcacgccattgcactccagcctgggaaacaaagcgagactccgtctcaaaaaaaaaaaaaaaaaawatatatatatatatatatagctctgatcaattaattggcacaaattctccttcgacaaagctaatgaatcgtttttcatgcattagtaaatattaca

SEQ ID NO: 417399 - DNA, 537 bp, Homo sapiens
tgctaaatgccactgaattgaacacattaaagtggctaatttagttatgtgaatttcatcacaactaaaaaaaaacacaggaaaaactttcgtaaaacttttttcaaaataaaattaatttaatacatgaaaaagtaaccagaaaccatttccccactggactgcagaagcacaaaagacccttctacttgatgtttggccaagtttttatttcagaagtagcaaaaaggaacacctgaaatcagaacctrctgcaaatatacatattagtgtaggttcagtcccctcacacatttcccagcactgattcctcagccatctatattgaaaccagaatgttgattgcttgtgcttcattgggcaaataactgttttcttccttcatagagacagtaaatgataacagcttagctcacagaaaaaggataagcaataccagatttggaacatattgaaagctgtatcgatctatggattctaccatctacagaaatggtcagtggctgttagctacaagaacctgtcaagcaaaatcaa

SEQ ID NO: 417400 - DNA, 537 bp, Homo sapiens
tgctaaatgccactgaattgaacacattaaagtggctaatttagttatgtgaatttcatcacaactaaaaaaaaacacaggaaaaactttcgtaaaacttttttcaaaataaaattaatttaatacatgaaaaagtaaccagaaaccatttccccactggactgcagaagcacaaaagacccttctacttgatgtttggccaagtttttatttcagaagtagcaaaaaggaacacctgaaatcagaacctactgcaaatatacatattagtgtaggttcagtcccctcacacatttcccagcactgattcctcagccatctatattgaaaccagaatgttgattgcttgtgcttcattgggcaaataactgttttcttccttcatagagacagtaaatgataacagcttagctcayagaaaaaggataagcaataccagatttggaacatattgaaagctgtatcgatctatggattctaccatctacagaaatggtcagtggctgttagctacaagaacctgtcaagcaaaatcaa

SEQ ID NO: 417401 - DNA, 452 bp, Homo sapiens
tgctgtcaccttgattgcagcctatgaaacattgacaggtttcagtccaggaccctcctaatctatgctctgattcctgacccaagaaactgtgatataataagtgtttgttgtkttaagccattaagtttgtcataatttgttacacagcaatagctaatcaaaagaaatgcatgaagacatttaaaataatttctttaaaattgcagtttatatccaatcatttaaattttagagccttttttaaaaaaattacaagctgagggtggtggctcaagcctgtaatgccaatactttgggaggccaaggtgagctgatcacttgaggtcaggagttcaagactagcctggcaacatggttaaaccctgtctccataaaaaatacaaaaattagccagatgtagtggcaggaacctgtaatcccagttactcagcaggctgaggcaagagaat

SEQ ID NO: 417402 - DNA, 452 bp, Homo sapiens
tgctgtcaccttgattgcagcctatgaaacattgacaggtttcagtccaggaccctcctaatctatgctctgattcctgacccaagaaactgtgatataataagtgtttgttgtgttaagccattaagtttgtcataatttgttacacagcaatagctaatcaaaagaaatgcatgaagacatttaaaataatttctttaaaattgcagtttatatccaatcatttaaattttagagccttttttaaaaaaattacaagctgagggtggtggctcaagcctgtaatgccaatactttgggaggccaaggtgagctgatcacttgaggtcaggagttcaagactagcctggcaacatggttmaaccctgtctccataaaaaatacaaaaattagccagatgtagtggcaggaacctgtaatcccagttactcagcaggctgaggcaagagaat

SEQ ID NO: 417403 - DNA, 457 bp, Homo sapiens
tctggctatagattgatatctggcaataaatgattaacttgtaatgtatgaaaatactgtttagctttcataaaatgagtagtagtaatttgaatgtatgatttcaatggattttaaaatatttctaaagaaagaaaaataatgactccaactctttagcaaaaatatcatgagacatataaccaaaacaaaaatgtcttgactctgaataaaaatttttttttcarttttcagctatttcgttcaaatttgtgtctccatattcactgtgctttctgttttggtacaaaaatattttcttaaaattggatgtaataatgatcaacattttgcattgtattttaaatttaatgtagagttacttgacttaattctgtggcaactttttgtgaagtggggtatctttatttatgttcctaattttagcaaagttttgtcattacaagcaacctcagta

SEQ ID NO: 417404 - DNA, 457 bp, Homo sapiens
tctggctatagattgatatctggcaataaatgattaacttgtaatgtatgaaaatactgtttagctttcataaaatgagtagtagtaatttgaatgtatgatttcaatggattttaaaatatttctaaagaaagaaaaataatgactccaactctttagcaaaaatatcatgagacatataaccaaaacaaaaatgtcttgactctgaataaaaatttttttttcagttttcagctatttcgttcaaatttgtgtctccatattcactgtgctttctgttttggtacaaaaatattttcttaaaattggatgtaataatsatcaacattttgcattgtattttaaatttaatgtagagttacttgacttaattctgtggcaactttttgtgaagtggggtatctttatttatgttcctaattttagcaaagttttgtcattacaagcaacctcagta

SEQ ID NO: 417405 - DNA, 632 bp, Homo sapiens
  misc_feature (1)...(632): n = A,T,C or G
ctgttggttttctccacttcattgctttatattatgattatttgtaagtaccttctacatgccagtcattgctctagagggaaaagaaggaagcaaaacacacaaaacagccactcagyagcattctacattctaataaggagaagcagacaataaataatacaatttatagatatcacacgaacagatgttaaaaagtccaataaagactggttaggggaaaaagatttctagggaattctcgtttatatcaagtgatcaaagagaaacccaatgagataggacatcagaacagagattggaaaaagtaaagtgagcaaacctnatgtgaatttctagaaggaatattttccacgctagagggaaaacaaagtgaaaagactgagaggtttccacaatccctgtgttttcaaaggtcaacaagaatgccagtgttggagttgagagaaaaaggagaacatttgaaaatgaggctttccatctgggattctcaaatgctattttaaatccaatatttctttgatgtaacggggtaacctggacattctaggatatttagcaacatccgtggactccattcactggatggtagcaacatccacagccccccaactccctacccccattgccac

SEQ ID NO: 417406 - DNA, 632 bp, Homo sapiens
  misc_feature (1)...(632): n = A,T,C or G
ctgttggttttctccacttcattgctttatattatgattatttgtaagtaccttctacatgccagtcattgctctagagggaaaagaaggaagcaaaacacacaaaacagccactcagcagcattctacattctaataaggagaagcagacaataaataatacaatttatagatatcacacgaacagatgttaaaaagtccaataaagactggttaggggaaaaagatttctagggaattctcgtttatatcaagtgatcaaagagaaacccaatgagataggacatcagaacagagattggaaaaagtaaagtgagcaaacctnatgtgaatttctagaaggaatatwttccacgctagagggaaaacaaagtgaaaagactgagaggtttccacaatccctgtgttttcaaaggtcaacaagaatgccagtgttggagttgagagaaaaaggagaacatttgaaaatgaggctttccatctgggattctcaaatgctattttaaatccaatatttctttgatgtaacggggtaacctggacattctaggatatttagcaacatccgtggactccattcactggatggtagcaacatccacagccccccaactccctacccccattgccac

SEQ ID NO: 417407 - DNA, 632 bp, Homo sapiens
  misc_feature (1)...(632): n = A,T,C or G
ctgttggttttctccacttcattgctttatattatgattatttgtaagtaccttctacatgccagtcattgctctagagggaaaagaaggaagcaaaacacacaaaacagccactcagcagcattctacattctaataaggagaagcagacaataaataatacaatttatagatatcacacgaacagatgttaaaaagtccaataaagactggttaggggaaaaagatttctagggaattctcgtttatatcaagtgatcaaagagaaacccaatgagataggacatcagaacagagattggaaaaagtaaagtgagcaaacctnatgtgaatttctagaaggaatattttccacgctagagggaaaacaaagtgaaaagactgagaggtttccacaatccctgtgttttcaaaggtcaacaagaatgccagtgttggagttgagagaaaaaggagaacatttgaaaatgaggctttccatctgggattctcaaatgctattttaaatccaatatttctttgatgtaacggggtaacctggacattctaggatatttagcaacatccgyggactccattcactggatggtagcaacatccacagccccccaactccctacccccattgccac

SEQ ID NO: 417408 - DNA, 572 bp, Homo sapiens
ccttgttgcactggaagtcaaaaggctccaggacaagttttgctttcaattctattaacgtttttttttttttggcttagttttcttgtataactaacttctcccatcccttaggctttgtcatgtacctataattttttgattttgtttttgtgatatgtaaatgttaaatgggtgttataaatgaactaatactaatgcatttttgacaatctaattaggacagagaagattaatgtacttagaatactgtactaataaaattaatgcaaagtgtgtataaaattaaagaagaattasaaattagaaaatcactcaaacaaggtagggaattaagacaaagttctttcacataagaccattaatgaatttgtaatatttatacagtccgagctaaataaatttaattgaaacctagtatttaataactatggaaaacaaaaaaataaacaccactagacatacaaacaaataattataaaacaactcaagctttttagattgctaacaggtagagaatgtttggtcaaaatatagtcaatcttttgaacatttaactattaggaatgact

SEQ ID NO: 417409 - DNA, 572 bp, Homo sapiens
ccttgttgcactggaagtcaaaaggctccaggacaagttttgctttcaattctattaacgtttttttttttttggcttagttttcttgtataactaacttctcccatcccttaggctttgtcatgtacctataattttttgattttgtttttgtgatatgtaaatgttaaatgggtgttataaatgaactaatactaatgcatttttgacaatctaattaggacagagaagattaatgtacttagaatactgtactaataaaattaatgcaaagtgtgtataaaattaaagaagaattagaaattagaaaatcactcaaacaaggtagggaattaagacaaagttctttcacataagaccattaatgaatttgtaatatttatacagtccgagctaaataaatttaattgaaacctagtatttaataactatggaaaacaaaaaaataaacaccactagacatacaaacaaayaattataaaacaactcaagctttttagattgctaacaggtagagaatgtttggtcaaaatatagtcaatcttttgaacatttaactattaggaatgact

SEQ ID NO: 417410 - DNA, 541 bp, Homo sapiens
gttctgttctgcacaaatccaaccctatgattacttcttatctggctaacaaatacagttataagccatggagatggtgtcaataaataattgcaaaggaaagcagaattacctcctctcataatcacattcatgaaattttatactttgtcctactaagccataaaccaaataactaagaggttgtcacattaattgttctatatgaaactattaaaattccaawcttaatattcttactttatatgagaaaaaacaaaaaatgtgcaaagaagtagaaagagtgagaaataaaatgctcaattgaatagtacatcaaaatcattcatagaacactacatccatacaggtagcagaaggcagtgaaacaatttttaaatgaagagtatataaagctcatttgtctaatataaaaagagttcatggtttctcaaataagtttataaatgtctgtcacagaagtgactggatgttgtttcccaaatgaatttgctaccactgctgtgattacacagtgattttttttgaagtaggctgcagt

SEQ ID NO: 417411 - DNA, 541 bp, Homo sapiens
gttctgttctgcacaaatccaaccctatgattacttcttatctggctaacaaatacagttataagccatggagatggtgtcaataaataattgcaaaggaaagcagaattacctcctctcataatcacattcatgaaattttatactttgtcctactaagccataaaccaaataactaagaggttgtcacattaattgttctatatgaaactattaaaattccaaacttaatattcttactttatatgagaaaaaacaaaaaatgtgcaaagaagtagaaakagtgagaaataaaatgctcaattgaatagtacatcaaaatcattcatagaacactacatccatacaggtagcagaaggcagtgaaacaatttttaaatgaagagtatataaagctcatttgtctaatataaaaagagttcatggtttctcaaataagtttataaatgtctgtcacagaagtgactggatgttgtttcccaaatgaatttgctaccactgctgtgattacacagtgattttttttgaagtaggctgcagt

SEQ ID NO: 417412 - DNA, 596 bp, Homo sapiens
catctcaaaacaaacaaacaaacaagaattcatgtagcataaagttttccccaaaagtactgatgttttataaactttcttgtttgtctctgtataggtcagaaaaaatgagttcatttagattattaattgaaaccactgtagaatataatatttcattgtattgttttaaccctaggatgttttccacctaaacatcatcactttctcagatttaactattttcttacttcagtcatcascactaggagttgattttttaaaacagaaatagatgcctttcacaaggacagctatttttaattaaaaattatttttataagtgttagtgcatatagaatagaaagtaagaatagtatggccatactgagatacaaatagtaggtgatttgggggttaacttcatagccaaaggcctgaatagggcatgagattttaatatgactcttattcctatttacatctgtggactgtgtggagttgtttctgtgactcttgtgtttgatagtgctgttctgcccagtatttgagaacaaaattcaggtatgtgatttactgtgtactttgaaaattgcatttgatgatacaactgtgtg

SEQ ID NO: 417413 - DNA, 626 bp, Homo sapiens
actattttcttacttcagtcatcagcactaggagttgattttttaaaacagaaatagatgcctttcacaaggacagctatttttaattaaaaattatttttataagtgttagtgcatatagaatagaaagtaagaatagtatggccatactgagatacaaatagtaggtgatttgggggttaacttcatagccaaaggcctgaatagggcatgagattttaatatgactcttattcctatttacatctgtggactgtgtggagttgtttctgtgactcttgtgtttgatagtgctgttctgcccagtatttgagaacaaaattcaggtatgtgatttrctgtgtactttgaaaattgcatttgatgatacaactgtgtggcacaattccatttctttgccatgacttatcctaagtccacacgactaagccctcttccaaaaaggtggaatcataaatagtatacttaggtttgctgttggtttaattacagcatattagtaaaattgaataaaataataatcagcacatattacaaattaagaatcaaagcgtttttctgtacttgtctatagttccctgagaaaccaacaaactaaatgcaattgctataacatttcatttttt

SEQ ID NO: 417414 - DNA, 577 bp, Homo sapiens
acataatatgagtaaagtagatatcacattatacatatgaaaagtgatttcaagagtaaattcgattttattttccttagaagctagtacttttaaaagtataatattgaagatgaaataccatattgaaatataaattaaggtaagaaaagtgatcaaaagcaaaataaaatctaggtaggaaaatggatraatctttttaagttttctagggtaaaaacatataaaggcatctgtatatgtatgaccttcttgtctctgcaacatatatagtcattactttacaaaattaatatataaacttatgtttttcatttattgctaattataagattaatatgttttgttgttattcatcaaaaacaaattaagattaaatatatcataaaagattttacaaggtaatccattatgttcacagtgctgaccactcagcaatgtttaacaagtgcatatcaacaatcactaaatgcctctgttcctgatatactttctgagtgagcaggtgttttaaaaagtgcttttagggcattttttgcttcaaatgttgtatggaattatagggagaaggatcaag

SEQ ID NO: 417415 - DNA, 577 bp, Homo sapiens
acataatatgagtaaagtagatatcacattatacatatgaaaagtgatttcaagagtaaattcgattttattttccttagaagctagtacttttaaaagtataatattgaagatgaaataccatattgaaatataaattaaggtaagaaaagtgatcaaaagcaaaataaaatctaggtaggaaaatggataaatctttttaagttttctagggtaaaaacatataaaggcatctgtatatgtatgaccttcttgtctctgcaacatatatagtcattactttacaaaattaatatataaacttatgtttttcatttattgctaattataagattaatatgttttgttgttattcatcaaaaacaaattaagattaaatatatcataaaagattttacaaggtaatccattatgttcacagtgctgaccactcagcaatgtttaacaagtgcatatcaacaatcactaaatgcctctgttcctgatatactttctgagtgagcaggtgttttaaaaagtgcttttagggcawtttttgcttcaaatgttgtatggaattatagggagaaggatcaag

SEQ ID NO: 417416 - DNA, 584 bp, Homo sapiens
atttactggagggcagaagttgtaattactgaataactcagtaagtaaataagaaaggtccttaacaagcacaagataaagcaatggagagaatctaaattaaatataaccaatcagcacacacacacacacacacacacgcatatatatatatatatmtatatatatctatatatatatatatatatatattcaatgtattcattcaacaattttaataaatatttatcatgctctaggcacacttgtgggtgatggggatacagcgatcagcaaaaaaggcaaaaatatctgttcttacagccttcacggaacttgcattccaatgagacacagcattaataagaaaaatgaacaaaccataatgtacattagtaagaaattaatgctatggcaaaaataaaacagcggagaggcgaaaggaatgttgaagaagttggttaaactttaggtaggtgttagctttttattgccgctgtaacaaattgccacacatttaagagtttaaaaccacagaaacttactaccttttggttgtgtaaggtcatatagacccagtgtgtaatgggtcacactgggctaaa

SEQ ID NO: 417417 - DNA, 584 bp, Homo sapiens
atttactggagggcagaagttgtaattactgaataactcagtaagtaaataagaaaggtccttaacaagcacaagataaagcaatggagagaatctaaattaaatataaccaatcagcacacacacacacacacacacacgcatatatatatatatatctatatatatctatatatatatatatatatatattcaatgtattcattcaacaattttaataaatatttatcatgctctaggcacacttgtgggtgatggggatacagcgatcagcaaaaaaggcaaaaatatctgttcttacagccttcacggaacttgcattccaatgagacacagcattaataagaaaaatgaacaaaccataatgtacattagtaagaaattaatgctatggcaaaaataaaacagcggagaggsgaaaggaatgttgaagaagttggttaaactttaggtaggtgttagctttttattgccgctgtaacaaattgccacacatttaagagtttaaaaccacagaaacttactaccttttggttgtgtaaggtcatatagacccagtgtgtaatgggtcacactgggctaaa

SEQ ID NO: 417418 - DNA, 584 bp, Homo sapiens
atttactggagggcagaagttgtaattactgaataactcagtaagtaaataagaaaggtccttaacaagcacaagataaagcaatggagagaatctaaattaaatataaccaatcagcacacacacacacacacacacacgcatatatatatatatatctatatatatctatatatatatatatatatatattcaatgtattcattcaacaattttaataaatatttatcatgctctaggcacacttgtgggtgatggggatacagcgatcagcaaaaaaggcaaaaatatctgttcttacagccttcacggaacttgcattccaatgagacacagcattaataagaaaaatgaacaaaccataatgtacattagtaagaaattaatgctatggcaaaaataaaacagcggagaggcgaaaggaatgttgaagaagttggttaaactttaggtaggtgttagctttttattgccgctgtaacaaattgccacacatttaagagtttaaaacmacagaaacttactaccttttggttgtgtaaggtcatatagacccagtgtgtaatgggtcacactgggctaaa

SEQ ID NO: 417419 - DNA, 420 bp, Homo sapiens
gtaagcgggagaggaatgaattctagtgcagacatcttgaccttggctagtacaagatgaaatttatccataggtagaamaaagaaggcaaagtatgtgtgcacagatgctgaaactctaagtggtagtgatcttatggaggatttttggggtggtctcagtattttcagtgacacaaaacacaacaccagctcatacagagaatgagtttttggtggtgtacgtttgaaggtaaaaggcagtgagagaacagatgatttaagaaatatagaaaaactttgtgtcaccattatgggtttaactgaagttagtgtcagggaatttaggagaaaccagttatcatggttctctgcttttttcccatccccattcagctctatcagtacagagatacaatattggaggggaccaaatttaatc

SEQ ID NO: 417420 - DNA, 420 bp, Homo sapiens
gtaagcgggagaggaatgaattctagtgcagacatcttgaccttggctagtacaagatgaaatttatccataggtagaaaaaagaaggcaaagtatgtgtgcacagatgctgaaactctaagtggtagtgatcttatggaggatttttggggtggtctcagtattttcagtgacacaaaacacaacaccagctcatacagagaatgagtttttggtggtgtacgtttgaagrtaaaaggcagtgagagaacagatgatttaagaaatatagaaaaactttgtgtcaccattatgggtttaactgaagttagtgtcagggaatttaggagaaaccagttatcatggttctctgcttttttcccatccccattcagctctatcagtacagagatacaatattggaggggaccaaatttaatc

SEQ ID NO: 417421 - DNA, 606 bp, Homo sapiens
ggacaagggatttggagtacaggcagacctggtttcattgtacttcactctatagtgcttcacagatcttgaagttttttgtttatttgtttgtttctttgctcgttttttgagagagggcctcgctctgtcacccaggctgttgtgcagtggcacaatgtcggctcactgcatcctccgcctcccgggttcaagtgattctcatgcctcagcctcccaggtagctggaattacaggcttgcaacaccatgcccagctaatttttgtatttttagtagacatgtgattttgccrtgttggccaggctgatctcagctattcctgacctcaagtgatccgcccgcctcagcctcccaaagagctgggattacaggtatgagccaccacgcctggcctgcgttttttacacattgaaggtttattgcaaccctgtgttgagcaattctatcagcaccatttttttttccgccagcgtgtggtcactttgtgtctctttgtcacattttggtaattctcacaatatttcaaactttttcattattattttatctgtatgttggcctgtgatcagcaattttaatgctactgttgtaattgttttgggga

SEQ ID NO: 417422 - DNA, 599 bp, Homo sapiens
ggaattaagctaaatcagatattctgcctgtgctcaataaatggagcaacaaagcctagatgtcagcacatctgtttacggcatggtatactgactattttatgaccactatggaaaaaaaaaacttcctttcaaaatattactgctcattaacaatgcacctggtaacccaagagctcagatggagatgtacaaggaaatgtgtgctgttatgtaagtgacaacacaatatctattatgtagctcatggatgaaagagtaatttcaactttcaagtctttttatttttgaaatacactttgtaaggatatagctgccatatrtatggtgattctgatggatttggtcagagtaaattgaaaggcttttgaaaagaatttaccattctagaaaccattaagaacattggtgattcatgggaggagattaaaatatcaacattaataggagtttggaagaagttgattccaaccctcagtggatgactttgtgaggttcaagacttcagcggaggaaataactgcagatgtgatggaaatagcaagagaactagaattagaagtgcagcctgatgatgcgactgagttgctgtaacctca

SEQ ID NO: 417423 - DNA, 384 bp, Homo sapiens
tgctttgcacatagatgacactcaataaactttcttttaatacatagatgaaataatccagttgaagtacttgaagcataatgtgggtggaagatagaacacagagttggtagaccacactagctagmagatcagggccatgattccaagacttgcaatgaaaacataagctaacttaaattcctgcaccctactgatgtatgtagtaagatttacctagaagatctgcaggtattagcaggcctgaaatttttaagtgaatgtagatggataaactgacattttttaagttgaattattattcttacagcatgtcccgctgaagaccatttgtaaggttttcatgtgctggctcattacaaatttaatgatgtgaagaaaatg

SEQ ID NO: 417424 - DNA, 534 bp, Homo sapiens
gacttgcaatgaaaacataagctaacttaaattcctgcaccctactgatgtatgtagtaagatttacctagaagatctgcaggtattagcaggcctgaaatttttaagtgaatgtagatggataaactgacattttttaagttgaattattattcttacagcatgtcccgctgaagaccatttgtaaggttttcatgtgctggctcattacaaatttratgatgtgaagaaaatgtatttagcatctgatgatttttctcagtttgaagagagagaagatgttgtgaaataatattagtgaatggcatctcaagtttgctagataaaaatagtaaagttcctgcaaatcttgagcgtacctttgaggtttttgattattaattcagagttcaaactagggagcctggttgggtgatttccctctagcatgtttcatggattaaggcatggaggagagagctatttggtttatctagagctagagtcttaccagttaagtaccaaggacagagggataggcaaggaagctgaggt

SEQ ID NO: 417425 - DNA, 557 bp, Homo sapiens
taacttcttgatatagaagataagtaaamtatgcgccaaccatcaatgagcccatagcctgatgggtaagacagacatgtaaaggaattaccaaaacatcttaagcacctttgatagaatgcagagaaagaagaatgatcacaataccccctctgatcaatagccagctttataaatgcatagtactgttaaatgaatgcatgatttcaataagggtatgcatggaaaaatcttgcagacatttattattcatttatttgattcaagaaagattaggactggcttaaaagtactgacatttaaaacctgaaaagcgctgttatcaacttgaatgtcacttggcctgacccccaggattttttatacttgtaaaaatttctgacttccagaacacataaaaaacttctaaaaagagagcaaatatttaaccagtttttcttcctttgtgcctctactcaaatctaaagaaaataatacagagaataatacagaggtgattgtttgaagtttcctgctgatttcacacatcatttcttattaagtattagaatatattc

SEQ ID NO: 417426 - DNA, 557 bp, Homo sapiens
taacttcttgatatagaagataagtaaaatatgcgccaaccatcaatgagcccatagcctgatgggtaagacagacatgtaaaggaattaccaaaacatcttaagcacctttgatagaatgcagagaaagaagaatgatcacaataccccctctgatcaatagccagctttataaatgcatagtactgttaaatgaatgcatgatttcaataagggtatgcatggaaaaatcttgcagacatttattattcatttatttgattcaagaaagattaggactggcttaaaagtactgacatttaaaacctgaaaagcgctgttatcaacytgaatgtcacttggcctgacccccaggattttttatacttgtaaaaatttctgacttccagaacacataaaaaacttctaaaaagagagcaaatatttaaccagtttttcttcctttgtgcctctactcaaatctaaagaaaataatacagagaataatacagaggtgattgtttgaagtttcctgctgatttcacacatcatttcttattaagtattagaatatattc

SEQ ID NO: 417427 - DNA, 557 bp, Homo sapiens
taacttcttgatatagaagataagtaaaatatgcgccaaccatcaatgagcccatagcctgatgggtaagacagacatgtaaaggaattaccaaaacatcttaagcacctttgatagaatgcagagaaagaagaatgatcacaataccccctctgatcaatagccagctttataaatgcatagtactgttaaatgaatgcatgatttcaataagggtatgcatggaaaaatcttgcagacatttattattcatttatttgattcaagaaagattaggactggcttaaaagtactgacatttaaaacctgaaaagcgctgttatcaacttgaatgtcacttggcctgacccccaggattttttatacttgtaaaaatttctgacttccagaacacataaaaaacttctaaaaagagwgcaaatatttaaccagtttttcttcctttgtgcctctactcaaatctaaagaaaataatacagagaataatacagaggtgattgtttgaagtttcctgctgatttcacacatcatttcttattaagtattagaatatattc

SEQ ID NO: 417428 - DNA, 541 bp, Homo sapiens
tagaaaaaaattctctgcgaccttctgaagttccagttcttcctatcttaggaaatgccttcactatctacttagccactgattctggaaactagaggttgtattctagtttttaaatttctgttacctagtgtaggacctgagccgattaatcatgaaggcatctatgtaaaatagaattcatccaattctttctttcctcactattactaccttgatctaattcatattgcctctttgttctcttatagtagtagccctcgaatcagcctcacggtagccactctcaaataaactgtatccttgaaaatrttaggcaccacatgtatgctatctttgccaaattatcaacatgtcttttggggttaaacctgagaactgaagatgttaagaaaatgtcagtagaaatgtaggaagattgcttattggatatatgtgtcagaaaccatgctcattgtttaggtctaaatttgatttgtagtttttagaatttaaatgttctttgaattttcaaagtatcaggggcttaactttgagctct

SEQ ID NO: 417429 - DNA, 603 bp, Homo sapiens
ctgtggtgctcaggctggccttgagctcctgggcttgagcaatcctcaaatctcagcctctagaggagctgggattacaggcaggtccaccacgcctggcaagaagtatgatttatagcattaggatatagtggttaagaacctgtagtgaggagtttgaagaatgaaatttgaacctcagtttccttatttaatattttgacaagttactttctctgatgataagtagaaacaaaagtaatatatatttaataaatttctagggaaaatcaagtgacctactcacaaaatagcagcattctggtgcatgataaacaatcaacaagtaatagctaataactatattttacataaagttgagggcctataagaatcatttagatattaaaatgaatgattagagaaataaagagatacgttttcttcatcaatgatagactggataaagaaaaatgtggcacatatacatcatggaatactatgcagccatraaaaaggatgagttcacttcctttgcaaggacatggatgaagctagaaatcattctcagcaaactaacacaggaacagaaaaccaaacaccgcatgttctcattcgtaagtg

SEQ ID NO: 417430 - DNA, 394 bp, Homo sapiens
atccctagttaggaacagatgtttgtgtgtgtgtatgtgtgtacatatgaacatgaatttctagtgttaaagaaaagtcatctaaccaaaaaggagtttgtgctaggtgctgttttattttgctattggaaagatgagttttggtgatgtacttaatgtacagcatratcaaactgttgtcttttgatgagttattactataatgtatcatcaaagcctcatggctttgatagagtatactaacatgttttttgaacaaaagaagtttgatgatttattaaaataatgctattctactgtttaaaagctgcttaaaaaggtaaacaaaacatgcttaaagactaagagagaaaataaataaaactcactaaactttaaactcactaaaaatata

SEQ ID NO: 417431 - DNA, 556 bp, Homo sapiens
atattttatccattccttcatctttcccaagactctggtaacattttcccctgttcccttatttctgaattctctctttctatcgttaagaaataaaatagccctacatttctcttttttatcttcagtttttacacattaataaaaatactgcaaaacataaaataggaagcgaatcatagacaccacagaatattttttaaagtaatttagaaaaagttttctctatgatttctrtaggaagatgtcaatttgccaaattcctgattctctttgtatctgagtccttgaagacttcaaacttacatgattaatttatataaataaatgtatcctttaatataggtgaatagaaagatcatagtgaaattttaatgtttttaatttgttcagtgtaactctcacattctttgttattgggaagtaaattagcttgtcatctctttgttctcttatatatattttttaattttcttcagcttcccaagttttgcagttttttttttcaaggagtagcttagcacctagatgtgttgtaagcataaaaacagaaaaa

SEQ ID NO: 417432 - DNA, 556 bp, Homo sapiens
atattttatccattccttcatctttcccaagactctggtaacattttcccctgttcccttatttctgaattctctctttctatcgttaagaaataaaatagccctacatttctcttttttatcttcagtttttacacattaataaaaatactgcaaaacataaaataggaagcgaatcatagacaccacagaatattttttaaagtaatttagaaaaagttttctctatgatttctataggaagatgtcaatttgccaaattcctgattctctttgtatctgagtccttgaagacttcaaacttacatgattaatttatataaataaatgtatcctttaatataggtgaatagaaagatcatagtgaaattttaatgtttttaatktgttcagtgtaactctcacattctttgttattgggaagtaaattagcttgtcatctctttgttctcttatatatattttttaattttcttcagcttcccaagttttgcagttttttttttcaaggagtagcttagcacctagatgtgttgtaagcataaaaacagaaaaa

SEQ ID NO: 417433 - DNA, 601 bp, Homo sapiens
tttgaatccttcattagtgcacttaagtataagaatagacacgaaaacatcctcatgtaaaatatagttctaataaaatatatttattgtgctgtttgctttcttctcttgacaatgtcttagatacttttcatattagtgcttgtcttagttcatgttgtgctgttataacagaatacctgagactgggtaatttataaacaatagaagtttatttggcttacagttctgcaggctgggcagtcaaagagtatggtgctggcatctggtgagggcctttgtgttacatcatcccatggcagaaggcagaagggcaagagagaacaagatcaagagggrgctatactcacttttagaataagtccactatcatgataataaatccactctgtgataacaacattaatgtgttcatgagggtagaggtttcatgatctaatcacctcttgttaggctccacatcccaatactgttgcactgggaattaagtgtctaacatgaatttatgacatattcaaacaatagcagtgtttatcattctatgtcattccttttaactgttaaagtgcatttgtttatatgtaagtttatttaaccagtt

SEQ ID NO: 417434 - DNA, 593 bp, Homo sapiens
tagtgcttgtcttagttcatgttgtgctgttataacagaatacctgagactgggtaatttataaacaatagaagtttatttggcttacagttctgcaggctgggcagtcaaagagtatggtgctggcatctggtgagggcctttgtgttacatcatcccatggcagaaggcagaagggcaagagagaacaagatcaagagggagctatactcacttttagaataagtccactatcatgataataaatccactctgtgataacaacattaatgtgttcatgagggtagaggtttcatgatctaatcacctcttgttaggctccacatcccaatactgttgcactgggaattaagtgtctaacatgaatttatgacatattcaaacaatagcagtgtttatcattctatgtcattccttttaactgttaaagygcatttgtttatatgtaagtttatttaaccagttcctattgatggatagttcaatcattttcagtttttcactcagacatataatattgcagtgacctcccttgtacgtttctcttttatttccttagacttgccaaaataaaatgaactgttaattcctat

SEQ ID NO: 417435 - DNA, 589 bp, Homo sapiens
tagtgtttagcaatgcattatgtcattgtcgtgatatattgagtaatcttgctaaagtttcttcttaataatacttagtttacagtgatgtatgttgatttttatgtaggatatcatgatctctgcaaataaaaacagctttttctttattttattcttttcttattgttttgrattggttgattcttgacttaatggaaacatttctattaatagttgttgaacataaagtgttaatttttgtatgtttctcatagatacactttattgcgttttggaaattatacaaactagaatttttaaaaacctgaaacggaccccaaatgttatatgtagacctcattatactaattgccaagctacatattattttccttctttattaaaaaagtccttacttagcaattgatattatttccttttctattattctttatttactgtttttagattaaatttctaatagtgtacacatctgtattaccctttcagaaccaatttttgatgtttattatcaatatgctctttgttgacttgcatttatattcatcttaaagttaatgacctttatttttttcatttatttcca

SEQ ID NO: 417436 - DNA, 655 bp, Homo sapiens
cactactacaaactactaggaatctgatccatcagaaaatagcagagagatcacaagtaagaagaggacatgtcacctttgtttataatgcaatgtactgagtgaatactgaaatagaaaggttggtgctgctgaggtctgaaccaaaattaagcccttttttttctgttatgggtactgtttttttatttcatatgatatgttgtttgttcaggcagaattattctgcactgtcttccgtagcacacacacagctttcaaatgaaataaacagttgttttgagaatgatgtttttattattatggtcacttaaatgacacctcagttttatctcctttctccttaacaacctaattccacttttgtttattcttttctctcactatagacaatmaacctctgataaaacattgtgtgtgtgtgcgcgtgcaaaactagaattttttttaaaaaaagaatcaaattaccctttccacaactctaactcatgacttggctaaaccttactcatcctaacatttaattctcaaattaaatgacatttccccagagaaagctttcttgagtatctcctaagttaggcttccttctattagtctgtatgctaatcaatttttacttttatgtttgtaattttatattatttatgcattg

SEQ ID NO: 417437 - DNA, 655 bp, Homo sapiens
cactactacaaactactaggaatctgatccatcagaaaatagcagagagatcacaagtaagaagaggacatgtcacctttgtttataatgcaatgtactgagtgaatactgaaatagaaaggttggtgctgctgaggtctgaaccaaaattaagcccttttttttctgttatgggtactgtttttttatttcatatgatatgttgtttgttcaggcagaattattctgcactgtcttccgtagcacacacacagctttcaaatgaaataaacagttgttttgagaatgatgtttttattattatggtcacttaaatgacacctcagttttatctcctttctccttaacaacctaattccacttttgtttattcttttctctcactatagacaataaacctctgataaaacattgtgtgtgtgtgcgcgtgcaaaactagaattttttttaaaaaaagaatcaaattaccctttccacaactctractcatgacttggctaaaccttactcatcctaacatttaattctcaaattaaatgacatttccccagagaaagctttcttgagtatctcctaagttaggcttccttctattagtctgtatgctaatcaatttttacttttatgtttgtaattttatattatttatgcattg

SEQ ID NO: 417438 - DNA, 654 bp, Homo sapiens
aattctcagttctctattaagtcattcctcatctctttttattttgatttctctcttcatggtattgtattttccccaaatgtctgataactatatttaggaatagagtttcaggctgattattacaaatcctctggaataggtttccactttgagtgtgtagatctratctcacactcattcattctcctcaaagagaggtctgagtgtgagatccgggttaatgagctgaatattttgacttgaatgctccttttgcttctggacagaacaaacttcctttcattttttcagcagattttgctgtgtggctggagtagagggaaacttaaactgacagctaatcttacatagttctttaataaattacctgtagcagactttattttataaatacaacaataacaatatctcccattcttcatataatgtgattttaactcttttcactaaaaatggattctgtgattccttgtcttgaatctgggtggcagatatgacttcttaggctaggtcataagaagttgtacaagttctttttttttttgaggcggagtttggctcttgttgccgaggctggagtgcaatctgtttcttcttgggacactcattcttggaacttcaccaccatgctgtgaggaagcccacgtaacc

SEQ ID NO: 417439 - DNA, 654 bp, Homo sapiens
aattctcagttctctattaagtcattcctcatctctttttattttgatttctctcttcatggtattgtattttccccaaatgtctgataactatatttaggaatagagtttcaggctgattattacaaatcctctggaataggtttccactttgagtgtgtagatctgatctcacactcattcattctcctcaaagagaggtctgagtgtgagatccgggttaatgagctgaatattttgacttgaatgctccttttgcttctggacagaacaaacttcctttcattttttcagcagattttgctgtgtggctggagtagagggaaacttaaactgacagctaatcttacatagttctttaataaattacctgtagcagactttattttataaatacaacaataacaatatctcccattcttcatataatgtgattttaactcttttcactaaaaatggattctgtgaktccttgtcttgaatctgggtggcagatatgacttcttaggctaggtcataagaagttgtacaagttctttttttttttgaggcggagtttggctcttgttgccgaggctggagtgcaatctgtttcttcttgggacactcattcttggaacttcaccaccatgctgtgaggaagcccacgtaacc

SEQ ID NO: 417440 - DNA, 654 bp, Homo sapiens
aattctcagttctctattaagtcattcctcatctctttttattttgatttctctcttcatggtattgtattttccccaaatgtctgataactatatttaggaatagagtttcaggctgattattacaaatcctctggaataggtttccactttgagtgtgtagatctgatctcacactcattcattctcctcaaagagaggtctgagtgtgagatccgggttaatgagctgaatattttgacttgaatgctccttttgcttctggacagaacaaacttcctttcattttttcagcagattttgctgtgtggctggagtagagggaaacttaaactgacagctaatcttacatagttctttaataaattacctgtagcagactttattttataaatacaacaataacaatatctcccattcttcatataatgtgattttaactcttttcactaaaaatggattctgtgattccttgtcttgaatctgggtggcagatatgacttcttaggctaggtcataagaagttgtacaagttctttttttttttgaggcggagtttggctcttgttgccgaggctggagtgcartctgtttcttcttgggacactcattcttggaacttcaccaccatgctgtgaggaagcccacgtaacc

SEQ ID NO: 417441 - DNA, 616 bp, Homo sapiens
ccattgtcttagggattaacatttggcttgtcattacttatgctaatttctgcagccaccttgaatttctcctcataaaatgggattttcttttctatcatatttacaggctgcaaattttccaaacttatatgctctgtttgccttttaaaactgaatgccttgaacagcacccaagtcacctcttgaatgctttgmtgcttagaaatttcttctatgagttacccactcatggagggtgcatttggaccagcgctaccaagagggtagtcagccatcgcagtggttggaacttgagttccaacaagacttgccacataaactaaagtgctcttgggtcttaggtaaacttgaaaggcagtttaggccgtaaggactgccactcctaggcaactccttggcctgtgctgagctcattaccaatggacatagtgggcacatgacctaatgagaaaccagctggagtgaataagggagtgcttgcagtattttgttaaaacatacagttgtgtgcttggatgtcatattctgcaagagtatcaattttcatagaaatgtaagttttacataccagatcagagccctgtatgcgtcgatatgaagtccttttacagaa

SEQ ID NO: 417442 - DNA, 616 bp, Homo sapiens
ccattgtcttagggattaacatttggcttgtcattacttatgctaatttctgcagccaccttgaatttctcctcataaaatgggattttcttttctatcatatttacaggctgcaaattttccaaacttatatgctctgtttgccttttaaaactgaatgccttgaacagcacccaagtcacctcttgaatgctttgctgcttagamatttcttctatgagttacccactcatggagggtgcatttggaccagcgctaccaagagggtagtcagccatcgcagtggttggaacttgagttccaacaagacttgccacataaactaaagtgctcttgggtcttaggtaaacttgaaaggcagtttaggccgtaaggactgccactcctaggcaactccttggcctgtgctgagctcattaccaatggacatagtgggcacatgacctaatgagaaaccagctggagtgaataagggagtgcttgcagtattttgttaaaacatacagttgtgtgcttggatgtcatattctgcaagagtatcaattttcatagaaatgtaagttttacataccagatcagagccctgtatgcgtcgatatgaagtccttttacagaa

SEQ ID NO: 417443 - DNA, 508 bp, Homo sapiens
tgtatgaacatcttgttattgcacaattgtgtttcaaatataataatctcaaattcaaaatctgatctcttgcagtgaaacaattaagccccttctatcaactaatataccaagataacaacaaaacataaatctcaaaaatcatgtctttttgtgggcatacagttatatattagaaacatttgaaagaaaacaaggaagagactagaaaaagtacatttgggccattgaacacaactaaaataagtaagaattttataaaagttccaccaagtagaacaaatgagattaatgccatatgtagatatcaaaattaactaaagttgaaagctctaagtcttaatcaayagtatagatttcttcatttagaaaagaagtatagcatagtggatcaaaacacacttagtaataataattttaaaaaaacctttggctgcttatatagtaaaaaattaaagctgtgtttcagcattccggtatctctaattggtgtggtgttttatttttc

SEQ ID NO: 417444 - DNA, 610 bp, Homo sapiens
gctttgtggcccaggcacagatgatacagtggcaccaacatgcaatcataattcactgcagcctacaactcctgacctcaagccatcctcccatctcagcttcccaagtacctgggactaccggtattcatcaccatgcctggctatttttttattttttttgtagagactcctgtctctctatgttgcccaggcaggtctcgaactcctggcttcaagcagttcccctgcctyggagtatcgtttcttaattgctgcaatggtattttattcaacactgtgattagagagataagttaatccagctgcctggatgacatgaaaggagacataaaagttactgctttgggtactgcttcgggcagcactctttcatttttccttgctgtctccctatctgtcagaaagagaaaaaatatatttgcttttagctgatctcttacactgtcatacacaactaaccaagaaataatatttctctaggtaatgtactttcatgtttgattcgatggagtttcatgaaggtttggcatggtttgaagttctctttaaagatctggtggcttttgcatttactgaactctgccttacaaaaatgtattctttcaac

SEQ ID NO: 417445 - DNA, 582 bp, Homo sapiens
tagaatttttgtgtatttaccttatatactgagagcttcctcatttattagttctaaaactttttagagtttctctgagactttctacatgcacaaacatgtcatgcctaaataaagttttatttcttctttcagtaacatgctttatttttctctttcttgtcttttttgactaactaggccttccaggatggttaagaataggaatgaatatcctgctgttgattctgaacctaggaaagcattcactcttttatcattaagtatgattttagatgcagggttttttgtagatgccctatataagtttaaggaattttttttatatttttactttgctgaaaatttttttrtcaagaatagaagataaattttcaagtggtctttctgtacctgctgatatgatcatgtgtttttcttctttattctatttttgtggtaaattaatgattaatttccaaatattgaactagccttcaatacctgggataaattccacttggtcatgatgtattatcctttttatgtatccctagtttatatttgctaatattttgttgtgcatttctgtagtgaggttta

SEQ ID NO: 417446 - DNA, 547 bp, Homo sapiens
tttcatctttctagtttgtttgaaaacttataaaaaccatatgataagttttcaaataaaatttatggtagttccatgctgacttcttgccccctatagtttgtgcttttatttcaggactatagtgctggtatcaaaaacaaaatcctaaggaatattcttacwttgtacctaacattataaattcaatgacaaatctggtggcttttttttttaatgtggtgactctatcactttcatttcactaattgatgctaaaaaataacctactggataagagtagttgttatttttactgaaatagttgccagagaaccactggatattttctatagtaaaggaaagagcacaaaaatttatttatttttcccattttttgttataactcaggatatccctccaaagttaagtcattactattttccatctaaaatagagacaaattttaatttgaattaatctcaaatttagcaaatagtcccaaagttaaaaataaaatttgagatctattgagacatacatgtaaaaggttttctttccctgtgct

SEQ ID NO: 417447 - DNA, 559 bp, Homo sapiens
aattcaatgacaaatctggtggcttttttttttaatgtggtgactctatcactttcatttcactaattgatgctaaaaaataacctactggataagagtagttgttatttttactgaaatagttgccagagaaccactggatattttctatagtaaaggaaagagcacaaaaatttatttatttttcccattttttgttataactcaggatatccctccaaagttaagtcattactattttccatctaaaatagagacaaattttaatttgaattaatctcaaatttagcaaatagtcccaaagttaaaaataaaatttgagatctattgagacatacatgtaaaaggttttctttccctgtgcttttgttcactatytgagaaatctgagaaataattgctagttaccttcccagcagaaaaattatgaggattattaaaataatatatgtaaattactttgctgtcagaagccctggatacctgcgtaatatattacactgctaaaaacttttattagtagactttaaattttatcttaatgctcaaataagtaatt

SEQ ID NO: 417448 - DNA, 524 bp, Homo sapiens
ctggggttctaaataaacttgaaaggctatttagaccacaaggactgcaatttctaggcaagtcctagtgctgtgctatgcttggagccagtagagtgggggcatcacaacctagtgagacatgaactggggtagctaaaggagtgcttgcgccatctttcccccaaccccaggcagcacagcttgcagctcctaaagagactccctccttccacttgaggagaggagcrgggagagtaaagaggactttgtcttggaacttggataccagctcagccgcagtaggatagggcagcaggcagaatcctgaggtactcactccagggcttagctctcagatgacatttctagatacaccctggaccagaagggaacccactgccttaaatggaaggacccagtcctgaagaattaattacttgaagactaaatagcccttgtaccctgaataatcagcagtggtatccagacagtacttgccatgggccttgggtgagactctgagacttgctggcttcaggtgt

SEQ ID NO: 417449 - DNA, 528 bp, Homo sapiens
gtaaaattaaaacaaactcacggagaaagagaataaaaggatggttaccagaggctgggatgggtagtggggtggtggggatggggaaagtgtgaatggttaatgggtacacaaaaactagaaagaatgagtaagatctaatatttgatatcacaacagggtgggttattacagtcaataatttaattatacatttaaaartaactaaaataatataattggattttttgtaacacaaaagataaatgcttgaggtaatggatattccatttaccctgatgtgattattatgtattgcatacctgtatcaaaatatctcatatatgccataaatatatacaactactatgtaccaagaaaagttgaaaatttaaaattaaaaaaaaattgcatgcttgaaagagaaaaaaacactgtatgtaaagagaaagttcattaagtggcagttattatgactgataattgtactatgcatgcgataaggtgaggtggtcatagtatcgactgtatggaagtgaaaagaaccaa

SEQ ID NO: 417450 - DNA, 572 bp, Homo sapiens
gtatcaaaatatctcatatatgccataaatatatacaactactrtgtaccaagaaaagttgaaaatttaaaattaaaaaaaaattgcatgcttgaaagagaaaaaaacactgtatgtaaagagaaagttcattaagtggcagttattatgactgataattgtactatgcatgcgataaggtgaggtggtcatagtatcgactgtatggaagtgaaaagaaccaatacctttagagagtttgctgtgtttggtcaccacataatttataggcattattttatgaaattctcaccaaactataatgttgtcattttatttcccattttatagatgtggaaaatgggggtaagttaatttgctcaaagcagagtcagggcttgaatgtagatctgttggatttcaaagtctgagaaacaaactctatatctgaaattgaattgcttctccttgtttttaaatttctttgaaaataaatgacacagatgatgtctgaacttagatatctctttttcttatagccaggtttcttcattttctgttgcatcaagttaatagattttgaggttgaaagc

SEQ ID NO: 417451 - DNA, 572 bp, Homo sapiens
gtatcaaaatatctcatatatgccataaatatatacaactactatgtaccmagaaaagttgaaaatttaaaattaaaaaaaaattgcatgcttgaaagagaaaaaaacactgtatgtaaagagaaagttcattaagtggcagttattatgactgataattgtactatgcatgcgataaggtgaggtggtcatagtatcgactgtatggaagtgaaaagaaccaatacctttagagagtttgctgtgtttggtcaccacataatttataggcattattttatgaaattctcaccaaactataatgttgtcattttatttcccattttatagatgtggaaaatgggggtaagttaatttgctcaaagcagagtcagggcttgaatgtagatctgttggatttcaaagtctgagaaacaaactctatatctgaaattgaattgcttctccttgtttttaaatttctttgaaaataaatgacacagatgatgtctgaacttagatatctctttttcttatagccaggtttcttcattttctgttgcatcaagttaatagattttgaggttgaaagc

SEQ ID NO: 417452 - DNA, 572 bp, Homo sapiens
gtatcaaaatatctcatatatgccataaatatatacaactactatgtaccaagaaaagttgaaaatttaaaattaaaaaaaaattgcatgcttgaaagagaaaaaaacactgtatgtaaagagaaagttcattaagtggcagttattatgactgataattgtactatgcatgcgataaggtgaggtggtcatagtatcgactgtatggaagtgaaaagaaccaatacctttagagagtttgctgtgtttggtcaccacataatttataggcattattttatgaaattctcaccaaactataatgttgtcrttttatttcccattttatagatgtggaaaatgggggtaagttaatttgctcaaagcagagtcagggcttgaatgtagatctgttggatttcaaagtctgagaaacaaactctatatctgaaattgaattgcttctccttgtttttaaatttctttgaaaataaatgacacagatgatgtctgaacttagatatctctttttcttatagccaggtttcttcattttctgttgcatcaagttaatagattttgaggttgaaagc

SEQ ID NO: 417453 - DNA, 557 bp, Homo sapiens
  misc_feature (1)...(557): n = A,T,C or G
ggcattctaattcatttacagatattttccccaaattctacctcccttatcatattacatcattggaaagcatataactaaactagtgttctcaaccttcgaygtgtatcagaagtatttgggaaacttttttaaaatgtgaatttcctgaagcttgactctgtctaaatgaaacaaaatattttctgatgaagacgtatcttagacatttctctattatgaatacataagtgtagctatgtattatccttttaatctccctatgtcttttattgaaaattcactattctatgtacaattccattataacacaggctgtttcataccttccaaggtatgacaaataatctgataaataaatttgttctactatgctagagatagagagaaagctgtgttgaatacacatttaatttatgaaagcattctgaaaacaatgtctccacctttgttgcctaactggaaaaagtgactaacgttgtanatttgggtgaaatacaaaggttgatgttatgacacttactagagcagatatctgggaacaggtagagaccttg

SEQ ID NO: 417454 - DNA, 590 bp, Homo sapiens
ttaatgttaaaaaactttcaatgttataaactttagattataacaatagttttttagtgtcatgcttaagaaatctaagaagcagagtacggactgggaaagcattttgataccagcaggtttatcaaaaggccttttgcctactactttatatagtaagatgcaagcaaagtatattcaagggaagtctttcaaggtatttaaattactttgggaattttaatcatagtcagtaaggcttcctcaatttgtcataagaacaagggaacatcctagttagtgaatagtctaaattaaatagttttaaagaaatactatcattgctgttaagcatgagacattttttagtataagatattaaaaagtatgaataaaaaattgcaaaaatactcccagcattctcccagcaaaggtattcctaaaataacaaaaacaaacaaacacacgaaacatgcttactatcagraatagaaaacaaatgccaaattcatcagacagataattacttggagaaaattggcaatacaacaccaaaagagctttttcattcatttctttttaaagtttaaattatgaactgtgatatttta

SEQ ID NO: 417455 - DNA, 579 bp, Homo sapiens
ttgagaagtttcagccatttcaaaacatgtcttttcttttccagtgacccttctgcactctcctgttaagattctgaaataaggaagttaacaggcttagagatcccactgtttcctatttctgtttccagtaatagctctcagggctactttgtcaccaagatccgtagaattgaatgcgattgcagcaaaaggtactatgagtagaaaataaattccttatgtcgaaaagagaaaaatgtgtgggtgctttaggaataagactgtagacaatcatgtgcttttcaacagcatactacaaaggggtggccaaactgacagatgattagaygattgacataatttttggaaataacaaagcggaattttctgatttattatggcttttatgcattttctttttaaactcttggttataacatttaccaaaaatttgtgtgtccaacctattctgatgtgttttgtcagcaaaatttcatgaagtaatgtgaactcatataaagtctatttaccttgtagtttctcccaggaaataaaagtatggcttaagtcatggccagtgatttttacatttaaaaa

SEQ ID NO: 417456 - DNA, 598 bp, Homo sapiens
actcacttgtttgttgaatgaatgatatttttcatccttgaatgattccttcacttcaatctgctatggaaaaaaatatgagtgaacaaaggactttaaacattacatctctcaaacaaactatttaaaatmttttcggaagttcaaaaacattttaaagcattttaatttgttttgttctttctatagtttatgccaaagacatgatgttgcctgcctctgcttgcttacaggtagaagcaacctgaatccctctaatggaggagatttcacctctcatgccaggagaggtgaaagcaagcatgagatgtcatttcccgtaccagattgcacttcttgtcacggtcctctttgggaataggatggcagttcagctccaactttctacttgctacagtagcaataatgaaagagaagaatgccctgacagtttgtgggtgggtggactccaccagaccttaagaactcacagtgttctcttccacttgagcccaattgtgtctgaacctcttttgttctcaagagcagctgtctttctattggtaaaagatagtcaacatatcaatacttattaaaccatagaggcttgacagtcact

SEQ ID NO: 417457 - DNA, 598 bp, Homo sapiens
actcacttgtttgttgaatgaatgatatttttcatccttgaatgattccttcacttcaatctgctatggaaaaaaatatgagtgaacaaaggactttaaacattacatctctcaaacaaactatttaaaatattttyggaagttcaaaaacattttaaagcattttaatttgttttgttctttctatagtttatgccaaagacatgatgttgcctgcctctgcttgcttacaggtagaagcaacctgaatccctctaatggaggagatttcacctctcatgccaggagaggtgaaagcaagcatgagatgtcatttcccgtaccagattgcacttcttgtcacggtcctctttgggaataggatggcagttcagctccaactttctacttgctacagtagcaataatgaaagagaagaatgccctgacagtttgtgggtgggtggactccaccagaccttaagaactcacagtgttctcttccacttgagcccaattgtgtctgaacctcttttgttctcaagagcagctgtctttctattggtaaaagatagtcaacatatcaatacttattaaaccatagaggcttgacagtcact

SEQ ID NO: 417458 - DNA, 595 bp, Homo sapiens
ggagttgaatctctcacatgcctataatgttagtgagtgggaggctgggactttcctcttcctataaggactaatttcatagatataaaagacagtggctctgcaagcactctgcctggaaatgtgtaattatttttgccgtcatyactatatttgcttggaaagaaggctgaaccaaagagcttaaataacttgacaaaatctctgttgatgaaaacagttgccacatatctctgaaataggcacaaacacattggagacctcatcttactaactcactgttgctcaaaattgtttaatacaatcagaataatatgacagctgcatcactcatcaaagaatttaaaagtgaagaaaagacaaataagcaaaataggattaaatagtgaaaaaaagcatatagtaatatgtaatttaaaacaccgagaagggggtgtgtagctggcatgttttcatgtatatgatagtgttgttggaggagttacctaatgacagtttttagcaaattcctataggcagattttgacacaggaaaataggacattcaatttactgtctgaaacatccagttgttatcaaaatgttttggttttat

SEQ ID NO: 417459 - DNA, 595 bp, Homo sapiens
ggagttgaatctctcacatgcctataatgttagtgagtgggaggctgggactttcctcttcctataaggactaatttcatagatataaaagacagtggctctgcaagcactctgcctggaaatgtgtaattatttttgccgtcattactatatttgctyggaaagaaggctgaaccaaagagcttaaataacttgacaaaatctctgttgatgaaaacagttgccacatatctctgaaataggcacaaacacattggagacctcatcttactaactcactgttgctcaaaattgtttaatacaatcagaataatatgacagctgcatcactcatcaaagaatttaaaagtgaagaaaagacaaataagcaaaataggattaaatagtgaaaaaaagcatatagtaatatgtaatttaaaacaccgagaagggggtgtgtagctggcatgttttcatgtatatgatagtgttgttggaggagttacctaatgacagtttttagcaaattcctataggcagattttgacacaggaaaataggacattcaatttactgtctgaaacatccagttgttatcaaaatgttttggttttat

SEQ ID NO: 417460 - DNA, 595 bp, Homo sapiens
ggagttgaatctctcacatgcctataatgttagtgagtgggaggctgggactttcctcttcctataaggactaatttcatagatataaaagacagtggctctgcaagcactctgcctggaaatgtgtaattatttttgccgtcattactatatttgcttggaaagaaggctgaaccaaagagcttaaataacttgacaaaatctctgttgatgaaaacagttgccacatatctctgaaataggcacaaacacattggagacctcatcttactaactcactgttgctcaaaattgtttaatacaatcagaataatatgacagctgcatcactcatcaaagaatttaaaagtgaagaaaagacaaataagcaaaataggattaaatagtgaaaaaaagcatatagwaatatgtaatttaaaacaccgagaagggggtgtgtagctggcatgttttcatgtatatgatagtgttgttggaggagttacctaatgacagtttttagcaaattcctataggcagattttgacacaggaaaataggacattcaatttactgtctgaaacatccagttgttatcaaaatgttttggttttat

SEQ ID NO: 417461 - DNA, 530 bp, Homo sapiens
ccgctggctcaacatgtcttcatactgttggcatccatgacttagaacactagggaagacccagtggcacaagcagtaggtaattgtctcatagagagaggattagttgaatgtcttctggtatttaagttacaaaagattacatttgtaggaaaggacttttcatagtgtgattttgattatgagtaattataaaagaataataaatataatatcgaataccaattagttaattctgattgaatcagtaatactaatagttaccattatgtctcaggcattctcctaagtacttcacacttattaacttgtttagtcttcacaaaaacccatactcatttagagataaggaaattaaracacagagagattaggttacctgtccaagttcactccagcaggaaagtagtaaaggcatacttcaagtctagtcagtctggcccaagagtgtgcaaaattttctgtttatagcttagtattcagcactgagctagatacagatgaaaaactaggatggaggaggagccaag

SEQ ID NO: 417462 - DNA, 511 bp, Homo sapiens
gaacgctattcctgcttcctaggatgattttgaaatgctaaaatgagacattgtgatcctgtaatctgctaaatgttttatgtatccatattactgatctaaaatttaataagaaaataatgcactttgctaactctgtgagggaaacataccataacagtaatctggctcatagagaattctgttatctacctatatttcaattatgataaaatttttatcaggtcaaaataatttttcatcataaatgttcagttttgtttttctctagcaattatttttaaaacttcaaaygaacaatatggataaacaaagagaattaatcctattccattctataggggactgggaggcaattggcagtcctaagtattagttaacatttaaatttcaaatatgacaaaagactatttgaaaaaagaaatacagtcttttaaaaagattgtatcagaataaacctttttgcttaaaggttatctagtgtttgttttctttgccaatactttacaca

SEQ ID NO: 417463 - DNA, 633 bp, Homo sapiens
gaccttgaaatcattatactaagtgaaacaagccagtcatacaagagcacatattgcatgattctacctatgtgaaatgtccagaataggcaaatccatagagacaataagcaactcagtgattgccagggtttgggaggtgagggagcgttaggaagtgattccttaactggtaagggttttctttttgggttgatggagatgttttggaactaggtgaaggtgatggttacacaacattgcaaatgtactaaatgccaacaaatgcatctctaaaatggttagttatatgttacataagatttacctcaaaagaaaacaaagccaacaaaaaaaaattctgcaaaaaaaaagaaagaaaagaaaagaaaaaagaaacctayggcgaaatttatttcaactccaaatgcctgcaaagatgtaacttgaagatatactgtgaccacagccaagtcatttaaatgtactttcttctcccatctcaaaaaaagattttaataaacataatactttgaaaatttttatgtaagaaactgacaaaaataagaccccccccaccccccaccaagatgctagtttagtgccttgctacacaaagtggaatcacctgggagcaggtgagaattgcagaaa

SEQ ID NO: 417464 - DNA, 467 bp, Homo sapiens
aaatgttaaatttttatagtaattttccagcacacaagaaaaagccacatttttagtacatgcatggtggcatgtacattttgcaccagcaatggttgcaattgtatcacttcttcctagcaaacagctgcgtcattcytcacaagatcttaatcaccaacccaagtgccttaatcatccgaaatatttttggaccagtaaactgagtatttctacacctggtatcttttttatttttgcctgatcaataggctgtgaagctgcagttcataagtttgttgcagataataccaagttttcagtggtaaagatgtctgcagattttcaaaaatgtaaatataaaactccaagtagaaaatggactatggatcagccatctgtataactagctataaaccagtatttcacttaattagttaccctcaatttcctcatcaataagcatggctatgagcatttgtaatttt

SEQ ID NO: 417465 - DNA, 569 bp, Homo sapiens
cttaattgataatattgatagcataaggctggtagtacctacttcctcatgttgttatgaaaattaaaattgacagtttgtgaaatgcactggatatatccttgtaatgcactcatatgttcattgcactaactccgtggtcctaagtgggctgtatactttcatgaagctcctgattctgtgtaagaagtatgggtgaaaattgctaggtgttcttaaaagcttagacaggaaaagagaagaaagatttcttctgacttataaagtataacacaagactgattgggtcagatcaaccatatgcaaattcacctaaaagaggtttgttttaaggaaaatataaatttagcttacattgtgttatgtcactaaagctagaggaaaatgacataccattggagtgttgtcaattatggaattacagatacaggagagtcttgggacaaaactcataaatatccatccaaaatatttatcaggagagaagaatcattctaagagtgctagacactaagaataaagatatatatrtatattccataaatatcacagctttaagatggtaatac

SEQ ID NO: 417466 - DNA, 624 bp, Homo sapiens
tgcatagttgtgaagtctaggcttttaatgtaaccatcacttgaatggtgaacattgcatccaataggtaatttttcatccctcactcctccttcccaacccaatccttctcagtctctaatgcccatgattctacactctatgtcttcctgtacacattatttaggtcgcacttataagtgagaatttatggtatttgactttctgtttctgtgttatttcacttaygagaatggctttcagttcaagccatgttgcatcaaaagacacaatttatttatttatttttgtcccagaatttattcttgaggattttcttgatatcagtgggtggagcatgaattaagaacactaccaaaattatgtgtaattttctttatccaatcattttctttatccaatcgcattttctttctccagtcatctgttggacacttaggttgattccatatctttgctattgtgaatagtgttacaataaacatatgagtgcagatgtctttttgacagggtggtttcttgtccctttaatgcactctatttgtgtaggaccaagaatcaagatgttcctgtaagtcaagagcattttttcgtgttccccctcagtcaccaagtaagctgtgt

SEQ ID NO: 417467 - DNA, 500 bp, Homo sapiens
gctcttcgagtccctgtttgagattatttgcaaatctccttattctttttctaaaagtaaatgagcaggtgacagatagaacatgctgtagcttcccataaaagatttttgcaacatttaatggagaatggcccagcatctcatgaaggagaytctcaaacaaaacacaatctggcgaacagattccatgggcttagcttagagggatgcctttaaaccctcgtgctttgcaactgctcttacctaaggttgcttgttgtctgtgactagctctttaactttaaagctttattaagaaagtggcctctgtgactcttgagtttatgagcgtttagtctcctttggttccctgctggccatgatgcactgggaaaaatgttcaggaaaataaatatccactcttctgcagaatggaatcatctcttcgaggtcagatttttctgagtttttgttatttaggagaaatgctgaatatgtaatactagcacacttaaaaaagt

SEQ ID NO: 417468 - DNA, 407 bp, Homo sapiens
accctcacagacacacccaggaacaatactttgcatccttcaatccaatcaagttgacacacagtattaaccatcacatccccaatatcaggttatgtatgggggaaagatattggacctcatgcatggagaggttgaagattcactggatacactagagggaacataatatatgaagtgagcttcctggggatatcagaacaaaaggtgttggaagatggttggagatgtgcacaggggagtgtgattgttcctaratagacagaaagtaacaccaggcaagatgcagagaccaattgaaatacaaaacagtattggaagtggaaggtattcctgtatggtggcatctgttttccctgtgacacagaagagatttttttcaggaaatactaaaagttttcaattgt

SEQ ID NO: 417469 - DNA, 565 bp, Homo sapiens
gactctgtatgtatataacttcaaagtctgctcctttttattgttccatattctttccccagctgccaatgaccagacattgtcgagaatctaataacagtaagggaagaatgaggaagaggctgcacctgtggaatctgaagaggygtgaaagagatggaaagataccaaaacaaactcacttgacaaggttgctgctggggtttgcatgtttgtcctctccaaacatgttgaaatgtaatccctaatgtcagaagtagggtggaatgggaggtgtggagtcatggaggtggatccctggtgaatagattaatacctcagagggtgtgagtaaattctttattagttcctgcaagtgctggttgttaaaaaggacctggtaccgccccatctctttctctctctctctctctctctctctctctctctctctctctcttgctttctctctcctatgtgatctctaagcagatgctcagccttgaactttccagccatcagaatcatgagccaaatacaaccttgttttttaataaaattacccagcctcaagtattcctttata

SEQ ID NO: 417470 - DNA, 613 bp, Homo sapiens
catcattatttttgcttcaattttactcattgctgtctcaaacaacattgatcaaaaacattgatttttttccctcaaggaagatcaaattygataattttaaatgcagaaagattccatgttgcaaaggatttaagcttgtatatggaacataagtacaatcttttttattttgatgacctttcctgaagtttcttatgaattttgcaattttttgtgagcattaactaaatgctatttactgataggaaaactggttgtttctcagttcataactcacctatcagagttagtgccctttctataaaaggaatatctttttataaataagtggcaactcttagcaccaatgtatgcagctgtattctaacatgctatggtttacatgtcttccgcaaaattcatatgttgaaccttgatccccattgtggcaatgttgggaggtggggctcatgggaattgcaggagtgggtttcttagaaaagaaagagtttagttcccacttgccctctctcttgccaagtgatgccttttgtcatgtcatggtataggaagaaggttcttgcaagatgccaatattttgatctaggtctttccaacctctagaatcata

SEQ ID NO: 417471 - DNA, 558 bp, Homo sapiens
ctattagattatgaggttagaaccctcaagatggaattagtacccttataaaaaaaagcttttcacttgaggccaggagtttgagacaagcctgggcaacatagtgagatcccatgtttgcaaaaaaattttaaaaattaactgggcatgttcttgtatgcttgtagtcctagctagttgggtggctaaggccagaggactgcktgagtccagagttcgaggctgcagtgagctactattgtaccactttgctccagagtttttcagagatcaatagcttttctctataaacgagaacaacaagaacaacaagaaaagctttgagaagagttgaatgcttttactcttcatgctcgtgatgaacaaccataagatatgtttctgcaaaccagtaagagatccctaaccagatgttggatctactggtaacttgatcttgacttcccagcctctagaaatgagagacatacattggtttaagtcatgcagtttatggtacatttgttatggcagcccaagatggctaagacattgccagaaacaatactattaggaaga

SEQ ID NO: 417472 - DNA, 521 bp, Homo sapiens
tctcagcttccataattgcatgagccaatacttaaactaaatctctttctatccatctgttgttctactattctatcattatgtcattctatctgtcaattgttctagccatccacagttctattcatctgcccatctacctctccacccttgcaccccactgaagcctccaggtcccttttcctgcaaaattatatctcctctggatgtctggtaatttccttgtgctgttgtttagtttggctgttgactttcaaatttctcttgtctcttttagaaatggcgaccattaaatgaataaagtgtcttatttcaaagagaacaggtggacatttgtggattctgcataatgtatgaggaaggaggtcaggcatgagacttgtgttctgcaaatgcttctgaggatgtttcttaatgycaccatctgattattcaaggtcaccatattgtcctctgattatatgaagacttattggctgcaaatgtaatgaagaccaatgccacctgtctattgaccctgt

SEQ ID NO: 417473 - DNA, 560 bp, Homo sapiens
gagctctcagcatttccataagcaaactgttgctgttggctcaaagcctgcatggtaggattgcctatcaataagatagcattgggcttatggaaacccacaaatatcttttaggatttgagacagtcctggctatgagctgcctctcgaaaatggccccattgagattagatcatactgaatgctcttggtggagaataagaagctggtgggttatcagaggaggaacttactttgatttacactcaaggaaacctgaaaagctgctggagtgtacagctgttagtctccaccgtggctggcttaggcagttccagtttgtgctcatctccctggctatcttgacagtttccagagaagtgcatcctttaatttttacagtgttgtatctggctacagcaycttatcaatccaaacaccttgggcaggtgtttttgttgtaaagtcaatccgtacttgtgacccagtgacatgtcatacataggaggcaactcactacatgggaaggggcagattgtgttgcaaagatcagttgagattattttcccaaaagagaaata

SEQ ID NO: 417474 - DNA, 531 bp, Homo sapiens
cctgtctgagtccacaacagcatctgggagagaggtacttattttgctggagcacactcaggaagactgcctcaaatgatgttcccaagaggctcgaagtacactgtcaactgcatgtcatgagatgcttcccyggtgaaggatgagttcctcggggtattaaatttaaaaggtgaatccagggataaaaatggaaagaaatattattggagattgtgtcttggctaggggtataaatataacttttagccatggagaaacatgacgctttgtgtgtagaaatgatcagatctttatactaaatctgaaaattaaaactgtgccccgttctatttcccctgcctcttcagcctcaacagcacgagaagaaacatctttagatacaatcctgataaccccacgtctactccccttccaccatccacttgccaaatataccatccatctcttcctatgttccactgtatcaggatctaatgaatattgaatattgtattattacaataaagtatgctagagaaaaaaaaatgt

SEQ ID NO: 417475 - DNA, 599 bp, Homo sapiens
catataatgtggaatatctcttcatatgcttgtttgccatctatacatcttctttggtgctgtatcttaaagtttttgacccacttaaaattgcttatcttcttactgttgagtcctgagttttttgcatatttcgaataacagtcttttatctgctatgccttttggaaatattttctccctgtctgtggcttgtcttctcattctcttgacagtgtcttttgcagagtataaaatttttaattttcatgaagtccagcttgccaattcttcctttgctggataatgctttggtgatgcaactaaaaatcattrccaaattaaaaaggcatctagattttcccctgtgttattttcgaggtgttttatagttttgcatctggcattaaggtctgcaactcattctgagttcacttttgtgaaggatgtaaagtctatgtcaaggttcttttttttaagatgtaaatgttcagttgttccagcatcatttgtggaaaaggcttttaaaaaaatatatttgtcacattccaattcaatcagttttaaaaaattgttttaatttaaaattcagaataatgtttaaagctttatgttggaca

SEQ ID NO: 417476 - DNA, 634 bp, Homo sapiens
tttaacctcctgtcatctcctacttgkttagaagaagtttctcatgcttcagaaccagagatagactggagacctgtgcttagcttcctgattttagaccctaaggaactgtttgcccttctgatattaaaccagcaaaatcacaagaagaaagaagaaagaatgtagtgattttctttcaaagataaggagtatgacatggacattccccttgacttcaattttccaatataactgtaagtctccgtattagctccctggggctgctgaaacaaagtactacaaattacaaactaggtggcatggtcaattgaaatttcttccctcactgttctggagaaatctgaggtcaaggtgtctgcagggttgattctttctcaaggctattagagacacatctattccatgccactcccttagattttggtagttggctgcaagtcttttgtgtctgttgacttgtaaatgcatcattctgatctctgccttcatcttcacatgatattcttatgtgcatgtctgtgactaaatttctctcttttataagaatgccagtcatattgggatatagtgacccactctactcctatatgacttcatcttaactaatttcatctacaatcaccctatttcc

SEQ ID NO: 417477 - DNA, 634 bp, Homo sapiens
tttaacctcctgtcatctcctacttggttagaagaagtttctcatgcttcagaaccagagatagactggagacctgtgcttagcttcctgattttagaccctaaggaactgtttgcccttctgatattaaaccagcaaaatcacaagaagaaagaagaaagaatgtagtgattttctttcaaagataaggagtatgacatggacattccccttgacttcaattttccaatataactgtaagtctccgtattagctccctggggctgctgaaacaaagtactacaaattacaaactaggtggcrtggtcaattgaaatttcttccctcactgttctggagaaatctgaggtcaaggtgtctgcagggttgattctttctcaaggctattagagacacatctattccatgccactcccttagattttggtagttggctgcaagtcttttgtgtctgttgacttgtaaatgcatcattctgatctctgccttcatcttcacatgatattcttatgtgcatgtctgtgactaaatttctctcttttataagaatgccagtcatattgggatatagtgacccactctactcctatatgacttcatcttaactaatttcatctacaatcaccctatttcc

SEQ ID NO: 417478 - DNA, 548 bp, Homo sapiens
gggtgtgctgcaagaatgcaggatccaaaataaatgagctcccggcaccgaataaagctgtagtgatttgaccaataaaatgaataaagtagcatggatcttcttcagggaatgaaatagacatccataaaccaatatgaacattaacagataatgaaataaagaaataatgggaagaacacatcttcttacagaagtattccaaatatctcaggtggatagtcctmcaatccagtaggtgaagtttaaacactcatgagttgattgtggcctgagattagagacttggagaaaaataatcactattagtgtattttataatgagaattcagatataacgccaaagacatgatctatggatgaagaaaattttacatgtttttaaatcaaaatttgtacaaacacacacacacacacaggcagatatttttctgcagtacacactgataggggagtaaaagacaaccacagacttggagaaaatgcttccaagtcacaaatttgttaaaagaattcttttaattcgttaaatgacttttataaacaat

SEQ ID NO: 417479 - DNA, 590 bp, Homo sapiens
tcttcttacagaagtattccaaatatctcaggtggatagtcctacaatccagtaggtgaagtttaaacactcatgagttgattgtggcctgagattagagacttggagaaaaataatcactattagtgtattttataatgagaattcagatataacgccaaagacatgatctatggatgaagaaaattttacatgtttttaaatcaaaatttgtacaaacacacacacacacacaggcagatatttttctgcagtacacactgataggggagtaaaagacaaccacagacttggagaaaatgcttccaagtcacaaatttgttaaaagaattcttttaattcgttaaatgacttttataaacaatatgcaagtaaacttacaactaatcaaaacaaaacaatgcagttaaaaatgaaccaaatatcaggaaaggcatatcaccaaaaattatataaaaattgttaaatatgaaatttatattagggacatgtgcatttaaataamaattagataccattactcacctactagaatggttaaagcacacaattctcataaggataaataacaatatgaatgtggaaaacca

SEQ ID NO: 417480 - DNA, 602 bp, Homo sapiens
ctctagaggaaaaattaaaagaagacaaaatgaaattgtgcaagtctagtctatgaccctagcatactttcacatgatgacttcttatggcagaaagaaaaacaaaatcactccgatttttgtgatttccccacagatacagttagaaaagctcctaggatggtgctactcagatagatagatagatagataataggtagatagatagataaatgataggtaggtagatggatggataaatagatgatagatagatagatagatagatagatagatagatagatagatagatgatagatatagattaatacatgatagatagatagatagatagatagatagatagatagatagatagatagacagacagacagayagatagatggatgataaggagatgatagataacagataaatggatgatagatagatagatagatagataataggtagatagataaatatggatagattgagagatgatagatgaatatataatagatggatgataggtagatagatgacagatgatagataatagatagatgaatgataggtagtagacagatgataggtagatggatggatagatagatgataga

SEQ ID NO: 417481 - DNA, 579 bp, Homo sapiens
cctgttgccttgtatttactttcagggacttctgtgtggtattttccactggaaaggtcaggtttatattatatcaaacatcacatgaggattgcctatgcacatttctaccttgcatagggtagctaaagcaggcaaatgtatttttaaaaagacacagctcttgagaaagtcactactatttctgcaaacctctaatgtgtcagatgctttacattctttatctcccctgatggtcacaacactcctccctccctctaatgctaatgaggttagcagttttctaactttacagatgagaacatggacattcagagagtttcagaaacttacctgtagtcacatagctagtaagtttcaaagccaggatttgattcccaagtgtacgttctttccactatcccacactgcttcttttgttttwgaagactctttgatttagctgggaagccagatgcatatgtatatgagacaatcagagagtcattttaaggcaagtagcacagtggttaggagcttgggctctgcagtcaggcagccgggggtcaaattccagctctgctacatcactaggtgatc

SEQ ID NO: 417482 - DNA, 580 bp, Homo sapiens
tgtaagtggccaattgtcatatgaaaagatattcaatatcattaatcagggcaatgcaaattaaaaccaccactttgttccaattatctattgtgtgacaaaccagctccaaatatagtggtttaaaaacaatgacaacatttattttaccaacrtacttgcaaactagtatggccttaggagggacagctcacctctgctccattaggcattagctgaggtcacttaaatgctggggctggaattatctgaaagctcattcactcatttgtctggcagttgatgctagccatcagctaggatgataactggggtcgttagctaaacacttgcacatggcctctccgtatagcctgggattcttctcaacatggccagattccaagagcaagcatcccaagagagagaactaagtaaaaatgctatcaccttttaaaatctagcctcagaagttgaagtcatacatcaacattctatcttattctattcattaaaagcaagtcattaaagctggcccatatttaaggggagaagaagagtgtcaaagaatttgcaaacatgtttatagcaatcacagtct

SEQ ID NO: 417483 - DNA, 580 bp, Homo sapiens
tgtaagtggccaattgtcatatgaaaagatattcaatatcattaatcagggcaatgcaaattaaaaccaccactttgttccaattatctattgtgtgacaaaccagctccaaatatagtggtttaaaaacaatgacaacatttattttaccaacatacttgcaaactagtatggccttaggagggacagctcacctctgctccattaggcattagctgaggycacttaaatgctggggctggaattatctgaaagctcattcactcatttgtctggcagttgatgctagccatcagctaggatgataactggggtcgttagctaaacacttgcacatggcctctccgtatagcctgggattcttctcaacatggccagattccaagagcaagcatcccaagagagagaactaagtaaaaatgctatcaccttttaaaatctagcctcagaagttgaagtcatacatcaacattctatcttattctattcattaaaagcaagtcattaaagctggcccatatttaaggggagaagaagagtgtcaaagaatttgcaaacatgtttatagcaatcacagtct

SEQ ID NO: 417484 - DNA, 622 bp, Homo sapiens
ttggccccttcaggcaaggaaggtctaggggcacgtgatctggtataagatacagatagttcctatgrgctagacttggtcagatctccacagagaaaagggagcttgctggtagtattgccctttgggactgcacagatgacaaacacacacgcaaaatatgtactaaagacaattggcatgggaggtcagtattgacacagggtgacccactcttgtgaggaacacagttcaagacccagaaaaaggcacatctcttccccgttgtcctctaaacagcatctgaaaccgcaagggtttttggcttgtgccaccatctgtgtaaaagacagacagtgtcgtggggtgcagggaggatttgagtggtagaaacactcaggtaagggaaaagacaaactaacttgtcaaatccttcctctcagatagtgtgaatgctacaggtcttttcataataaagtatcatttcccaatagcaccaagtacccattttcttgcttctctttgtattctagtttggttccaaaggtactcaggagatagcacagtatttgctgcagttgcatggggtagaaaaagaatattttgcaataatttatatctctcttaaaattgtatatgtaag

SEQ ID NO: 417485 - DNA, 605 bp, Homo sapiens
gtaagcccattaacaacattcttaacttctcttacagtgtttttgttctccagtattttgtaaatccttcttagaacttccatctctctatccatctgttcttgtatgttgcctactttttctgtcagatccctcagcacattaatagtagttgttttaaatttatggtctaattatgtcaacaatcctgccacatgagggtctggttctgacacttgctgtgtctcttcagatagtgttttgttgggttgttttgggggtggggggggcggttaatggaggggtggggctgggttttttkttgttgttgttgtttgccttttagtatgtattgtaattttttttttagtctggacgtaatatactagatgagaggaattgcagtaaatagacctttagtgatgtagcagtaaggtgttgtgtgggggtggggagtagggggaggattctatagtcctatgattaggtcttagtcttttagtgagcctgtgcctctaggttgtgaacttcacaagtgactctcagtttccccccatattagatgggacagggtggatagaagttgctggagttaggtatttccctttcgccagtttggttagtct

SEQ ID NO: 417486 - DNA, 605 bp, Homo sapiens
gtaagcccattaacaacattcttaacttctcttacagtgtttttgttctccagtattttgtaaatccttcttagaacttccatctctctatccatctgttcttgtatgttgcctactttttctgtcagatccctcagcacattaatagtagttgttttaaatttatggtctaattatgtcaacaatcctgccacatgagggtctggttctgacacttgctgtgtctcttcagatagtgttttgttgggttgttttgggggtggggggggcggttaatggaggggtggggctgggtttttttttgttgttgttgtttgccttttagtatgtattgtaattttttttttagtctggacgtaatatactagatgagaggaattgcagtaaatagacctttagtgatgtagcagtaaggtgttgtgtgggggtggggagtagggggaggattctatagtcctatgattaggtcttagtcttttagtgagcctgtgcctctaggttgtgaacttcacaagtgactctcagtttccccccatattagatgggacagggtggatagargttgctggagttaggtatttccctttcgccagtttggttagtct

SEQ ID NO: 417487 - DNA, 581 bp, Homo sapiens
actaaaaatattttgtgtttagttaacatcgtgcaaatgttgaaagaggtagtagcatttatcattttgtaggtatttatcaaggtactcaaaaaagtccctataggaaggaggaggtttttgtcttatttccattctgacataaactgaggaacagagatgttatgtaaccaaatagtccaagtaagttagtgagagagctctatttatgtgaccaaacattttctaaaactggaataatwggaaaaatcaagtccaaatttaagcagatgctttaggcttaatattatatgatagccagaagttgtatttacatggaccaaatactttgggaggctaatctgtgggaattaattttatagtgaactccatatggggcccaagatacagttttcttttcctccatccatccattcaataagtatttattcattatctattataggtcctccacttccctttgccattgaacatgatccctatggacctttaataagtaattgttgaaatgtaactaaaatatgtatattttctccttgctccaagaaactcaaggaacattattatgaaagagttaaaaa

SEQ ID NO: 417488 - DNA, 494 bp, Homo sapiens
acggtttaaaaggattttaaagaagttttgttttatatgtgttctttctsttctgttttatgaaatcttcagaaaaatctttattccctcttaatgttattgtaaagtatttacttaccagttatagaagtagattttttctctcatttgcttactaaggtattatttaaaacaatactatttattttaagtgcgcagtttggtgaatgtagttgttatataattgtgcaaccatcaccacaagtgaaagagtacttcactctaaaaagttttctcctgcccctttccaccccatacccttccctaaccatggcccgaggtcaccgctgattccctttgtcactataatttgcctttttgagaatttcatgtaaatggggcgtatagtacataaccttagcacagggtttctctgtcttttaactactgacatcttctctatgttttcctctcttctacatcattgatttttacatttgcatttattgtgtcct

SEQ ID NO: 417489 - DNA, 467 bp, Homo sapiens
gcaggtatatcagcttctccacgtctctgtgcccttgtctgtagaatagagataataatggtgtcratatcatggtcttgttgcaagaattaaatataatgaaaactgtaaaggtcttggcacaattcctggcccatctgtattattattactattattaaaataaatgaatgcagataaacacaaataaagatatatatatatttgtatatatacacacattagggtatgaaaaataattttaaacatagaaattctcatggttaatatgtattaaaatgttgaatatcagtagtaaaagatatgcagtttaatactcctaatttttcctaccaagttagtaaagttcaaaaactgatggcacaatttaaattgctgcctcactgttagcaaggatgaagtaaaagagacatttctatatggtcctgctagaattataaattggtgcaacctctttacaattctgt

SEQ ID NO: 417490 - DNA, 531 bp, Homo sapiens
cggcattaacataaagtgtttcccaataccactgcccatgctgagcaaacatgcttccccacctattgctctcttggatcaaaagcctatatttcattcattgttcattattctctcacatagttatgtcttatttcagagggtcagttgaagtcctttcattatgggccaaattgtttctttaaaaaattttttggaagccattggaattagcatgtaatccagttttgaatgaaaaactgaaataacrtctaagttccagtttctaattcaggtccacgtgagatgcctacttaaaaaattatcctcatttttaaaggtattatacaaagtagttacagtgaagtccttgaccgagaagcctcccacgtagaacagtgatttttaaccactattattgcttctatgctctaagtataacagatactcctccttcttgatgtttccatgtcctctagggaagggcatcttggaaatcccaggattactaggaaactggagtagggcgtatccggtcatctaataatggtg

SEQ ID NO: 417491 - DNA, 531 bp, Homo sapiens
cggcattaacataaagtgtttcccaataccactgcccatgctgagcaaacatgcttccccacctattgctctcttggatcaaaagcctatatttcattcattgttcattattctctcacatagttatgtcttatttcagagggtcagttgaagtcctttcattatgggccaaattgtttctttaaaaaattttttggaagccattggaattagcatgtaatccagttttgaatgaaaaactgaaataacgtctaagttccagtttctaattcaggtccacgtgagaygcctacttaaaaaattatcctcatttttaaaggtattatacaaagtagttacagtgaagtccttgaccgagaagcctcccacgtagaacagtgatttttaaccactattattgcttctatgctctaagtataacagatactcctccttcttgatgtttccatgtcctctagggaagggcatcttggaaatcccaggattactaggaaactggagtagggcgtatccggtcatctaataatggtg

SEQ ID NO: 417492 - DNA, 513 bp, Homo sapiens
ctgtcttcaacatcccacccaagtattattaaataataataatcagtttgagtatttgtccctgagccaagacagtggagaagcactcctctattgaattcaaataggaatgtatctatttttttaaaaaaaggagaggataataactctgtatacttttaatgaagaaccattgatacaatatatatgaaagcaaagatactttgaagaattacacatagatttttattatcacttaattgacaattataatccatgtatttcttttgctacattatctccaattaaactgaaaagatttcagaatgatagttaatttgtgaattaygctgaattatacctctttgtttcctatgagcctttttcatactgccttatattgtggggttctcagtttgtatttgttgactcgtcataggaaacctttaaatgtgtttggtggcaaaatatcttggaacttaatattaaggaaaatgtgaaggaaaactttgactttatctgtcactactataa

SEQ ID NO: 417493 - DNA, 483 bp, Homo sapiens
acatggattcaaaattccaagcccaatgtcttttatataactaatgatgtgatttgactttgaatgcaatttagactacaaatttaattctctactaatcattagtcttcatttaaaatattctaattgtgcctgggagagaaacaggacataactgctttttttctttttcacgtacacacacgtgtacacacacacacacacacaatgcytaaaaattcctattcataaagggggagaatggaagacacacagtagatctctgctcattgcaattctgaaatctgactggcaagacattgtcaaggtctccaaccttgagcatgggatggatgtgtattaaactgtcttaagctctatttcatttcctgtattaagccctaattcattttcctgtattaagctctaattcatttccctagaaggaattatttcatccatttttcttcatggctcctcgatccaccacccatttgtaaactc

SEQ ID NO: 417494 - DNA, 560 bp, Homo sapiens
tcagaagcaagaaatgtactcaatccagctgtaagaatttggagtcattctgtgtttcccaaaaggagaatttgatgaacatctaggcattatgtggaatattatctcctgctgttattttttttttcaaatatatgaaaaggatctcaatatatagtgtgacaaatgcttattaaagattatctaattaattaaagagaccatccatcttcacctstcaccaaccgtctttgaaataatatcactcttccaatttcctaaaaataaaacaacttttccattattcctagtgacatcaattttcattttgtgtactgctctctttcagcatatcattgtgaacacttacttggccttattgcttaacaaattctcttgcatttggggaaagaagatttcaccttactttcttctgtaaaacttcagagtttgcaagtgggtaattcctaggaaaaatgtatgcctgtttaaggatagattccttaaccccttgctcctttttcttcattacagggaataaataattttatagtaacagtaatcatcaactgttttgattt

SEQ ID NO: 417495 - DNA, 376 bp, Homo sapiens
tgtaatgtttagttaatatgttcaaaacaaagcacatagtggcactatttcttgtttcctttttcttatgagactcatgggactattaatgaattccaacagagctattataaactggatcttataaatgcattatgtttgaagttctgtgcaaatatcacaaatgtgaagcagagaaaacattttaaaatattattctaatatttcaataggcggagcaatttttaaatactctgagaaagagcatgtttcctccatgattttaaatgtrtagtggaaagctgtgcttccccattaggccaagaaagcataaaatactccgtttggaaacaaaaccatcacagatactcttctttcctatctgacagagagacac

SEQ ID NO: 417496 - DNA, 614 bp, Homo sapiens
agtgtggctgattcatgaacacttaagcaggtttccactttccttgggggtccaggcacatgttaaatggttttgtatcattatggactaatccttagtaatagaacatgatcccagaacagctgcttaaatgacttggcctcctggtacacatttcaatttttttagaaccataaatctacaatcatttgtagcaaacattctctccactcacaccagatgtgggtggaggaataggatggggatgaagaaagtaaaggtagataaaataattgtgtatttttggtcttttgtacaacttggatttccaaattccatgttcaatgtatcttaccatccccccttggtgtcatgagttgaggtagaaatttctatctgaatgtcatagcttaccttttattttacaaagtacagtgatattgtgttatataaccttacacatttctcagtgtgtgcttktataatagatacaaatatgttgagtatatatatatgtatacattacagctacaaatacacatttggagctagaatgtccattaaatacataaatgtttaaaatgtttatacatgtgtgtgtgcctatctatctatctatctatctatctatctat

SEQ ID NO: 417497 - DNA, 614 bp, Homo sapiens
agtgtggctgattcatgaacacttaagcaggtttccactttccttgggggtccaggcacatgttaaatggttttgtatcattatggactaatccttagtaatagaacatgatcccagaacagctgcttaaatgacttggcctcctggtacacatttcaatttttttagaaccataaatctacaatcatttgtagcaaacattctctccactcacaccagatgtgggtggaggaataggatggggatgaagaaagtaaaggtagataaaataattgtgtatttttggtcttttgtacaacttggatttccaaattccatgttcaatgtatcttaccatccccccttggtgtcatgagttgaggtagaaatttctatctgaatgtcatagcttaccttttattttacaaagtacagtgatattgtgttatataaccttacacatttctcagtgtgtgcttgtataatagatacaaatatgttgagtatatatatatgtatacattacarctacaaatacacatttggagctagaatgtccattaaatacataaatgtttaaaatgtttatacatgtgtgtgtgcctatctatctatctatctatctatctatctat

SEQ ID NO: 417498 - DNA, 611 bp, Homo sapiens
aaggtggttaaaagaaacacgaaataaccactaaaatagtctgygctttaaatacaataatgtctgtcttatataaacattgctgtacaggaaaaagagcattttacagaatagatatactttaaaaattaactttataacttaattatttatgtaaatctatatagaacgagagtccagactaggaaaaaatagataattcacattaagaatgtggaatttgaaggtattgatggatagaatatttctgttcaaatttataactgttgaatatgattctaaatgaactattctaaatgaagtacaaatgaaaagagagacattgtcatttctgtgaatgagaaaattagatgaaaaaataaaactttttttttttttagccaagtaatagtctaccagccacgatgtagttttggttttaattgttgtgtcctagtaatatagacatttatctcatttacaagatttacagtgaaggtgttagacaagcgcatggcaatttgttttagttaaatttgtgcattcatttaatttctctattcttgttttcaaagataataagtgttatgggttgaactgtgtctgcaaaaattcatacggtgaagtgcgaa

SEQ ID NO: 417499 - DNA, 611 bp, Homo sapiens
aaggtggttaaaagaaacacgaaataaccactaaaatagtctgcgctttaaatacaataatgtctgtcttatataaacattgctgtacaggaaaaagagcattttacagaatagatatactttaaaaattaactttataacttaattatttatgtaaatctatatagaacgagagtccagactaggaaaaaatagataattcacattaagaatgtggaatttgaaggtattgatggatagaatatttctgttcaaatttataactgttgaatatgattctaaatgaacwattctaaatgaagtacaaatgaaaagagagacattgtcatttctgtgaatgagaaaattagatgaaaaaataaaactttttttttttttagccaagtaatagtctaccagccacgatgtagttttggttttaattgttgtgtcctagtaatatagacatttatctcatttacaagatttacagtgaaggtgttagacaagcgcatggcaatttgttttagttaaatttgtgcattcatttaatttctctattcttgttttcaaagataataagtgttatgggttgaactgtgtctgcaaaaattcatacggtgaagtgcgaa

SEQ ID NO: 417500 - DNA, 603 bp, Homo sapiens
agaacagaagccagaggtgctttggggtaatgataggagtaggaaaagagttcatgagttgtcagtgaagatgataagatgaacaattaaagaaaacatgaataaccttggtttgtttcaaaatttttgccaacataagtactgtaaataaatattaatattaattcatacatctttcaaaaatgtatattatgtgttgtagtctttaattctctggtataggtgagtgaaaatggcaattattgtaaattattagtgcttrtttatcaaatgtatacagctctcagaagtgcttttttagatacacatttcttccctgaaaatctttcaatttgaaataaatatttatgattctttccaatcttttatatgactttctataaactcccctgtgatatttcaccacttacttagcaataaatgaattgcccaactttatttaagaccaagttgataacataatctaaccaatacatgttgtgacaattttaagacttaaattatttaagtgaaagtaacaaaagcaaagagctagagaaaattctaattagggaaaatgagtgcctgcaattaaaggtgagctctccattctccatcatctaa

SEQ ID NO: 417501 - DNA, 603 bp, Homo sapiens
agaacagaagccagaggtgctttggggtaatgataggagtaggaaaagagttcatgagttgtcagtgaagatgataagatgaacaattaaagaaaacatgaataaccttggtttgtttcaaaatttttgccaacataagtactgtaaataaatattaatattaattcatacatctttcaaaaatgtatattatgtgttgtagtctttaattctctggtataggtgagtgaaaatggcaattattgtaaattattagtgcttatttatcaaatgtatacagctctcagaagtgcttttttagatacacatttcttccctgaaaatctttcaatttgaaataaatatttatgattctttccaatcttttatatgactttctataaactcccctgtgatatttcaccacttacttagcaataaatgaattgcccaactttatttaagaccaagttgataacataatytaaccaatacatgttgtgacaattttaagacttaaattatttaagtgaaagtaacaaaagcaaagagctagagaaaattctaattagggaaaatgagtgcctgcaattaaaggtgagctctccattctccatcatctaa

SEQ ID NO: 417502 - DNA, 560 bp, Homo sapiens
gcagactgcccccttgctgttcttgtgatagagttctcatgagatctggttgtttgttaagtgtgtgacacttcctccttttctctctttctcctgctgccttatgaagtcrtgccttgcttcccaactgtatcttctgccacgattgtacattttctgaggtctcctcagccatgtggtactgtgagtcaattaaacctcttttcttcttgaattacccagactcaggtagttctttctagcaatgtgagaacaaactaataaagaggatttcacaattgctttctggtaatccactttctacttatttaaaataaatagaattcataaaatttattttttggtgtagtatgattttagaagactcctgaatagttgttaaaataatgaataaataatgtgtctattttttcttatgatgttgtcattggttgtttcaggtacatatattaagaaataaaacaattcattatttttattttagaacagacaagtagacaactctgaccccttaaattaggtgaattgtgtatatttttcctctgatactaatccatgct

SEQ ID NO: 417503 - DNA, 560 bp, Homo sapiens
gcagactgcccccttgctgttcttgtgatagagttctcatgagatctggttgtttgttaagtgtgtgacacttcctccttttctctctttctcctgctgccttatgaagtcgtgccttgcttcccaactgtatcttctgccacgattgtacattttctgaggtctcctcagccatgtggtactgtgagtcaattaaacctcttttcttcttgaattacccagactcaggtagttctttctagcaatgtgagaacaaactaataaagaggatttcacaattgctttctggtaatccactttctacttatttaaaataaatagaattcataaaatttattttttggtgtagtatgattttagaagactcctgaatagttgttaaaataatgaataaataatgtgtctattttttcttatgatgttgtcattggttgtttcaggtacatatattaagaaataaaayaattcattatttttattttagaacagacaagtagacaactctgaccccttaaattaggtgaattgtgtatatttttcctctgatactaatccatgct

SEQ ID NO: 417504 - DNA, 577 bp, Homo sapiens
aatcaccaacaaatcttcaaataaccaggaaggtagaagcctaaatggattaaaatcatggggttgatcagtattactcaatgttcccatgtaccaactctgcacatgtaccccctgtatctaaaataaaagttgaaatttaagaaataaaaacatggggtttagagtcagactaactggctttcttcagttattgtgtgacctctggcaagtctcttaatattgcagagcctaattttcctcatttgtaatgtaggagtagaaaagcatacctcttcatgaggtgttctcagttaactaatgtattgtgtttagtgtccaagagagtaatcactcagtaaacatgagtttcttctccctattatttgactaaaaagaaaaagcaaaaaataaaaatttaaaaagcaacaggaagacaaatcactgagtataagcaattttggattattttatactcagtgatactcaaaatggaaactttatttcctatacaaccaaattttartggtgttctcttcctggaacaagcaaattcaattcactttgaacaattcacttgttcacaaacaattaaaat

SEQ ID NO: 417505 - DNA, 533 bp, Homo sapiens
cggcatatgcaccatttaactgtttcaaatattaaaaatccttaattcccaaagaaatttggcctaaaagttttgggaaaagtatatggacatattatttttattattaatattattaattaaaatatggactaaaacttctatgtaaaataagaacttttatactcagtgataatattcattaagttttacagtgaacgctcaagatttatatcgaaacactttgacttgaagtaacaaaattatcttcacaagtggcaattggtaaaattaatatgaccttttgaaagctgaagaaactgaattatgaaagacatatgtaatttatgtaaaattaagttaaaaattaagatcacagttgagatttgaaatctttartttactttctttgtgtttagctctctgattaggcatcttttaatttcagctcaagtacttttggaaatgatcagttttgcaaaacaatcttattggcaacaaaaaaaatagcagcctatatttctaaacatattttttcagattaaaagaaacta

SEQ ID NO: 417506 - DNA, 661 bp, Homo sapiens
aatagtctctcattttaaaagtagaggaattaaagtttttataaatgtacctctcatttgaaaccacagtcatttggagaattcatataatatcagttttctcagttaacaaagaatttgggagaatcaatccaagtaagaaaatataatattcaactccactgggwtttcagagttaagagatagtggcagaaaagaggtgctgttaagagaatgttcctgaataagtagattgtctacgtttttccacgttactctgtcccacttactcatttagttttatattacttcctttcccctattaactatatttcccctcaattgcctatgagaaagctaagaaagaaaagcattttctcatgatattgtttctaacaaggaaggccttggaggctaaagaaatattttttaggtgaaggtttatttattcaacatttgcagatgtactcattcacttgttaattttggttctccatcagtgaaatatattataattttgtgatttatggtacctacttaccttttaataaaaataggtgaatttaagcaaatgaactaaactcatgtgtggaatctacatatgtcaaacactttgactctattcatgtaattatgacctcaaatagcattagttaagttttaccaactgacactgatggaa

SEQ ID NO: 417507 - DNA, 661 bp, Homo sapiens
aatagtctctcattttaaaagtagaggaattaaagtttttataaatgtacctctcatttgaaaccacagtcatttggagaattcatataatatcagttttctcagttaacaaagaatttgggagaatcaatccaagtaagaaaatataatattcaactccactgggatttcagagttaagagatagtggcagaaaagaggtgctgttaagagaatgttcctgaataagtagattgtctacgtttttccacgttactctgtcccacttactcatttagttttatattacttcctttcccctattaactakatttcccctcaattgcctatgagaaagctaagaaagaaaagcattttctcatgatattgtttctaacaaggaaggccttggaggctaaagaaatattttttaggtgaaggtttatttattcaacatttgcagatgtactcattcacttgttaattttggttctccatcagtgaaatatattataattttgtgatttatggtacctacttaccttttaataaaaataggtgaatttaagcaaatgaactaaactcatgtgtggaatctacatatgtcaaacactttgactctattcatgtaattatgacctcaaatagcattagttaagttttaccaactgacactgatggaa

SEQ ID NO: 417508 - DNA, 569 bp, Homo sapiens
acaataagcattatctattacttttatctttaaattgaaaggggttagtatagtacacaaatgaggataaggaatgatttgttccactctaagcagtggaaataggttaaaatcagtcgttcctcattcacggacttggtattttgacttcccctmttcgttaaaatttatttataacctcaaaatcaatagtcgaggagcttttgtggtcatttgtggacatgtgcagagcaggagatttgaattgccctgtaagagtcgcccagttctcagctgagagtaacaaagcgatgctccgccttcttgtttcagctctcacacaacagagtccttttcatattccagttactgtgacactttccacacttttgtgctttttcttggtgattttactgtttaaaatggcccctgagagtagtctggaagtgctgggtagtgtccctaagtgcaagaaggctgtgatgtgtctttggaaaaaagagcactgggaggaaggcaaaaagaatgaaagtgaggcaatcaagagtcaggaggctgagctgcttcaagaattagtgtgtctgtagttg

SEQ ID NO: 417509 - DNA, 569 bp, Homo sapiens
aattatgtaatagatggagaacatcagtcataaaccctctatcctatctacaaatttttagcaagaaatttttattcttattgatactatatacccaaggcttataataaaatttggcaacgcttacctatgaatattggtggaaaatttagtaagtgaatgtggcagacctcttatgtagcattttatcatctacatttttctttaatgattttgagatagtccattttataagctatgcaaaattktaattaggaagtggtactaataatggcagcttttctaattattttcctttataaggatgacaaaaatggtatgttttgaaaataaggctaattttctgaaatgtaattattctttcatatataaaatatatgtcttattatataatcctgtatgtattatcagagaaatggtaaattatactataatatatattgagttttgctattaagtaaaacacaattgaatgtctttgagctgatccacctttcttcccttcctgagcgtaaaatataacatttttatttttatttacaattttgttttctgtttcctctctaaca

SEQ ID NO: 417510 - DNA, 569 bp, Homo sapiens
aattatgtaatagatggagaacatcagtcataaaccctctatcctatctacaaatttttagcaagaaatttttattcttattgatactatatacccaaggcttataataaaatttggcaacgcttacctatgaatattggtggaaaatttagtaagtgaatgtggcagacctcttatgtagcattttatcatctacatttttctttaatgattttgagatagtccattttataagctatgcaaaattttaattaggaagtggtactaataatggcagcttttctaattattttcctttataaggatgacaaaaatggtatgttttgaaaataaggctaattttctgaaatgtaattattctttcatatataaaatatatgtcttattatataatcctgtatgtattatcagagaaatggtaaattatactataatatatattgagttttgctattaagtaaaacacaattgaatgtcttygagctgatccacctttcttcccttcctgagcgtaaaatataacatttttatttttatttacaattttgttttctgtttcctctctaaca

SEQ ID NO: 417511 - DNA, 514 bp, Homo sapiens
tggcttcccttggctaggaaagggaaatccccaaaccccttgtacttcttgagtgaggcgatgccccgccctgctttggctggctctccaagggctgcacccactttccgagcagtcccaatgagatgaaccaaatacctctgttggaaatgcagaaatcatctgtcttctgcatcgatcatactgacagctgcagaccggagctgttcctgttcggccatcttggaagggacccccattttgttttttttcttgctttattttttgagtttcttgtagattctggatattagtccttcgttgggtgcataggttacaaaaaattttctcccattctgtgtgttgyctgtttactttgctgattatttcttttgctgtacagaagctttttagtttaattaggtcccatccatttatctttgtttttgttgcatttgtgtttgggttcttggtcatgaattctttgcctaagctaacattgagaaaagtttttcaaatgttatcttcttgaatt

SEQ ID NO: 417512 - DNA, 623 bp, Homo sapiens
ccagcataggtcattcacctgtgaagggaagagaagccattgtaatatcatatttaagaaaagtattcattggttttgtgtattgcgcaatttaaaaaactggccccttaatatattaacacatgctctgaatgttttcatccaaaagatgtcatttttttttaagatgtcatttttgtaaacatgtatctggatatattatcttttagacctcaaccaaaaatttatactaatatatgccacattttgtgtttataatattttctattcctttgaagaattcaggttgctttttctttctttcttaaatggaatctttatgaacacagggaatagtttggttactttaaagtcctacatacaggttttttttgttatattttaccaagttcttcccagcatgaaaccttgtggttaaagaagacaaaacacatactctctcaacctattttttggctaaacaattataaactgtatacctcctaaacagagcaataaagaaagtgaaaaygcaggtttataagatagttacctatacaggacagaaattgctcagataaatttaaatgttgatgtagcagaagcccgggttctcttctaatattaaacagctgaacagaaac

SEQ ID NO: 417513 - DNA, 548 bp, Homo sapiens
agggtagcattcccattttacagatgaagaagctttgtatgttgaggtagaaacttaaagaaacccactaacacraattttgaacacatactctccataattaatccttttgaaaacctaagcagggtggggagagaatagaaagtgaactggtttgctactaattcagtgtaggagagaccattattttaaatagtggttttaaaaagctatttaagttgaaaccccatgatattctgattaagacacatgggaccatgatctgcactgaggtggataactgtggcctgccaaaatttctactccaaaattcccccacaatattttaagagaaaagtaaaacaaattaagacaatcaactctcaaaccacacttgaaacacttcttcccaggctgtgtgtgtctaactttatatcaatttccattttctccccaagcactcaagatgatgtaacaacagcattgagtggcctagaagtattaaaccttaataagagcaggaatatattgaaatggtttttatttaaatggacctataaactttaact

SEQ ID NO: 417514 - DNA, 532 bp, Homo sapiens
gggctgattttctgcaaaagcctacaacctycacccagaacttgaacggaaaggttggtgggaggaacattactcttttcccagagctcccacgctaagcccgctccccttgggcctcgcacccgaggccctatcctaccttgagaaggtatttgtccacgatctccaggccgcaactgttgcacacacacttgccaggagggcagccggagcccgaggccatggaccggggcgaggacgacggggacagcggggccgaggaggagcacgagtcctcgtcccccgctccctcggggctcacctgcaggaaaccgcgaggcgcaggcggttctagacccctcctccccttcgcatcccacctacccacaagggcgcccccaccgcctcccctcccttccccctggccaccccaccccacccccagcttcttgaggtcacgattctcgccctcttccccgagtccaagctctggctacgcacccgctggggctgccgacccctgacctattcggaccccagaagtcttgcggcc

SEQ ID NO: 417515 - DNA, 495 bp, Homo sapiens
gccttctctacatgttaaaatctttatcagaacacgccaactgacttcaggtttagtactaaagaaaaaaaaattgggggatgtcctgttaacttgactttaaaaaatctgctgtctgcatttgccataacttttaaattctcgctccccaacccaaacctaaacaaagattcaggttacatctctttctgcagcaagcagaaggggaagtggaggtctgggtgacttgaaagttttagtcattctcttgaaactcgcagctgtccggtgtagccgaggaatgccaccgctccwggcagcctgggagctgacttatctagcagttcgcgctccctttccgaaaagttttctcattaagataaagaaggaacatctgagcaacacaaaagcttatgatttgcgactagatttgaaatcaaggctacaagaaagacaaaagtatgttgctaatgagtattgctctttcatctcctagacaaaatgtaagcccgagca

SEQ ID NO: 417516 - DNA, 586 bp, Homo sapiens
tatgtaaaacacacacacgcacacacacatatcttatctccttgccttatttgtatagaagaaaaagagcgaaatgatcttgcccagaccccagctcggtcagcagccggctagcggaggagatagatagcctttcctgtgatgaagtgagcctgtgtaagagtctgggaccgagttaccactacaaatttagtttttcctccattgcatttttctcccataaacactagagtcttcagarcattttcctatcgccattgtttttcttttcgcgcagtgccgacaagttaatattagccatccccctgccggtcctctctgggagatctcgtttaaatttactgagcgaagggaggaggacgatataattaatctgtgccctcttagaaaattgaaagattggggtggactgacttttcaaaaagctaacttgtgcgtgggaaccagaaagacttgtgtttttcatcaaatgcagaaatcggtattgggggtggtggagaaattcacataatgcattttccatgaaatagcatcgttgtggagaccgctcttccgaatggaaagtcagagtcgtgcagaacattgg

SEQ ID NO: 417517 - DNA, 604 bp, Homo sapiens
atttaatttctgctatcttattttgtaattgtcacttcaccataatttttccttgcttgttttatttttccattttccttcttccccttattttttctgttaatttgaaaattatacatttatatctattcttgcagcgattacttaaatgtttttaacatccttgcttaaaaagtcttaagataatatttttatcctcttcttagctayttttaacatgcatccctcctactttccttacatgttgttgcctaatagttgagttccatcttaattttgacctccaaaatgaatgttcctttttttttttcttttttggttatagtctttgtttttatatggttaaagcttctttagatttgcccacatgtttactagtactttaacattatggtttttgttaattcagtccctctaagcttatagtctttcccctaacatacatccttgagtgattctttcagtgaggctctgttaaatctcttaatatttttttctaaaatatctttattttattctactaaagtgatttaaaaaaatctaggtgatgaattctagattgaaagttatctttattctgcactttgttgttactatttcattg

SEQ ID NO: 417518 - DNA, 565 bp, Homo sapiens
ggttgcctctgtttgtggggtattactcaataaatttttgcccacaccaatgtcctgcagagtttctccaatgttttcttgcagtagtttcatggtttgaggacttagatttgagtcttcaatccattttgatttgatttttgtatatggtgatagataggggtcttgtttcattcttctgcatatggatatccaatttctcagcaccatttattgaagagattgtcttttctctactgtatgtttttggcacctttgctgaaaatgagttcactgtaggtgtgtggaattgtttctgggttctctactctgttccattagtctatgtgtctgttttttatgccagcaccatgctgttttggttactgtagctctatagcatactttgaaatcrggtaatgtgattctttcaattttcttcattttgctcagaatgacttgactattctggatcttttggtggttccatataaattttagaattgtttttcagtttctgtgaaaaatgtcattagtattttgacaggaattgcactgaatctgtagattgctttgggtagtatgg

SEQ ID NO: 417519 - DNA, 609 bp, Homo sapiens
cagtgagacttcctaggtgtgaatattagctttgcaatttactagccaggtaaccctggacaagttacttgacctttcaaacttcaatttcctttgctgtaaaatttggctaataaaagtacctaccaaatgtcaaataatgtatacaaggcacttagtaaaattattgacaagtagtaaatagtcactacatttagattttagtatcatatctatgagatcatccagagagttgaggaaggtatatttacattagtgagcagtagaacagatggcagaaacaagttctgtcaccaagtctaatgctgtttctaatgatatacattaaatgtccctgaataatgccatacagaaatgaactaaaaaaaattatcttctcacaagaagagaatctgaagttgaatgccagacttcaatcgcattgctaaaaaaaagaaaawgtgaagaggttcggaattgggatcctcaggaggaatatatttttttcattagtgtcagccaaagtaaacagagaataagcaagaagatacacttttgggatggcaaaataagaacttcatataatgataaagtaaagacctcagaaaacccactcctcctaaaaagcaa

SEQ ID NO: 417520 - DNA, 617 bp, Homo sapiens
tattgtcaattaatttttaaccagaaagaatagtcttcaataaatagtgctgaggcaactggttatccacatgctaaagaatgaatttgacattctaacacacatcgtatacaaaaattaactcaagatggatgacagaactaaatgtaagacctaaatgtaagagctaaaactataaaactgtgagaagaaaacacaaaactatatcctcaggactttgcattaggcattagtttcctagacaagaaataatagataaattagatgaattgaaatttttaaactttcttgaaagaacastaccaaaaagataaaaagacagtcgacagactgagagaaaatatttgtgaattgtaaattaggtcaaggacttgtatcaagaatatacaaagaacccttacaaatcaacaacataaagacaaacaacccaagtaaaaaatagacaaagaatttaagtacacatttctccaaagaagacaaaacaataatcaaaagcacatgaaaaaatgtacaacaccattagtcattagaaacacaaaagtcaaaatcacaatgagatagtacttcacggcaactagaatggctacaataaaaaagacatacagtaacaagtactc

SEQ ID NO: 417521 - DNA, 594 bp, Homo sapiens
gttcttgactgagtacgaaaagaaaaaaaaaagtaaggacaaaaattatatgctgaggttgctaagttctgtggtaagaatgaatcttttatctgtgaaattgtggagaagaaaaaataaatgtatgctagttttgctgttgcacatgaaactgcaaaatgtatggctgtagcgcatgataactgcttaggatggaaaaaacattaaatttgtggaagacatgaacagaaacatgttctgattgacagcagttgggttttttactatctgtggtttcaggcgtccactgaggtaattacttgaattaccccacacatacactctaattacccaacatgttcactctaattaccccacacatgcactaggggtcttggaacatatctccctaggataaggggaactactgtaatatatatttagatttatcaacacctataagaaaataggagacaacaaaaatcmacacaaagttaaaaggattgagaatcacaaatggtttttctctataatctcttctcacttcgatggtaaatggaagccctgttggagtttggcttcatttttaatttttcttctatgtgtgcagtttac

SEQ ID NO: 417522 - DNA, 553 bp, Homo sapiens
aatgaataaaaaaacagaaataaaaaatttagttctataactaacaataaaaacaaaactacttatgggaatcacaaataaaagtctcttaataggcctttctaatatttttagaaatattataaagaggtggaatttttcacctcttagagtcttaagaatctaccttccttagtcctcagcgataaatatcagattttttaaaatcttactttatcccacatgccatataacttgttctgaaaaacagttggaaaactatttcctaaatatatgtggtattatttgggggcaatgctgatgacatttagaatggttatatacacargtagaaaacgtacagggtctacgaaattaaaactgaacatctgtaaaatgctttgtaaaagaatgtaaaaaggttataaatcaatttgtgggtgtttaaagcaacgcatatttgccctgcactttgcagatttgatttattctcagcttaatgatgtttacataggttaagccttcagcaaagttcaaggagccaaatttctccataattccctcccaccaaggt

SEQ ID NO: 417523 - DNA, 535 bp, Homo sapiens
gttatggtggctcacgcctgtaatctcagcactttgggagkccaaggctggaggatcacttgagtccaggagttggagatgagcctgggcaacagagtaagacctcatctccacaaaaaaataaacaaaattagttgttttcttccttttaaaaatgtacgtttttttctacaggatccaacaaagtgaagaaacaatcttttatcatttaaaaatgtaacccatcctgcatgtgagattttgggtggtttttgtttgtatgtttaatattttaacttttagtaagtatatataccatatttatagttagaacaaatgacacagaatgatttttaattggccccaaaacatttttctagtttgtcttcatggcaaaaaaaaaaaaaaaaaaaaagttagtagtccaaaaaattaagccttgaagtcatcatatctactattataattaatcaaataagcagttcacatataacaactgtttctggctcaaaattatacttttttaaacaattgtaataactagcaatccatgtat

SEQ ID NO: 417524 - DNA, 535 bp, Homo sapiens
gttatggtggctcacgcctgtaatctcagcactttgggagtccaaggctggaggatcacttgagtccaggagttggagatgagcctgggcaacagagtaagacctcatctccacaaaaaaataaacaaaattagttgttttcttccttttaaaaatstacgtttttttctacaggatccaacaaagtgaagaaacaatcttttatcatttaaaaatgtaacccatcctgcatgtgagattttgggtggtttttgtttgtatgtttaatattttaacttttagtaagtatatataccatatttatagttagaacaaatgacacagaatgatttttaattggccccaaaacatttttctagtttgtcttcatggcaaaaaaaaaaaaaaaaaaaaagttagtagtccaaaaaattaagccttgaagtcatcatatctactattataattaatcaaataagcagttcacatataacaactgtttctggctcaaaattatacttttttaaacaattgtaataactagcaatccatgtat

SEQ ID NO: 417525 - DNA, 519 bp, Homo sapiens
acgcctgtaatctcagcactttgggagtccaaggctggaggatcacttgagtccaggagttggagatgagcctgggcaacagagtaagacctcatctccacaaaaaaataaacaaaattagttgttttcttccttttaaaaatgtacgtttttttctacaggatccaacaaagtgaagaaacaatcttttatcatttaaaaatgtaacccatcctgcatgtgagattttgggtggtttttgtttgtatgtttaatattttaacttttagtaagtatatatmccatatttatagttagaacaaatgacacagaatgatttttaattggccccaaaacatttttctagtttgtcttcatggcaaaaaaaaaaaaaaaaaaaaagttagtagtccaaaaaattaagccttgaagtcatcatatctactattataattaatcaaataagcagttcacatataacaactgtttctggctcaaaattatacttttttaaacaattgtaataactagcaatccatg

SEQ ID NO: 417526 - DNA, 535 bp, Homo sapiens
gttatggtggctcacgcctgtaatctcagcactttgggagtccaaggctggaggatcacttgagtccaggagttggagatgagcctgggcaacagagtaagacctcatctccacaaaaaaataaacaaaattagttgttttcttccttttaaaaatgtacgtttttttctacaggatccaacaaagtgaagaaacaatcttttatcatttaaaaatgtaacccatcctgcatgtgagattttgggtggtttttgtttgtatgtttaatattttaacttttagtaagtatatataccatatttatagttagaacaaatgacacagaatgatttttaattggccccaaaacatttttctagtttgtcttcatggcaaaaaaraaaaaaaaaaaaaagttagtagtccaaaaaattaagccttgaagtcatcatatctactattataattaatcaaataagcagttcacatataacaactgtttctggctcaaaattatacttttttaaacaattgtaataactagcaatccatgtat

SEQ ID NO: 417527 - DNA, 519 bp, Homo sapiens
acgcctgtaatctcagcactttgggagtccaaggctggaggatcacttgagtccaggagttggagatgagcctgggcaacagagtaagacctcatctccacaaaaaaataaacaaaattagttgttttcttccttttaaaaatgtacgtttttttctacaggatccaacaaagtgaagaaacaatcttttatcatttaaaaatgtaacccatcctgcatgtgagattttgggtggtttttgtttgtatgtttaatattttaacttttagtaagtatatataccatatttatagttagaacaaatgacacagaatgatttttaattggccccaaaacatttttctagtttgtcttcatggcaaaaaaaaaaaaaaaaaaaaagttagtagtccaaaaaattaagccttgaagtcatcatatctactattataattaatcaaataagcagttcacatataacaactgtttctggctcaaaattatacttttttaaacaatwgtaataactagcaatccatg

SEQ ID NO: 417528 - DNA, 526 bp, Homo sapiens
attttcttactgattgtgggaacttttaaaatgttctagatatgaatctttttgtgatttctataaagatttcaattatctttaargtgtatgaggcttgtcttttaactttgttcatagtctcttttgacatagaggagtttataatgttaacgtttatctatcttttcctcaatggtctgtgtcctttctcggggatggtattaatacattttttcctaattgtgctggctttatagtatgtcagtttggttaggctaaactatatttcccaggatttacttttgtgtatgttttcagttagggtaggccataagagagattcttgtgtgagatttggagggctgaagtgaagcaacaggcattttgtagccctacacttttatcctatatttgctggatcacctcattggcatgaagcagcagtaaggctgtgactgttttactttcccctggatcctcctttagcttctctagcacctgggtctggtatgtgtgttttagctccatgaagaagggccccagc

SEQ ID NO: 417529 - DNA, 526 bp, Homo sapiens
attttcttactgattgtgggaacttttaaaatgttctagatatgaatctttttgtgatttctataaagatttcaattatctttaaggtgtatgargcttgtcttttaactttgttcatagtctcttttgacatagaggagtttataatgttaacgtttatctatcttttcctcaatggtctgtgtcctttctcggggatggtattaatacattttttcctaattgtgctggctttatagtatgtcagtttggttaggctaaactatatttcccaggatttacttttgtgtatgttttcagttagggtaggccataagagagattcttgtgtgagatttggagggctgaagtgaagcaacaggcattttgtagccctacacttttatcctatatttgctggatcacctcattggcatgaagcagcagtaaggctgtgactgttttactttcccctggatcctcctttagcttctctagcacctgggtctggtatgtgtgttttagctccatgaagaagggccccagc

SEQ ID NO: 417530 - DNA, 526 bp, Homo sapiens
attttcttactgattgtgggaacttttaaaatgttctagatatgaatctttttgtgatttctataaagatttcaattatctttaaggtgtatgaggcttgtcttttaaytttgttcatagtctcttttgacatagaggagtttataatgttaacgtttatctatcttttcctcaatggtctgtgtcctttctcggggatggtattaatacattttttcctaattgtgctggctttatagtatgtcagtttggttaggctaaactatatttcccaggatttacttttgtgtatgttttcagttagggtaggccataagagagattcttgtgtgagatttggagggctgaagtgaagcaacaggcattttgtagccctacacttttatcctatatttgctggatcacctcattggcatgaagcagcagtaaggctgtgactgttttactttcccctggatcctcctttagcttctctagcacctgggtctggtatgtgtgttttagctccatgaagaagggccccagc

SEQ ID NO: 417531 - DNA, 646 bp, Homo sapiens
atacatgtcccatgtgagtctatgggacgctaatgtgttagtctttgtaacaaactgcaatgagtcatttaatgaacacaattgtacagtttttgagtaggaaataattgaaagtgccttaaagtaaataggaaactactggttgactacaattgagcagattcctttatgtttttaaaggtggtaaagggagtacttctataatttgatattaaagttttattatgtcccctgaaaagggagggattttttttagcttagttgccctaaacatgattgttataaatttgatttatacaaattatcaaaataattaaattactctttgctttataaacctatataatgattccttctggcatttttgcagataatgaaatcatattttctaaaagattaatgtggctgaggtatttgtttcatgttaaggaaaagtaacatttgttgaaygcctatcacactgctgggtaccttatacatagtatccatcttagctcagactttaaaggacatttatgcagtgttaacaaatgaataaaagtaactttttcgaaaatcacgtttagtattctaagacctgccagtatttaagatggatacaagtgtttcaggagataatttttattttgagaatgatttagaaaag

SEQ ID NO: 417532 - DNA, 646 bp, Homo sapiens
atacatgtcccatgtgagtctatgggacgctaatgtgttagtctttgtaacaaactgcaatgagtcatttaatgaacacaattgtacagtttttgagtaggaaataattgaaagtgccttaaagtaaataggaaactactggttgactacaattgagcagattcctttatgtttttaaaggtggtaaagggagtacttctataatttgatattaaagttttattatgtcccctgaaaagggagggattttttttagcttagttgccctaaacatgattgttataaatttgatttatacaaattatcaaaataattaaattactctttgctttataaacctatataatgattccttctggcatttttgcagataatgaaatcatattttctaaaagattaatgtggctgaggtatttgtttcatgttaaggaaaagtaacatttgttgaacgcctatcacactgctgggtaccttatacatagtatccatcttagctcagactttaaaggacatttatgcagtgttaacaaatgaataaaagtaactttttcgaaaatcacrtttagtattctaagacctgccagtatttaagatggatacaagtgtttcaggagataatttttattttgagaatgatttagaaaag

SEQ ID NO: 417533 - DNA, 405 bp, Homo sapiens
catttgtagaaatgatatttaagaatttcctgctaatattatggattgcttattctatgtagaagcactcacttagtgattattaatattaaacacgccaaagttagctcctgctttagtctgttttcagatcgagttactgctatgcagcctcctgacttttctggtagatctcctggcctaaaaatgatgagtgtctacagaggctcactccttgtccacgttagaagaacttggaaaaggagtgaagtaggcttcagcagcattagtgcctagagaatagtgaaactaagtasaaattaaaagtacctcttttttctttttgtgtgtgtgagactaatcattgatactattgaaaggaagaacaatcaactcatcttacttttcctttagaatatttcaatt

SEQ ID NO: 417534 - DNA, 586 bp, Homo sapiens
actctgtcagaaactcttaacatactctctgacagaaagggagttaaactcctagggatacgaaraataagacattccccttgatctcaaggaactcactttccactatggagataacttgaaaacaaattatttagctaccctgtgacaagtgcagtggcagaagatagcattatatgaggagcatagtggagaatgcaattaattttgcctgctgaaaagagtgaagtccagcagtgcttgaggtctttaatagattggttacccacatcctatgcctgtagacaagcacaatcacattgggtgccaagctcttctctctcattcttcataataatacattttttacattttgtaatgcttccctcagttgactgacttttagtaataaaattcaagtatctcacttaattctcataatgattctcttttctgaaagaattcaaagtttttggcttgtgcttatattctggtactctctcccacactactcttctccctttatcttttattataggtagtcattggcatgtcggcatctttctgccaggaaattaaatccaaagagttttgtttcatgtttcac

SEQ ID NO: 417535 - DNA, 586 bp, Homo sapiens
actctgtcagaaactcttaacatactctctgacagaaagggagttaaactcctagggatacgaaaaataagacattccccttgatctcaaggaactcactttccactatggagataacttgaaaacaaattatttagctaccctgtgacaagtgcagtggcagaagatagcattatatgaggagcatagtggagaatgcaattaattttgcctgctgaaaagagtraagtccagcagtgcttgaggtctttaatagattggttacccacatcctatgcctgtagacaagcacaatcacattgggtgccaagctcttctctctcattcttcataataatacattttttacattttgtaatgcttccctcagttgactgacttttagtaataaaattcaagtatctcacttaattctcataatgattctcttttctgaaagaattcaaagtttttggcttgtgcttatattctggtactctctcccacactactcttctccctttatcttttattataggtagtcattggcatgtcggcatctttctgccaggaaattaaatccaaagagttttgtttcatgtttcac

SEQ ID NO: 417536 - DNA, 544 bp, Homo sapiens
cacattttctgcgtgtgatctctgtgtagtttaaatttaaggtttcttccaaggtataattctgtatgaacagttgtgtagaaattaaaataattctcaagaatgacttttaaaaattacaacatattttctttatttacttttctaaatgaaaaatgttcattgtaaaacggggaaattaatactatataataaaggctgtaatactaattttgtactccatttcaaaaaatgatttcaaagagtttagtgattaatttgaataaaaattgctaggtaayttaaagtaatttatgagacccagagtcttttataaaatcacagaattttataattaccaaaaaagcatatttctcagcaggtttacttttcattacttcaatattggtaataatttgcttcctcattcacttgggataggctaatcttaatttttggtagtaacttaaagccctttgaaaggtttgctttgaaagatttcacaagtgaaagtctagttctttaggatttttaaactccttgcttcatgttatattctgaaatt

SEQ ID NO: 417537 - DNA, 544 bp, Homo sapiens
ctttgtgtccaatctttggatgtaatatctcttgaaggatacataagaaaccagtaatcagtagtcataattattaagagaaacagaggaacctaaccagtagttacatcattaagagaaacaggaatgaataagcagcagtgggagacttaagttttcactgtgtaccattttgtaatgctgaaagttttttgacatttgaacctttccagagtatacaatatcatacacgtaaatttttaaaaggcaatcaaatattttcctccaattgtctttctcctttttcaatgtaaacggtcctggaagcagtaacacaatgatatctcagggtaagttagtttacagatgacattcygtaaactgacttatatagaggactataataacagagtggcaaatatttgctacaaatgccactactcactactctattgcccgtgacagatattgcaaatctatgtggcactttttcttgccaaaccaaaggctccaggcagccattgtcaattgatcaaagatagcactccagataatgtttacttgt

SEQ ID NO: 417538 - DNA, 569 bp, Homo sapiens
ataaataaataaataaataaattagccaggcacrgtagcacacacctgtagtcctagctacccaggaggctgaggtgggaggatcacctgggcccaggagttcaaggctgcagtgagctatgatagtgccactgtattccagcctgagtaacagagcaagatcctggctctgagaaaaaaaaaaagatttttttaatattagtacctcacttgaaaagtcctggagaacctagtacctagcagaagcttaatctggctttcaccttccatgccatttctttggcaaaccaacagaaagtagagtcagtaagtaaaagagcagaacttgttagctgcacaactacacatcctgagagattatttctctagcacattgcccttaagagaaacagagaacatttactctctgacaggccattactgaacaatccacttgtataaaatttacagtttgcattttagaataacccacagcaccaacttcacactgggatcaagagagacgataactatagggagatatattcaaagaaaacctcctggaaaaaagtctggccttgttttttgtt

SEQ ID NO: 417539 - DNA, 441 bp, Homo sapiens
tacaatgcaaaccatttgtaaacacttcatttttagaaacatggaatctttttattattacaaggtactgagattcatcatctcagagtgggaaaaaaataatagttgtagatgcttattaatgtgatccaggccagacttcttaccagtaccttaagagtaataacaagatagatatgttatatacagcagtaatctctccttatccatgggggttacattccaagacccctggacatgccagaattctctaatagtaccaaacccaattgctgtcaattggaacatgtttcygtttatgtcttccatccacaaatgtaatgccttttccatcctaactaagcacttatcatacactgtggccataacttttgcagtttgagatacaacaaaactagcttaaaattcttttttcttcttcacaatttcacgtataaaaaa

SEQ ID NO: 417540 - DNA, 490 bp, Homo sapiens
ctttaggtattgactttacatttaactactaaattgatgtgtaaaattccataaatatgcattttttgttagcatagtctataaggaagcatctttcagtgttaaaaatattcatcctttctttscaagcaaacatatgatggggcctttattatataccaaattcttaggtacacagaggtttcttaggctcttcattctatttcattaatattattgttgatttctgtatgactatcagtgttaatcactgtagtttcttttcttctagtattttttaaaaacacattttgtcaccattgctgcccacgtttgaaattatcttgactgttgttggattttatttatcaaaatgaactttttttgtcatcttttattttagattgaggggttgcatgtacaggtttggtacataggtaagttgcatgtcaccggaattggtttagaaatgatttcatcaccctggtagtgagcagagtacactataggt

SEQ ID NO: 417541 - DNA, 596 bp, Homo sapiens
tggcaattgcaattaaaatataattcttgaaattttattattttctattagcaaactaaatatttggtttggcttctgagtgcaacattatttaaactctacttaaaattatgatttaactatgattcttttatttattaaatagatctttaaatataatagagggtgattcaactaagaattgaaaacaaaatagttttattaaaaaatgtatgatgaaaagttggttattttttcaagtttttatgctctggttacataaagatcacagaattaagtgtcaatgcaataggtaaaataatgaacatgtggaatagtggtatgaatcaccactattcaaagccagcttctaamatttgtctttgacaaatgccatagtgacaagaaagtgaaatttaagattagaataatataaattatatgtcagttttcaaaaatgttgcttatttacgttatttaattttcaagatacttgaaattaatcactgctatagatattgcaagtaatcatacagatacttttagattaaagttaagaagaggactcactgaaatatttcttatttagaatttaactgccacaaataaaactgaaa

SEQ ID NO: 417542 - DNA, 482 bp, Homo sapiens
tttcttatttagaatttaactgccacaaataaaactgaaaatgcaaacgtttactgaaaataaactggatataaataaatagaaggaaaagcttcargtagtacttctagatagtaggaactattagccaacattaataaatcaggtgagacaaaattacatggggaaaagtgaatgtctgggtgtgaataccagagatatttctagataaacataatcagaattttgcttagaaaagtgtttccctaaggaccctttcttgagacacagcttcttgaaaaaaaagataaatatctagttaaactcatttatcatcacaagttattatgaaatggcagcccactggtgaccttacagactcactgccttaagtcccagccaagggatcaacacaattgatgatttaataattaactattctttggttacaaatatctttgcaattaattttccagagtaggctgctctacaggtgattgctt

SEQ ID NO: 417543 - DNA, 564 bp, Homo sapiens
tatttactaacacaacttagagtattgtcctggagttaataagtatgtgttcacatcactttcctccactcagtccccatgtgacctggtgataatttgcctctaaaatgaaatgataatatttccaagaaggatatattaaaatgtactaagaaggatatattaaaatgaagtaactgaaaagaaaatctgaaaccagaatgcrtagtattagactacaaaaaagaggggaatattttttcttaattatcagatattcttcaaagaaacattgctatccattggccttatccaaaaattgatgggatacctaagaaaaacatgtaaatttgatgtctcaggtcaaggtgaatattctcagtggacgataaatttattttcaattgctatacatttcagttttaagacataagaaaacccagtactggtaaatgaggtttgatgttacattctaaggacctcaactatttattattgagctgccttgtaaagataacaaaagtcaataacgcattgctaagtatctcatctattagggccataaaataattgtatgtgttcgta

SEQ ID NO: 417544 - DNA, 564 bp, Homo sapiens
tatttactaacacaacttagagtattgtcctggagttaataagtatgtgttcacatcactttcctccactcagtccccatgtgacctggtgataatttgcctctaaaatgaaatgataatatttccaagaaggatatattaaaatgtactaagaaggatatattaaaatgaagtaactgaaaagaaaatctgaaaccagaatgcgtagtattagactacaaaaaagaggggaatattttttcttaattatcagatattcttcaaagaaacattgctatccattggccttatccaaaaattgatgggatacctaagaaaaacatgtaaatttgatgtctcaggtcaagrtgaatattctcagtggacgataaatttattttcaattgctatacatttcagttttaagacataagaaaacccagtactggtaaatgaggtttgatgttacattctaaggacctcaactatttattattgagctgccttgtaaagataacaaaagtcaataacgcattgctaagtatctcatctattagggccataaaataattgtatgtgttcgta

SEQ ID NO: 417545 - DNA, 501 bp, Homo sapiens
gctggagaatattaagcaaaaaggagatgtagctgaagaatctggtgtcaaggtagagatccgaattgtgttacagatgtaagggagctattggagattgacacaatcttcatttagcttccacaatgatcactgtgcaatgtagatagaggagtgcagggaggtgtatacaatttctctcatgtacctcgtcagatatgctcagctgtccccgtctctgggatcattgaccactcattttgtcccggccatcatggcttccaaattaatgtgggtatagcccagcattgccttcctcttgcctgtgccttatgactgtcctaggactaccttgaagccactgaggagtgagacgtgtgggatcttactagtgtccctgtaagcataatctggagttgtaggagagttaygtgtccaagttgaatctttgatcattagaagggagccagtgaataaaagtttcttcctccctcatgacagactgtcaggagatggtggagt

SEQ ID NO: 417546 - DNA, 544 bp, Homo sapiens
ggagccagtgaataaaagtttcttcctccctcatgacagactgtcaggagatggtggagttcttgtggtctcttaaaatgtcaccttagaagaataagcaatccattgttttgataccaagctagcaygttaacacaccctcttattagctcttccaccttctctgcctcacctaccttttcccttattcctgcatccttggcattgcacttctgatacaagagaagcacataagctttggtcctacctctgctttctggggaaagcagggtacgacaggtgtaagaagaaaagtagaaacaccagttaggaagttgaccaggcaagagatgatgatgaggctgggtgctgtggttcatgcctatctataatctcatcactttgggggccagggtgagaggattgcttgagaccaggagttcaagacaagcctgggaacatagtgagaccctctttctataaaaaaaaatacaaatttaaaaaaaaattttaaagaaagagatgatgatgttttagaatgtaatggctgatagtgaatggtact

SEQ ID NO: 417547 - DNA, 544 bp, Homo sapiens
ggagccagtgaataaaagtttcttcctccctcatgacagactgtcaggagatggtggagttcttgtggtctcttaaaatgtcaccttagaagaataagcaatccattgttttgataccaagctagcacgttaacacaccctcttattagctcttccaccttctctgcctcacctaccttttcccttattcctgcatccttggcattgcacttctgatacaagagaagcacataagctttggtcctacctctgctttctggggaaagcagggtacgacaggtgtaagaagaaaagtagaaacaccagttaggaagttgaccaggcaagagatgatgatgaggctgggtgctgtggttcatgcctatctataatctcatcactttgggggccagggtgagaggattgcttgagaccaggagttcaagacaagcctgggaacatagtgagaccctctttctataaaaaaaaatacaaatttaaaaaaaawttttaaagaaagagatgatgatgttttagaatgtaatggctgatagtgaatggtact

SEQ ID NO: 417548 - DNA, 638 bp, Homo sapiens
tcttacctatattcttttgattcatattgggttaaccagtgtttgctgagatgctattgtgttacatatatcgtaaaataatactctaagaactattatgaataaaagttgagcctccaaaatcagaaaacactgaaatctgaaacgcttgaagaaacaaaacttattgagcaccaacattatgctcaaaggaaatactgactggagcattttagattttggattttcagatttgggatgctcaatcaatatagtgccaatattccaaaatccaaaatctgaaacacttcttatcccaagcattttgtataagggatrctcagtctgtgtaatgattaagtgaacatagatctagcactcaataaacttagattccaacagaaaagataaaccatatcaaattaaactattagatagatagatatagatatataaataccataaatgaaatacattaagtgatgtaagcatctagaataatgagagagtcatgcagtttaccattttcccaactccactgaggttccttgatgagtcatggcttatatttatttgttcatttatgactaaatagtgatactcactgatcatactggctgccctaattagtacaatatttttgaaaattatcattttct

SEQ ID NO: 417549 - DNA, 551 bp, Homo sapiens
gggcgctactggttactatatatagggtgtagatatgtagtctttccacactctactgaattctgtacctaattaacacaagactatcagtttcaaaacagcagactggaatagtgtttctagtcgagtgtgctgttggctattacatggtatggctctcagcatttttgcctacagagtcagtttctcagttcaaactatttattacttagtatttctatttccctaacccacataccattatatatgtagagggtctctgctatagaaatgccccacaaggaatgtgaaagagcagaataaaaatatgaattcattcatttataatggaaatcattatttctgcaggtaatatcacagaaaacttacctcactagaggagagaaaaagatctttatctctagccactcccaacaggaaatgtttcttagtgttawagagacatactgtatttaaaaatactttttttcggacatcaatatttaaatcattaatttaatatatatatttttctttcttgtattacaccatgtgctagagaaacaaagaat

SEQ ID NO: 417550 - DNA, 551 bp, Homo sapiens
gggcgctactggttactatatatagggtgtagatatgtagtctttccacactctactgaattctgtacctaattaacacaagactatcagtttcaaaacagcagactggaatagtgtttctagtcgagtgtgctgttggctattacatggtatggctctcagcatttttgcctacagagtcagtttctcagttcaaactatttattacttagtatttctatttccctaacccacataccattatatatgtagagggtctctgctatagaaatgccccacaaggaatgtgaaagagcagaataaaaatatgaattcattcatttataatggaaatcattatttctgcaggtaatatcacagaaaacttacctcactagaggagagaaaaagatctttatctctagccactcccaacaggaaatgtttcttagtgttatagagacataytgtatttaaaaatactttttttcggacatcaatatttaaatcattaatttaatatatatatttttctttcttgtattacaccatgtgctagagaaacaaagaat

SEQ ID NO: 417551 - DNA, 619 bp, Homo sapiens
tcaccaactgatgggtgtaagagctgttccagatactctgcagggtgaagattgctgttatttaagagtgcataaagtgtgaagagaattccaataaaggaatgaccaacattgtttggggaattagagaaaattcagaccactctattttttggttatggyttccttgtaatttaaaattttttactggtttttaaaaacatcaaatttttgctttaaaaagttatatctggagattatatgaatataaattattaataaattaataatttacataaatgagtcataactagaatccaatgatcttgcttcaaagatgtaatatttctaaatttatttcttatcaatataattccacagaaattaggaaaaagacatgctcccagcctacatatataatccttcatctaagagtacaaactcttgagatggagtttcatcttggacttccagagctttgttgcctcactgaagccatgtgaacaattttcatccctaataacaactctcccaaagttttcaagtttaagtactgttgcattcatgtgtgtgtgtgtgtgtgtgtttatgtgcaagcttgtgcttgtaaatatgtgtgtgctacaaataaaaacaatat

SEQ ID NO: 417552 - DNA, 619 bp, Homo sapiens
tcaccaactgatgggtgtaagagctgttccagatactctgcagggtgaagattgctgttatttaagagtgcataaagtgtgaagagaattccaataaaggaatgaccaacattgtttggggaattagagaaaattcagaccactctattttttggttatggcttccttgtaatttaaaattttttactggtttttaaaaacatcaaatttttgctttaaaaagttatatctggagattatatgaatataaattattaataaattaataatttacataaatgagtcataactagaatccaatgatcttgcttcaaagatgyaatatttctaaatttatttcttatcaatataattccacagaaattaggaaaaagacatgctcccagcctacatatataatccttcatctaagagtacaaactcttgagatggagtttcatcttggacttccagagctttgttgcctcactgaagccatgtgaacaattttcatccctaataacaactctcccaaagttttcaagtttaagtactgttgcattcatgtgtgtgtgtgtgtgtgtgtttatgtgcaagcttgtgcttgtaaatatgtgtgtgctacaaataaaaacaatat

SEQ ID NO: 417553 - DNA, 579 bp, Homo sapiens
cactatgcttgaagagggaggaagcatggcagcctgcctggagtcactgagcacctggactggcccctgcacccagaytggacgtaaggaagaggtgagtaaaagaactccagaacaccatattgctgttgtggacacctgatatcctagctacaggagttcccatcaccctatggacatttagattggcagggagagacaactggagaacaagcagaggtgtagtttgaaccctcatggactccagagacttccctgtgctgtgcaactatagcaaaacacaacccataggcacccatctcccaaggctctccatcttgcacagagtggttgcagcacctgctgtctgccaggcttggaaattgcagggactggacatgttcttgtgcccatcaccaaggccccatcaccattgccatgggaccaaggtgcatctgatccacatgcccacttacttcctggcccctcctaagactgcctgcctggccactcctgcaagaagatgcccacagcacagcctccactgccccacacagaacacagtgcagtgcagtttcttacgctggcatgggagcagga

SEQ ID NO: 417554 - DNA, 579 bp, Homo sapiens
cactatgcttgaagagggaggaagcatggcagcctgcctggagtcactgagcacctggactggcccctgcacccagattggacgtaaggaagaggtgagtaaaagaactccagaacaccatattgctgttgtggacacctgatatcctagctacaggagttcccatcaccctatggacatttagattggcagggagagacaactggagaacaagcagaggtgtagtttgaaccctcatggactccagagacttccctgtgctgtgcaactatagcaaaacacaacccataggcacccatctcccaaggctctccatcttgcacagagtggttgcagcacctgctgtctgccaggcttggaaattgcagggactggacatgttcttgtgcccatcaccaaggccccatcaccattgccatgggaccaaggtgcatctgatccacatgcccacttacttcmtggcccctcctaagactgcctgcctggccactcctgcaagaagatgcccacagcacagcctccactgccccacacagaacacagtgcagtgcagtttcttacgctggcatgggagcagga

SEQ ID NO: 417555 - DNA, 553 bp, Homo sapiens
cactccaccctggctgaagatgagcataagcttggggagggcacttttcacccttctctgtagcctcagagggtgaacacagcagtgtctatctgctggctcttakttttaagtgccacctagtagaattcatcctgaattacaccacataacaaaaacattgctgcaaaaagcacgaactgtgaaactccccacaggagcccatctgcaacaaaggaacctgtacagagccttggccctctgaagacacaaagacacaaagccaattgattatacacaacatacgccataatcatactcacaagggagacaagaataaaaaatcaaaaagcaagaagcattagctctctcaggtgagaaggaatcagtgcaagaaatccagctatacaaaaatccagagtgtttaatcacctccaaaggattgcactagaaccctagcaatggattctaaccagattgaaatgtctgaaataacagacacagaattgagaatatgaataacgaggaaactcagtgagatccaagagaaagttgaaacctaatccaatgaagc

SEQ ID NO: 417556 - DNA, 575 bp, Homo sapiens
gttgtggggtgggggaggggggagggatagcatttggagatatacctaatgttaaatgaggagttacagggtgcagcacaccaacatggcacatgtatacatatgtaactaacatgcacattgtgcacatgtaccctaaaacaaagcataataaaataaataaataaataaaattcaccttaaaaaaataaaattaaattaaaaaaaaaagaaacaccccagatgattttaactgacagcagagttgagaagctctcccgctgagctacataatggttctagttggcttcattagccactgtgtgtaatcagtgactggcacatagcctggcctgcatgaccaactataggatatgaatatttgacacyggcattctagttttctttgtttgtcaaaatacttcttggagatgacagaagtattctcaagtaacaacactaaaagttgaaatgaaaagagtgctttcaagcctaataactcttctgaatttaataataaaatattatcctgatttcccttcccagtgataaaagcaagatgtttttcttcagtcttctactgagaagaatgtttt

SEQ ID NO: 417557 - DNA, 431 bp, Homo sapiens
ataaatcaaacttgccattatctacccaattatgaatgctaacaattttagcattatattagactgtttcaactttygtttcttacacatttagatgaaacagaaagtagttttgaggctctagttcataaaacttgtgcttgagaggataccacaagttgtgtatattttatccaaaatatttatcaccagaaatgttttgaatttcagattttttcagattttgaaatacatatacataatgagatttcttggggaatagtatcaagtctaaacataaaaattatttatgtttcatatacaccttacacacatagcctgaaggtaattttatgcaagatttcaaataattttgtgcatgaagcaaagtttgtttaagtgcttatgtatggaattttctacttgtggcatcatgttggcactcaaaaagt

SEQ ID NO: 417558 - DNA, 431 bp, Homo sapiens
ataaatcaaacttgccattatctacccaattatgaatgctaacaattttagcattatattagactgtttcaacttttgtttcttacacatttagatgaaacagaaagtagttttgaggctctagttcataaaacttgtgcttgagaggataccacaagttgtgtatattttatccaaaatatttatcaccagaaatgtttygaatttcagattttttcagattttgaaatacatatacataatgagatttcttggggaatagtatcaagtctaaacataaaaattatttatgtttcatatacaccttacacacatagcctgaaggtaattttatgcaagatttcaaataattttgtgcatgaagcaaagtttgtttaagtgcttatgtatggaattttctacttgtggcatcatgttggcactcaaaaagt

SEQ ID NO: 417559 - DNA, 578 bp, Homo sapiens
acataaaaattatttatgtttcatatacaccttacacacatagcctgaaggtaattttatgcaagatttcaaataattttgtgcatgaagcaaagtttgtttaagtgcttatgtatggaattttctacttgtggcatcatgttggcactcaaaaagttttctatttcggagcatttcagattttggattttttgtattagggatgctcaacctgtaattatattgttccctcctctctttaatatayaggtaaaatgttatattactataacaccatagaacaccaaaaataccaccaactaatatattcttaagtgccaaataagtgacaaagtgttgtgactatagaagagaagaaaaatcctgcccaggatgatttggtgacactccaagaggactaagaatttgagctggaactatatgtgatataatcaactagaagttagaaggcatttcagaaatggaatttgaacatgtaagaagacttatttgaagaagcagagggttcttacagaaaaatgttacaacttatataggtgggcaagtcccataagtacagtcttcagtaaaaataatat

SEQ ID NO: 417560 - DNA, 578 bp, Homo sapiens
acataaaaattatttatgtttcatatacaccttacacacatagcctgaaggtaattttatgcaagatttcaaataattttgtgcatgaagcaaagtttgtttaagtgcttatgtatggaattttctacttgtggcatcatgttggcactcaaaaagttttctatttcggagcatttcagattttggattttttgtattagggatgctcaacctgtaattatattgttccctcctctctttaatatatrggtaaaatgttatattactataacaccatagaacaccaaaaataccaccaactaatatattcttaagtgccaaataagtgacaaagtgttgtgactatagaagagaagaaaaatcctgcccaggatgatttggtgacactccaagaggactaagaatttgagctggaactatatgtgatataatcaactagaagttagaaggcatttcagaaatggaatttgaacatgtaagaagacttatttgaagaagcagagggttcttacagaaaaatgttacaacttatataggtgggcaagtcccataagtacagtcttcagtaaaaataatat

SEQ ID NO: 417561 - DNA, 578 bp, Homo sapiens
acataaaaattatttatgtttcatatacaccttacacacatagcctgaaggtaattttatgcaagatttcaaataattttgtgcatgaagcaaagtttgtttaagtgcttatgtatggaattttctacttgtggcatcatgttggcactcaaaaagttttctatttcggagcatttcagattttggattttttgtattagggatgctcaacctgtaattatattgttccctcctctctttaatatataggtaaaatgttatattactataacaccatagaacaccaaaaataccaccaactaatatattcttaagtgccaaataagtgacaaagtgttgtgactatagaagagaagaaaaatcctgcccaggatgatttggtgacactccaagagkactaagaatttgagctggaactatatgtgatataatcaactagaagttagaaggcatttcagaaatggaatttgaacatgtaagaagacttatttgaagaagcagagggttcttacagaaaaatgttacaacttatataggtgggcaagtcccataagtacagtcttcagtaaaaataatat

SEQ ID NO: 417562 - DNA, 578 bp, Homo sapiens
acataaaaattatttatgtttcatatacaccttacacacatagcctgaaggtaattttatgcaagatttcaaataattttgtgcatgaagcaaagtttgtttaagtgcttatgtatggaattttctacttgtggcatcatgttggcactcaaaaagttttctatttcggagcatttcagattttggattttttgtattagggatgctcaacctgtaattatattgttccctcctctctttaatatataggtaaaatgttatattactataacaccatagaacaccaaaaataccaccaactaatatattcttaagtgccaaataagtgacaaagtgttgtgactatagaagagaagaaaaatcctgcccaggatgatttggtgacactccaagaggactaagaatttgagctggaactatatgtgatataatcaactagaagttagaaggcatttcagaaayggaatttgaacatgtaagaagacttatttgaagaagcagagggttcttacagaaaaatgttacaacttatataggtgggcaagtcccataagtacagtcttcagtaaaaataatat

SEQ ID NO: 417563 - DNA, 542 bp, Homo sapiens
tctgaataagaaaataatgtttatacaaataatagtagcaaaataaggtcattaacaatgttctaagacagaaaacaaaagaatactayaggtgtttgagagagcgagatacgacatgtcaggttggaaaatagcaaagaattaattacggaggtgctaattttattggatagttaaaaattatcaagaaaacgtaaggcagatattttggaggagtgatatggaaaaagattgaccacgtatgtgagacattggttcttatttttctggagtgtagaggatgaaaagcctttaaattaaatagtttgaattgaggttatggacatatttaattttgtaccagtaatttgcactttatttttaaggtaatagagatccaggaaatttttgttccaatgattagaggttgtgcaacgggaataattcacgtgcctgtggtgtgtgcatggtttggggcgaggcaaaattttaagttagaggccattaaaagagagcaacaattaagtaatgttttaactacagaaataacactagaaagaaag

SEQ ID NO: 417564 - DNA, 542 bp, Homo sapiens
tctgaataagaaaataatgtttatacaaataatagtagcaaaataaggtcattaacaatgttctaagacagaaaacaaaagaatactataggtgtttgagagagcgagatacgacatgtcaggttggaaaatagcaaagaattaattayggaggtgctaattttattggatagttaaaaattatcaagaaaacgtaaggcagatattttggaggagtgatatggaaaaagattgaccacgtatgtgagacattggttcttatttttctggagtgtagaggatgaaaagcctttaaattaaatagtttgaattgaggttatggacatatttaattttgtaccagtaatttgcactttatttttaaggtaatagagatccaggaaatttttgttccaatgattagaggttgtgcaacgggaataattcacgtgcctgtggtgtgtgcatggtttggggcgaggcaaaattttaagttagaggccattaaaagagagcaacaattaagtaatgttttaactacagaaataacactagaaagaaag

SEQ ID NO: 417565 - DNA, 542 bp, Homo sapiens
tctgaataagaaaataatgtttatacaaataatagtagcaaaataaggtcattaacaatgttctaagacagaaaacaaaagaatactataggtgtttgagagagcgagatacgacatgtcaggttggaaaatagcaaagaattaattacggaggtgctaattttattggatagttaaaaattatcaagaaaacgtaaggcagatattttggaggagtgatatggaaaaagattgaccacgtatgtgagacattggttcttatttttctggagtgtagaggatgaaaagcctttaaattaaatagtttgaattgaggttatggacatatttaattttgtaccagtaatttgcactttatttttaaggtaatagagatccaggaaatttttgttccaatgattagaggttgtgcaacgggaataattcacstgcctgtggtgtgtgcatggtttggggcgaggcaaaattttaagttagaggccattaaaagagagcaacaattaagtaatgttttaactacagaaataacactagaaagaaag

SEQ ID NO: 417566 - DNA, 514 bp, Homo sapiens
tcccttcccagtgataaaagcaagatgtttttcttcagtcttctactgagaagaatgttttgatattttaaggttgtctgagctcatattcacagaagccgtgtgtgacaataagccacgtgtgagtgtgtgtgtgtgtcagtttcatttttcttacctatcaggatcaacccatagatgactaatsacataaaccagtatctctatcataggacagtcattctgacttgttacaactaaaatgaatgattttaaattgaacatataaatttcttcttcttagtgattagcgaaatacattttatttatttactattttattttagtgcacatttttatttctcaagactggtgattctgtcatatacaagggccagaaccaaggtgaggcaagtaaggcattcatctcagtgcaaatgtaattggggtcaccaaaaactcagtagtcaaagctataatgtttgatggaatatttttagaaatcaaaattaatgtaaaaaattatgaataaaat

SEQ ID NO: 417567 - DNA, 514 bp, Homo sapiens
tcccttcccagtgataaaagcaagatgtttttcttcagtcttctactgagaagaatgttttgatattttaaggttgtctgagctcatattcacagaagccgtgtgtgacaataagccacgtgtgagtgtgtgtgtgtgtcagtttcatttttcttacctatcaggatcaacccatagatgactaatcacataaaccagtatctctatcataggacagtcattctgacttgttacaactaaaatgaatgattttaaattgaacatataaatttcttcttcttagtgattagcgaaatacattttatttatttactattttattttagtgcacatttttatttctcaagactggtgattctgtcatatacaagggmcagaaccaaggtgaggcaagtaaggcattcatctcagtgcaaatgtaattggggtcaccaaaaactcagtagtcaaagctataatgtttgatggaatatttttagaaatcaaaattaatgtaaaaaattatgaataaaat

SEQ ID NO: 417568 - DNA, 482 bp, Homo sapiens
tcacttaagggagaatcccagtgcatgtggttattcaaaggacgggctagagtctagcctctgcgaggaggccgtctttcacacacccacctctgcctgagactatcacctttattgctttcatagcgttcctgcaatcagacctttgaatcagtcaagtgtggayctcagtacataaagtcaattagcactatatttgcaaacgatcagtgttaataaaaaatgttagctttctctcttatcacattactacgtaaaagaattagcaaatggaactcttggggaagtgagctgttttcagaaggaagagatttgaggagtttatgataggaataatagaatgtaaggtgagaaaggtggttctattacataaagggtattcgttaccactcagggtatttttgtgcttttgttttctgggttctgtgtttttgtaattgtcttatgtttgtattacatacgctttttctgtttttcttagt

SEQ ID NO: 417569 - DNA, 482 bp, Homo sapiens
tcacttaagggagaatcccagtgcatgtggttattcaaaggacgggctagagtctagcctctgcgaggaggccgtctttcacacacccacctctgcctgagactatcacctttattgctttcatagcgttcctgcaatcagacctttgaatcagtcaagtgtggacctcagtacataaagtcaattagcactatatttgcaaacgatcagtgttaataaaaaatgttagctttctctcttatcacattactacgtaaaagaattagcaaatggaactcttggggaagtgagctgttttcagaaggaagagatttgaggagtttatgataggaataatagaatgtaaggtgagaaaggtggttctattwcataaagggtattcgttaccactcagggtatttttgtgcttttgttttctgggttctgtgtttttgtaattgtcttatgtttgtattacatacgctttttctgtttttcttagt

SEQ ID NO: 417570 - DNA, 529 bp, Homo sapiens
gccataggcaagcagtggtgatatagatgaatggcaataagaagaattgaataacatgaggcatataaagatttaaaaaaacccctactgtatagtctattggattgtctgattatttcactgaagaatttagtgagaaaagttttccagggtcagagctgagttccaagttaccaaagcctagaaccaagaacaataaagtaggaacaataaagtarggaagcaggaatctgtggcttaaaggaatgtggatgtctgccaggaccacagagcagggttgggcaggatgcccatgacattctgtgtgttccatcattgtccttgaatccctacattgtaatttcctgtttacctattaatctctacttcattattatcacctgctatgtgctcaccagatatgaattagacatggcacctggggactagaacagtcacaggggcattcaagatgggtggagagagttggaggaagaatattccaggcagaaggaatgccatgtgcaaatccttgtgtgtggaagcatgt

SEQ ID NO: 417571 - DNA, 442 bp, Homo sapiens
gtcctataatatgagttcagttcatacttcattggtcaggccattctgtttcaccccaatcaagacagattagatactcaattttgtcttttcacagcaccttattgcataaaactgacactatatggaagtcaatatttgcttgtttttctttctcaatactaagtaggctattgaggatccagattataycttgataattttttgaagcctaggatctggcatagagagtgatgcatgtttggtgctcattaaatgaaaattggataaatgaatcaataaccagttttaggttaaacactctcaggttttaatacattctagactctcgatatcctaactattcttggtatactatgtttttgccaatactgtcctttagttaaagtgtattatggtcagcaagagatgaacaggagacataattctgtgatgaaagatc

SEQ ID NO: 417572 - DNA, 587 bp, Homo sapiens
aatagatgtattctgtgaagtataaaatgatatacttggttttagagtaccttagatgtgtaaatttactagattataatattcacatatattgaagatgacaacatttcacagtaatgtgtatgtcctttgttagaaatgtttcttacatggtaaatttaaatatacatctatataatcaaaatgcaattctactatttttttcctrctttaaattctctttaaggtgtttcctgaaaagtttagggacaagtttatattcttgaaaagttcattcatttcattcatttaagtttaagcagaggtcaataactctgaggaatatatttgttatttcaacagtgtattctaaaacaaacaaacaaacaaaaaaaccttatagcatgagataccctttagttgcaagatacaagttagtatccagacaagtgacttaaatgaaggcttaagggccatctgtgaagccatagacttgatcatagaatcttctcctgaagaatttcagctatttggcttaaattattgtttaaattataattattatttttagtaaggttttagacatctcacaggaccctttacacagg

SEQ ID NO: 417573 - DNA, 584 bp, Homo sapiens
gataggagaaacataaatttttctatttcaatatcatttttataccaaaagttttactcatatatggagtttaatagctactaaagttgtcttaataattcaatgtaattaaataatatgactgaataaacatatttactcatccaaaatacagtactaactctgaattttacatagaatattatagatagaaaatcataacattgtagatgttattatgtatagatatagatgttatggattatatatagatattataagatagagaattataatttttgtgtatgactcttgtaaaaggaattatagaatataaaatttggaagaatttccaaggcaagtattacctgattggaaggtagccctcttttttccaagttaacctctactcccactttctattagtttatactcttatttcatcaagaagtctccactaacaccctgaaccaggttaaatayctctattgtactctgttttgatatcatatactactctttgataatacctattacaattgcaacttgcatggtaatacctattaccatgcactttcttatgaacatttgaataatgtccctag

SEQ ID NO: 417574 - DNA, 577 bp, Homo sapiens
ttaggattccacaggcatcaggtacatatacaattgcttcctgatatacgcaataaagttcagacttttactctgaataggacatttccttgtattctgtgtatacctacttatgcctccatgagtaatctgctgaaagggcaagacgacagtaaatttagttctcattctcagagcatgcatgagcagggagtcttatttatgacagacagattaggagtcaatttatyttttttaactgatagttactaatgtaacatggcatatcctagccaagctaagaaaaccactgggagaagaaaagatcataaacataaaccttgtaaagtgaaattagcttttatttgtctttttaacctatttattcattacttctagtccttatcttttttgaggaatgggagggaaacacaaaatgccacagaagttgagctttgcatctctttatctggctgctaactggtttggcagcaatgtgctatgcagaactgtgctaattaatgagccatggctttggaactatagatcaaggcatcctgtgtttggaagagttgagaaaattatctgtccactcaat

SEQ ID NO: 417575 - DNA, 563 bp, Homo sapiens
agcttagaaactatggcaaatatttttaaaagtcctacattaagtttaaaatacaatgccataactagatttgatcaatgttgagtatttctaattctgatgaaaagatgtgctattaataaaatcagataatcagtcttaacttcaaaggaatgtcacccaataaagcagtgttgaagatgcatataattgtgttagttgttctttaataactgtggacacgacattttatctctaactagaaaaatcttcttttagcctgaagcaatagatcttattcaaaattagggagtcagtaattaacatccattttcttagttttgtttctatacatacttgtttgtgtatggatataaatttctccttcgatattaaatttctatgtgtgggaactatgtgtaagctgacaaattccacaagtattaaatagccataacttaaaaawtatattagtattggtttatgtggccaatctgtatttcaagacacatcattagtctttttgaagacacatgcagatgaataatacatgtctttcgcttgattgaaaaatcacagtaagg

SEQ ID NO: 417576 - DNA, 617 bp, Homo sapiens
atattttaagaaaaaagcattaaagacagacatttaatacagattggtaagttttaataaaattgataaaagtatcagttcaccagaaggatgaatcacttctaaatttgtatgtgcctaataacatctgatctcaaacgtattttaaaatggacagatttaggagaaatacagagaggtatacagtaattatgacaagatactgtaagacctctttcattaactaatagaagtaaagaaatatcagtagcaatttagaagattagaacaacatgattaacaaaataacataattggcatacacacacacatataaatacaaaactgcattcagtactgcataacgaataccatttcttttgaatgcgcataaaacattgaccaagattggtcatctgctggctttaaagtaaatctcaayaaacctcaaaggattgaaattagaaagagtataatctctgaccacattggaatcaagctataaatcaataacaaagagacaagtggaaatgttttgagtgactaaaattaacagcacacatctaaacacacatggatcaaagaaggagtcacaactgatataaaaatatttatggcatatgaaaataaaaatgtgc

SEQ ID NO: 417577 - DNA, 614 bp, Homo sapiens
aagtggtttctactctctgtactgtcagttgttcaaagtcaaaattctgttccagtaaaaattacttctctatttcaatcaaattagaggaaatgacagttaagaaaaaagcattttattgcacactgtgatgtctaaggcagtcaatgaaccggcaagtgctttgaccttacataatagttgccattttagcagctttaaccaatttggtcataattgctgggcagatgctttttcaaataaagaattccgtggctcagactctaagacttttatgacttaggtctatcctgtctaaagcttacattgtcrttgtcaaatcttaaatattttttctatattgtacagaaattcttatccatattttaatcctaaacaaaggaaaacttgcaaatgtttttttcccatttgagaaaacaaatagggaagagaaacagaaacttttttttctatttttctttgcattctatctgtacgaatcccaatgaagtctatttttattatatacttctttatagcttaaacttttaaattttacttactttactacaaatcccaaatggttactctgtgaattaactgagataatgcaagatgagtgcagagtagtgaac

SEQ ID NO: 417578 - DNA, 583 bp, Homo sapiens
tatgaaagccaaaagggaaggcttggaaagtcagggaaggccttcagaccctgaggcagctctgtcacctatgatagagatagggaaggaaagatcgggtagaaagagcctcggatggcagcacaggtcgaggaagtctctgtcaagatgatgggaagtctttggaccaaaaatgccagctggaagtacctcatgttgagcagaaagtcttggctctagtgttcctgctgtgcacagtcactggctcagagcagaccaggggaagggttgttcattttgcttgttttagtatgaagttagacataacttttgataagtttaaatttcaaagaaatactgcttagaaacagatctagatgtattcacttaaataatttaaaataaagccaaaaggaattaatgtgtaattttgtgtcaataacaacttttagagaaaggcaaggaaaaatacgccgtatacattctaaaagtagttctgaaaagattgccactttgaaaayacaattttcatgtgcacttatatttctaagtttcagctaaaaatctacttaatgataataaaagacacttatctcatagcaac

SEQ ID NO: 417579 - DNA, 650 bp, Homo sapiens
ttaagttacaaagccctagctgacatgtttatatatttttaaatctacttctcaaatgactgtaaaccttccctaaagttgcctcatgtgatgaaaaatgggctatcacaaaatccagcttctcaatcagtctctctacctctctaactctctttcctcccctctttcctaggacaggaatatgcctgagcacactttttcccctgtagatgatgtctcatgtcaagcaattgggtgtaccttgttgccaggcctcaactctgaccacagtcccagtgtatttcatgggtgtgaggtctgtttccggtgtcttagtctatcttctacttccatagagcttagcagttaggagcatgtgcactcagaaagygtatgactgtatttagttttctattgctgtttaacagatcaccagaaaaaagggttaaaacagcacccatttattagttcatacttctaaaaccagagtctggtatgatgtggctgggttctctctgctcagggtgtcacagggttgaaatcaaagcactggttggattgagtagttgtctgaaaggtctggcgaaaaatccacgaccaagctcattcaaattgtcgacagcatcaaggtccttgttacagcatgactgtggtttctgtattcttgctgt

SEQ ID NO: 417580 - DNA, 568 bp, Homo sapiens
caatcacaatatttcctataagttagataaattgaccagtcacttaacaagaagaaaggccagcatcagttgcagcaaaggtcactcaatctagttttgttctatattaaattgtcatcagatctgaacagcaattttatcaataatacatctaactagaattttgcaaaatgtagaaatcaactgccttccctatgggataaatgaagtaggtaaataagacacaactctccacgacaaactcacagggtattgaaccaatattctcatctatcacttaaactaaagatgactttcagaaataactctattggttcaaacgtttatccttatagagattaaacaagtgaatgtcatgtggacttggtaaatatgtttgacttttctgcctagccaagcaataaatatatgaaacaagcaaaatatattctgatattatgaactgaatataataatmaggaggctatcactcaaatccagaataaggagtgatctacagtacaattgacctgaattcaagattaaatgccattgagaacagaggcaggcagaggactcagattggtgg

SEQ ID NO: 417581 - DNA, 614 bp, Homo sapiens
aagtggtttctactctctgtactgtcagttgttcaaagtcaaaattctgttccagtaaaaattacttctctatttcaatcaaattagaggaaatgacagttaagaaaaaagcattttattgcacactgtgatgtctaaggcagtcaatgaaccggcaagtgctttgaccttacataatagttgccattttagcagctttaaccaatttggtcataattgctgggcagatgctttttcaaataaagaattccgtggctcagactctaagacttttatgacttaggtctatcctgtctaaagcttacattgtcattgtcaaatcttaaatattttttctatattgtacagaaattcttatccatattttaatcctaaacaaaggaaaacttgcaaatgtttttttcccatttgagaaaacaaatagggaagagaaacagaaacttttttttctatttttctttgcattctatctgtacgaatcccaatgaagtctatttttattatatacytctttatagcttaaacttttaaattttacttactttactacaaatcccaaatggttactctgtgaattaactgagataatgcaagatgagtgcagagtagtgaac

SEQ ID NO: 417582 - DNA, 604 bp, Homo sapiens
ttcatttcatatgacttttaacataataatttcctctcctgtaaattatttatttaattggtttctatattttccagcattctcatggatgttttttctcaatatatttatttgagatactaacattttctctgaccattaaaatgtatttcccatcagtgttttgtgttattttgtgtatattttctgtttttgatatgcagactttcactaacacaatagtatatttctttcattgagttttaaggctgaaatatatttttaaatacagagattaataagtacacatgtattaaaagtttaatcttcttatagatttattttatttaaatacgttaaatgcatcagaagtttattacaagtttgttataaggcaaacttctgactattttttctacacagttagacaattttaccaggaatgcacatacttatgatttaaaggtacctttcaaacagcctcaaaacatgtcaataagaggtgtattaaataccacatccctagattacattgctatattgtattttattgctatgttttatttcatatttrtatagtacagtgtgttttcacctatatgatctcatttgatctttacatcaa

SEQ ID NO: 417583 - DNA, 517 bp, Homo sapiens
caatgtctgtaatagggcaacagtaaaatatgacactatatagcataaggaaataagggatttactgtcaaattatcaatatagggaataaatactataggatttaaggaaaggaaataagttcagtatattgaaaagagacaaaattaaatataaactgtcttaaaggaaataaacaatttatatatgcagagaggccaagaaaaaacattttttaaggatgaaatagagcaaactgcaaaataagactrtgtatggtatatgttgaggaagctgcagtagagtagctaactgaaattgaaagttgtcatagcggacagaaagagatatgaataaaaaggtcaactgccatcaccttgttgaggacaaattggtgggttacaagataaatctgaggaacaatcagtggattaagtgaatctcaggagacagaaaagaaaatataaaggggatattcaacagaaaatagtgctcaaaaatgggtgactcctagaaggctgccggtgatgaatagagc

SEQ ID NO: 417584 - DNA, 562 bp, Homo sapiens
cattctattagaaggccatgaatggatttctttccttataaaaggcaacrgttcaatctttagatctttaaatctgctacctttaaatctgcttcttttaagttatttacatgagaaaaccaacaaaacaacctgtagtataaatgatgcttgtgttcactgccactattattacagagtataattaagaatttagtatagatcgtgttttttgtttgcttgcttgtttatttttaaatatttctaaaatagcctgtagcagttggggcctttcttgcttcagtttctctcctgcatttattgtccaggaatacaatgagagaatgttatttgcggtgctgtgtatcggtaaccttactccagaatctacttcatcagtggctacactaacagtaattttttcaccacaaaacaccacttttgttaagtgtcatacacgattaaggacataacttcctccacacatctttttactagctcaaatgatgtttttcataagctaaaacaatataaatgtttgtttttgcatcccacaatgaacaaccttcccaaattatataat

SEQ ID NO: 417585 - DNA, 562 bp, Homo sapiens
cattctattagaaggccatgaatggatttctttccttataaaaggcaacagttcaatctttagatctttaaatctgctacctttaaatctgcttcttttaagttatttacatgagaaaaccaacaaaacaacctgtagtataaatgatgcttgtgttcactgccactattattacagagtataattaagaatttagtatagatcgtgttttttgtttgcttgcttgtttatttttaaatatttctaaaatagcctgtagcagttggggcctttcttgcttcagtttctctcctgcatttattgtccaggaatacaatgagagaatgttatttgcggtgctgtgtatcggtaaccttactccagaatctacttcatcagtggctacwctaacagtaattttttcaccacaaaacaccacttttgttaagtgtcatacacgattaaggacataacttcctccacacatctttttactagctcaaatgatgtttttcataagctaaaacaatataaatgtttgtttttgcatcccacaatgaacaaccttcccaaattatataat

SEQ ID NO: 417586 - DNA, 619 bp, Homo sapiens
gtttctgcgacttaaaatgatgatgtgtggtagaaggtgtagatgaggtgaggcgtgatggattgtcattgtcaaattattaatagaaaggttcattttctattagaaatataaagtaaaatattttattcagagctcccttttcaactctggttccagctgccaaaatcgactgtatcattcartgctgcataactttgccaaaatgtgtaggatatttggcagtgcatacatcaaactccttttaaatttagcttttatggaaactattttacatcatcttgtttctctataaagcaaaagtaaattattttttaaatagttaaaatgtgataaaactgtttgataacacaatgaaagaacaattcaaattagtgagctttgtttcttgtaatattaattcataagattcattttccaagttattttcaatatatttgtaatagaggcatactgtaaaatttaatgttgcaacaatattagttattattatcccaattttatagattaaaaacagatccactgagaataaataattccctttaggagtcccagtaaagaaacactgaatctacagtttggttcagggaaagctagagatctgcacccacatttacac

SEQ ID NO: 417587 - DNA, 419 bp, Homo sapiens
agttcaaaactgtttttttgtcttcccagtatcaaagtatcaaaatttagatacttcgataatacattgtttaggtaaaatacattttgtaggtgtgggggtatgtgtgcgtgtatatacacacagatattcacatattattttcttttcattaaatttttgcctaggtcttgatccacagtaacattctgtatgactgattataagcaataaaatcagtacagagctctctgctgtcaatactgcagagtcagaacaaaggggaattacttagaagtgtttaataaagggatatgtctaacattgrtgcaacatatgccaaaatggagctaccctggcttggctgcaggaagactttgcactacattgaatcctatactagaaattgatatagtttagctccagaactatattcaatc

SEQ ID NO: 417588 - DNA, 597 bp, Homo sapiens
cttacacagcggcacagaagagaaaggcctggctgtcccccatcaccactcagtcaagagagagtgcctgtgccaggccctcttagaggctgggtagacactgcccagggtgtttattctgctccaagacagaaacagaagagaacctcctgccgtcttgggacacagagaaaagagctggtaggcctgggcccagcaggctaataatctgcccacttggaagcagatgccagcaacagttgcaatctctggccggttagattggccagcccttcttcctyggggagggggaggggggtggacgaggtaaaggggagtgaagaggtatgagcggatgatcctttccatatgaattgaggtggaaatacgagggtggggtagaaaatcctggcccagaagtacaggtccaggaacaagaaagggcaggtgctccagccagccttgaggtcaggggagaagtgacctggccagcccagcagaaacagctcacctggagccatggtgataatgcctgcttcatagggtttcatgagggttgaaatcaaggtcattaacatgtaagtgttctgaaatgtcatatgaaagactggttttcag

SEQ ID NO: 417589 - DNA, 597 bp, Homo sapiens
cttacacagcggcacagaagagaaaggcctggctgtcccccatcaccactcagtcaagagagagtgcctgtgccaggccctcttagaggctgggtagacactgcccagggtgtttattctgctccaagacagaaacagaagagaacctcctgccgtcttgggacacagagaaaagagctggtaggcctgggcccagcaggctaataatctgcccacttggaagcagatgccagcaacagttgcaatctctggccggttagattggccagcccttcttcctcggggagggggaggggggtggacgaggtaaaggggagtgaagaggtatgagcggatgatcctttccatrtgaattgaggtggaaatacgagggtggggtagaaaatcctggcccagaagtacaggtccaggaacaagaaagggcaggtgctccagccagccttgaggtcaggggagaagtgacctggccagcccagcagaaacagctcacctggagccatggtgataatgcctgcttcatagggtttcatgagggttgaaatcaaggtcattaacatgtaagtgttctgaaatgtcatatgaaagactggttttcag

SEQ ID NO: 417590 - DNA, 609 bp, Homo sapiens
catgttcttaaccatgatatgatgttgcttcatatgagaaaagggaaatgtaccctaggccaggacagcaggggagtgggtctttcaggcttcctagagtcccctctccaactttttttttttttgagacagagtttctctcgtctcccaggctggagtgcaatggcgggatctcagcttaccgcaacctccgcttcccaggttcaagcgattctcctgcctcaatctccggaatagctgggattacaggcgtgcgccaccacacctggctaattttgtatttttagtagagatggggtttcaccatgttggccaggctggtcttgaactcctgacctcaggttagccgcccayctcagcctcccaaagtgctgaaattacaggtgtgagtcactgtgcctggccttatagtcccctttgaatgaaaactgtgcatgtacacaggcacgggtgggatggccatgcttattctccagccatagctcactggatgagaggtgaccatctgtggttgcgacctggaaatcccataaaagaaggagcaatgaggtggccaaatgcctggagaaacccaaagagagaagaaagcagagataaagaagagacaga

SEQ ID NO: 417591 - DNA, 561 bp, Homo sapiens
cacacagggaagtgcaagagttttatggaacacacaacaaaagcatcccactagttattttaaagaaatccatgtttgtacctttagtctccaggatgaggttcagaggggtgtccatgcacacagtaggtgtttaataaatggggactaaattatctaataggtgcatggtcctgcagcctgtccggtgtgacagttgagggcagacccagagttggggagctggctgccttctctgttgaacaggatgtgcagacgtggctccaggatgcatctctgtggaatgcagtcgctaatacaaatgagcttcctcacgtcacaaggcatctattatgtggacagttgggcgatgggccgtgggactgggcgggctctctaggggagtttcagagccacagttatgtttagggccttcctttggagagggacttttccccatgaatgactcttaataacaaagataataatagccaccactttccaggtgcctgagctgtgcaaagggattaacccatggamtcctcacaatggcccatgaagccagtatatgatccccattgt

SEQ ID NO: 417592 - DNA, 635 bp, Homo sapiens
ttctgtgagccatagtagcaaaacaatcaaacccaaggacaaggtcatggaattcctgatttgtagcaggttggtcagatgcataggcttgcaacgggcattagaagtggggaaacagtcttgtgggactgagagccctcaacaggtaggatctgactctatctccaggtagatggtggtcagaatgaaattggattggatgccacccagctggtgtctgctgtgcaattggttgcttgcttgttggttttttccactcacgtctttacattccactatactaatgwacacctaaagagggatcctggctgagcaggtaagttcttagtaagtgtttgctgctatcattattgttgttattactctgacctcgactctacattaggcaacatggtatacaagctggccctgctctcatgcagcttattttctaataaacacctacaaaaattatacaataaggatttaacgcatgctatatatcatgttctaaaacatgcagaagacagagggatttcttgcattttgggtagtcagaaagacaatggaggtggttgcatggaaactgggctttgcataatgagctgtatgacagcagattagcctaaaaaatgggtaaaggagagcaatgcaga

SEQ ID NO: 417593 - DNA, 615 bp, Homo sapiens
ctatcctaatatttctgatatttgacagactgtttaataggcatatcagtctttataaagcacattctgtcccctcctagtcctacttgcattgtattgttaggttatcagattaaaaaattaccgtaaccttgtgtcccaaattarccatcttcatcaggtctctatcttagtctcacctctgcagtcttgggtacaagaacagtgtctttgagcaagatttctgccttgttcaaaattctcttgaagagaccatttacctcgttaccaaagattcattatcctcatagtaaattctgtcttgagttcttctccaggaacatattttctttcagaaaaccagcatgctctttctttcagtggaaaaggataattaagtaatactacataatttctttgttagccttagctgccaagggtccaattgtagaattagctttctcggacatttagaagaattgaatctcacttttgagactctatctgatctatttttatctctgtctcattttgcactatgtttaactcgttaaaattcatatcgtcttcatttctgcttctgatccgacgctggcctcaccatggctcaggctgctctcagcgtgttttcactcc

SEQ ID NO: 417594 - DNA, 615 bp, Homo sapiens
ctatcctaatatttctgatatttgacagactgtttaataggcatatcagtctttataaagcacattctgtcccctcctagtcctacttgcattgtattgttaggttatcagattaaaaaattaccgtaaccttgtgtcccaaattagccatcttcatcaggtctctatcttaktctcacctctgcagtcttgggtacaagaacagtgtctttgagcaagatttctgccttgttcaaaattctcttgaagagaccatttacctcgttaccaaagattcattatcctcatagtaaattctgtcttgagttcttctccaggaacatattttctttcagaaaaccagcatgctctttctttcagtggaaaaggataattaagtaatactacataatttctttgttagccttagctgccaagggtccaattgtagaattagctttctcggacatttagaagaattgaatctcacttttgagactctatctgatctatttttatctctgtctcattttgcactatgtttaactcgttaaaattcatatcgtcttcatttctgcttctgatccgacgctggcctcaccatggctcaggctgctctcagcgtgttttcactcc

SEQ ID NO: 417595 - DNA, 376 bp, Homo sapiens
agctgaattaattctaaatgggagaattttctgagaggcattagccactcttgaagaaaatgaataggttctctccccacatgtattaaatgtctatgattctctaatttaggagtcttttattgtcagttgaaagatggaaaacttcaggtgtatttcagggaaagagactctctcttacctaygcattgtaatgctcagaattagtttttttaggattttaattttttttattatactgcacctaaaaaaattatacaaggcatgtctccctgaaataccctctatcagaatgaattcttgaggggagggtaatatgaggagaaaattccttgagaggtcagaggtaaccaggtctgtgtgggtggcacagggc

SEQ ID NO: 417596 - DNA, 483 bp, Homo sapiens
cctgctagcagtttcagaggcagaagcttgaagaggctttgagtgcttttctccctaattgaaagagtagcttcagtaggagatattttagcctcaaaaaaaaatgagaaaaccaaatcattrgagaataaaataagaactgaaagaatggaggaaaacaaagtaatggattttgaggtgggaataaaatgttaaacctaggaaaaccttaggagataatctctgtgaggtaagtgcaggggcatcagaaaagaagccaatggatgcttaatagcctgttgccctgggagggaactgcctgcagcacatgctctatgcctggtcttcatacttgatggtaattcaggtcaatgtttacctgcttttacagacatgaagaccctatacctcccctattaaggtttactattatctgataatatcaatagcacttaaatcattttatactattaaacataatggcaactgcacattttcaaaagt

SEQ ID NO: 417597 - DNA, 483 bp, Homo sapiens
cctgctagcagtttcagaggcagaagcttgaagaggctttgagtgcttttctccctaattgaaagagtagcttcagtaggagatattttagcctcaaaaaaaaatgagaaaaccaaatcattagagaataaaataagaactgaaagaatggaggaaaacaaagtaatggattttgagrtgggaataaaatgttaaacctaggaaaaccttaggagataatctctgtgaggtaagtgcaggggcatcagaaaagaagccaatggatgcttaatagcctgttgccctgggagggaactgcctgcagcacatgctctatgcctggtcttcatacttgatggtaattcaggtcaatgtttacctgcttttacagacatgaagaccctatacctcccctattaaggtttactattatctgataatatcaatagcacttaaatcattttatactattaaacataatggcaactgcacattttcaaaagt

SEQ ID NO: 417598 - DNA, 593 bp, Homo sapiens
taccagctcagtcgactgcgactctgatgctgtaacatccaatgacatagatataaaatctcccacatattctcaacctgacaactctaggaaaggacattctattgatgtcttctgaaggcaagggatagatctctaatttcaatgcttactgcttgatgctatgagaatttgccaacctctccaccagtgtctctcctcaagtcagtggtttctctttggtgtggccattctttcagctgcccagartcacactgtggcaccccatttttcactattccctatccctatcccatttatctcatgtgtttgttcattcatcatccatttactgaggagttattatgttctatagtactgtttaagactgagagattttagagagaaaaagcaaattttgatcttaatgagtcctggcgactgtctgtgcttcaggtgatcccatccacagtgaaagttcatccagtcttggttctgattaccataattcagctgtttggtttcctatgcaggatgttaaccctttatataacaatttttttttgcataattcactacttcaagtacagctgtttctcactcgtatgtgtcaa

SEQ ID NO: 417599 - DNA, 593 bp, Homo sapiens
agtactttaccgttttagtataagataaaatgtggacaagattaacagagaggattaaacyttctttttattctacataatgaatttagacactgagaatttggctaatggaatatcaggtcgtataactgactgcatagcaattccataagaaaaaagagactctagtaattctattgcattcttggctacattgagcaacgccagcattaatttatgatgcaagtaccatgcttatataaaaaggatctaggccgtctttaaaatgaagagaaacaattcactctaaatagggcatggagtgggtggaaggtttggctgtgaatataaattattgaattgccaaccaaaagaaaaactttatattcctactgggccagagatacaaatccctggatgtatcacagcatattaccaaatgttttgtatagttcatttatttatgcatttattatttttaaaatatcacacaaactataatagccaataacgatagtgtaagatagtatgctaagcacagtggggaattcaaagaagaggtcaacatcactcttgtcctatatctcaacagaggcactattggtatttgggtg

SEQ ID NO: 417600 - DNA, 596 bp, Homo sapiens
aactacgtaacagtttacataaacaatcaaataaataagaaaaagaaaatcaataaaaactctatgccttaactttattcccccactttttaactttgtgttgtttctatttaaatctcattgtactgtcaatgtcttgacaattgttattattttatattggttcattggctagtcttttcatttggaataaaagtagtttacacatcacaattacagtgttacaattttctgggtttttctgtgtactgttaccagtgagttttataccttcaggtgatcacttctcattaaagtccttttctttctgaytgaagtactccctttagcattacttgtaagacaggtctggtgttgattaaatacctcagcttttgtttgtctgggaaagtctttatttctccttcacgtttgaagaatattttcaacaaatatactattctagggtaaaagtttctttccttcagcactttaaatatgtcatgccactgtctcatggcccgtaaggtttccacagagaagtcagctgctccattgtatgttatttgtttcttttctcttgctgctttaggatcctttctttatctttgaccttt

SEQ ID NO: 417601 - DNA, 562 bp, Homo sapiens
ttacaattaaaattataatttattcagcaaattgtagagggtattttagaatctttacctcaaaaattaaagttcagtaaattttcttggttgatgtcaggaaaaaaaaaaagagagagagagagagagactccattttctccagttcatgaccactgccaccatgggccaggagcaggatcaccacaaacttaggtattccagtcaccagggttttcagatttgaactacagtgaaattctgatttaatccacagttaaccctaaacatcctgcagagtgacagaccaagtcatcatctaagaatagggaacctatataatcttcatcccacagttctgaactcatgttagggaagcaatcacaaagtctcacccttgttcattagaataaaatttttaaaaaatagaaaatgcttattcttgttttacttcagagcacctgccactgatgcacccaagtgttgctttttcctgttatcaactttaggcccagctgtcaggtcctcacacctttcctcaytgtgactcaaggactgtggtgttttcatgtattatgttaac

SEQ ID NO: 417602 - DNA, 557 bp, Homo sapiens
gagttcgagaccagcctggccaacatggtgaaaccccgtctctactaaaaatacaaaaaattagctggaaatyagcagggtgtgggggcggacacctgtaatcccagcaactcgggaggctgaggcagaagaattgcttgaacccgggaggcagagttgcagtgagctgaggtcctgccattgcactccagcctgggcaacaagagtgaaactccgtcttaaaaataaataaataaataaaataaaaataaaaggaaatatatcctctctctttaacaatataagttgtctctactttattttgttcagctggcaacttcacatgaaagctgaagtcaagcaaaagcagagaaaaactggcaccctcttctaaaaggtctgggcggggtgggtctgctatcactgctggccaaggattcaagaaaaactatcctccctatattccagaaactgttcttactaaggctgacaatgattccctaatatcaaaaccaaaagattcttctgggctttcatcttcccaaagatgacagttcacttagcactgatgaccagta

SEQ ID NO: 417603 - DNA, 610 bp, Homo sapiens
gaaaggctgttctttgaaagaatgaataaacttattttgtaagactccagagaatagacccaaagccaatgagtggatgctgtagaatcaaattttgrtaagactattaaaaaattaagttggctcgctaacaaaaacataagcttacagtcttagaatatgtaaacaaagcaaaagtaaagtggtcatgttgtaaagggatgtctgttttgggttctctctgttgctctgtctccagactctatcatcctgtgaaggcttctgaaaatttactggcttcccagcaatgaaacaattctcatagaatccatctactttatcatccagaggggcatatgtggaagcaacccatacaagaattttcccacatttacaaggaagcctaacttgcccacaccatattttcctatgtgctttctggagaagcgagctcaggaacagtcaaggaagggttatgtgtatgtgagtttgcccttactcaaacatatagttatactgtgtatatggatgagtggtttgataaagagagagatgaataaagaagggagagagaagagagaaaaataaagatgagaatatctgtagccaagaaggcaaaaactgccatgta

SEQ ID NO: 417604 - DNA, 598 bp, Homo sapiens
gaattggtaacttaatattctgcaaatggtaaacagaataattcatgaaaaagcaatgtggactttgggccttcagagtggtagttttccttttttctttcttcctttcttccttccttctttcctcccctccttccctcctcccaatcttcaactataaaagtaatgtgtacttgacaaatattcaaacaataaagaagtrtatgctggaaaagggagaatttctccctcttcccacctcatcttacagatagtcatgcaatagagtctatccggaatcctatattgtcttcatcagctcaggttgctattaaaaaaaactatagactgggtagcttaaacaacactcatttatttctcacagttctgaaggcagggtgccagcatggttgaattctgataaaggctctcttcctggcttgcagaaggctgccttcttgcttccctcatatgatagaaagagagagctctagtctcatccttttcttataggggccctaatcccatcaagggactccatcctcatgatctcatctaaccctaattatctcccaagcgggttaggtcttcacatatcccttttggagcagaccactat

SEQ ID NO: 417605 - DNA, 501 bp, Homo sapiens
  misc_feature (1)...(501): n = A,T,C or G
nnnnnnnnnnnnnnnnnnnnccatgattgcaattcatctaccacacaccttcttttcctcccatctgtagcatctctaaaattggtcttatgattaatattgtcttggagtggcttcagctgcgattttcatctaattcttccagaggcaattgcggatttgcttttgccagtcacctgtagcatgatcaacctcaattttcttttgaggtttttcagaccacactagcagtgttaatttagcctgcagaactacatggctactggctgttgttcatgtcatcagggaacatamattttccctttcgccattctgggccaaagtggaggcatgtaagttttctggtaacattttctgtgggtcagatctttttctcattttccatgcattgaggacatcgtcctttggtatatgtactttatgaagggtttgccctttatctccccgtttttggtgatttttcttttgcagtagtagaaaaataatggtgtgtcttacaat

SEQ ID NO: 417606 - DNA, 501 bp, Homo sapiens
  misc_feature (1)...(501): n = A,T,C or G
nnnnnnnnnnnnnnnnnnnnccatgattgcaattcatctaccacacaccttcttttcctcccatctgtagcatctctaaaattggtcttatgattaatattgtcttggagtggcttcagctgcgattttcatctaattcttccagaggcaattgcggatttgcttttgccagtcacctgtagcatgatcaacctcaattttcttttgaggtttttcagaccacactagcagtgttaatttagcctgcagaactacatggctactggctgttgttcatgtcatcagggaacataaattttccctttcgccattctgggccaaagtggaggcatgtaagttttctggtaacattttctgtgggtcagatctttttctcattttccatgcattgaggacatcgtcctttggtatatgtactttatgaagggtttgccctttatctcccygtttttggtgatttttcttttgcagtagtagaaaaataatggtgtgtcttacaat

SEQ ID NO: 417607 - DNA, 578 bp, Homo sapiens
tattttgactgaaattagcatcatttttaagatttaatcattaagatgtaattaaagtgccatcatgtgtacttttaaattgctgattgaaatccacgtctcaatgtaacctttttctaaacatcatacctctctataccaaacccaaaagccccacattgttttagatttactaatacaatcaacatactattctacaactccaaaatattcattgaaagcaatttaatccttgttgttgttgttgttgaatggttgcatgtttaagggtatttcttttctaatattgcgtgcagatattgtactgaaactatgagaaaatagggcaaggagtgtaagagaatgctgtttataatgattkgtggcactcagagccttacattgggatataatgctaaattgacttttgcagaaatacacaacttgttgtgaagctttggacattttccataaccagtggtgccagatcctggaggggctgggcagtctgggcaaagacaaagtaaacaagtcagtagaaaaaacaatgattagaaagactgacctctgaaccataacatctctgagctcccaaaaag

SEQ ID NO: 417608 - DNA, 533 bp, Homo sapiens
attttgggcgctgctgtttgttagaaaggaagttctgctaaggaatcttttgccctcattatctgcctaaataatttgtttctatctcctgtatcaatagctcattggarcctcgaactattgggctcaagcaatcctctcacctcagcctcccacgtagctgggactacaggcatgcaacaccatatccagctaattttttaaatttcttgctatgttgcccaggcctgtttcaaacccctgacctcaagcaatcctcctgcctcagcctcccaaaacactgaaactttaggcatgagccaccatgctcagcctgtgaagagatattaataaaggaaaagattcattaatccagaaaatctgtaggccactcagatgagtcgttctgaactacacagaatttaaatttaaatttaacaaggtcttgttggtctctcagtaacaaaagcgaaggcatttttcatttctgggggagaaaaattgtttttatctacataagtagactaatttcatcaaaagagttgagggcccaa

SEQ ID NO: 417609 - DNA, 533 bp, Homo sapiens
attttgggcgctgctgtttgttagaaaggaagttctgctaaggaatcttttgccctcattatctgcctaaataatttgtttctatctcctgtatcaatagctcattggaacctcgaactattgggctcaagcaatcctctcacctcagcctcccacgtagctgggactacaggcatgcaacaccatatccagctaattttttaaatttcttgctatgttgcccaggcctgtttcaaacmcctgacctcaagcaatcctcctgcctcagcctcccaaaacactgaaactttaggcatgagccaccatgctcagcctgtgaagagatattaataaaggaaaagattcattaatccagaaaatctgtaggccactcagatgagtcgttctgaactacacagaatttaaatttaaatttaacaaggtcttgttggtctctcagtaacaaaagcgaaggcatttttcatttctgggggagaaaaattgtttttatctacataagtagactaatttcatcaaaagagttgagggcccaa

SEQ ID NO: 417610 - DNA, 533 bp, Homo sapiens
attttgggcgctgctgtttgttagaaaggaagttctgctaaggaatcttttgccctcattatctgcctaaataatttgtttctatctcctgtatcaatagctcattggaacctcgaactattgggctcaagcaatcctctcacctcagcctcccacgtagctgggactacaggcatgcaacaccatatccagctaattttttaaatttcttgctatgttgcccaggcctgtttcaaacccctgacctcaagcaatcctcctgcctcagcctcccaaaacactgaaactttaggcatgagccaccatgctcagcctgtgaagagatattaataaaggaaaagattcattaatccagaaaatctgtaggccactcagatgagtcgttctgarctacacagaatttaaatttaaatttaacaaggtcttgttggtctctcagtaacaaaagcgaaggcatttttcatttctgggggagaaaaattgtttttatctacataagtagactaatttcatcaaaagagttgagggcccaa

SEQ ID NO: 417611 - DNA, 590 bp, Homo sapiens
aatgttggaaacctactttgagatgtttcctgttctggtagcattccactttatacatgtcatagcaaattattttctctcaagattttcctttcagtgtgagatcactctctttacccagactttctagaatttgactgaagctgactggaatataccaaattatagccttctacggttttttttcattttgtattagattattttgcctatcatttctgccattcctaggtatattccttttgtgtctcatgaaatattcttctagtcacaaattttatttttgttgaaatatttgaatgtgaattttgtgaattcttgataacttacactaaggctttacctatatactttttcatgcttctatactttattcaatctccccttttaataagtccccaaattggattattagtattcttttcatgcttttcttcacataacacagtaacctttcctggtataatttaagctaatataataaccrcaaatatcaatgatatgaatggattttactcttacctgataaacagacattgctcaaagggttttatagttattccttggtgatttcacttaaggataatggt

SEQ ID NO: 417612 - DNA, 585 bp, Homo sapiens
catcatcactggtatcatgatcaccttgattcagaaccattttgtctattttcccattagtcaatgagtaaaaacctggagcctcattatgtaggttaaaagcttttttgatattcacttctttcagcttactaatggattttgaagatactcrttttgcatatataagaaggtcagacatcaatttttttttctcacttgacatatggaatccttcaaagccacgaccatgttcatcattatcatggaacatagtcatatcacaggcaagaggttgtgtcaggcactcacaaatatgtctttggtcactgtgttccaagcattggcaacagcatatgtggcatctttcatgctaacttccttttgaaaaccttccacactcatgcctctgttcattgttgctagcatgctattcaagaaaatgtttgtatattagtcttcattgatcgaaagatactctgttaaagtggctgaattaatgaagttacttttgggggaaagtatgtagcataaacattattttctatgagaatttcagctggaggatgagcagaactgttgccacggaaaaacaaaatcttgctg

SEQ ID NO: 417613 - DNA, 592 bp, Homo sapiens
aaggatataataaactgtaaattagaagaatttcttacaggtacattgtgaggtgtttcaataattaaaatatattacacagtaattgtcaaatgcttctgtaaatacagtgccacattatccctttagtaagatacactcaattattaaatatgtcgcagtcaatttttaaaagtccccccaaaataacattaacaaatgctgagaaaagtatagggcattttaatataaggactgtcttacaaaatgggcattttctatcacaatgctaggggctttcagggccaaattacaatttctgaatctactttayacaagtttctattctctacttgaattaatttaaaaatgtattcctttcaacaaatgtttttgagtactcactgtgtccttacactgtgcatgttgatgcgtcctgcaccataattgattttaagatatcatggaaaaaaacacatgtgtcaaagatttacttttgcacatattatttatagaattattgtaaagcctgactaaatctacaataggacaaaacaattatgaactggagaaatatctcatgagttaagggacagttacaaaatagcctaat

SEQ ID NO: 417614 - DNA, 592 bp, Homo sapiens
aaggatataataaactgtaaattagaagaatttcttacaggtacattgtgaggtgtttcaataattaaaatatattacacagtaattgtcaaatgcttctgtaaatacagtgccacattatccctttagtaagatacactcaattattaaatatgtcgcagtcaatttttaaaagtccccccaaaataacattaacaaatgctgagaaaagtatagggcattttaatataaggactgtcttacaaaatgggcattttctatcacaatgctaggggctttcagggccaaattacaatttctgaatctactttacacaagtttctattctctacttgaattaatttaaaaatgtattcctttcaacaaatgtttttgagtactcactgtgtccttacactgtgcatgttgatgcgtcctgcaccataattgattttaagatatcatggaaaaaamcacatgtgtcaaagatttacttttgcacatattatttatagaattattgtaaagcctgactaaatctacaataggacaaaacaattatgaactggagaaatatctcatgagttaagggacagttacaaaatagcctaat

SEQ ID NO: 417615 - DNA, 631 bp, Homo sapiens
catgggaaatgtaactgacagaagcttgatattagtggttgaaayttaaagtgagatttcaacatttaagtagaaggttgtggctcaatttagaaaaatgacgatgatggtagtgatggaagagtggattttagagatatacaatctctaagtttgacataatattatctggttatggtaaacagtaaattaatggaaataaggaatttagaaaggtaactaaatttctaatatgataaagctattaactaaaggtagcatacaaagaaaaaacgcagagtttagttttaatccgttttttaaaaaatttaactttattggcattgtattatattgttgccatatatatccaaattgattctttgactagattatacacactggcccaattacaaaatgtctactttactttgttagaaagagaatagaatttatatctgccactttgtttcttatataaaaatagtaacacatttcaattacttatttacctggattttatatttaatactacctacctataagtgcacaaagcagattcatcaacactctttggttcaggtttcaccataaaagtgctgatttacctccaggaaaattttttgtaatggctggtttatagaaattgaaa

SEQ ID NO: 417616 - DNA, 631 bp, Homo sapiens
catgggaaatgtaactgacagaagcttgatattagtggttgaaacttamagtgagatttcaacatttaagtagaaggttgtggctcaatttagaaaaatgacgatgatggtagtgatggaagagtggattttagagatatacaatctctaagtttgacataatattatctggttatggtaaacagtaaattaatggaaataaggaatttagaaaggtaactaaatttctaatatgataaagctattaactaaaggtagcatacaaagaaaaaacgcagagtttagttttaatccgttttttaaaaaatttaactttattggcattgtattatattgttgccatatatatccaaattgattctttgactagattatacacactggcccaattacaaaatgtctactttactttgttagaaagagaatagaatttatatctgccactttgtttcttatataaaaatagtaacacatttcaattacttatttacctggattttatatttaatactacctacctataagtgcacaaagcagattcatcaacactctttggttcaggtttcaccataaaagtgctgatttacctccaggaaaattttttgtaatggctggtttatagaaattgaaa

SEQ ID NO: 417617 - DNA, 634 bp, Homo sapiens
ggaacttactggatttcccaaagctgcgctcccaccagagacagagccagcactgtgctccatccctcatggctggtatggtctgttctgggggcaattaaccatggtgccctttcatctctgaggttttgttgctgctgaaccacccctgcctgggagcctgccatctctgagttgagctgctgctacaccccaccccatgggaccaagctgttacagagccactgcatctgcatttcccaattgctgctgtgtcttgcccctggggcctgagctgaagcagtgcaccgtctctccaggaaatgttgccttggcctcccagagcagtcacaacccctggttcctgggctgaagtggcaccctgcctcctcaggaaatgatgtctttgccactcaaagtagtcacacccccttgtgcttgagctgaagtgttgccctctctccagagcagccatgcccactaggcctaagctgaagcagcacatcacctgctaggaaatcagtaccktggctgggctaagcagacatacatcccagggctaagccaaagtggctcctcatgtccaagggaaacagagagttgtctgagctcagacaccatgtcctacaggccacataactagtattctgcctct

SEQ ID NO: 417618 - DNA, 436 bp, Homo sapiens
accatgcccagctaatttttgtatttttggtaaagacggggtttcaccatgttgaccatgctggtctggaactcctgacatcaggtgatcygcccgtctcggctttccaaagtgctgggattagaggcgtgagccaccgcacctggcctatacattgttttagatttacttctttcacttagtgatatgcatttaaatttcctttatgttgttagctggcttgatagctcatttcattttagcactgaataatattttattgccttgcataaatcacagtttatctatttacctactgaaaaggacatcttggttacttccatgttttgacaatcatgaataaatctgtcaaaaacatctgcaggcaggttttttgtttgtggaaataagttttctcttcatttgagtacataccaaggagcacagttgcttgatc

SEQ ID NO: 417619 - DNA, 423 bp, Homo sapiens
atacacacatacatacacaatagtcatataaacacgtttccttgctctgtcagcttagaaggtctggaagcaatgatgctctagtagcaatgagcacacctaacacctacatcttgacttctaaaacaatttttcgattaaagaaaccatgactcctggagaaatggctgattctaagactggggcaagaaatacacaagatgaacctggaacatcttacagtgccagaaaataaggaagttcacaaaacgcacaatgaagggccaagatggctgactagaaacagctgtggtcgggtcggaggcttccactgagaagaacaaaaacaatgaatgaatactgcatcagcaactgatatgtccagcttctctcaytgggactgactagcagttggcatgactcgtggagagcgagaaaaagcag

SEQ ID NO: 417620 - DNA, 517 bp, Homo sapiens
ttatgggagttttggaaagagaggagattaagatagaaacagaaagattttttaatacaataatttctcaaaacttcccaagtcttagaagagatatgaacatctagatccatgcaactcaaatatcactaaacagactcaacccaaacaagccccttccaaagcacactataattaaactgtcaaaagtcaaagatgaggagagaattttaaaaggaacaagagaaaaaggttaagtcacatgtaagtaaatccccattagaatatcagyagaaaccttgtaggccaggagagaacaggatggtatatttatgtgctaaaagaaaaaaaaaaaactttctgacatgaacactatacccaaagctggccttcagaaatgaaggagaaagtttttccaagacaagcaaaagttgagggagttcaccacttgacctgctttacaagaaatgctttaaaaagtttttcaagtgaaaacaaaagaacagtaattactaactgaaaaacataaaagtataaa

SEQ ID NO: 417621 - DNA, 575 bp, Homo sapiens
gaaaacttttgagtaagtgccagaatgcctgtgtgagtggaatgtgaaggaaaaggggatgcttgataacaaatacaggtggcgaaataggctaagatctttcaaagaactgaaagccaaacataagtaatggagaggagagggttggggtaagaccaacaggtttggattttaccatgaccagtttggctaaaatgtagatacggaagtgaaggcattgagaatggatgacattgataaagaagccattatagtctagatgagatatgatttattgatccaaaatgatgatattaaggaaagaatgtaattttcacgtttaacgatatttagaaggaaaaattaatgggacttcctgatagatattaaatagtaggaattgacctgtagaagaagatgaatagctcaatactgtaagaaactctggaatataacaatatttgagaaaaaacttatcaattaaacycaggcatatcagtcctgaaaaacccttgaaaaatctaagtaatactgtggagtaaacagtgacttgaaatagctgtagttcagaaaagtctggctcaaaattataatct

SEQ ID NO: 417622 - DNA, 525 bp, Homo sapiens
aaaaatgggaggtagaatatttgaaagtacaaaagaatgagtgcctaaaaacactctyattatcttcataaacttctgggaggcagccttatagatcccagaaatccaattagtctttgtttattttttcacatgttttgcttctgctttatgtatggttcactttactgctgggaaatacatattaagagaaagtgaggtgacagcatgtaggggtaggggaatttggcccaacttggatacatgtccccttctccctctctgatttaaagcaaatcaaggcagacctggggaagttttcagatgatcctgataggtacatagatgtcctacagggtctagggcaaacctttgacctcgcttggagggatgtcatgctactgttagatcaaacccttgcctttaaagaaaagaatgtggctttagctgcagcctgagagtttggagatacctggtatcttagtcaagtaaatgatagaatgacagccaaagaaagggacaaattccctactggtcagcaagcca

SEQ ID NO: 417623 - DNA, 506 bp, Homo sapiens
acacagagttgacgtctgaataacataatgaggtggttagaactgctgaccccctcacagttgaaaatctgcatataacttttgactccacaaaaacttaagtattaatagaataccgttaactgaaagccttactaataacatagtcaattaacatgttctatatatgtgttatacactgtatcattaacacatgttttgtatattatatgtattatacmctatatatatatatatatatatttttttttttttttttttttgagacagaggcttgctctgctgcccacgctggagtgcagtggtgtgatctttcctcactgcaaactctgcctcctggattcaagcaattctcctgcctcagcctcctgagtagttgggattagagacatgccccaccacacttggctaattttttaaaaattatattttaaattttagggtacatgtgcacaacatgcaggttaattacatatgtattcatgtgccatgttggtgtgctgcac

SEQ ID NO: 417624 - DNA, 604 bp, Homo sapiens
aaaatctaatcagtgtaataaaaagtggagttaattaatttatattgctgaacatctgtttctagttataataaagttggagtggttgcagagtgtattttcgcttttagatcatctaaaatcagatgctttgaaaaatttcaagtatagtgaatttgatgatggatacaacagtctcaagaaaaaatagcattttgtattatttgtactgttcaaaaacagatgttctttaaagatgaaatcagtktttactaaaactgaaataaagttggcagatactaagacatatgacaataaggtccatgaaatattttacaatatcatatctatttgtatataagctttcaaatgtcgcaagttttattttctgtgtgccatatatgagcagagtttggcacttgaggactgtgcagaaccctccaagatactgtgggtgtctacgtttttctttttttcaatctgttaaaccacatctaaaatacttctgtatttaaataaattatttaaatcacattaaaaacattcactcacacaacagaggtttattgaatgccaatgtgctgaccactacatgctgcggatgtagcagtgaacaaaatattcc

SEQ ID NO: 417625 - DNA, 592 bp, Homo sapiens
acactaagctgacggcaagattgatatgatccaattccaagaggcatttagaagatagaagcaatggacatggtaggttgatgggtgctgcttgctttgcctggctcacgccactttctctgattatactcacccattccagctcctgcctgtgtttccatggtcacaggcaaatataagacccagagaactcagtcttacaagggacatttggctktcctctgagttatgaatcacatcagagctctcttgggtttattcagaccagcatgcatccagaaacatttttaaaaagacatatcactgtaattgagaatcacacacacacaaaatcaaaactgagtattttgctggatcacctatccggtcgagaagacggaccaatgatggacaagaaccagctcagtttggtagtcggaacatggctggggcttagagcatatgtgtacaaagtggtcacatacatatttatactgtaaagcacagtatcctcagagggttgcagaagaagggccaccccatttgagaaaggagagagactcagctggaaggatctgggaaatttctttcatggaaaaggtggccacaaaga

SEQ ID NO: 417626 - DNA, 592 bp, Homo sapiens
acactaagctgacggcaagattgatatgatccaattccaagaggcatttagaagatagaagcaatggacatggtaggttgatgggtgctgcttgctttgcctggctcacgccactttctctgattatactcacccattccagctcctgcctgtgtttccatggtcacaggcaaatataagacccagagaactcagtcttacaagggacatttggctttcctctgagttatgaatcacatcagagctctcttgggtttattcagaccagcatgcatccagaaacatttttaaaaagacatatcactgtaattgagaatcacacacacacaaaatcaaaactgagtattttgctggatcacctatccggtcgagaagayggaccaatgatggacaagaaccagctcagtttggtagtcggaacatggctggggcttagagcatatgtgtacaaagtggtcacatacatatttatactgtaaagcacagtatcctcagagggttgcagaagaagggccaccccatttgagaaaggagagagactcagctggaaggatctgggaaatttctttcatggaaaaggtggccacaaaga

SEQ ID NO: 417627 - DNA, 482 bp, Homo sapiens
atcgtttcattcataaatacgtcagcctacatctttaaaagataaggacttctttggattttaatatagcaatacaattacctaaaaataattcctaaatctattacctagtcagaatgtaaattctagttgtctcaaaagtgtcatttatkttttacaatttgtttgaatcaggatcttcttcctcttcttctttttctcttcttcctcttcctccccttccccctccccgcttctcctcctccccctccttctttgtcgtcttttttttttttttttttttttaaagagatgggggtcacacgtttttccccagactggtcttgaactcctgggctcgagtgatcctcctgcctcagcctcatgagcagctggaactacaggcatgtacccctgtgcctggctttgaatcaggatctggaagtcattcttgactctttccttttcctcctacctacaaccaatctgcctataaatcctgt

SEQ ID NO: 417628 - DNA, 482 bp, Homo sapiens
atcgtttcattcataaatacgtcagcctacatctttaaaagataaggacttctttggattttaatatagcaatacaattacctaaaaataattcctaaatctattacctagtcagaatgtaaattctagttgtctcaaaagtgtcatttattttttacaatttgtttgaatcaggatcttcttcctcttcttctttttctcttcttcctcttcctccccttccccctccccgcttctcctcctccccctccttctttgtcgtcttttttttttttttttttttttaaagagatgggggtcacacgtttttccccagactggtcttgaactcctgggctcgagtgatcctcctgcctcagcctcatgagcagctggaactacaggcatgtacccctgtgcctggctttgaatcaggatctggaagtcattcttgactctttccttttcctcctaccwacaaccaatctgcctataaatcctgt

SEQ ID NO: 417629 - DNA, 570 bp, Homo sapiens
ctttttacgttttctctagtaagaaagtggggaggttgtgttcatctccttgttttttcttgcccttttgataagggaagaattcaggttcaaggaatgcctaggattattccgtttactgcatatgaatatcagcggagtttgaactccctttagcaggccttgagttgcctgataaaattagtggagtagtgggtttgaaatgtatgcctccagcctccctaaagctaaggaagacagtggccaaaatctttcttttcagcatccacgtgtccacagagcctaagacttagccaggttctgtgtagactagaaaagatattrcatactggttcctggtcttcaaagagctcaccagtctgttttgttttgtttttttgtgttttgtttttgttgagacagagtgtcacctgttgcccaggctggagtgcagtggcgctatcgtagctcactgcaacttccatctccaaggttcaagtgattctcatgcctcagcctcccgagtagctgggattacaggcacacaccaccacaccccgctaatttctgtatttattttctagtagagac

SEQ ID NO: 417630 - DNA, 611 bp, Homo sapiens
ttttaaaaccatggcctaaataacattgaggatagctgccgccacctatcttgagtctcttggtaattcccactctctgcagtcttccttcttactcctatcccagtgtggggagtagacaatctgggtggtggacaacagctgctggcttccaccctgacacggctgcatttcattagtgggtaaactgattgctcagagtatgtttatgtgtgggtgtggttgtacaactctatgcactctgtgcgctatgtatgcagatacagatacacaaaagtcattatctcgctctcagcccaacctaaattcattcctgctgtaagagttataaatggaaggttccartcccttggtggatatggccttttggtaatatctgccccaaattctggctccccatcctctttgtgtttgtttatatgttatttacccttgcatcagaaaacttccccagactcagggcctgagtcctattatccggacatggaatcttcttcttcctctgaggcctagaaagccccaaatggttttctgatttagaaaatgaaatagactttgactcttgtggcaagctatgaaattcccaaccaacagcttccactaaatttata

SEQ ID NO: 417631 - DNA, 611 bp, Homo sapiens
ttttaaaaccatggcctaaataacattgaggatagctgccgccacctatcttgagtctcttggtaattcccactctctgcagtcttccttcttactcctatcccagtgtggggagtagacaatctgggtggtggacaacagctgctggcttccaccctgacacggctgcatttcattagtgggtaaactgattgctcagagtatgtttatgtgtgggtgtggttgtacaactctatgcactctgtgcgctatgtatgcagatacagatacacaaaagtcattatctcgctctcagcccaacctaaattcattcctgctgtaagagttataaatggaaggttccaatcccttggtggatatggccttttggtaatatctgccccaaattctggctccccatcctctttgtgtttgtttatatgttatttacccttgcatcagaaaacttccccagactcagggcctgagtcctattatcyggacatggaatcttcttcttcctctgaggcctagaaagccccaaatggttttctgatttagaaaatgaaatagactttgactcttgtggcaagctatgaaattcccaaccaacagcttccactaaatttata

SEQ ID NO: 417632 - DNA, 569 bp, Homo sapiens
aaatagactttgactcttgtggcaagctatgaaattcccaaccaacagcttccactaaatttataacatatacaacatctaaaagtatcactgatctagcatgaactcgaattatagaggcattcaatgcccatcgggtaagatcaccagcctcttcccaagcactcaaaattgggcagttttccagtggaccataaagctcccaggaatgctgattggcatgtgtgtttgaatttctgktgctttgtaaaaggaacttaatccacagaagagtacctggaagagatggcatcttccctttctctgtgtgtgtcttacccccacatagaatcgtcgtaataacttcccaggcccagagcacaagtatcatctttattttacctatagtattttaaaaatcgcaacataaattcctccccagaaatattttttacagacacatcttttttttttctttttttttttttttttttttttgtcttttggcaaaagcaaaatcagactaacaggaaacacatcagccctactcagacactatcttctggcctgcaatgaccaatcctatttga

SEQ ID NO: 417633 - DNA, 569 bp, Homo sapiens
aaatagactttgactcttgtggcaagctatgaaattcccaaccaacagcttccactaaatttataacatatacaacatctaaaagtatcactgatctagcatgaactcgaattatagaggcattcaatgcccatcgggtaagatcaccagcctcttcccaagcactcaaaattgggcagttttccagtggaccataaagctcccaggaatgctgattggcatgtgtgtttgaatttctggtgctttgtaaaaggaacttaatccacagaagagtacctggaagagatggcatcttccctttctctgtgtgtgtcttacccccacatagaatcgtcgtaataacttcccaggcccagagcacaagtatcatctttattttacctatagtattttaaaaatcgcaacataaattcctccccagaaatattttttacagacacatctttttttttyctttttttttttttttttttttttgtcttttggcaaaagcaaaatcagactaacaggaaacacatcagccctactcagacactatcttctggcctgcaatgaccaatcctatttga

SEQ ID NO: 417634 - DNA, 569 bp, Homo sapiens
aaatagactttgactcttgtggcaagctatgaaattcccaaccaacagcttccactaaatttataacatatacaacatctaaaagtatcactgatctagcatgaactcgaattatagaggcattcaatgcccatcgggtaagatcaccagcctcttcccaagcactcaaaattgggcagttttccagtggaccataaagctcccaggaatgctgattggcatgtgtgtttgaatttctggtgctttgtaaaaggaacttaatccacagaagagtacctggaagagatggcatcttccctttctctgtgtgtgtcttacccccacatagaatcgtcgtaataacttcccaggcccagagcacaagtatcatctttattttacctatagtattttaaaaatcgcaacataaattcctccccagaaatattttttacagacacatcttttttttttytttttttttttttttttttttttgtcttttggcaaaagcaaaatcagactaacaggaaacacatcagccctactcagacactatcttctggcctgcaatgaccaatcctatttga

SEQ ID NO: 417635 - DNA, 684 bp, Homo sapiens
atcttattacttttcccatattctgtttgtttgaagcgagtcactaggtccagcccacagtcaaggagagagcatgagttccaggaggcaagaatcattgagagttatcctaaaagcacctgccacaacctgtaagtcctacatgatttgacccctattaccctctaatctcagctccttctacttcccttttgcccactcaaccacagccacactacctccttgttcttcagtcacaccaaccttgctgctacctcagggcctttgcacctgccatgccttttccatgggacrtttttcctccagataccttcaccactggttccatcatttccttcaggtctctcctcaaatattttctcagcagggaccttccttatcaccacatgtaaaataaaaactcttcctcttccatatccacagcgattctctcctcttcacatctgcttgtacatctatgataagaccactaactcttcatcttctcactctgatagatcacacggctcaatggccagatatattctaaaggatgttaatccctatagccttcccacatgagaaatgagacaatcccactatacgcaacattgtagacggtcttcatctttaatgaatgaagacagtggggtctcaatgggaggtattgtagaagttaaatgtcctcagataccctacatacag

SEQ ID NO: 417636 - DNA, 515 bp, Homo sapiens
ggatgtgttttcaggatcatgttttcacttctagaattttctgcctctgtgggccatgttggctctgtggacatcactgcccatgaagccagaaaattcatgtctaagccatgtgaggtcacgctgaagaaacaactcatggtcagaacaataggagaggttattaagagatattaactgcctctcatgsgtctgctcccttggtcaatcctcaatacatgggactgtccctcccttcctctctctctctctctcacacacacatacatacatacatgcatggagacacagatacacacagttgttttgcattgtcttttggattctttttcagtcactatcttcctgtatgttccacagctgtgaggctaagcagtcacagagaatttcagagctaactgtaaccactgtgcaaaaaattagctcaaatcctcagcaagggggagagtggctgcttatccacccaaatgaggtcatatcttcctctctctgttggtcctctgtaaataaaaaga

SEQ ID NO: 417637 - DNA, 617 bp, Homo sapiens
gttgaaattgaatattaccataaggcccatcttaaagcatgcatatggcatccacatgatgtggtcatgactccattaataccagggcgattagagcaaagttgcatgatgatggagctctcacatgaactgtttctaaacaatgatgcaagtgagaagtgaactggtccccacaatgctttgccaacaaacatttgaatagcaggcactgccgctactttctcattctgatgaatgggaaaagatgggtggggtggatgggtatgtatgcatttgtgtatgtgcatataggtacgtgtgtgtttgttgattgctaaagaaaacgatctacactttcttaactttaaaaaacagtgttcactgcattactctttataattctatatcttctttaaaaattagmtaagtacacacaaacccaaagggatgtccttttttcaacacactgcaactagttcaggggtggcaaacatgtggcacacttgtggccaatgccccaagggcagccttgcccagggatgtgggttgatgctaccatgggctgttttggatttggcctaaccctactcacttcagagacagtaaaaatgatactgagagaaagaaagtggtttaca

SEQ ID NO: 417638 - DNA, 567 bp, Homo sapiens
acactgccctcaccacgggtctcgggccaggccttgtgctgagagccctgggtgccttgcctgggtcagttctcattgcctcgtgcgtggagtgctcaccacagaggggttgactgtgtgtgaagattctctatatataatgatttaaaaaattaaattaataaataaytacatatttgaagggcaaaaaagatattccctgatgcttaggccaaggaatgtgtcaagcaaaaagtaaattcgggtcagtcttcagaagaaaaaccaagaagacagctatagataattacccacctctgtgagcccatagttcttctgggtccctcttgccagcaaggaacccctgctttgtaggacagtgtattttcttcataaaattaagcttattcaactgaaagaatgttctttaatcctgaagctgtgtcctcaggttatttgacaaaatgccaggttgggctgcagagcctctgtcagcctctccagacagcatccccctggccctaggatgcccacctgtatggaacacagcagtgacccctctgatctgggctgcgactctgggtctgc

SEQ ID NO: 417639 - DNA, 486 bp, Homo sapiens
ctttgtttcttatttggtctttacatatttcacagtgaaatgtgttgttttgatcaatagatctttaattggagttttatgtttgaaaaagggtccactcaagtttggaacttcgttgagctagagcactagatgtcccttcaatcacccccatgggtctgtgtgaaactctgaggtagaaatgaagtgaattaggagaattaaaacaaaaacatgtccctctgctcggtgggtatttttctttttgaaatacctttatcagggcctcagatctcttcctcacatctcctttgtgcctcacctattgttcctcacaggttgcctgcgctggtcccatctcatcacatgggctctccctggtgggatrtccccgattgagtcctgggctctcgctgtcctctgcctacactcaccccttcggtaacctcatctacgtgcagacagtaaccaagctcaggcctcctcccgggacatgagcttcatatt

SEQ ID NO: 417640 - DNA, 557 bp, Homo sapiens
aaaagtcgggagaggtacctgccttagttagatggtcagggagaccctttcttaaggatgatggttttttygtttgtttgttttttgtttttgagacagaatttcactttgttgcccaggctggagtgcagtggcacaatctcggctcactgcattctccacctcccaggttcaagcagttctcctgcctcagcctcctgagtagctggcattacaggcacctgccactatgctctgatgactttttgtgttttagtagaaacagggtttcatcatgttgtccaggctggtctcaaactcctgagctcaggcaagccacctgtcttggcctcccaaagtgctaggattacaggcgtgagccaccatgcctggccaggatgatgtattaagctgagtcctggaggatgagaaaaactgtggagactggtccaggctgaagaaacagtgtgtacaaaaactctgaggcatggggatggtgaatatgctgggttctggaatctgttcatagatttaggccagattttcaaagaagggtaggtgacccaggttttgttgac

SEQ ID NO: 417641 - DNA, 557 bp, Homo sapiens
aaaagtcgggagaggtacctgccttagttagatggtcagggagaccctttcttaaggatgatggttttttcgtttgtttgttttttgtttttgagacagaatttcactttgttgcccaggctggagtgcagtggcacaatctcggctcactgcattctccacctcccaggttcaagcagttctcctgcctcagcctcctgagtagctggcattacaggcacctgccactatgctctgatgactttttgtgttttagtagaaacagggtttcatcatgttgtccaggctggtctcaaactcctgagctcaggcaagccacctgtcttggcctcccaaagtgctaggattacaggcgtgagccaccatgcctggccaggatgatgtattaagctgagtcctggaggatgagaaaaactgtggagactggtccaggctgaagaaacagtgtgtacaaaaacyctgaggcatggggatggtgaatatgctgggttctggaatctgttcatagatttaggccagattttcaaagaagggtaggtgacccaggttttgttgac

SEQ ID NO: 417642 - DNA, 580 bp, Homo sapiens
catcaggcttcaggaatactgaaattttagccttttcatttctttcgctagacatgaaattcttcataaacstgacctggacggtgtgaggaggagcctctgttgcctggcccatggcaggatgcattgctactctctaccctgggtcacaggtgcagccacgactgagcagaaggtgttcgcactcccagcaggtctgttcagtggtcattacagctaagaggtgccctgtctatgcagcacaggttaatgatgcccacaggggacctttttccagagtcatggtagatgagatggtggcttggttagaaggtatgaagtggtcctcacttaaggcagtgacattcaggctttgggggtggctggcaatagatctggaatgctgcacatctgggtgtccagtgccctgctgcccgggacagtgctggcacctagggcagccagcaggagcctgcagcacttgatccccattagccctggtgtcactgcgaaaggactgagttgccgggaaaccctggaggcctctgccaactactaggcagcaattctggaggaaacaggaaggagcaacctgatttta

SEQ ID NO: 417643 - DNA, 580 bp, Homo sapiens
catcaggcttcaggaatactgaaattttagccttttcatttctttcgctagacatgaaattcttcataaacctgacctggacggtgtgaggaggagcctctgttgcctggcccatggcaggatgcattgctactctctaccctgggtcacaggtgcagccacgactgagcagaaggtgttcgcactcccagcaggtctgttcagtggtcattacagctaagaggtgccctgtctatgcagcacaggttaatgatgcccacaggggacctttttccagagtcatggtagatgagatggtggcttggttagaaggtatgaagtggtcctcacttaaggcrgtgacattcaggctttgggggtggctggcaatagatctggaatgctgcacatctgggtgtccagtgccctgctgcccgggacagtgctggcacctagggcagccagcaggagcctgcagcacttgatccccattagccctggtgtcactgcgaaaggactgagttgccgggaaaccctggaggcctctgccaactactaggcagcaattctggaggaaacaggaaggagcaacctgatttta

SEQ ID NO: 417644 - DNA, 574 bp, Homo sapiens
cagaaaggttggcccagtgagctaagctggattccttgggaatgggaaatagaaacagatgaaagaggagagaagtcagaccaagggtttatctggaatatttagaagctgacagacatcacagagtatttttacctctccacagtgaagaggtgtagagattttagaaatgtatcctgaatattagaaccagttaaaatattctgattcttccaaatgcctgcttctcccaaagggcctctcctggagtttctaagtctctagctgcaccccaggaagaggatctagtagtaactgggaggggctgggacttttatctgactcccaggattgctgcaggtttttcatgaatatggggttggactcccaagttaatgaagcccatgtttatccrggctgaaatacaaatataaatgttatgttcgtatatatttaaagggaagattcatttgagcgttaatgatttgaaactcagctctgctcagtatggaattctagggacctggttaatggtgactgtaggtcaccttgctgtcatccccttcctgcgtcctcaggatacatctcaagtagg

SEQ ID NO: 417645 - DNA, 604 bp, Homo sapiens
ccaaagtagattcgaaaattttctggaactcctgaacatgtgtattcaaggatgaataagcaacttcttgcctctatttttgctgttttatagagaaaaaaattaaggccctggaaactgaagtgcttttcccaacagtggggtaaatgtcagagtcaatgctttgttttaatatcctggctttccctatacatcccaccctagagttctgttgtgctgttcctttgtatgactttctaaagcctgaaaaaaggtgataccatatccaattatattaactcggtagcacacaacatcggggactgacataarattattatccttgtggtattactgaagtcctgtctcactagtacttgttaaatagtcaccctggctaaatacatggctttgattttttttaatcagttaaaaatattttaaaatatgtgtcctacatatataaccccagaaaatcaatgcttttaatcaaggtttaaaaattccaaatttggataaaaaaatttgttttgttttgttttcactgtcactcaatcaaaatagaagcaactaattggatagaacagcacaggcagaagcattactcacagtcaaaaatgggatg

SEQ ID NO: 417646 - DNA, 632 bp, Homo sapiens
ttatattacatgttatgacttgaatactgtttggtttccagtatccttctatcccatctagatgagctcttagttgaaaatgacctacaggagggtgggggaactttcaaccatacctattgatttgtctagcactgtaacccttcaccctgcatgtgggaagacaactccgctkttttactgggaaaatgcgccatcctattccatgcagccttgcaggggtctgtctctccctgataaaggtgcagcacatgggaaaattgcacaatcacatcaaacagacttcaccagaaatctaaattataaaaagagttgcactcatattaaaggcaatttcttcaccacccttttcagaggcaattccctgggtctgtacatgtatgcctggccaagattcagggaattcctttagttcccagctttcactgggcataatcattcagcattttcttccatcttttaaaacactgcattggcttcctacggctgctatcacaaattacaacaaacttagtggcttaaagcaacacaaatgcattatctgacagttctataggctgcaggtttcagatggatttcagtgggccaacatcaaggtgtcagcagggctgagctttcttctggaagctctg

SEQ ID NO: 417647 - DNA, 632 bp, Homo sapiens
ttatattacatgttatgacttgaatactgtttggtttccagtatccttctatcccatctagatgagctcttagttgaaaatgacctacaggagggtgggggaactttcaaccatacctattgatttgtctagcactgtaacccttcaccctgcatgtgggaagacaactccgctgttttactgggaaaatgcgccatcctattccatgcagccttgcaggggtctgtctctccctgataaaggtgcagcacatgggaaaattgcacaatcacatcaaacagacttcaccagaaatctaaattataaaaagagttgcactcatattaaaggcaatttcttcaccacccttttcagaggcaattccctgggtctgtacatgtatgcctggccaagattcagggaattcctttagttcycagctttcactgggcataatcattcagcattttcttccatcttttaaaacactgcattggcttcctacggctgctatcacaaattacaacaaacttagtggcttaaagcaacacaaatgcattatctgacagttctataggctgcaggtttcagatggatttcagtgggccaacatcaaggtgtcagcagggctgagctttcttctggaagctctg

SEQ ID NO: 417648 - DNA, 591 bp, Homo sapiens
accaacccagaactaaaggcaaagtgtcttactgattcaacagtatagatacagctacagaagtcagtcttttactaccaaagccaatctataaaattagaagaagcaactgttttaccagatattcaaatatcaatgtaaggacataagaaacattgaagagcaaggaaacatagcatctytgaaggaaaaccaataattcttcagcaacagatttcaatcaaacaaatccataaaatgagtgaaaaggaatttaacagctgaaattgaataattcaataaataaaataaataatacaatttgagaacctcaacaatagactagattaagaagatgaaagaatttctaaacataaagatcggtcttcatatgcaggattaaagattaaagactgaagtgtgaaacacaaaactataaaaatcctggaagacaacctaggcaataccattcaggacataggcacgggcaaagattttataacaatgacaccaaaagcaattgtgacaaaagcaaaaattgacgaatgggatgtaattaaagtaaagagcttctggacagcaaaagaaactattaacagagcaaaaagacaa

SEQ ID NO: 417649 - DNA, 231 bp, Homo sapiens
attcatttctagttctattctatttttgtctagaatatacttgatataatgttgatttttcaaaatttgttgaaacttgttttgtgtcttaacatatggtctagcctggagaatgttctatstgatgaggagaagaatgtgtactccacagctattggatgaaatgttctgtaaatgtctgttaagtctatttggtctgcggtacagattaaattcaatgattatttgtta

SEQ ID NO: 417650 - DNA, 231 bp, Homo sapiens
attcatttctagttctattctatttttgtctagaatatacttgatataatgttgatttttcaaaatttgttgaaacttgttttgtgtcttaacatatggtctagcctggagaatgttctatgtgatgaggagaagaatgtgtactccacwgctattggatgaaatgttctgtaaatgtctgttaagtctatttggtctgcggtacagattaaattcaatgattatttgtta

SEQ ID NO: 417651 - DNA, 629 bp, Homo sapiens
tgtagttaataatgtatcatactccagaaatttgcccagagtagattttagatacttttaccacaaaaaagtaactatgtgagatgatggatatgttaatttgcttgattatggcaatcattgccctaagtatatatgtatatgtatatatacacaaatataatattgtatatcttaaatacaataaaaagaaagtcaatgcataaagcaataaatataaacctatgttggtgatcatacagtgtataaagatgagatgtgatttaggttgggcccagttgctcacctgtaatcccagcactttgggaggccgaagcgggcggatcacctgaggtcaggagttcgagagcagcctgaccaacatggagaaatcctgtgtgtatcaaaaatagaaaattagctgggcatggtggccgatgcctgtaatcccagaaaaaatgagcaagggttgcaatcctagtccctgacaaatcagagtttaaaccaacaragataaaaaaagacaaagaagagcattacataatgacaaaaggatcaattcaacaagaagagctaactatcctaaatatatatgcacccaatacaggagcacctagattcataaaacaaattcttagacacctacaaag

SEQ ID NO: 417652 - DNA, 508 bp, Homo sapiens
ttgtttcaggtttttcttctttttattttgttatttatttcgattcttcagttgagcagtacgctgctttcatactttcatgaattctagtaaatgtcttgaaaaccataaatrtccctttttataccactttggctgcaatccacaggatttcatttatagtgctttccgtttcttcagatctaattattttgtattcatttttatgtatgccttagcccaagtgttatgtaggaatgtgttgtgttttaatatctctgtgtatgaatttgggaatatatcttattgttattgatttctgatattagcaacttgctgcagggagcatgccgttttcaatatcaattttattttagaatttattcaataatcatggaaaacctctctgtgatggtgacacaggaacaaagactgaatgaaatagggggacagagtttccatagaaatatcttagaaaagaataatccttgcaatggtaatagtaaaaacagaggctatgaggtagaaa

SEQ ID NO: 417653 - DNA, 530 bp, Homo sapiens
caattttattttagaatttattcaataatcatggaaaacctctctgtgatggtgacacaggaacaaagactgaatgaaatagggggacagagtttccatagaaatatcttagaaaagaataatccttgcaatggtaatagtaaaaacagaggctatgaggtagaaatgagtttgaaatgtttatggaagakcaagaaaactaatacttgtggaacagaatgaaaagagggaacagtagcaggaaataaaggatcggagaaatattcagcaaccaaatcatgtaggacattgcgtgccatgtaaacagactggatttattctatgtagtttttttttaaaaaacataattagattttcaataaggaaataatttgatttaatttgcattttagaaacatatctctggtgtctgaccataaattagagtatgcaaagctctcatagaaacatagagacaagttagagggctctctccagagacactagtgacttggacaatggtgcaatgacagaggaagtgaacaaaggtt

SEQ ID NO: 417654 - DNA, 530 bp, Homo sapiens
caattttattttagaatttattcaataatcatggaaaacctctctgtgatggtgacacaggaacaaagactgaatgaaatagggggacagagtttccatagaaatatcttagaaaagaataatccttgcaatggtaatagtaaaaacagaggctatgaggtagaaatgagtttgaaatgtttatggaagatcaagaaaactaatacttgtggaacagaatgaaaagagggaacagtagcaggaaataaaggatcggagaaatattcagcaaccaaatcakgtaggacattgcgtgccatgtaaacagactggatttattctatgtagtttttttttaaaaaacataattagattttcaataaggaaataatttgatttaatttgcattttagaaacatatctctggtgtctgaccataaattagagtatgcaaagctctcatagaaacatagagacaagttagagggctctctccagagacactagtgacttggacaatggtgcaatgacagaggaagtgaacaaaggtt

SEQ ID NO: 417655 - DNA, 582 bp, Homo sapiens
atataattgtctctcccccagatattaggaaaaaatgtcactggggatgtgaacagccctgcgatattgacagtagtatcmtcctctcccccgctgcatactgggaacaacatcacaggtggggtgtactgcctctgtgatattgagagtgaaattttcctctcttcccgtggacattaggaagggtatcagaaggggagggtgtacattccctgtgatattcaacgtaaccttatcctctccctcccagggtattcagaacaatattacaggaggggtgtacaccctctgggatattgagagtcatatcatcctctttcgctctggatattaggaacaatatcacagggtttgtacccccccccttgcgatattgggagtcataccatcctctctccctatggatatcagtaagaatatcagagggctgtggaaaccccttgcggtactgggagtaataccatcgtctctccctctgaaaataggaggattttcacagggatgtgtacacaccctgcgatattgggagtaagatcatcctcttcacccaggaaatgactaacaaggtcaagggggggcgta

SEQ ID NO: 417656 - DNA, 582 bp, Homo sapiens
atataattgtctctcccccagatattaggaaaaaatgtcactggggatgtgaacagccctgcgatattgacagtagtatcctcctctcccccgctgcatactgggaacaacatcacaggtggggtgtactgcctctgtgatattgagagtgaaattttcctctcttcccgtggacattaggaagggtatcagaaggggagggtgtacattccctgtgatattcaacgtaaccttatcctctccctcccagggtattcagaacaatattacaggagggrtgtacaccctctgggatattgagagtcatatcatcctctttcgctctggatattaggaacaatatcacagggtttgtacccccccccttgcgatattgggagtcataccatcctctctccctatggatatcagtaagaatatcagagggctgtggaaaccccttgcggtactgggagtaataccatcgtctctccctctgaaaataggaggattttcacagggatgtgtacacaccctgcgatattgggagtaagatcatcctcttcacccaggaaatgactaacaaggtcaagggggggcgta

SEQ ID NO: 417657 - DNA, 582 bp, Homo sapiens
atataattgtctctcccccagatattaggaaaaaatgtcactggggatgtgaacagccctgcgatattgacagtagtatcctcctctcccccgctgcatactgggaacaacatcacaggtggggtgtactgcctctgtgatattgagagtgaaattttcctctcttcccgtggacattaggaagggtatcagaaggggagggtgtacattccctgtgatattcaacgtaaccttatcctctccctcccagggtattcagaacaatattacaggaggggtgtacaccctctgggatattgagagtcatatcatcctctttcgctctggatattaggaacaatatcacagggtttgtacccccccccytgcgatattgggagtcataccatcctctctccctatggatatcagtaagaatatcagagggctgtggaaaccccttgcggtactgggagtaataccatcgtctctccctctgaaaataggaggattttcacagggatgtgtacacaccctgcgatattgggagtaagatcatcctcttcacccaggaaatgactaacaaggtcaagggggggcgta

SEQ ID NO: 417658 - DNA, 582 bp, Homo sapiens
atataattgtctctcccccagatattaggaaaaaatgtcactggggatgtgaacagccctgcgatattgacagtagtatcctcctctcccccgctgcatactgggaacaacatcacaggtggggtgtactgcctctgtgatattgagagtgaaattttcctctcttcccgtggacattaggaagggtatcagaaggggagggtgtacattccctgtgatattcaacgtaaccttatcctctccctcccagggtattcagaacaatattacaggaggggtgtacaccctctgggatattgagagtcatatcatcctctttcgctctggatattaggaacaatatcacagggtttgtacccccccccttgcgatattgggagtcataccatcctctctccctatggatatcagtaagaatatcagagggctgtggaaaccccytgcggtactgggagtaataccatcgtctctccctctgaaaataggaggattttcacagggatgtgtacacaccctgcgatattgggagtaagatcatcctcttcacccaggaaatgactaacaaggtcaagggggggcgta

SEQ ID NO: 417659 - DNA, 513 bp, Homo sapiens
ataaatggtgctgagatagctggctagccatatgtagaaggataaaactgaatgcctacctttcaccatatacaaaaaactaactcaagatggattgaagatttcaatgtaagacctcaaactataagaattctagaagaaaatctaggaaacatcatttttgacattggccttgggaaataatgcatgactaagtcctcaaaagcaactgcaacaaaaacaaaaattgacaagtgcagccaaattaaactaaagagcttctgcagagaaaaaaaaaaactattaacagagtaaacagcaaactacagaatgggagaaaatatttgcaaaccatgcatctgacaaaagtctaatatccagaatctataagsaatttaagtcaacaagcaaaaactgaaacctttatttaaaaatttggaaaacatggacacttctcaaaaacagacatacagagagacacccaacatatttttaaaaatgcccaatatcactaataactagagaaatgcaaat

SEQ ID NO: 417660 - DNA, 513 bp, Homo sapiens
ataaatggtgctgagatagctggctagccatatgtagaaggataaaactgaatgcctacctttcaccatatacaaaaaactaactcaagatggattgaagatttcaatgtaagacctcaaactataagaattctagaagaaaatctaggaaacatcatttttgacattggccttgggaaataatgcatgactaagtcctcaaaagcaactgcaacaaaaacaaaaattgacaagtgcagccaaattaaactaaagagcttctgcagagaaaaaaaaaaactattaacagagtaaacagcaaactacagaatgggagaaaatatttgcaaaccatgcatctgacaaaagtctaatatccagaatctataaggaatttaartcaacaagcaaaaactgaaacctttatttaaaaatttggaaaacatggacacttctcaaaaacagacatacagagagacacccaacatatttttaaaaatgcccaatatcactaataactagagaaatgcaaat

SEQ ID NO: 417661 - DNA, 513 bp, Homo sapiens
ataaatggtgctgagatagctggctagccatatgtagaaggataaaactgaatgcctacctttcaccatatacaaaaaactaactcaagatggattgaagatttcaatgtaagacctcaaactataagaattctagaagaaaatctaggaaacatcatttttgacattggccttgggaaataatgcatgactaagtcctcaaaagcaactgcaacaaaaacaaaaattgacaagtgcagccaaattaaactaaagagcttctgcagagaaaaaaaaaaactattaacagagtaaacagcaaactacagaatgggagaaaatatttgcaaaccatgcatctgacaaaagtctaatatccagaatctataaggaatttaagtcaacaagcaaaaactraaacctttatttaaaaatttggaaaacatggacacttctcaaaaacagacatacagagagacacccaacatatttttaaaaatgcccaatatcactaataactagagaaatgcaaat

SEQ ID NO: 417662 - DNA, 513 bp, Homo sapiens
ataaatggtgctgagatagctggctagccatatgtagaaggataaaactgaatgcctacctttcaccatatacaaaaaactaactcaagatggattgaagatttcaatgtaagacctcaaactataagaattctagaagaaaatctaggaaacatcatttttgacattggccttgggaaataatgcatgactaagtcctcaaaagcaactgcaacaaaaacaaaaattgacaagtgcagccaaattaaactaaagagcttctgcagagaaaaaaaaaaactattaacagagtaaacagcaaactacagaatgggagaaaatatttgcaaaccatgcatctgacaaaagtctaatatccagaatctataaggaatttaagtcaacaagcaaaaactgaaacctttatttaaaaatttggaaaacatggacacttctcaaaarcagacatacagagagacacccaacatatttttaaaaatgcccaatatcactaataactagagaaatgcaaat

SEQ ID NO: 417663 - DNA, 596 bp, Homo sapiens
ggtgtttcataacttagcctattgattctccattgttgaatattttattatagcttacgtttcactatgatgaacagctgagaggagtatacatatattaataattgattatgtaagaataaattcctagaaatgaaactgctggctctaaggatatgctcttttcttaaaaaggcttttgatacctgttgctgaattgttttcttaaaggttttgctagtttacactccattagtgccttttccctacatccttgctaaaataggtatttattattattaaacaaattggacctgttttgatgctgaacatggcatctcattattttaattygcttttcttttattacaagagatgttggacatcatcactttttaatgtttgttggcgattcgtattttacgaatttcttgtgtgtatcatgtatccgtttcttattgatatggttatctctgttcctgagtttatatatggggacatcagctctcggatggctgtatatgacaagtgcagtgaaaaccccgggtaccatgtggcattgctgaaaatctagacttaaagtgattggctgttggcttccattctacatgcagccc

SEQ ID NO: 417664 - DNA, 596 bp, Homo sapiens
ggtgtttcataacttagcctattgattctccattgttgaatattttattatagcttacgtttcactatgatgaacagctgagaggagtatacatatattaataattgattatgtaagaataaattcctagaaatgaaactgctggctctaaggatatgctcttttcttaaaaaggcttttgatacctgttgctgaattgttttcttaaaggttttgctagtttacactccattagtgccttttccctacatccttgctaaaataggtatttattattattaaacaaattggacctgttttgatgctgaacatggcatctcattattttaatttrcttttcttttattacaagagatgttggacatcatcactttttaatgtttgttggcgattcgtattttacgaatttcttgtgtgtatcatgtatccgtttcttattgatatggttatctctgttcctgagtttatatatggggacatcagctctcggatggctgtatatgacaagtgcagtgaaaaccccgggtaccatgtggcattgctgaaaatctagacttaaagtgattggctgttggcttccattctacatgcagccc

SEQ ID NO: 417665 - DNA, 624 bp, Homo sapiens
atatgagtgcatagacctgagttggaatctcagttccaacacttcccagatatctggccctgggaaagtcacttcatttctttaagttttgttgcaggttgactctcagtgagtagatgctgagactgagtttgaggatcaaaagttatcctaaggagtaatacttatgaaaggaaaagggagaaagcaagaccaggsagggttttagtcttttgcaggatagttagcagactgatgcagaccaaagtctctgtcagccccgtgagagttctggaacaaagattgcccattggcccctagcatgccccaaaaataagtcatcaccatttatcaactgcatcagataggcccattttatttttttataatttcaagtgacttttacaaataatatacagaagatataaaagatagcacaaaactaatttatttaaaatgttaatataaactaaaacatagaaaacccaaatttttattctataattttgtggtttggaagtatatatacctaaaatgggcaacatctttgaatgcatgtcatgcatgcccctggaacatacccattctgtatttatggattccagatttcaaatgcatctgtaataggttctagttcatcattac

SEQ ID NO: 417666 - DNA, 659 bp, Homo sapiens
ttttctgcttcagtacttaacatagttactattttcttgaagactgtagttttgtaatactatgctctttggtgagacaaagcgttctgaaatttgtgaacacttcttatttcctggtaattattttttttggcccccccagtttgacttttctttctttttggcttcttatatcactgtcccacgttaaaaaatttaacagattttaagatgtcttttggcttaaattgcaaacaattacatttgaaaattaatgaacttygcgaaatttagtccagcctatatgaaaaagaaaactgttgtcagggtgagaatagatgattcgtgatttcagattctgccacacctttacaaatatttttcacactgttgccttcagaaaaattcattatgctaatccatcaagcttcagttccttcttaattgtttttttcaaacgtctcttctcactggtggcttggcgccatctctcactgctgacttcagaaatgaaatgtgatgatatgctgacataccagtgtcacaagctttgttacctttgaaaatcattatctttgaaacttctgcaagtagccacaaaacgagtgactcataccttttttatttttttccaacttttattttagaatcaggggagtccatgtgcaggtttattacca

SEQ ID NO: 417667 - DNA, 630 bp, Homo sapiens
gtaccatcattgagtttctcacctggtccctgagatcttcaattattggatagtatttgctgcaatctcttctagatccaccgtctccagacccaggcccaaatttgtcacactactccttgattttgtgttggcctcttctagggctctgacattgtctaggtaattggctaggccgtcattgaggttctgcatggtttgcttttcccctccagagaaaagccccccgttgccaccaccacctcccatgcmaccaccatactgcagaagcctccactagcaccaccgcctaatccagaacttccacagaatccagagatcctgccgaagctagaaccacctcctacagagcatttatcaaagcccccactaaagctacctccaaagccactgctagacatccccactcaggccatagctgtcggctcctctttggaagccccgggcagagccgccccccagaccacatctgcctctactgctgaagctgcttccaccagcagacagcctggccaagctgctgcctccagccctggaggaggagacacaggaagagcaagacatgatgctcctgcaaacgttgagcttatctaggtgtgagagatggaagtgaaaagcacaccgatttga

SEQ ID NO: 417668 - DNA, 580 bp, Homo sapiens
agtgctttatgaaggccttgaaagcaaggttcagccgtctgtattggtcatcttcccattgccagtgcctacgaagggcttgacccattcattgttagacgctcagtaagtgtgtattgaggcagccctctgtgccactccagggctctttccactaaatcatgagtatgttggtttaccagatggaatgagtagcctcttctttggatayataaacacccgatggatattgtgggtcactgtggagggagaatgaacgtatgggatccctgacctgtggttactggaaaacagttgacatttagagagaggctgaattcttgggcttcccgtagcccccatcctgagtgtgccaacagggactagaagcatctctagtctgcaaagcgaggaacaagtgatactctgtccaatttttccaatattgttatactcatgaatagagattaatgaaattgaagagcatattcaagagaaagactaaaggagaagtcgtctgccccgtggacaggcagcttgagtggtgcttgagaaaatgtacatgaaattgcttgttaaaaaatattcacgcctgtaatcc

SEQ ID NO: 417669 - DNA, 574 bp, Homo sapiens
aagcatcaatatgaaggaaagatatagtctttttcagacaaacaaatgctgagagaattcaccactaccgggccaccactaaaagaactgttaaaaggagctctaagtcttgaaacraatcctggaaatagatgaaaacagaatctctttaaagcataaatctcacaggacttaaaaatacaatttaaaaaacaaaaaaccaaggtacacagacaacaaatagcatgatgaatggaatggtatgtcacatctcaataataacgttgaatgcaaatggcctaaatgctccacttaaaagatacagaaccttagaatggatgagaattcaccaaccaactatctactgcctttgagagactcgcctaatacataaggactcacataaacttaaagtgaagggtggaaaaaggcatttcatgcaaatggacaccaaaacccagcaggactagctagtcttatatcagacaaaacaaactttaaagcaacaacagttaaaaaggataaagagggacattatataatggtaaaaggccttgttcaacagaaaaataccacaatcctaaacatatatgca

SEQ ID NO: 417670 - DNA, 645 bp, Homo sapiens
gtccaacaacatgtcaaaaagataatccaccatgatcaagtgggtttcatatcagggatgcagggatggtttaacatacgcaagtcaataaatgtgatacaccacataaacagaattaaaaacaaaaatcacatgatcatctcaatagagacaattgcaaattgtggaaccaacccaaatgcccatcaatcaatgagtggataaagaaaccgtggtgtacatatacgatgaaatactactcagccatagaaaagaatgaatgaacggcagttgcagtgacctggatgagattagatcggaggctattattccaagtaaagtaactcaggaatgaaaaaccaaacattgtatgttctcactgatatgtggaagctaagctatgaggatgcgaaggcataagaatgatacaatggtctttggagacttgacwggaagggtgggagtggggcagagaataaaagactacaaacagggtgctgtgtatactgcttgggtgatgggtgcaccaaaatctcagaaatcgccactgaagaacttactcatgtaactgaatatcacgtttaccccaataacctatggaaaaatcttttttaaaaagtattaacctataaatttatgatactattgggaaaccacactatcagg

SEQ ID NO: 417671 - DNA, 645 bp, Homo sapiens
gtccaacaacatgtcaaaaagataatccaccatgatcaagtgggtttcatatcagggatgcagggatggtttaacatacgcaagtcaataaatgtgatacaccacataaacagaattaaaaacaaaaatcacatgatcatctcaatagagacaattgcaaattgtggaaccaacccaaatgcccatcaatcaatgagtggataaagaaaccgtggtgtacatatacgatgaaatactactcagccatagaaaagaatgaatgaacggcagttgcagtgacctggatgagattagatcggaggctattattccaagtaaagtaactcaggaatgaaaaaccaaacattgtatgttctcactgatatgtggaagctaagctatgaggatgcgaaggcataagaatgatacaatggtctttggagacttgacaggaagggtgggagtggggcagagaataaaagactacaaayagggtgctgtgtatactgcttgggtgatgggtgcaccaaaatctcagaaatcgccactgaagaacttactcatgtaactgaatatcacgtttaccccaataacctatggaaaaatcttttttaaaaagtattaacctataaatttatgatactattgggaaaccacactatcagg

SEQ ID NO: 417672 - DNA, 645 bp, Homo sapiens
gtccaacaacatgtcaaaaagataatccaccatgatcaagtgggtttcatatcagggatgcagggatggtttaacatacgcaagtcaataaatgtgatacaccacataaacagaattaaaaacaaaaatcacatgatcatctcaatagagacaattgcaaattgtggaaccaacccaaatgcccatcaatcaatgagtggataaagaaaccgtggtgtacatatacgatgaaatactactcagccatagaaaagaatgaatgaacggcagttgcagtgacctggatgagattagatcggaggctattattccaagtaaagtaactcaggaatgaaaaaccaaacattgtatgttctcactgatatgtggaagctaagctatgaggatgcgaaggcataagaatgatacaatggtctttggagacttgacaggaagggtgggagtggggcagagaataaaagactacaaacagggtgcygtgtatactgcttgggtgatgggtgcaccaaaatctcagaaatcgccactgaagaacttactcatgtaactgaatatcacgtttaccccaataacctatggaaaaatcttttttaaaaagtattaacctataaatttatgatactattgggaaaccacactatcagg

SEQ ID NO: 417673 - DNA, 612 bp, Homo sapiens
ggcatggtggcaggcgcctgtaatctcagctactcgggaggctcaagcacaagaatagcttgaacccaggaggtggaggttkcagtgagccgagatagcaccaatgcactccagcctgggtgacagagtgagactttgtctccaaaaaaaaaaaaaagaaaagaaaaaaagaaatatattttctggttaaattaaaatcttctatctacccaaaccatttcaaaataaactgaatgtgccagttaaactcatgattcaaaaacaatatctttgtgtcaaaaggcaagcagaacatgtaaccagttgtctcaggttgacatttcacatttcaatctatttccataacaatgcaagttacttgaaagcagagactgtgttttcctcatgtacagattcccagcagctagtaaagtgcctcacacgtgacaggcacacaataaatattgatcaaataaataaaaaataattacaactaaaagaaaatagatttgagggtaaaaaaaaagcagtggttaatgccatatgctgcataaatacgttaataaattccatcttacaaaattgatatgcagataatatttttgataatacaagagtaatcagcttgcaatt

SEQ ID NO: 417674 - DNA, 612 bp, Homo sapiens
ggcatggtggcaggcgcctgtaatctcagctactcgggaggctcaagcacaagaatagcttgaacccaggaggtggaggtttcagtgagcygagatagcaccaatgcactccagcctgggtgacagagtgagactttgtctccaaaaaaaaaaaaaagaaaagaaaaaaagaaatatattttctggttaaattaaaatcttctatctacccaaaccatttcaaaataaactgaatgtgccagttaaactcatgattcaaaaacaatatctttgtgtcaaaaggcaagcagaacatgtaaccagttgtctcaggttgacatttcacatttcaatctatttccataacaatgcaagttacttgaaagcagagactgtgttttcctcatgtacagattcccagcagctagtaaagtgcctcacacgtgacaggcacacaataaatattgatcaaataaataaaaaataattacaactaaaagaaaatagatttgagggtaaaaaaaaagcagtggttaatgccatatgctgcataaatacgttaataaattccatcttacaaaattgatatgcagataatatttttgataatacaagagtaatcagcttgcaatt

SEQ ID NO: 417675 - DNA, 645 bp, Homo sapiens
aggtattggtcataaccaagtatatgccasaactcaaacatccacacgtataaattgatacctgttaatatacatacacagctgctttctatgagctgatgggaattactttgggtttagttgtttctgtagttaagagtaaaggtttaaggatagagcatcagttgctttacacctcttgtttttctcttcactgtcaatggcacactttggcacagttaatgtcaggctttggaatatttctctgacttttctcactgccatatttggcataaataaagtgctccacttaggtgagagttttccccactcagcatcatgttgagtgctttacagatttgttgtgctcaaaatgattaagggtgaatgcaagtgagctgtagataagaggcggaataatgtggcttccacatagtcactggcactggcatatgttgaatacataggagcatcttcattaaaaaaatgatgctacttgctgagtgtttcggttgatttacacagacagtacaatatagtgtctttgatgtccagtagcatgaaaactatatgtataagtctgagtataacgagctgtctgttaaattctatatataacatatttgcattttattcaggatcatcaaatggggaaatcaaagtaca

SEQ ID NO: 417676 - DNA, 645 bp, Homo sapiens
aggtattggtcataaccaagtatatgccacaactcaaacatccacacgtataaattgatacctgttaatatacatacacagctgctttctatgagctgatgggaattactttgggtttagttgtttctgtagttaagagtaaaggtttaaggatagagcatcagttgctttacacctcttgtttttctcttcactgtcaatggcacactttggcacagttaatgtcaggctttggaatatttctctgacttttctcactgccatatttggcataaataaagtgctccacttaggtgagagttttccccactcagcatcatgttgagtgctttacagatttgttgtgctcaaaatgattaagggtgaatgcaagtgagctgtagataagaggcggaataatgtggcttccacatagtcactggcactggcatatgttgaatacataggarcatcttcattaaaaaaatgatgctacttgctgagtgtttcggttgatttacacagacagtacaatatagtgtctttgatgtccagtagcatgaaaactatatgtataagtctgagtataacgagctgtctgttaaattctatatataacatatttgcattttattcaggatcatcaaatggggaaatcaaagtaca

SEQ ID NO: 417677 - DNA, 533 bp, Homo sapiens
ctctcagaatctcatggcattttcttgacaataaaaaagatagactgtgatgtcaaaaataaaaaccaagcctgaatagagcttatatctatatataagttctcagaaaggggtgtgatttggtgaattcacactgacgcttttttgggttcatgctgcattttaaaagttttcttaaagccacaaaccttccataaaagagtacatctaatatttagggtgaagtgtatggaattctagcttgatcttttacctctttcatgtgccaatcccctttgtctggcttattgtagttaattaaaaattagttactttttatgtctcttaaaatttgtgatgaaagactaaagaagtgagatctcattaatgtttttattttgttttttccacatgtacttatcatcattccatatctatgagcagatttgttacagagaggtaatatcagaagtcaaatttaacttacaactagtaccaagacaactgagcatckttgccttcctgtatttttcagatgaccttaaattggatac

SEQ ID NO: 417678 - DNA, 524 bp, Homo sapiens
aaatttatgacaattattgtttcttatatggatcaatcataagtattggtcacactcattaaaaattaaaaatgtgtcattagaatgaagaaaagaaatatttaaaaagtcagactactttatgtatacgagttattaactcmataagcctccgtattaagggcttactatgtgtcagatattataggtaggtatgtttgtgtatttgagatatatatatatatatatctcattcccacattcaccctggatgaaggctatttaattcttattttttatttgagaaagcagaagcatgtaaggttaaatgactccaccaaaggctcacaagtgaagacgtgatttgatctttaatctgcctgatgtttaaacctgtgctgctgactcagccacattgtttattctgtcaccaaaagtgagtcaaaatttgacactcttctgtattagtcagggttcttagagggacagaaataatagggtatatcattattatattagtcagggtactcttagagggacagaac

SEQ ID NO: 417679 - DNA, 524 bp, Homo sapiens
aaatttatgacaattattgtttcttatatggatcaatcataagtattggtcacactcattaaaaattaaaaatgtgtcattagaatgaagaaaagaaatatttaaaaagtcagactactttatgtatacgagttattaactccataagcctccgtattaagggcttactatgtgtcagatattatagrtaggtatgtttgtgtatttgagatatatatatatatatatctcattcccacattcaccctggatgaaggctatttaattcttattttttatttgagaaagcagaagcatgtaaggttaaatgactccaccaaaggctcacaagtgaagacgtgatttgatctttaatctgcctgatgtttaaacctgtgctgctgactcagccacattgtttattctgtcaccaaaagtgagtcaaaatttgacactcttctgtattagtcagggttcttagagggacagaaataatagggtatatcattattatattagtcagggtactcttagagggacagaac

SEQ ID NO: 417680 - DNA, 524 bp, Homo sapiens
aaatttatgacaattattgtttcttatatggatcaatcataagtattggtcacactcattaaaaattaaaaatgtgtcattagaatgaagaaaagaaatatttaaaaagtcagactactttatgtatacgagttattaactccataagcctccgtattaagggcttactatgtgtcagatattataggtaggtatgtttgtgtatttgagatatatatatatatatatctcaytcccacattcaccctggatgaaggctatttaattcttattttttatttgagaaagcagaagcatgtaaggttaaatgactccaccaaaggctcacaagtgaagacgtgatttgatctttaatctgcctgatgtttaaacctgtgctgctgactcagccacattgtttattctgtcaccaaaagtgagtcaaaatttgacactcttctgtattagtcagggttcttagagggacagaaataatagggtatatcattattatattagtcagggtactcttagagggacagaac

SEQ ID NO: 417681 - DNA, 524 bp, Homo sapiens
aaatttatgacaattattgtttcttatatggatcaatcataagtattggtcacactcattaaaaattaaaaatgtgtcattagaatgaagaaaagaaatatttaaaaagtcagactactttatgtatacgagttattaactccataagcctccgtattaagggcttactatgtgtcagatattataggtaggtatgtttgtgtatttgagatatatatatatatatatctcattcccacattcaccctggatgaaggctatttaattcytattttttatttgagaaagcagaagcatgtaaggttaaatgactccaccaaaggctcacaagtgaagacgtgatttgatctttaatctgcctgatgtttaaacctgtgctgctgactcagccacattgtttattctgtcaccaaaagtgagtcaaaatttgacactcttctgtattagtcagggttcttagagggacagaaataatagggtatatcattattatattagtcagggtactcttagagggacagaac

SEQ ID NO: 417682 - DNA, 398 bp, Homo sapiens
gctaggtccatccacactatctctcctgcagattgctcttgatttctcatataggacatcatattgttctgacttgaaacttttcttatgtttaggtgagtttcttaaatactttcatactcaaaggttaattcacagcgttttctaattgtttaagtcatctcacttaattatcttagcaaatataaagacaaaatatattattttcactttccatttgcctgagtttagtcaagttttttttattgaattctacttataactttttttagtaatccatttgaaatcattttggaagaatgtgttawataaactatatatataaattactgatacatagacagacatatacacacatacaatattttaccttcatttattttcctatttgtgtgatg

SEQ ID NO: 417683 - DNA, 593 bp, Homo sapiens
gtttaagtcatctcacttaattatcttagcaaatataaagacaaaatatattattttcactttccatttgcctgagtttagtcaagttttttttattgaattctacttataactttttttagtaatccatttgaaatcattttggaagaatgtgttatataaactatatatataaattactgatacatagacagacatatacacacatacaatattttaccttcatttattttcctatttgtgtgatgcatcacatgtaaaaagtctgcygaaaatctagatcacatagatcacataaacaacttgattcagaacaatagtttttttttgttttattgggataaattaaagatttataaattagcttttgaatgtttcagaaattataatccgttattaagctatgtgaagtgcaatgcccttttccaagtgaattttccttggaaataatagcaaaatttacttgcaacctctttttgttttttagtgccaatagtgcacccaatgctgaagctagcacatgtaaagcatagttcttgccccagaactttcactgtatgaatagctaaaagaaatatgcaattattctgcat

SEQ ID NO: 417684 - DNA, 593 bp, Homo sapiens
gtttaagtcatctcacttaattatcttagcaaatataaagacaaaatatattattttcactttccatttgcctgagtttagtcaagttttttttattgaattctacttataactttttttagtaatccatttgaaatcattttggaagaatgtgttatataaactatatatataaattactgatacatagacagacatatacacacatacaatattttaccttcatttattttcctatttgtgtgatgcatcacatgtaaaaagtctgctgaaaatctagatcacatagatcacataaacaacttgattcagaacaatagtttttttttgttttattgggataaattaaagatttataaattagcttttgaatgtttyagaaattataatccgttattaagctatgtgaagtgcaatgcccttttccaagtgaattttccttggaaataatagcaaaatttacttgcaacctctttttgttttttagtgccaatagtgcacccaatgctgaagctagcacatgtaaagcatagttcttgccccagaactttcactgtatgaatagctaaaagaaatatgcaattattctgcat

SEQ ID NO: 417685 - DNA, 548 bp, Homo sapiens
tactttctatttcctctttacaaagcctacatttctattccttctccccatttccccatttctattaattagctactatttggcatagagctgttaaaacacaaatacgtctagaaaacacttttttttttttttttttgagacggagtccagctctgttgccaggctggagtgcagtggcacaatcttggctcactgcaacctccgcctcccaggttcaagtgattctcctgcctcaacatcctaagtagctaggattacaggcacatgctgccatgcccagctaatttttgtaattttagtagagacggggttacaccatgtttgccaggatggtctcgatcgcctgacctcatgatccgcctgcctcggcctcccaaagtgctgggattacaggtgtgacccaccgcacccggcctagaaatcgcttctaaatgtrttgttttcagtgaacatgttgccaaacattcctctggacacctgtcccagtaaaccgctagacacaaacgggaatcaggttatcatttcctcatttcattaggtgtggt

SEQ ID NO: 417686 - DNA, 604 bp, Homo sapiens
ctaccagaagccaaaagttcctgttcccaaatatatcccctctcattgcccattcaggacagatgatacctatacatcatgactcaaatttggtacactcagaagccgagatctatgtattttttttttttttgagatggagtctcactctgttgcccaggctggagtgcagtggcgcgatctcggctcactgcaagctcygcctcccgggttcacgccattctcctgcctcagcctcccgagtagctgggactacaggcacccgccactatgcctggctacttttttgtattttttagtagagacggggtttcaccgtgttagtcaagatggtctcgatctcctgacgtcgtgatgcacccgcctcggcctcccaaagtgctgggattacagacgtgagccaccacgcccagcctatgcgtcttctaatattaagatcctggagtcctagaggctagaagttctgtgacattttgaactagcccttaagtaagaatgatatcaaaatgagggttcgtttgggttcttttctaataccacctttatagttgcatcagacattgcaggggtgaagcagtggtcattatgaaaattgaatggggct

SEQ ID NO: 417687 - DNA, 604 bp, Homo sapiens
ctaccagaagccaaaagttcctgttcccaaatatatcccctctcattgcccattcaggacagatgatacctatacatcatgactcaaatttggtacactcagaagccgagatctatgtattttttttttttttgagatggagtctcactctgttgcccaggctggagtgcagtggcgcgatctcggctcactgcaagctccgcctcccgggttcacgccattctcctgcctcagcctcccgagtagctgggactacaggcacccgccactatgcctggctacttttttgtattttttagtagagacggggtttcaccgtgttagtcaagatggtctcgatctcctgacgtcgtgatscacccgcctcggcctcccaaagtgctgggattacagacgtgagccaccacgcccagcctatgcgtcttctaatattaagatcctggagtcctagaggctagaagttctgtgacattttgaactagcccttaagtaagaatgatatcaaaatgagggttcgtttgggttcttttctaataccacctttatagttgcatcagacattgcaggggtgaagcagtggtcattatgaaaattgaatggggct

SEQ ID NO: 417688 - DNA, 591 bp, Homo sapiens
tctatcctggttactggaacatcaaaatatatggggtaattctgaccactattgatggctcaatctggcccatggtgtcatctgccaggcagagcagttattgaagatttctgctgggcaaataatgcttggaaacagctgaacttgacctgaaagtggcacaaatatgtctggaaggcagagtcaggtgacatccaagccatttaagtatttatttgtattgaccagattaaatagaatttaggtccctcttggagacaaagacacaaatcctgtccactattggaggttcagttctaaaggatggggacaagaaggtgtgatggaggccagaacgtaaaaaggaaaaatagagcctttcagataatctgtaatcaaagtgaaaagaccagaataaaaaaataacaaatgaaaaacgaccaaraaaactaggctaagttagaccaaggtattcaggagcctggcacttctgaataaggtttgttgtgatcttgagaaaacagtcccacagatgacatatttgtccctaggcagaaggaaaaaaaaaaaactgtatttgtaaggagttccaaattctgatagtataacagt

SEQ ID NO: 417689 - DNA, 591 bp, Homo sapiens
tctatcctggttactggaacatcaaaatatatggggtaattctgaccactattgatggctcaatctggcccatggtgtcatctgccaggcagagcagttattgaagatttctgctgggcaaataatgcttggaaacagctgaacttgacctgaaagtggcacaaatatgtctggaaggcagagtcaggtgacatccaagccatttaagtatttatttgtattgaccagattaaatagaatttaggtccctcttggagacaaagacacaaatcctgtccactattggaggttcagttctaaaggatggggacaagaaggtgtgatggaggccagaacgtaaaaaggaaaaatagagcctttcagataatctgtaatcaaagtgaaaagaccagaataaaaaaataacaaatgaaaaacgaccaaaaaaactaggytaagttagaccaaggtattcaggagcctggcacttctgaataaggtttgttgtgatcttgagaaaacagtcccacagatgacatatttgtccctaggcagaaggaaaaaaaaaaaactgtatttgtaaggagttccaaattctgatagtataacagt

SEQ ID NO: 417690 - DNA, 591 bp, Homo sapiens
tctatcctggttactggaacatcaaaatatatggggtaattctgaccactattgatggctcaatctggcccatggtgtcatctgccaggcagagcagttattgaagatttctgctgggcaaataatgcttggaaacagctgaacttgacctgaaagtggcacaaatatgtctggaaggcagagtcaggtgacatccaagccatttaagtatttatttgtattgaccagattaaatagaatttaggtccctcttggagacaaagacacaaatcctgtccactattggaggttcagttctaaaggatggggacaagaaggtgtgatggaggccagaacgtaaaaaggaaaaatagagcctttcagataatctgtaatcaaagtgaaaagaccagaataaaaaaataacaaatgaaaaacgaccaaaaaaactaggctaagttagaccaaggtattcaggagcctggcacttctgaataaggtttgttgtgatcttgagaawacagtcccacagatgacatatttgtccctaggcagaaggaaaaaaaaaaaactgtatttgtaaggagttccaaattctgatagtataacagt

SEQ ID NO: 417691 - DNA, 623 bp, Homo sapiens
tttttgttatttttctttcctcattttccctttccatctttctatttcaattcatttaaatccctctttcctcttcctctagtattgactttttaatgtgtcatttrtgtattttagcaagacacacaaatcaattcaattggaatcaattaaaagttattatcttctgtgcaaaatggcaaaaaaaaaatagcacctggcaaatacaggcattttacaaatgttgggcattcaccaaatatttttaatagatgattacatggatttcatgttgctatggagagtgtaggatataaagtataatgcagagtttttgttcataactgagttagggagaatctcaaagaagctgcctaagctgagaatggctaagtggtttggaggaatgcaaactgtggcttgttcaccaaggtgattccctttgtatgttcgtccttgaatgggcccatcagggcacagtactcttattcagacaagaacaagttcacttgtcatttgtttccagaaccagctacataatttgctgggctcaacgccagttgataacataaaattcttttaaaaattattaagaataccaagatggtgacagcagagtgggatcctcctgagtgtgggcacca

SEQ ID NO: 417692 - DNA, 577 bp, Homo sapiens
ttgcacaatattgttaactaaactacaggatttatctgaatttccacaattttkctattaaagttctttttctatttcagggtcatccaatgtcaattttcagtcagagttcatactcactaaccacttaggtcatcttcttttaacatctctagaaaaacaatgctctttttaagcacatacctgaaatggaaaccgagccctgggatgacagttctcttctggtttccagatggagcagtaatcctccaattagtgatagcactgtgtgtggcaaaagtgaatctgtctccctgctgaaactggaagtgaaagtagatgaaagtagagagcatttcttaggttgaattcagtagactctaagatgaaaatctgtgaacattatcaatagtaatattcccaggaaatgctcgcagggaactgggaccaggaatgcccaaaggtaagaggccaaccaagggtgccatattgaacaaaattaccccgacttaattctgtgagggagctccacaaatagtggagcttgtacctcagaatatttttgattagaggtacaggaagctggaatgtgtgtacc

SEQ ID NO: 417693 - DNA, 467 bp, Homo sapiens
cttcagtggagaaagtaactgcaggtgtgccggaaatagtaagagaactamaattagaagtggagcctgaaaatgtgactgaattgctgcaatctcatcattagtattgaatggatgaggcaaagaaagtggtttattgagataaaatctactcctggtaaagatactataaacattgctgaaatgataccaaaggatttagaatatatgtaaacttagctaataaagccgtggcaggatttgagggaattgactccaattttgaaggaagtcctattgaggataaattcctatttaaacactattgcatgctacagagaaatcttttgtgaaaggatgagttaatgaatgcctcaaacttcatttttgtattttgttaagaaattgccgcagccactgcaaatttcaaccttcaggaactaccaccctgatcagttagcagccgtcaacattgaggcaaaagagaa

SEQ ID NO: 417694 - DNA, 467 bp, Homo sapiens
cttcagtggagaaagtaactgcaggtgtgccggaaatagtaagagaactaaaattagaagtggagcctgaaaatgtgactgaattgctgcaatctcatcattagtattgaatggatgaggcaaagaaagtggtttattgagataaaatctactcctggtaaagatactataaacattgctgaaatgataccaaaggatttagaatatatgtaaacttagctaataaagccgtggcaggatttgagggaatygactccaattttgaaggaagtcctattgaggataaattcctatttaaacactattgcatgctacagagaaatcttttgtgaaaggatgagttaatgaatgcctcaaacttcatttttgtattttgttaagaaattgccgcagccactgcaaatttcaaccttcaggaactaccaccctgatcagttagcagccgtcaacattgaggcaaaagagaa

SEQ ID NO: 417695 - DNA, 601 bp, Homo sapiens
gtattgaatggatgaggcaaagaaagtggtttattgagataaaatctactcctggtaaagatactataaacattgctgaaatgataccaaaggatttagaatatatgtaaacttagctaataaagccgtggcaggatttgagggaattgactccaattttgaaggaagtcctattgaggataaattcctatttaaacactattgcatgctacagagaaatcttttgtgaaaggatgagttaatgaatgcctcaaacttcatttttgtattttgttaagaaattgccgcagccactgcaaatttcaaccttcaggaactaccaccctgatcagttagcagccrtcaacattgaggcaaaagagaaagagattatgaaaaaaaagattatgacccactgaaggctcagatgatcattggcattttttaccaataaatctttttaaatttagatatgtatgttgttttctcagacataatgttattgcacactttatggacgatgatatagtgtaggcaaaacttttgtatgcactgagaaaccagaaaaattttgtgactcactttattctgatagtcactttattgtgataattgctatatt

SEQ ID NO: 417696 - DNA, 601 bp, Homo sapiens
gtattgaatggatgaggcaaagaaagtggtttattgagataaaatctactcctggtaaagatactataaacattgctgaaatgataccaaaggatttagaatatatgtaaacttagctaataaagccgtggcaggatttgagggaattgactccaattttgaaggaagtcctattgaggataaattcctatttaaacactattgcatgctacagagaaatcttttgtgaaaggatgagttaatgaatgcctcaaacttcatttttgtattttgttaagaaattgccgcagccactgcaaatttcaaccttcaggaactaccaccctgatcagttagcagccgtcaacattgaggcaaaagagaaagagattatgaaaaaaaagattatgacccactgaaggctcagatgatcattggcattttttaccaataaayctttttaaatttagatatgtatgttgttttctcagacataatgttattgcacactttatggacgatgatatagtgtaggcaaaacttttgtatgcactgagaaaccagaaaaattttgtgactcactttattctgatagtcactttattgtgataattgctatatt

SEQ ID NO: 417697 - DNA, 629 bp, Homo sapiens
gcaggaataaagaggggaaaaaataagggaggagagtcacctcctttttatgtgacattcttctgggggcccctccaactccctgggctctctcctgaatgagctctagtctagttcacctagatggcttttaaattatgatttgcctttctgggcaagacacgagagcacctcttgtattctagattgtattatacataattgtgttcatgaaggaagtcttagtgctgtgatgttgatggtcatatcacggtgttgactaagatccctaaggaagtttaatattggctgctgatatccaagtcagcagtaattgtaattgtatagaaattaccatcagtaattgtacagaaaaagaatagttatagcaatttactccttattcacctacattaatccctgttacttgttgaatctcacatggctgtggaattttcacacttagggaggataattccaatggactccaactgctatttttttggtttttcctaacttcatggtcctgcaggaaataaacatttcattcaatagtgtcctttgcaaccacaaactttaccaaattkcctatgataaaaagcattgacttttaaaaagatcagtttttaattgtttattttaatggtcac

SEQ ID NO: 417698 - DNA, 605 bp, Homo sapiens
gaaccagtcctggctgacacattgctctcagccttctagcctccaagacaataagtttctgttgcttaagatacccgtcatgtggtatttcacttcggcagcccgaggaaattcgtgctattgcygactctaccctgccacaccatcaacagtctctaatggttgcagtgtctttgctcatctcttgaaattcaaagtcccaggaggaatcattcaattcagcaagccccatcacacaagcaagctggttgcagggagttggagaaggagtattttactcctttaaactcctttcaagtccctgtctcctcccaagaaggatcactggtgactccataaataggaaagtgttggggtgctatgttgccaaaggtaactactaatggctatggtgtggggttagcatcatagaaattccaagttggctgaaaaatctactgcatcctataatggtttggaatcattttgctgccagtgatttctttctcatgttaatcccaggctaggcccagtagctcacacctttaatctcaacactttgggaggccaaggcaggaggaacacttgagcccaggagtttgagaccagcctggggaacagagtga

SEQ ID NO: 417699 - DNA, 496 bp, Homo sapiens
gaggctgaggcaggaggatcacttagggtcaggagtttgagaacagtctgggcaacacagtgagagacaactctgtctctacaaataataataataataaaattgtgagagctcccatatgtgagtgacttgttacttagagtatacataatagaaaacctaataaatcacaaatacttctataaataaatttgtatttattaaccaaagttgaataaatatacattgagagaagattttatctgtctgggtaaggcrttatttattgcatcaagagaccatgtttatttgacatattgcttggcagaccccttgtaataacttgcagtaacctcaggtctcccttgcttatccccagggttctacaattcacaggcttggagctgttgttttctcatgaaactgatttattggaaaagctcatttctatgagagcataaacatgaaaagcctttttttttcctccagtccttactttcactcatgttttgttgaa

SEQ ID NO: 417700 - DNA, 496 bp, Homo sapiens
gaggctgaggcaggaggatcacttagggtcaggagtttgagaacagtctgggcaacacagtgagagacaactctgtctctacaaataataataataataaaattgtgagagctcccatatgtgagtgacttgttacttagagtatacataatagaaaacctaataaatcacaaatacttctataaataaatttgtatttattaaccaaagttgaataaatatacattgagagaagattttatctgtctgggtaaggcgttatttattgcatcaagagaccatgtttatttgacatattgcttggcagaccscttgtaataacttgcagtaacctcaggtctcccttgcttatccccagggttctacaattcacaggcttggagctgttgttttctcatgaaactgatttattggaaaagctcatttctatgagagcataaacatgaaaagcctttttttttcctccagtccttactttcactcatgttttgttgaa

SEQ ID NO: 417701 - DNA, 586 bp, Homo sapiens
ggtatagtacacatctccactcaggcatctcttgccaattgtctcctgctcaagccaagtcaggaagtttgctgtttaataatacctaggaagtatttctttacagaagtttgggtttaacagggatgtacattggtcaaagcaaattgaagtgtgcaattaacatctgcatatttcactatgtgtaagttaaacgtcaatttaaaaggaagactgcctaagaatgaaaaatgaataagaattctaaggaatamaaataagtgcctatttttttttctggaaagcaccctcagtttctttgactaaagttcatggaggcttttctttcttggcttggctttggatggaagtactctttgcccctgcaagagaggagaaaaatctcactgtaccatgaatactgtgttccctataaatccaagaatcaaattactgtgactcttcctttctcttttgactcacctctcctgaatattgactgggaaaggttcagaaggtttggcgtggtaactggtgttatgtaagagccagatctgctgcctctcggtaagctcttagggaagtatctggcccaggtattagcaaa

SEQ ID NO: 417702 - DNA, 548 bp, Homo sapiens
caaaatgaaaaggacacctgatatcctaggagggagaacggagtgtcattgtatttgtttatttaggctgccacaacaaattgccacaaactgagtaacttaaaacaagataaattgatgctgtcacatttatggagaccagatgtctcaaatcaaagtgttgacaaagttggttccttctggaggctctgaagagaatctgtctcatccttttctcctagcttctggtggtcactgacaaatcttggcattcccttgtatgtagatgcatccaatctctgcatccatcaccgccccatatccctgcctgtgtgccctctactctcctctcctctccttataagggcatcagtcattggatttagggcccaacctaattcaggatgggttcattccaacttaactaatgatatctgcgaagactggatttccagacaaggtcatattctgaggttccaggtggacataaatttttggaggacacsattcaacccactatagtcactaaatgtctgtgtaatatatagcaacttattgccatgttgctt

SEQ ID NO: 417703 - DNA, 503 bp, Homo sapiens
atggagaaactattttgataaagacaacacgtagtgtgtaggatctaataacaagcaactgcctaggggaagagccttttctgactatgtttcagatctagccaaaatcaccaattactggactctctggggaccagaccttacaatgagttttctgaccccatgaggatttagataagctctggataagttcggttctgtgacatgagcactgagttgcttagcagtaaaaatctttctcctctcaaagacctcagtcaacaatatttccccagaatttacgaggaygcaacaggaggaggatgctgagagtctccatgtgagagcagtttttgccaatctcacatcaggtttaagatactaagggcattttcaaccctttctgaccccttttctaggttcaaggatggaaggaacactgcaagtggttctgctcttccctccccccattgatatggacaaaatcagccagatagggcttaggagaggtaagagttctcaga

SEQ ID NO: 417704 - DNA, 503 bp, Homo sapiens
atggagaaactattttgataaagacaacacgtagtgtgtaggatctaataacaagcaactgcctaggggaagagccttttctgactatgtttcagatctagccaaaatcaccaattactggactctctggggaccagaccttacaatgagttttctgaccccatgaggatttagataagctctggataagttcggttctgtgacatgagcactgagttgcttagcagtaaaaatctttctcctctcaaagacctcagtcaacaatatttccccagaatttacgaggatgcaacaggaggaggatgctgrgagtctccatgtgagagcagtttttgccaatctcacatcaggtttaagatactaagggcattttcaaccctttctgaccccttttctaggttcaaggatggaaggaacactgcaagtggttctgctcttccctccccccattgatatggacaaaatcagccagatagggcttaggagaggtaagagttctcaga

SEQ ID NO: 417705 - DNA, 503 bp, Homo sapiens
atggagaaactattttgataaagacaacacgtagtgtgtaggatctaataacaagcaactgcctaggggaagagccttttctgactatgtttcagatctagccaaaatcaccaattactggactctctggggaccagaccttacaatgagttttctgaccccatgaggatttagataagctctggataagttcggttctgtgacatgagcactgagttgcttagcagtaaaaatctttctcctctcaaagacctcagtcaacaatatttccccagaatttacgaggatgcaacaggaggaggatgctgagagtctccatgtgagagcagtttttgccaatctcacatcaggtttaagatactaagggcattttcaaccctttctgamcccttttctaggttcaaggatggaaggaacactgcaagtggttctgctcttccctccccccattgatatggacaaaatcagccagatagggcttaggagaggtaagagttctcaga

SEQ ID NO: 417706 - DNA, 475 bp, Homo sapiens
ctgagagtctccatgtgagagcagtttttgccaatctcacatcaggtttaagatactaagggcattttcaaccctttctgaccccttttctaggttcaaggatggaaggaacactgcaagtggttctgctcttccctccccccattgatatggacaaaatcagccagatagggcttaggagaggtaagagttctcagaacctagaggtgtttgtcagctacatctccataatggggatatagcatctaagggaaagaaacaatattacatctttaggggccaatttatgcaccaaatgttcagggagaggcaacgtggttgtsaaaaccatggtctccgaagtgggcctgcctaggtttaggtctcagctctgtcctttctggtaaccactctggaaatctgctccccatttatgataagggatgattttgcagaaggtatctaataagatattgtgatgagcaaacaggagagc

SEQ ID NO: 417707 - DNA, 571 bp, Homo sapiens
caatttcttaatggaccttagatcaaattgctttatcaaccatctggcagttacaattctagccagaccttgggctgcaggcaccttaataggggacaggcacaaaggaactgtggaaatgcagagaaggggatgagaagcttgagacacaggaagccaccagcccttatccttactcagcagacaatcagaatgccaaaggccacttgccatactggatactaaagtggattcagagcaacaagcagttaaaaatgcattttgccrttaatgcatttctgattaatgcctttcactctgttcagaagtaaagcaagttcattttctttgcagaagacccataccttggagcttttctaaatattgctcttaatttaactcttgtgaaggaatggcaacatccctttgagtgaaattactaccttttagaggcactgtctctccctggttgctgctgcttccctgagcactcattagccttcccgtggataggaaatagttttgtacaagaccctgaaatgctaaatgtccttaggttgaagggcatttgttctccaagcccgtctgactc

SEQ ID NO: 417708 - DNA, 544 bp, Homo sapiens
ttttctaaatattgctcttaatttaactcttgtgaaggaatggcaacatccctttgagtgaaattactaccttttagaggcactgtctctccctggttgctgctgcttccctgagcactcattagccttcccgtggataggaaatagttttgtacaagaccctgaaatgctaaatgtccttargttgaagggcatttgttctccaagcccgtctgactcagcagtgatatatgtgcagaggaagtctttctttgcctgtcttagctttgctcttgttcctctttcaattgaaaaaatgtgatttttctttttctactcaagttctattcagaaagcaaaggaagtgcataattgtttggttgtcccttgcatccttctgcagcatatttcacaggaaatctcattactaaaataagaatattattcctaatttattaaaatagatgtgggttggtcaaaagccatggtgggggatggtggaataaaaactgcatcttacagcaaaaaggtccactttattgagttacagcaagtaacatttcgt

SEQ ID NO: 417709 - DNA, 544 bp, Homo sapiens
ttttctaaatattgctcttaatttaactcttgtgaaggaatggcaacatccctttgagtgaaattactaccttttagaggcactgtctctccctggttgctgctgcttccctgagcactcattagccttcccgtggataggaaatagttttgtacaagaccctgaaatgctaaatgtccttaggttgaarggcatttgttctccaagcccgtctgactcagcagtgatatatgtgcagaggaagtctttctttgcctgtcttagctttgctcttgttcctctttcaattgaaaaaatgtgatttttctttttctactcaagttctattcagaaagcaaaggaagtgcataattgtttggttgtcccttgcatccttctgcagcatatttcacaggaaatctcattactaaaataagaatattattcctaatttattaaaatagatgtgggttggtcaaaagccatggtgggggatggtggaataaaaactgcatcttacagcaaaaaggtccactttattgagttacagcaagtaacatttcgt

SEQ ID NO: 417710 - DNA, 583 bp, Homo sapiens
aaatctcactgttcactagctgtgcgactgggggtaaattgttcgactttgcagtgttctggttttcttattgtgaagtaggtattagaatatatctacatcatagaacagttatgagaattaaacaggtacttagaacagtacctggaatatagctaatatttatttgttacctgtttctattaatttttcatataaaggatgtcagtttctgactacagatgcacacatgaatgcagcccaagagttcatattcatacctaactctccaagtccctcaccaacattgttgtatgaatccaagcttgacttcccccacctctaagtaagattggccacacaattctctatacacagggatgtgatacaaaagacctcattgactggcacaaggctccgatgctccctggagtgaccgatgtgaaaatgagtttgctagattaaaaactcaacgtgacatatatgctgactacagctcttcctgaaaatattgaagttggaacatgaagggaatatcattgtcaatattgtattttcattgagctgygggttcatggacttaaaaaataataataagtaaaaa

SEQ ID NO: 417711 - DNA, 577 bp, Homo sapiens
aaggataccgacaggaaaggtgtgtgcctggatgggcaggcagcggaaggtcaacaaatcaggtcagacagaggaaaaaaatgttctggagatggaatgaaagaagagccggggaagcaaacccagctgcagatacttgtcagcagtactggcactaagggccaaagggacttaacattcattcagaaaagattcactccagacagtcatggtgtttgccaaatgttactggaatttcacagcaagtatgttgataaattccaaaataccctcagaatacctggaaagttattctcttctagtttaaaaatagataataccaagttacagattattaaactatatatacctattatttatatgttagtcatatagccttactaagtgccatgtccttcatctttagtaatcatgactcttgttgcatgagacttaaggaacaatgtttaaccttstatacatacttatgttatagaagtacaaaaaacaacctgatgctactaaagctaagggctttgcagccaggcactgcaataaatgcaatttgatgaaggaattattgcatagacttgtcctt

SEQ ID NO: 417712 - DNA, 698 bp, Homo sapiens
aaatgtggttgtattatttacttaagacaactattcaaaatacctctctgttatgaacctataagttacaggataaaagatgtgcagcaatccaggactttgaaattttgactaaaactgccattatcttcattttctgtcttcattttatgcgataaattgtaagaaactttatgatccccaaatattctgtctgataacagcagtaaatttttgaagcagaagatgaaccatcctgtttgttttcgtaccttcatgaaatattcttcctttttatctctatccttgttgacgtttcagcatgcctaatttttaaaaaaatgttgtccrgtaaaaatatacatcatatcaacttactggtggctttggcccacttcttctattttcctttcattacaaatttttattagctgtgaaagaacagacttcccaatttcaagaaaagtttggtaatatattttgtaagaccgcataaatatatatgctgcacgtgtactaggctagaggttttgtgccctcagaattccaggtgtgcctcacataacttttaaattacaaacttatagtaagatggaaatttcttatagaaaatgcatgcacatgttctttcttttagagattacacttctcagtatctaacctatagaaatacacgtgcaagaacatgtaaactgccaataactagtttactgcacaag

SEQ ID NO: 417713 - DNA, 596 bp, Homo sapiens
cagtggctgcaatagctccacctatcacatcaggattcaagctaatagagagaaaaagaagggataagaggtcagtccttttactaaaaaataactcacaaaagaattgactaactttccagtcagcaagatggctaactagagatacctggcactcatctctctcacaaaagaagtaccaaggcaataaataaacaaccaaaattcaactaaagtgtttgggaaatagtgctgcaacaagggagtggtaaggtccttatagagcatggaggtctgaggatggaagcatatagagggaaggaaagcaccctgcctctgccaacccatttctcccatttggatcagctcagagccaaaagtaamttccctttgtgggaaaaggtaagcagaagactgccaccatcccccattgccaccgcagacagctgcagttcttactacagtcgaatcacagtcctcataatccccaagcccagtttgggaggctgcctggaatttatacagctgcattgctcagaattaggagtacaggatgtgctctgtaaatcctcccatgacccaaactgctgcagcacagcactatcttaaaaccagaa

SEQ ID NO: 417714 - DNA, 619 bp, Homo sapiens
acagtattaaaaatgttaagggcataaaactatcaataaagcacagtttgtgactcttaaagagagtataataaaaactttatgacaaatttagaaaaatcagaggaaatgaacatttttttctagaaaaatactgcagttgcttaaagataaatagctttaaaaaaatcctatagatataagaaatttaactagtagataggaagaaaagagtaagatggtagagtaggactttccagcaattgtccccctgcagaaacaccaatctgaacaactatccatgctcaaaaataccttcacatcagtgaaagaaaccaggtgggaggttacagtgcctgattatagctgaataataagaaaagcacattgaagggggtaagaaggacagttttacgttattcacattacstttcccgaacttcaggtagtacagtgctgctatattgtccattttggagataaaaaggaacgtaaacatagaactttgtcttaaaacccaacattgaagccaccacagtagaacacagcaccaaacagacctccatggttcctgactacaggctgcttcccatgaactcagcctctaaacttactccagcaccagatagaaatccccagc

SEQ ID NO: 417715 - DNA, 583 bp, Homo sapiens
ccttcacatcagtgaaagaaaccaggtgggaggttacagtgcctgattatagctgaataataagaaaagcacattgaagggggtaagaaggacagttttacgttattcacattacgtttcccgaacttcaggtagtacagtgctgctatattgtccattttggagataaaaaggaamgtaaacatagaactttgtcttaaaacccaacattgaagccaccacagtagaacacagcaccaaacagacctccatggttcctgactacaggctgcttcccatgaactcagcctctaaacttactccagcaccagatagaaatccccagccacagcaaaatagactcaagttctggcttacatcactgccaatgaactatggcagccatgggctcaaaataatccacaaggacaggtaaacctcagcaaccagtgactctgatttcagctcaacatgatgccagcctctgcagcaaatagattccagcctggtgcagtgtctgttgcagcaatcctgggcttagggttcttctagcactgtagcagctgtagcagttacaggtttagagaccacaacagaagacttg

SEQ ID NO: 417716 - DNA, 586 bp, Homo sapiens
caaaataatccacaaggacaggtaaacctcagcaaccagtgactctgatttcagctcaacatgatgccagcctctgcagcaaatagattccagcctggtgcagtgtctgttgcagcaatcctgggcttagggttcttctagcactgtagcagctgtagcagttacaggtttagagaccacaacagaagacttgcctagaatttatcattaaaggatgtcctataagaaagtcatgtaaaggtgggaataaatatctacttcttcagtgtgcacaagaccacatcaccacaagaatttaaaataatcagggaaacatgatatcaacaaacaggtaaaacaaggtgccagtgactgaccgtaaagagagagagatccatgaactatctgacaaataatttgaaattgctgttttaaggaagttcagagaacttcaagactataaagaaaaattatcccaggataagaaagtcaaaagtcaccaatgarattcaatccaaataagactaccacaaaatatattataatcaaaccatcaaagagcaaagacaaataaaataatcctgaaatcagcaagagaaaagaagca

SEQ ID NO: 417717 - DNA, 582 bp, Homo sapiens
ctttcccctggtgatttttgataccacactttgtaaaaaatatacatatgaaggcatcttctgtcatctcatagcttstagacacctctcaacaccttggtgaactaaatacttcattacaataatgcatttctgcttaatggtttcctatataggaaaatagtcctgtatttatttttaaaaataaatgttagtgcaagcttagaaagaatatgcattctacagaaatttaaagcaggattctatatataactctgagtttaattttccactagagatgttcaaatgttttatctcctcactgattatttttgtctgtatgtgctatcaactaataagagaggtgtgttatgtctcactgtggtcgtgaatttgacaattcctctgtaggtctgtcagttattgctttatattttgagaccacataattaggcacttacagattcaggattgctatatcttcttggtgaatttatccttttatcattatcatgtgatttatactaagatttttactttaatatctatcaggtatactattaatatagctacagaatatccacatgcaagtgtttctcagaa

SEQ ID NO: 417718 - DNA, 582 bp, Homo sapiens
ctttcccctggtgatttttgataccacactttgtaaaaaatatacatatgaaggcatcttctgtcatctcatagcttctagacacctctcaacaccttggtgaactaaatacttcattacaataatgcatttctgcttaatggtttcctatataggaaaatagtcctgtatttatttttaaaaataaatgttagtgcaagcttagaaagaatatgcattctacagaaatttaaagcaggattctatatatawctctgagtttaattttccactagagatgttcaaatgttttatctcctcactgattatttttgtctgtatgtgctatcaactaataagagaggtgtgttatgtctcactgtggtcgtgaatttgacaattcctctgtaggtctgtcagttattgctttatattttgagaccacataattaggcacttacagattcaggattgctatatcttcttggtgaatttatccttttatcattatcatgtgatttatactaagatttttactttaatatctatcaggtatactattaatatagctacagaatatccacatgcaagtgtttctcagaa

SEQ ID NO: 417719 - DNA, 582 bp, Homo sapiens
ctttcccctggtgatttttgataccacactttgtaaaaaatatacatatgaaggcatcttctgtcatctcatagcttctagacacctctcaacaccttggtgaactaaatacttcattacaataatgcatttctgcttaatggtttcctatataggaaaatagtcctgtatttatttttaaaaataaatgttagtgcaagcttagaaagaatatgcattctacagaaatttaaagcaggattctatatataactctgagtttaattttccactagagatgttcaaatgttttatctcctcactgattatttttgtctgtatgtgctatcaactaataagagaggtgtgttatgtctcactgtggtcgtgaatttgacaattcctctgtaggtctgtcagttattgctttatattttgagaccacataattaggcacttacagattcaggattgctrtatcttcttggtgaatttatccttttatcattatcatgtgatttatactaagatttttactttaatatctatcaggtatactattaatatagctacagaatatccacatgcaagtgtttctcagaa

SEQ ID NO: 417720 - DNA, 582 bp, Homo sapiens
ctttcccctggtgatttttgataccacactttgtaaaaaatatacatatgaaggcatcttctgtcatctcatagcttctagacacctctcaacaccttggtgaactaaatacttcattacaataatgcatttctgcttaatggtttcctatataggaaaatagtcctgtatttatttttaaaaataaatgttagtgcaagcttagaaagaatatgcattctacagaaatttaaagcaggattctatatataactctgagtttaattttccactagagatgttcaaatgttttatctcctcactgattatttttgtctgtatgtgctatcaactaataagagaggtgtgttatgtctcactgtggtcgtgaatttgacaattcctctgtaggtctgtcagttattgctttatattttgagaccacataattaggcacttacagattcaggattgctatatcttcttggtgaatttatccktttatcattatcatgtgatttatactaagatttttactttaatatctatcaggtatactattaatatagctacagaatatccacatgcaagtgtttctcagaa

SEQ ID NO: 417721 - DNA, 593 bp, Homo sapiens
tgggaattaagattatggaacaaaatatagttgtattacatcttgacaatgtaaaaatagtaatgtaataataatttttggcaggaggggaggagaggtgagaggaagtatgtgagtaccaattatctcatctttcatggtatttagtcaacacatacttgcgtctaaaaatggtataaagttgctgtcttcaggagtattacactccagtgaataaagacagaaagcactatgaagakgtaaataaataatccctttagtgataaatgccttaaaggaattaaatcaggataatgagatagcaacaaacatgggaagtaagagataaattggagtgtttgagaaggcttctatgagaaacggattttctttgtaaacgtctaatgtactgttacaaaaaagcaacttcactctcctaatgttttaaaaagtatcttcccaatttttaaagaaatattgtgttttgagaaaaaggcatttgaaaaatgaattagtaaatcattcaattttacttgagattccctgcaagtttttctctgttaaatacaactaaatactctattacaaataacatgtatagagaaataccaata

SEQ ID NO: 417722 - DNA, 455 bp, Homo sapiens
ttttttgagctcaattgtcctacacttgaacaagttacatattcataaaagatttgattctaatttaaaataaagagtggcaaacagaaacggaatgacagagaaaaatgcttgtcttaggatgtgttctaaatagcaaaacaatcattttagagtaaaaacttactttagccattatgaaatkttttatatttttccatgctgaacaacctcatagatagtgtcactcagtaaaattggtgtcgaataaaaatgctaagcatttccacatgctttattttctatatttgtatcatggacaaaaccaggtaactgtgttctaactgaagaaaaaactggatcgtagactgaaataaacttgggtttattaaggagttatatgttaatattatcccattgaaatttttaaaatgcaaacaaaatatatgtctaaagctaagactcattttgttgtt

SEQ ID NO: 417723 - DNA, 592 bp, Homo sapiens
ataacattctgggctaaagtgctatagaatatcctgttctaagaggggcaggaaaagagccaaggcagatctggtcacttcctccttgtctcggaatgttacattcccaaagtattctgcagttgttcttgagaattacaactgagaaaagggtaggaattgggccagtccaaggccacctggagaattattctgtaatatttttaataaaaattccctttgttttctcttttatttattctttatttgttcatggtgtttcatgctgcacaacaatgttatttctgtataattaagtttttcactgaatgtgattttgtttgtatgtttaaaaagggcttttccacttgaaaactatataaatatttacatatgttttattttagcacttttatttttttccgtaatccattaaacttgcaattaattttgaatttctgttagtgtatggcttaatgacmaaatatattattattttatttctggtggttcacaattttctgtagttcccacattttgaaataagccaacactttttctattggattgaagttttatatttatcaaattataaattctttctgaactctat

SEQ ID NO: 417724 - DNA, 621 bp, Homo sapiens
tttggaaaaagttgagcatctcactgttgttaaagatttgggcctgaattaatttgtcagtcagatctcctaattcagacccacagatcactgtcacttgtgttcagtgcttggtgtgaaacagaagccattctgcagtgctctgataatcttcatatgtgtatccattctccatgttccagctgacaccctctcaaggaacctgttctttttcttttctgctctgatctgctgagcagacctgtggtgacctgagctgacctgtgatcactgggtctggtcagtacagttagtctgaactctatgttgtaagacattgttctgcctattaatctacctttagtatactttaagaattgtgtaaccatataactcttaatattctttgtgtaartttcacttagctatttttctttttgaaaaaaattattttgaatcacatgtctagatgactttagactcattgtgtcgagtcccaaaaagataattctcaaaaatttgattggaaacaatttatcaaatatttgggggaaaatagacttttaacaatataaagttttcttatcaaggagcatggttcatctcttcatttaaatcctcttagtaacattttgcttatct

SEQ ID NO: 417725 - DNA, 397 bp, Homo sapiens
gttagcaaaaaagttagagcaaatagtctatcttttccaaataaattcaagcactaataacagtcaccatagtcaatttttttatttttaatattgtcttcttaaaatgcatgtagtcaaatgcttatttacaaagagtgggaagtattgttrtacttgattttacaggaacaagacattaacaagggtgaaaaacaaaaggtttttcagtggaaagatacttttaaaatatgctgtctctctatcctatcctcactcaaaaaggcacaaacataaacatcagtttggggagtttggggtgtaaaggcattccaagagtttcacagtggccaggacttgatgatagtgtcacaggcacatgagttgttcttctatcagttgataaaacatcacatat

SEQ ID NO: 417726 - DNA, 639 bp, Homo sapiens
actttcatactggattatctatgatattattgcatttagaaacataacatatttttcattcctaaatgcaatgcaggaagttagcaaaaaagttagagcaaatagtctatcttttccaaataaattcaagcactaataacagtcaccatagtcaatttttttatttttaatattgtcttcttaaaatgcatgtagtcaaatgcttatttacaaagagtgggaagtattgttatacttgattttacaggaacaagacattaacaagggtgaaaaacaaaaggtttttcagtggaaagatacttttaaaatatgctgtctctctatcctatcctcactcaaaaaggcacaaacataaacatcagtttggggagtttggggtgtaaaggcattccaagagtttcacagtggccaggacttgatgatagtgtcacaggcacatgagttgttcttctatcagttgataaaacatcacwtataacatctgaaggcatctgattttttctgaaagagaagacaaaagaaatgtaggcatgccagtctatctagtgccagcacagagctatgcaatggctgtagtgaacaccgccctagtggctggaaagctggttcaacaagctttgtttagctttgttgttagcg

SEQ ID NO: 417727 - DNA, 575 bp, Homo sapiens
cccccaactccttcaggctgcctccaccccaggccacacattttggatgcaaatgaccactctactgatagctggatctgtccaagctcattcaggggggcagcagcatayccacaggtgaggtgggaggtgggcaggggctcctgagatttagatctgatctctccctgatctggttctagtttttaacactatcaatgagaagacccaactggggagacggaagtcagaaaaatgtgttcagcctggggatgggaagtatgccccaggctacagaaggggtaccctgacttccactcagggctggccagatggggctcagaggcctggacatggtgccccctaaggctggacacatcttcactgaggcagtaggagaggctagctaggttggctttagctgctacccagacagctctactgttctcatctgtgtggccccacattgcaccccaaaacattttaatttgttactaattcacctgaggttgattttgattaagagaatatttaatattgaaaagaatgtatactatattagatgttacatgtaatggacttaccttaggatatag

SEQ ID NO: 417728 - DNA, 575 bp, Homo sapiens
cccccaactccttcaggctgcctccaccccaggccacacattttggatgcaaatgaccactctactgatagctggatctgtccaagctcattcaggggggcagcagcatacccacaggtgaggtgggaggtgggcaggggctcctgagatttagatctgatctctccctgatctggttctagtttttaacactatcaatgagaagacccaactggggagacggaagtcagaaaaatgtgttcagcctggggatggraagtatgccccaggctacagaaggggtaccctgacttccactcagggctggccagatggggctcagaggcctggacatggtgccccctaaggctggacacatcttcactgaggcagtaggagaggctagctaggttggctttagctgctacccagacagctctactgttctcatctgtgtggccccacattgcaccccaaaacattttaatttgttactaattcacctgaggttgattttgattaagagaatatttaatattgaaaagaatgtatactatattagatgttacatgtaatggacttaccttaggatatag

SEQ ID NO: 417729 - DNA, 641 bp, Homo sapiens
aaaagaatgtatactatattagatgttacatgtaatggacttaccttaggatataggttcctgagaagaggacaatgcctaaaatagtgtctaggagttctatgaaatggctgtgggataagttatccttgaacatattcaatttcagkaatcttatgttatagcttcttcaactgcttaaaaatgtttatctttagtattgatacagacagtgaaaaataaaaatcttataccacaatccagagataattttaatacacatatgtgtgtatatatacacaaacatatatatatataaatgtatctgaaatgtatatttagtaatatgtttaacataaaggggctagcatctgttattttgtaacttgattttcacttaatatctaattattttcattctttgatgttattatgttataataataattttcatggttatttagtattccatagtatttagatatgatgccttgttaattccttggatatctaggatgttttatatatttttaatatcataaaaaattatttaatgactattcttaaaactaaatctttgtaaacctttatgcatattacttcagaataaattctcagaaaggaaatttctaggtaaaaaagcgtgagtttttttaaggtta

SEQ ID NO: 417730 - DNA, 641 bp, Homo sapiens
aaaagaatgtatactatattagatgttacatgtaatggacttaccttaggatataggttcctgagaagaggacaatgcctaaaatagtgtctaggagttctatgaaatggctgtgggataagttatccttgaacatattcaatttcagtaatcttatgttatagcttcttcaactgcttaaaaatgtttatctttagtattgatacagacagtgaaaaataaaaatcttataccacaatccagagataattttaatacacatatgtgtgtatatatacacaaacatatatatatataaatgtatctgaaatgtatatttagtaatatgtttaacataaaggggctagcatctgttattttgtaacttgattttcacttaatatctaattattttcattctttgatgttattatgttataataataattttcatggttatttagtrttccatagtatttagatatgatgccttgttaattccttggatatctaggatgttttatatatttttaatatcataaaaaattatttaatgactattcttaaaactaaatctttgtaaacctttatgcatattacttcagaataaattctcagaaaggaaatttctaggtaaaaaagcgtgagtttttttaaggtta

SEQ ID NO: 417731 - DNA, 641 bp, Homo sapiens
aaaagaatgtatactatattagatgttacatgtaatggacttaccttaggatataggttcctgagaagaggacaatgcctaaaatagtgtctaggagttctatgaaatggctgtgggataagttatccttgaacatattcaatttcagtaatcttatgttatagcttcttcaactgcttaaaaatgtttatctttagtattgatacagacagtgaaaaataaaaatcttataccacaatccagagataattttaatacacatatgtgtgtatatatacacaaacatatatatatataaatgtatctgaaatgtatatttagtaatatgtttaacataaaggggctagcatctgttattttgtaacttgattttcacttaatatctaattattttcattctttgatgttattatgttataataataattttcatggttatttagtattccatagtatttagatatgatgccttgttaattccttggatatctaggatgttttatatatttttaatatcataaaaaattattkaatgactattcttaaaactaaatctttgtaaacctttatgcatattacttcagaataaattctcagaaaggaaatttctaggtaaaaaagcgtgagtttttttaaggtta

SEQ ID NO: 417732 - DNA, 610 bp, Homo sapiens
atcacttgagcccggaagttctaaaccatgctgggacatagagtgagattttctctctatgtaaacaaacaaacaaaaaaatttttttagccaggtagggtgggctgtagtctcagctactcaagaggctgaggtagaaagaagggttgtttgaggagactgaggctgcagtgcgctatcattgcaccactgcactccagcctgggtgatagtgaaagtctgtatctaaataaataaataaaaacaaaacaggactttattttcccagggactatccctcatcactgccaagtttggggacattagggaycctgtgcttacttgcaaaagaattttttctctgtcctccagggaaacttttttttttttaatgacattaattttttcatttattcctgacaaaacaatgtgagaaaataaaacaacatttgtcactaggattggctgggtgtcctttttaattaactggattaaaaagataatcatctgtaattgtagagaatgataaaaatgctgaagaccctttgaagtccttcattcgttaaatgttcttattaccagtacccactaacatgcccttgctgacagttcacaaggattgcaagctcgt

SEQ ID NO: 417733 - DNA, 610 bp, Homo sapiens
atcacttgagcccggaagttctaaaccatgctgggacatagagtgagattttctctctatgtaaacaaacaaacaaaaaaatttttttagccaggtagggtgggctgtagtctcagctactcaagaggctgaggtagaaagaagggttgtttgaggagactgaggctgcagtgcgctatcattgcaccactgcactccagcctgggtgatagtgaaagtctgtatctaaataaataaataaaaacaaaacaggactttattttcccagggactatccctcatcactgccaagtttggggacattagggatcctgtgcttacttgcaaaagaattttttctctgtcctccagggaaacttttttttttttaatgacattaattttttcatttattcctgacaaaacaatgtgagaaaataaaacaacatttgtcactaggattggctgggtgtcctttttaattaactggattaaaaagataatcatctgtaattgtagagaatgataaaaatgctgaagaccctttgaagtccttcattcgttaaatgttcttattaccagtacccactaacatgccctygctgacagttcacaaggattgcaagctcgt

SEQ ID NO: 417734 - DNA, 548 bp, Homo sapiens
gggttgtttgaggagactgaggctgcagtgcgctatcattgcaccactgcactccagcctgggtgatagtgaaagtctgtatctaaataaataaataaaaacaaaacaggactttattttcccagggactatccctcatcactgccaagtttggggacattagggatcctgtgcttacttgcaaaagaattttttctctgtcctccagggaaacttttttttttttaatgacattaattttttcatttattcctgacaaaacaatgtgagaaaataaaacaacatttgtcactaggattggctgggtgtcctttttaattaactggattaaaaagataatcatctgtaattgtagagaatgataaaaatgctgaagaccctttgaagtccttcattcgttaaatgttcttattaccagtacccactaacatgcccttgctgacagttcacaaggattgcaagctckttatatctactgaattacagagctaagctacaccttatatgagatccagttcaattctctccatctttcttaatgggaaagc

SEQ ID NO: 417735 - DNA, 608 bp, Homo sapiens
attaggacttcaacataaattttggggtaacataaacattcaggtcatcataccagggtattcacattttataccacataggctgaacaataaagaaaaccagtttttcttttcctttttctttgtaggttgaataacattgaagagcagaataggatgcatctacctaactttacagacattggaacctggatcttggatttctcatattcaagtggctgttgctaaatatattgatggggatrggatataaaatggccataacacaaaatagtggtactaagctttctaaagttggagaaggttgctttcctctgtatatacaacttcttgatctatgaatccaaccaaaaattggttgctgctattacagaaatctgtccacatttgtatgtttcagtttggatatgctcagctgtaaataacgtaatacttaattaaaagtaagggtgaattcatctgacataataataaatataaggagaaaacattagaggattgatataccagctcaacagtgtcatctgcacccagattctcatagtccctttgtttttccatcttcatcatgtagaggctgtctcccatcccaagtgtaaaatgaccac

SEQ ID NO: 417736 - DNA, 554 bp, Homo sapiens
actttacatgttggcaacctgaagtaaataagatgacagtccctgccagagctagaacctagagctcacttgactctgacagcatacacacatcctccaaattgggacttttcaataatcataaaatttttggattctyagggggtatagaattgtgatatgatctccagattcattggggcaggagacttcaagtgttgtctagtttttatatgttaaaaatttgaactcacacgttcttaatgaattttgaggacaaattcataggatccaatctgaatttctggttacagggcagagattgaattagaatgggggtaagagtagatatagggagaaaaattagcaactatgttgccattgtcccaccaagaggcaaaatcattaaggcctggctattgaaagataaggggacgaatgagtgaaaatggtaagtatttgaagaaatagaaaattaaggtgcaatttcttaaaattggaaatactgatgaacgaaaaggttttagggagaagatatatttaatttggagcatgtttgaatattttgtgagggg

SEQ ID NO: 417737 - DNA, 401 bp, Homo sapiens
aaatatgtaccactttttgcatgtcaattatacttcaataaagtggtttaagaaaaaaatatctcacttaaatcctcattttacatctctgctaaagatgaaagtttaaggacaaatagagttatctctcttgaaaaaccagtccatgatatgtgctgtgaattttagcttttcccttcttacacaaaaatatycatccttgtaaaattatatttagaaaataaagccaaccaaaaagaagaaaatttgaatgccactgactctactcagagttgtcacagtgtactgtccctgtcacttattgcaaagatatataatatttagtacaccaaatatgtattttgtaattagatcttaatataggttaaatataggttaacatctttccttgtcagtattgt

SEQ ID NO: 417738 - DNA, 575 bp, Homo sapiens
ttaaaatgaaaaagcactgatttgtagtttttgtcttattctgtgatataaatagcctttattacatcctagtttctcagcttctcaataccacatgtggaacaaattttatatttttttttaataaatgaaaaacatmaggaagatgtgcttaggtctatttagcagcatgaaattagtttcaaaacaaattctaaattctttttatttgctaagtgaatacaggcaacatgctcaccctctctgctttcttagtatcctaagatataaaatcaggtagctatattgacctacacacacatacacaaatgctaatttgtgacaatggaacaaacacattatttcaactggttggaggtaatattatacattactaatccataatattatgattttttagaataatacttgtcgagcccctggtatgcactagttactaaggttcaaagatgaagatcatcaaatcttatcacataagccattactttctgatttctattgatgttccaagctctttttctctgcttttacatggtataatttttagcccttttataattctgcattctctactt

SEQ ID NO: 417739 - DNA, 575 bp, Homo sapiens
ttaaaatgaaaaagcactgatttgtagtttttgtcttattctgtgatataaatagcctttattacatcctagtttctcagcttctcaataccacatgtggaacaaattttatatttttttttaataaatgaaaaacataaggaagatgtgcttaggtctatttagcagcatgaaattagtttcaaaacaaattctaaattctttttatttgctaagtgaatacaggcaacatgctcaccctctctgctttcttagtatcctaagatataaaatcaggtagctatattgacctacacacacatacacaaatgctaatttgtgacaatggaacaaacacattatttcaactggttggaggtaatattatacattactaatccataatattatgattttttagaataatacttgtcgagcccctggtatgcactagttactaaggttcaaagatgaagatcatcaaatcttatcacataagccattactttctgatttctattgatgttccaagctctttttctctgcttttacatggtwtaatttttagcccttttataattctgcattctctactt

SEQ ID NO: 417740 - DNA, 616 bp, Homo sapiens
cagtgacatatgagacataatgacaaagtttctaaggagttttgaaactttcagaaacatattttctaacactttggtggtatgttctcaccattcatttgaaattaacggggaattcttttgttaatttcttgaatttcccatcttattaagtagtaaaatctcaaataagaatgactccaaactttctaaaagcatttgtttcacaaaatgagaagtcatggaataattttggagttaatsgtagctcattatttatctatgaaaggatgctactttcacaatatgtaaagtaggaaatagattctagaaataacacttttcagatttattgaataacgtcttcagcagaaagaaatggctaaatgcagaacaacaaaaaatgttcaagttaaaattagtttcttatatatataaagctactttataagtctggctgatttggtaatcgtctagcttttttttaattatacagcttttttattgaatattggcaaattataattatatgtatttgtaggaagcaaagtcgtgctatgatatacgtatacattatttggaatggtggatatgttaattagctgatctaacctagctttagaaatgatagccttca

SEQ ID NO: 417741 - DNA, 612 bp, Homo sapiens
atcatgttttaaataaacactttaaaataaaattcaaagtcatctatttgacatgagctactgagacaaaagcatttatttaaacctatatgcaccttttatgcagagtttgaagtttcatatgtaaatgtgaacagtattttatcatttatttgagactagaagcaagtacttggaatatgactacatgtatactttcacttgattatgcaaaaaacacaaacggctttattaagtgttatgatcttcttgatgccaagtccccattctttccttctctctcagggagttgattacattgcttcgttgtttctccctgtactagcaacacagcctgagtgagtgattagtaggctcacgattggacttaagaactttcatcttcgagccctggtgtggggtctatccactaggttatgctgctgctcctctggagagcagagcggaacccacctggtgtggtytgggagaagatgcttgttttcaaggcctgtcccaaagaaatgaatgctgcggctttattttttttttcctcctcagagcaatcttgtttgaaaaatcaacattgctactgcaacactacttggatgaaattttgtaaaaattgggcat

SEQ ID NO: 417742 - DNA, 599 bp, Homo sapiens
gcgagttctaactgagtagagggttggtaaatatttggaaaataaatcaataaatgatgtgttatgatttttctgttcctttatactccttkaattttctgaactttcaaatatgatcatgtatattttgggtacaagacaaactaaattaaaaatataaacaagaataaggatcatttgccatttaagatgataaactgaatgaatctgtcagctgctagcatccatagcagttgttaaaactctgtttttctacatggaaaacaatactgatgtttctgatttaaaagaaaaaatatgagaaaaaggtaattttttatgacaaaatatagcaaaagtcacaggtttattttaagaacaattgcatgtagatgtcacaaatggttcatagtaaatctatattgtatatttcatccagtcgtacttaaattggtatctcctttattatattattttcgtagttttaagtattcaaatgggtttgtcaacaaattggcattaatatttatgttatttgtgaaatgacaaaattaactctggaaagtttacttttaaatgtaatcaattaattttagatatttgatcttgaataacaaaat

SEQ ID NO: 417743 - DNA, 547 bp, Homo sapiens
aggatagaaggaaatggagagagagggagaagaaaagatgaaaagataaaagagagagaggaaagaagtaagggagggaaggaaggagggagggatagaaagaaagagtttgaatcatatagggcaacaatggggatactcacaagtcaagatgaacaacaacaacaaaaattgtcttcaaccagaaattatttctatttaataagtagtcactgcacrtcttaccagaacaaaatatgagttcttcatttctagattcactttcatttatgcattcataaaatattttccaagagcctattatgtagggtaggcactgaggtaaaatgggaaacaagatggatgctattccttgtctcaaggagtttaacatatcatttggttacttggactaaagatgcagaacacaaaaatataagcaaatccatagcaaaggagtttatgtgattttcagttttggatagaaagtcttttgagtgaaagagtctaaagggaaaagatgagaatacttgatgcaatgagctaaatagttaaaccacattaatga

SEQ ID NO: 417744 - DNA, 547 bp, Homo sapiens
aggatagaaggaaatggagagagagggagaagaaaagatgaaaagataaaagagagagaggaaagaagtaagggagggaaggaaggagggagggatagaaagaaagagtttgaatcatatagggcaacaatggggatactcacaagtcaagatgaacaacaacaacaaaaattgtcttcaaccagaaattatttctatttaataagtagtcactgcacgtcttaccagaacaaaatatgagttcttcatttctagattcactttcatttatgcattcataaaatattttccaagagcctattatgtagggtaggcactgaggtaaaatgggaaacaagatggatgctattccttgtctcaaggagtttaacatatcatttggttacttggactaaagatgcagaacacaaaaatataagcaaatccatagcaaaggagtttatgtgattttcagttttggatagaaagtcttttgagtgaaagagtctaaagggaaaagatgagaatacttgaygcaatgagctaaatagttaaaccacattaatga

SEQ ID NO: 417745 - DNA, 533 bp, Homo sapiens
  misc_feature (1)...(533): n = A,T,C or G
nnnnnnnnnnnnnnnnnnnnnngtactcttttgcaatgacaaatctttattgtttcccattttaattgtttctcttactttactgatagctcagccatgcttttaaagagatgtttcttatwttttaggcagtcttttaggtgttctgctctaaaaaacattttttttcctgcaaaatctagtcaaccatatgactagaaatggaagtatctcattctctttttcacatgttttcatcagaatttcatccccattgctctacagaaacttcttttttctaggtcaacaatgacatccacttgccagatcttatattcatcttgctgggctcacatagtttgacctgagcaggacttgacagtttgatctctttcttcttcttaggaaagtttctttactttgcttctgctcactaagtttttaagtaaactatacagtttacttcctgtgtcacatatttggtgttactttcctgaatctgtctcttttatcagaactcagccctcaaactctatctcttcttaatttatact

SEQ ID NO: 417746 - DNA, 603 bp, Homo sapiens
atccttctagttgttaagccaaaactctagacctagttcttaatcctgctctttcctttataccttacattccattagctgcagtcttcttacttcacttttgtaatatatgcagagtccaaccacttctcaccatcattctctcttaaatgagtaactgcagtagatttcttactgttctcccagctctcatccttgcccctgaactatctgttcgtaacacaactaccagagtgatcgtttaaaaatataaataagggccagtcgcggtggttcacacctgtaatcccagcactttgggaggctgaggtgggcagatcacaaggtcaagggatcgagatcatctggccaacatggtgaaacccygtctctattaaaaatacaaaaactagatgggtgtggtggtgtgtgcctgtagtcccagctattcgggaggctgaggcaggagaatagcttgaacccaggaggtggaagttgcagtttgctgagatcgcatcactgcactgttgcttggtgacagagtgagactccatctcacgattttatcattatgttcaatgtactccaatggcttctcatcttattcagagtaaaggcaaattg

SEQ ID NO: 417747 - DNA, 603 bp, Homo sapiens
atccttctagttgttaagccaaaactctagacctagttcttaatcctgctctttcctttataccttacattccattagctgcagtcttcttacttcacttttgtaatatatgcagagtccaaccacttctcaccatcattctctcttaaatgagtaactgcagtagatttcttactgttctcccagctctcatccttgcccctgaactatctgttcgtaacacaactaccagagtgatcgtttaaaaatataaataagggccagtcgcggtggttcacacctgtaatcccagcactttgggaggctgaggtgggcagatcacaaggtcaagggatcgagatcatctggccaacatggtgaaaccccgtctctattaaaaatacaaaaactagatgggygtggtggtgtgtgcctgtagtcccagctattcgggaggctgaggcaggagaatagcttgaacccaggaggtggaagttgcagtttgctgagatcgcatcactgcactgttgcttggtgacagagtgagactccatctcacgattttatcattatgttcaatgtactccaatggcttctcatcttattcagagtaaaggcaaattg

SEQ ID NO: 417748 - DNA, 603 bp, Homo sapiens
atccttctagttgttaagccaaaactctagacctagttcttaatcctgctctttcctttataccttacattccattagctgcagtcttcttacttcacttttgtaatatatgcagagtccaaccacttctcaccatcattctctcttaaatgagtaactgcagtagatttcttactgttctcccagctctcatccttgcccctgaactatctgttcgtaacacaactaccagagtgatcgtttaaaaatataaataagggccagtcgcggtggttcacacctgtaatcccagcactttgggaggctgaggtgggcagatcacaaggtcaagggatcgagatcatctggccaacatggtgaaaccccgtctctattaaaaatacaaaaactagatgggtgtggtggtgtgtgcctgtagtcccagctattcgggaggctgaggcaggagaatagcttgaacccaggaggtggaagttgcagtttgctgagatcgcatcactgcactgttgcttggtgacagagygagactccatctcacgattttatcattatgttcaatgtactccaatggcttctcatcttattcagagtaaaggcaaattg

SEQ ID NO: 417749 - DNA, 479 bp, Homo sapiens
agtgttgttatagaaaagtaattaaataatttttgtaagctatttctcaccttgtactctatgcatatcaatgcttttacttaaaagtgtggaaatatatattttgaaattctatgaatgtgaaagagctaggagagtatacatttaaaattgtgtgtcaactgtaaccaagtagtaatagctgcttgaagtattgtgttgaaaattcctgcctatattcagggtcagaaagaagattactctgactgattagtgcatctgccataggtataggagaggaaactggcagcaaggcacaaattcattatctgtgaacatggaagaacaaagttctgacttttctttaaaactcctgaatagcaacttctatgaaagaaggggtatatcttactcacctctgctgctaaggaatttagcacatagcattgtacataatatactcataatactacygactaattaaataaaagtatataata

SEQ ID NO: 417750 - DNA, 616 bp, Homo sapiens
acagaatcaaattaaaatttttttcccattaggtataagcacaaattagaacaagaaagatcttactcagtttaagaatgcaatcatgtaattcattctaagggatatgtttcaataaacagtggaatttcctcattctcttagaatgatatagrgaaaccttacacctgaattaaaacattatgaagctattacacattgaggatagtactagagtaagaattcatccctatataattattatacaattaatgtggtgttttaaaacattgaaaaagctaaatacagcaggcatttttaacataaaatttaaagataaaacattactgatattgaatgaaacactggtgtttcaatttcattcctaatactgctacaacagtaaaaattatattgtataatttattccgtgcatagcataatggtttaaatacaaaaccttattctgtataagatattttccaatatagctacattaaattactatttaattattacaaaatttttattaagttatcaagtataactgtgttttacaaatgtccttcaaagtgaaattatctagatagactttattctgaaataaaaaataaattcagaaccaatataacataaa

SEQ ID NO: 417751 - DNA, 608 bp, Homo sapiens
acattttggttttaacatgaaccttagaatcatattttctgttgaagaatatttttgcttaaatataaatacttttgttagtaggcaagggagctacatatttatataatcaatgaactccactgttttaaaagaatgtttaagacattcattagggtggctggcaagatggccaaataggaagagctctggtctgcagcacccagtkagatcaacacagaaggtgggtgatttctccatttccaactgaggtacctggcctatctcattgggactggttagacagtgggtgcagcccaaggacgatgagcagaagcagagtggggcaacacctcaccctggaaacccaaggggttggggaactccctcctctagccaagggaagccctgagggaatgtgccatgaggaatggtgcactgcggcccagataggatgcttttcccatggtcttcgcaacccgcagaccaagagattccctccagtgcctacgccaccagggccctgggtttcaagcacaaaaccgggcagccatttgggcagacaccaagctagctgcaggagttttttttcatatcttagtggtgcctggaacaccagcgagacagaa

SEQ ID NO: 417752 - DNA, 608 bp, Homo sapiens
acattttggttttaacatgaaccttagaatcatattttctgttgaagaatatttttgcttaaatataaatacttttgttagtaggcaagggagctacatatttatataatcaatgaactccactgttttaaaagaatgtttaagacattcattagggtggctggcaagatggccaaataggaagagctctggtctgcagcacccagtgagatcaacacagaaggtgggtgatttctccatttccaactgaggtacctggcctatctcattgggactggttagacagtgggtgcagcccaaggacratgagcagaagcagagtggggcaacacctcaccctggaaacccaaggggttggggaactccctcctctagccaagggaagccctgagggaatgtgccatgaggaatggtgcactgcggcccagataggatgcttttcccatggtcttcgcaacccgcagaccaagagattccctccagtgcctacgccaccagggccctgggtttcaagcacaaaaccgggcagccatttgggcagacaccaagctagctgcaggagttttttttcatatcttagtggtgcctggaacaccagcgagacagaa

SEQ ID NO: 417753 - DNA, 608 bp, Homo sapiens
acattttggttttaacatgaaccttagaatcatattttctgttgaagaatatttttgcttaaatataaatacttttgttagtaggcaagggagctacatatttatataatcaatgaactccactgttttaaaagaatgtttaagacattcattagggtggctggcaagatggccaaataggaagagctctggtctgcagcacccagtgagatcaacacagaaggtgggtgatttctccatttccaactgaggtacctggcctatctcattgggactggttagacagtgggtgcagcccaaggacgatgagcagaagcagagtggggcawcacctcaccctggaaacccaaggggttggggaactccctcctctagccaagggaagccctgagggaatgtgccatgaggaatggtgcactgcggcccagataggatgcttttcccatggtcttcgcaacccgcagaccaagagattccctccagtgcctacgccaccagggccctgggtttcaagcacaaaaccgggcagccatttgggcagacaccaagctagctgcaggagttttttttcatatcttagtggtgcctggaacaccagcgagacagaa

SEQ ID NO: 417754 - DNA, 592 bp, Homo sapiens
ttctcattattgtatacctctgagatttggggcttatttattaccataatataatctagactattctaaatagtatatccacatctgttgattttataggaatctagatatgaaattcagaaattccttaaacttccagaactatagggaaaaattgcacatatataaaaagtacatacaaacacattcttctttggctagaaagcttgtgacacatttatgagattttaaagagtctataacccaaacaattcyaaaataggccaaaaaatgtattttacagctccaatgtatagatattttgactttccattaatgtctaagcagaaagaaagtatttttttaaacacaaaaggaaatatacatatatgtgccaggaagacggaaagtccagatggaaaattggtatttttcctattaataaaattattattttctgattataatatttgatatgatataagaatattttcttatatccaagaacccccccaaaagtttagatgttatgtttggaatatgaatgtttcttcaacttcttacataatatttgcttggactgtatttttctcttggtaaaatatttgagatc

SEQ ID NO: 417755 - DNA, 589 bp, Homo sapiens
ttttaactacatacttaacttataggctgctttaagtgctatatcgtgtcatttcataaagaccagcagctttaccaaggctacctttcctttgcaaaaataggcaatctctttaagacagacctcttcaaaacttaatgctycacggaataagtactgttgttcacatatgtcaaatagacatttcccggagtcacaagattaatatggccttctaattacataatgcctaaaacataatgcctataacgtctccatgggaaaaacctggttgaagactctgctaaacgttatctattacctgaaatttaagaattccataacaatgaaaaactgcatctcagatcagtaagtcaggtctctgttgcaccagattctccatgttgttaaattaaaaattgctcctcagaaatgccatgatccagaatatttgcatattgacctggatgagcaatcaaaatcatcaaagaaaggatgaaaaacgaattttaagaaaacatttgcaacattttctttctaaaattgacaaaaacccattttatccaaatgaaaggcctcaaaatgtgttaacaaagaagggtggagtgaa

SEQ ID NO: 417756 - DNA, 616 bp, Homo sapiens
tctcctggtttaccttctctgtttttaagtgcttcttctctgccatctgatgcatacacacagttttattttctgccttactagatgattcttaattatcttactgttttctctacagtactctttaccaaattctagatcttgatgttcaaatgcctgttaaaaattccctatacaatttmatcaccaatagattaaattcagtatgtctcctggtcatcacattttctattttggtttgtatcatttatatctcagttattgaagctcaacatctcagtttttgtcagaacttcttacttttcaattggacatagagtcttgaagtttctgcctctgtattttgtcttgtgtttatttcactgacaacactatggttcacatcaacagtacattttctctgagccttctaagcacggaattacaggcttagttttccccctgatgcaaaacacgatgtatagcatactgtaattgttccatagaaagtgtataaaactagtgaattttcctgcataatctcacccctttccaaaccacctctaatgaatttttcttactgaaaagaagctttgacaatgtcctactccagctaaaatgaaaacagaacattgca

SEQ ID NO: 417757 - DNA, 572 bp, Homo sapiens
tgcattctgttataattctttttaatttctgcaatatctgtagtaatacacattcttttatttctgattttgagtatttgagtcttccctcttttttcttaatctaagaatttttcagttttgtccatctttaaaaaaattattagtttttaattatttttattgtctattcggtttatctttgctgtaatctgttttttttccttctgctagattttaggtttagtttgttgttcttttcctagtttcttgattcctaaatctagttctttgatttgaggtttttcttatttttcatgtatgtaattatgaggcagaaatttaaaaataaataagcattcattcacttcaagaaaastaacaggcaagtcaagggttcaaaagaaaagaacaagttttcctctgcctagcaagctcacttcaaggacagttacaagataacgctgtctgccactgtccgggaagccaaggccaaaggaatgagctccagacactgcccccttccagagcaaggttgaagggaaaaaagaagagagagacaaattcttttactgttactcctttccctggct

SEQ ID NO: 417758 - DNA, 572 bp, Homo sapiens
tgcattctgttataattctttttaatttctgcaatatctgtagtaatacacattcttttatttctgattttgagtatttgagtcttccctcttttttcttaatctaagaatttttcagttttgtccatctttaaaaaaattattagtttttaattatttttattgtctattcggtttatctttgctgtaatctgttttttttccttctgctagattttaggtttagtttgttgttcttttcctagtttcttgattcctaaatctagttctttgatttgaggtttttcttatttttcatgtatgtaattatgaggcagaaatttaaaaataaataagcattcattcacttcaagaaaactaacaggcaagtcaagggttcaaaagaaaagaacaagttttcctctgcctagcaagctcacttcaaggacagttacaagataacgctgtctgcyactgtccgggaagccaaggccaaaggaatgagctccagacactgcccccttccagagcaaggttgaagggaaaaaagaagagagagacaaattcttttactgttactcctttccctggct

SEQ ID NO: 417759 - DNA, 534 bp, Homo sapiens
atagaatttagaatttccttaaatatttgcatgtttttttctgtttatattttgtcatcacattacttatgatgaaaattaatctaactctataaaataaagaggataggaatttacagtatagacataaatttaaaactaaaaggtagctatagtttactacaaagcccagaacaaattgcatctgaaaataaggtaaaaaggaaaagscctctgattttgccagccaacaatacctgttgttactgtttggtagtttgaactgagtaacatactgctttaatttgtggagataccaaagtttataatagtccatattttttcagttaaccagtgaatttaagatacaccagtgactctgttacacatgagtactatttttctggaggatatgataagtagatggtaaatacatcattctcttgagtttgagatattagttactaatgatctagggatgaaaggctttggaacccaattacaatttttttcctatccaaatcttttatatataattttaaataataaaccata

SEQ ID NO: 417760 - DNA, 552 bp, Homo sapiens
aaaaagacaaaaaaatcttgataaggtttaattttttggcaaatatgttttataagtgatgttatagtataattccagtataaamgatatgatatcttgttgtcttttttattataatcatggcctaaattcatttattgattggaggtttaaaactattaagttaaagagtttatcaaatttgattcattaattagctgaaatacttcataaggaaaacccttcaactattatttagttatcttgatgtaaaagataactattctgacttttttctgtagaaaagtcaggctaaaatgcttaattatttacttttgcttatcaagttttatttaatatatcttccctctgtcattcttcaaagctaagttgaacatataatttattgttcaaagctggacatacttcaaagtgaaagtggacattattcattattatactgggacaacaaaataatccacactgcctgttatttgtaaaccaggatagtcactctatgcaaatgtgaccaatgaggttttaggttgtgaaacttattttgcttataaataa

SEQ ID NO: 417761 - DNA, 643 bp, Homo sapiens
aatgtatttttagaaatgtacatttatttttgtgaatgttttattttaatcaatattataattatccatattgcttatgggttttaataataattatgaaayatttccctgtaatcatagaaaaacgcacttaggtattcttctagaactttcatgccctcacattttacattaaagtttctgatgaattggaatttttaaaatttgtctcatgataatgaatccaactttatcttttaaaatatataactatcctttcatattatcttcaccgatttaagaagccatatttccatatacaattaagaataattctaaattttattttttctacattaacttttcaggctatgcatacactagtattacactgttttagttagagtgtctttacaatatgttataatgtcaaacaggcttagttgtcttccactgcttcttcccaagtcatttctatatcaggattttatgattatgcttatttgttattacagatgatcttaattttaaaaaatagtttgtctaccttttgggaaatagaaaaagcctaattgtatatttattagaattgtgtctattttacaaattaacaaaaacctgatcatagacagatagagattagatacagattttctattcaaaa

SEQ ID NO: 417762 - DNA, 643 bp, Homo sapiens
aatgtatttttagaaatgtacatttatttttgtgaatgttttattttaatcaatattataattatccatattgcttatgggttttaataataattatgaaacatttccctgtaatcayagaaaaacgcacttaggtattcttctagaactttcatgccctcacattttacattaaagtttctgatgaattggaatttttaaaatttgtctcatgataatgaatccaactttatcttttaaaatatataactatcctttcatattatcttcaccgatttaagaagccatatttccatatacaattaagaataattctaaattttattttttctacattaacttttcaggctatgcatacactagtattacactgttttagttagagtgtctttacaatatgttataatgtcaaacaggcttagttgtcttccactgcttcttcccaagtcatttctatatcaggattttatgattatgcttatttgttattacagatgatcttaattttaaaaaatagtttgtctaccttttgggaaatagaaaaagcctaattgtatatttattagaattgtgtctattttacaaattaacaaaaacctgatcatagacagatagagattagatacagattttctattcaaaa

SEQ ID NO: 417763 - DNA, 643 bp, Homo sapiens
aatgtatttttagaaatgtacatttatttttgtgaatgttttattttaatcaatattataattatccatattgcttatgggttttaataataattatgaaacatttccctgtaatcatagaaaaacgcacttaggtattcttctagaactttcatgccctcacattttacattaaagtttctgatgaattggaatttttaaaatttgtctcatgataatgaatccaactttatcttttaaaatatataactatcctttcatattatcttcaccgatttaagaagccatatttccatatacaattaagaataattctaaattttattttttctacattaacttttcaggctatgcatacactagtattacactgttttagttagagtgtctttacartatgttataatgtcaaacaggcttagttgtcttccactgcttcttcccaagtcatttctatatcaggattttatgattatgcttatttgttattacagatgatcttaattttaaaaaatagtttgtctaccttttgggaaatagaaaaagcctaattgtatatttattagaattgtgtctattttacaaattaacaaaaacctgatcatagacagatagagattagatacagattttctattcaaaa

SEQ ID NO: 417764 - DNA, 388 bp, Homo sapiens
tgaaagaaagattaggagagatggagagcaaaatagcaatgacaaagaagtaactggagtccctgaaggagagaatgagaaaacagggagaatatgagaaaggcaatatacaaatgacaaatatttccaaatttaatgaaagatagaaagcctcaaatttatgaagcaccagaaaatcaaatctgaatcagaataaataaaatcaagtccasataaaaagaccaaagaagtaattcaagctcattgttttaaaagataatgtaagataatataatttttaaaattataattaccctgatcagtatcccagtgcttttatgagttcccctttgttctttctctaaaaaaacttctcagaaaataaatctgataaaagaatgagagagag

SEQ ID NO: 417765 - DNA, 578 bp, Homo sapiens
atcctattcaaactattcagaaaaatagaggaggaggaaayacttcaaaactcattccatgaggccattattaccctgataccaagaccaaagacatatgaaataaaaaactacaagccaatatctctgatgaatattgatacaaaagtcctcaacagaatactagcatattaaattcagcagtacattagaaagatcattcattgtgacctagttggatttatctttgggatgcaaggatagttcaacatatgaaaatcaatcaatgtgatacatcatatcaacagaacgaaggataagaaccatgtgatcatttcaactgatacttgaaaagcattggattaaattcaacatctcttcataagacaacctctcaaaaaactgtgtatagaaggaacatacatgaacatataaaagctgtgcatgacagacccacagctagtatcatagtgactagggagcaactgatagcctttcctctaagatctggaatatgacacagatgcccactgtcaccactgatattcatcatggtactgcaagtcctagctagagcaattagacaagagaaagatata

SEQ ID NO: 417766 - DNA, 552 bp, Homo sapiens
gaggatggtgaatgtggagaattttactgagtgatgaagacaactctcagcagagaggggagctgaaaaggggatgggaagggaaggtcgctctcccctgaagtcaaactgcctctctttgatgtccagttgccatctctggagtcaagctgcttctctccaacatccagctgattcttcctgacatccagctgcttctatcctctgctggctgggatctttataggcataggatgggggcagggtgggctgctagtagttttggaaaatgcaacattcgattggttaaaaggcagtattcagaaagaacaaattgggagagaccgggcacatagggatgaaagttctcacttagggccatgggtttcatgctttttggcttgaaggtaaggttttgccagggaccctcccctgtctgcctagaatttttctgtctcctgttgctatccttactaaaacaggcatgtacactaagtgatttcagagaaatggaattaactatatcagtracagttgaatttaagcagcttttattattacaatattaagtct

SEQ ID NO: 417767 - DNA, 567 bp, Homo sapiens
catgcttcattcacttggaaataacaaaatggtgtataaacagcaacactgtgagcttttactcaagaaggaatacagaattcacccaaaaagtgagggacactccggatactggggaagagaaggtttacaagcagcctgtgtgacagcatttgactgataaaagtgagtgaagcctcagtgcataaaagaggcacttttcatytatgattcactttttaactagagattcgtccaaccaaggccacgggagagcaccttgtttctccgaagccctggagctaacttggggagaggctgggagagggtatgagggaaagatgccagaaaagctgcggaaattttcccagacttggactgagaggacactgttttcaatctagtttcatataaagaagtcagtaatttttggtgacccagcaggggcagctgccacagggactttggactctggctggagaatggagcacttactctggagcaggggaagggtacccacaatcagaactgagtgatgagtgtagactgcaccccagcagtaggcactgtgactggagcagaggaatt

SEQ ID NO: 417768 - DNA, 567 bp, Homo sapiens
catgcttcattcacttggaaataacaaaatggtgtataaacagcaacactgtgagcttttactcaagaaggaatacagaattcacccaaaaagtgagggacactccggatactggggaagagaaggtttacaagcagcctgtgtgacagcatttgactgataaaagtgagtgaagcctcagtgcataaaagaggcacttttcatttatgattcactttttaactagagattcgtccaaccaaggccacgggagagcaccttgtttctccsaagccctggagctaacttggggagaggctgggagagggtatgagggaaagatgccagaaaagctgcggaaattttcccagacttggactgagaggacactgttttcaatctagtttcatataaagaagtcagtaatttttggtgacccagcaggggcagctgccacagggactttggactctggctggagaatggagcacttactctggagcaggggaagggtacccacaatcagaactgagtgatgagtgtagactgcaccccagcagtaggcactgtgactggagcagaggaatt

SEQ ID NO: 417769 - DNA, 570 bp, Homo sapiens
atttaaataagttgataaaagacttgtgcatggaaagctgtaaaacactgatgaaaaaattaaagtacacacaaataaatggaaacatatcttatgtccatgggttgggagaattaatattgttgaaatgtccatactgcccaaagcaacctaragatctaatgcaatacggttcaggacatgctaccccaaaacatggcaccttggcatctgaaaaaacagatgaagaagaaaagtctctctgaccttgttgcattgtttccccctgaagttggccacataagaattctttaacccttttctaaagtaggtcataagactgtctttttagaggggtcctccctatacctggagaaaaggaatgaaggcatagaaacaccaagaagaatcttaagagaaaggcctttctgagttcccttcagtttgttaccattagatcatattattttgctctctaattatacttctgcatgactgtttgcaaaaatacatagttctccctgttaccttgggtgttcctttccaaagcctcctgtgtcacataaaacttttattaaatatatttgttat

SEQ ID NO: 417770 - DNA, 637 bp, Homo sapiens
aaaacctttgctatgctaggcacagaaaraacataactcaaaataataaaagccatatatgacaaacccatagaaaacatgacactggaatgggaaaaattaaaagcattcctcttaagaactgggaaaaggacaatgatgtccactctcttcactcttattcaacatagtacttgaagtcctagtcagagtaatcagacaaaagaaagaaataaaagacatctaaattggcaaagaggaagtcaaattatctctgttcactgatgatacaattttatacctagaaaccctaaggactcctccaaatgcctcctagattttataagtgacttcagtaaagaatcaggctacaaaatcaacttacaaaaatcagttgtgtttctatatgccaataatcatcaagctgggaaccaaatcaagaactcaatcccatttacaatagctacacaaaacaaataaaaaatgcataggaatgcatttaactagggaggtgaaagatctctacaaggagaactataaaacactgatacgggaaacaatagatgacacaaatggaaaaacagtgatgctcatggattggaagaatcagtatcattaaagtgaccatactgcccaaagcaatccatagattcaatgc

SEQ ID NO: 417771 - DNA, 637 bp, Homo sapiens
aaaacctttgctatgctaggcacagaaagaacataactcaaaataataaaagccatatatgacaaacccatagaaaacatgacactggaatgggaaaaattaaaagcattcctcttaagaactgggaaaaggacaatgatgtccactctcttcactcttattcaacmtagtacttgaagtcctagtcagagtaatcagacaaaagaaagaaataaaagacatctaaattggcaaagaggaagtcaaattatctctgttcactgatgatacaattttatacctagaaaccctaaggactcctccaaatgcctcctagattttataagtgacttcagtaaagaatcaggctacaaaatcaacttacaaaaatcagttgtgtttctatatgccaataatcatcaagctgggaaccaaatcaagaactcaatcccatttacaatagctacacaaaacaaataaaaaatgcataggaatgcatttaactagggaggtgaaagatctctacaaggagaactataaaacactgatacgggaaacaatagatgacacaaatggaaaaacagtgatgctcatggattggaagaatcagtatcattaaagtgaccatactgcccaaagcaatccatagattcaatgc

SEQ ID NO: 417772 - DNA, 637 bp, Homo sapiens
aaaacctttgctatgctaggcacagaaagaacataactcaaaataataaaagccatatatgacaaacccatagaaaacatgacactggaatgggaaaaattaaaagcattcctcttaagaactgggaaaaggacaatgatgtccactctcttcactcttattcaacatagtacttgaagtcctagtcagagtaatcagacaaaagaaagaaataaaagacatctaaattggcaaagaggaagtcaaattatctctgttcactgatgatacaattttatacctagaaaccctaaggactcctccaaatgcctcctagattttataagtgacttcagtaragaatcaggctacaaaatcaacttacaaaaatcagttgtgtttctatatgccaataatcatcaagctgggaaccaaatcaagaactcaatcccatttacaatagctacacaaaacaaataaaaaatgcataggaatgcatttaactagggaggtgaaagatctctacaaggagaactataaaacactgatacgggaaacaatagatgacacaaatggaaaaacagtgatgctcatggattggaagaatcagtatcattaaagtgaccatactgcccaaagcaatccatagattcaatgc

SEQ ID NO: 417773 - DNA, 587 bp, Homo sapiens
acttttgcattagctaaaagcaattatgaatgtgagaagatggaagttgttaatataaaacgattacactttatggctcatctttttcagtccccagtagcagaaatacatgccttttggctgctttttcttcctgagccatatattttaaagatttcaccttgaagtctatttttctcatacttgagcattttctgtttatacccattgattttcccctggagcagtatttaaagaaatgtaatttcaaactaaagatgaaataagtttcacttgattttgacctccagcccaacaaccctcattgccacagtgtgactctttcactgatgaagataaagggaattaagataaaggcagaggggtaatcattaattaaaagcagtgatctcaagatatattatattctaactatcaaaagaattatctaaaatagatttagaggtgaagctctacttgaactttggaattgacacaatgtctcattcttaacgggtcacccatgatcrctaatccccgagacagtggggatgttatcaggaggtactttagcccagtagctcctggaatgcttacatgactattat

SEQ ID NO: 417774 - DNA, 625 bp, Homo sapiens
aattcaccactatataattcatccatacaacaaaaaccacttgtaccccaaaaaccattgaaaaaatatttaaatgcacacagagacagagaaagagagagtgaaatggatatgtgattctcagttctaatactggataacagtgtttaaacttttagctcctagaaagaagtgaaaagaaataaaaatgaaggagcagaagaaatatagcatcttctcataaagtgttagagttcaatttgttttaattcaacaaatatgcatttaaataactgtactatagatgttatgctattcggactatgtggaggtgactgagattagtaagtcttaacttttaagtagaataaaacctgggggaaaagggagcttaagttgaggcagaataatattgattttataacaagcaaaattggagatgatacaaatacaggagaaagagaaaataattcaagatgggcagatgagtgactttcaccaagtgttagatatgattttrctttgaagtgcgaacagaataataatgcatgtgaagaaatactcttccaaagggaaaaagaccttcaggtgaaggtgaaagaaataaaataagtaaaaattaagagatggaaagtggtttgggttt

SEQ ID NO: 417775 - DNA, 429 bp, Homo sapiens
gatattattctttagcctgaacaattcattctgtataaagtaggtattcarttagggaagggattatgggaatataggattatgtttttattagtcaaaaggcaagctatcctgagaaagttgctgtcaaaaaccatgaaaacatattgtaaaattttatttattacttataagtaatatttttagaggagtgggctggggaaaagagtaagtgaatctcaaactacattttaaaatttcttttctgctaatttaaatattttagtttcatttaaaggtttagtattataattgagagcagaaaaggaaattatgttcattcagattctttagcccatgcacacaattatctttctttatatagttatagagattttaaattgccaattgggggtataaaataaactcttcatattacctactaaatct

SEQ ID NO: 417776 - DNA, 490 bp, Homo sapiens
tttttaaacattatctttcttacctctggggaatgtgatgagtgggcttcttttgtttcagaaaaccctatttcaaaaaattatttaatttaaataaataccctctatcagaagactggcacatttcaaaataaaaytttataagaggcactgccgtctacatgaaataaaaccatttaagcccattcacttgccatttatatctaagtaaacaaatcctatatactgtgatctagccaattggatctagcaagccacagaacattaccagaccactcatgctcaccgaagctgcttttcctacataattggtgaatatataaaaacaaactaaataccattatacaaacaaaaactaccaaatgacaagggggaagaacctttgatttttaggattcttcgtatcacttttcttgctaaggtaacagaagtatttcaattctctatgaatgaaattagcttacattttagcttttaacaccatttacgt

SEQ ID NO: 417777 - DNA, 490 bp, Homo sapiens
tttttaaacattatctttcttacctctggggaatgtgatgagtgggcttcttttgtttcagaaaaccctatttcaaaaaattatttaatttaaataaataccctctatcagaagactggcacatttcaaaataaaattttataagaggcactgccgtctacatgaaataaaaccatttaagccmattcacttgccatttatatctaagtaaacaaatcctatatactgtgatctagccaattggatctagcaagccacagaacattaccagaccactcatgctcaccgaagctgcttttcctacataattggtgaatatataaaaacaaactaaataccattatacaaacaaaaactaccaaatgacaagggggaagaacctttgatttttaggattcttcgtatcacttttcttgctaaggtaacagaagtatttcaattctctatgaatgaaattagcttacattttagcttttaacaccatttacgt

SEQ ID NO: 417778 - DNA, 545 bp, Homo sapiens
ctctctgtggtatcttttgtaaaagcactaatcctttcagtaaccctcatgacctaatgaccttccaaaggccacaccttcaaataccatcacactrgggattaggtttgaacatatgaatatttaggggacataaacattcggtctattgtgttcagttattcaagatctgatatttcaggtattcttggctccaaacccattgcactgctcacttgcactctccccaaatgagtgggaattttgagatgggggtaagaggagatcattatgtaaatatgcttgtggtcattgctaggactaacatgtaagaattttattttttacttcctccctctgcactaccatattttttgcaagctatttagtaatgtttggtttatcaatgcaattgtttttcttataatagacatgttggtgcaattacttgatattacaaaaggtgtcaaaggaaagtttatagaccactaagtcacaactaccacctggcagcagacaattttaagacttcatagattttaagatacacctgaatttaggaaagg

SEQ ID NO: 417779 - DNA, 545 bp, Homo sapiens
ctctctgtggtatcttttgtaaaagcactaatcctttcagtaaccctcatgacctaatgaccttccaaaggccacaccttcaaataccatcacactagggattaggtttgaacatatgaatatttaggggacataaacattcggtctattgtgttcagttattcaagatctgatatttcaggtattcttggctccaaacccattgcactgctcacttgcactctccccaaatgagtgggaattttgagatgggggtaagaggagatcattatgtaaatatgcttgtggtcattgctaggactaacatgtaagaattttattttttacttcctccctctgcactaccatatttyttgcaagctatttagtaatgtttggtttatcaatgcaattgtttttcttataatagacatgttggtgcaattacttgatattacaaaaggtgtcaaaggaaagtttatagaccactaagtcacaactaccacctggcagcagacaattttaagacttcatagattttaagatacacctgaatttaggaaagg

SEQ ID NO: 417780 - DNA, 455 bp, Homo sapiens
aaaaaaatctgtcttggaatcaatacaagtaattaagggctaataactattaagcacttatacctttgcttttatattcattttstctctcatctaattatagaagcttaggaactaatcctcccccaaaccacaaaaatggtcttagtatgcactttcttgaatgcctgacctgtcctctcacctacttctccccagacatttcttcctccatccttaaatcatttctcctaaaattcacattcacgcatatctctttggaccaactttttaagctagtctctaaaagttcaattccctgaactactgcttctgttctggtgtgtctttaaagttgctcatgcattctaaactttgctctgttcatggaatatagcctcaggggcaagttgtactatttcccagagtcaaactctgcccttcaacaaaagtcaacaggtacctacaaactcctc

SEQ ID NO: 417781 - DNA, 455 bp, Homo sapiens
aaaaaaatctgtcttggaatcaatacaagtaattaagggctaataactattaagcacttatacctttgcttttatattcattttgtctctcatctaattatagaagcttaggaactaatcctcccccaaaccacaaaaatggtcttagtatgcactttcttgaatgcctgacctgtcctctcacctacttctccccagacatttcttcctccatccttaaatcatttctcctaaaattcacattcacgcatatctctttggaccaactttttaagctagtctctaaaagttcaattccctgaactactgcttctgttctggtgygtctttaaagttgctcatgcattctaaactttgctctgttcatggaatatagcctcaggggcaagttgtactatttcccagagtcaaactctgcccttcaacaaaagtcaacaggtacctacaaactcctc

SEQ ID NO: 417782 - DNA, 511 bp, Homo sapiens
ggtccttatctctcaccacagactcttcttaaataggaaactcaactatctggaggactactcaagtcattactcaaaatttgttgtccatccctgggtaattccctgattagacaattggwtgagtgccagctgtttttgacatgagtttatttgataatttattctttcctcaaaatctttcagagtattatttgacatagcttggtaggttacatatgctagtggttctcaggtttagaggtggggactagtagcagatatatttttgaagtattttttagagttcttctctgatccaaaccgctgctgtgcacccaacaaataatgagatgggcatggtgaaaaggagtccaatatttattaatacactggcaaggtgctttacactacaacacttcacctcttatgatatttttatgaggtaattacctctatcctactgagagtactgagcttgagtgtattcatgaaccttgctccaattaatatagcaaataaaggagagagt

SEQ ID NO: 417783 - DNA, 511 bp, Homo sapiens
ggtccttatctctcaccacagactcttcttaaataggaaactcaactatctggaggactactcaagtcattactcaaaatttgttgtccatccctgggtaattccctgattagacaattggatgagtgccagctgtttttgacatgagtttatttgataatttattctttcctcaaaatctttcagagtattatttgacatagcttggtaggttacatatgctagtggttctcaggtttagaggtggggactagtagcagatatatttttgaagtattttttagagttcttctctgatccaaacygctgctgtgcacccaacaaataatgagatgggcatggtgaaaaggagtccaatatttattaatacactggcaaggtgctttacactacaacacttcacctcttatgatatttttatgaggtaattacctctatcctactgagagtactgagcttgagtgtattcatgaaccttgctccaattaatatagcaaataaaggagagagt

SEQ ID NO: 417784 - DNA, 460 bp, Homo sapiens
ccgttccctccttctggaacacgttctcagtagatatcctcatgatttattcccttaycacatttatgtctttggtcaactgtcagcttcattttgtctatcaataaatatttatggagcaccactatgaattgagcatggttctaggaacttcaaataaaacagaaaacaaaacaaaaatgttcctgtcttgataaagcttacctgctagcagcaaaggggaaacaatggctgattaaaaagtaagtcaattatattatattagaagatgagcatgctgtgagaaaagagagactgtgggaggtcaggaaaattcattatcaaatcacgcaataataatgggacttgtggagatgtcaacagagattggatagagggtttgagggaaattacactaggatttaggacttcaaaggttttgggcaaactgatggaattatgaaattttcaataatttatc

SEQ ID NO: 417785 - DNA, 608 bp, Homo sapiens
acgcattaggtaattttctaggacactgagtttatgaggtatttaagctttgtctatatcatttcaaagaatatatgggaatagatgtttttgattaaattaattagatatttgggcaaattatatgagggattgtctgaaaactcctatgggtatttttctttccagagattagctctgaacagcagtctatctgtgccccactaaaaacgcaaaatktttttcatattgcaagtttccaaagactgtttctggagatattttgttagaggaatatcctccctcattgtattgacataatattttgctcacatatttattgtagtctattggacataatttaagaccgttggagtcagaatgagatattttatattcatatcaccagcgactctggaagtgcatgtcacatagtaggaatgcaaaaaatggctgttaaaataaattggtatttttatgaactctatccaaatattttataagtttcatagtgatgtccattactggaaagacaaaatcaatgcagtgctcacacaagcaaatcagtattgagtggtgagagaagactggtttcctctcagctctttgagacccaaattgatcctctc

SEQ ID NO: 417786 - DNA, 541 bp, Homo sapiens
ttaagttctgggttacatgggcagggtgtgcaggtttgttgcatcagtaaatgtgtgccagggtttgctgcacagatcatctcatcacgtcggtattatgsctattaactattagttattcttgatgttctccctttgcttcctgacaggccccagtgtatgttcttcctcgccatgtatctctgtgttctcgtcatctgttcctgcattagtttgctgacaataatggcttccacctccatccatgtccccgcaaaggacatgatcacattcactttcatggctgtgtagtattccatggcatatgtgtaccacattttatttattcagcctatcattgatgatcatgtggattgattccatgtctttgctattgtgaatagtgccgcattgaacatacacagacatgtatctgcattatataataacttacattcctttgtgtatataccctgtaacaggatcgctgggccaaatggtatttctagatatttgaggaatcaccacactgtcttccgtgatagtcaaattaattcacact

SEQ ID NO: 417787 - DNA, 541 bp, Homo sapiens
ttaagttctgggttacatgggcagggtgtgcaggtttgttgcatcagtaaatgtgtgccagggtttgctgcacagatcatctcatcacgtcggtattatggctattaactattagttattcttgatgttctccctttgcttcctgacaggccccagtgtatgttcttcctcgccatgtatctctgtgttctcgtcatctgttcctgcattagtttgctgacaataatggcttccacctccatccatgtccccgcaaaggacatgatcacattcactttcatggctgtgtagtattccatggcatatgtgtaccacattttatttattcagcctatcaytgatgatcatgtggattgattccatgtctttgctattgtgaatagtgccgcattgaacatacacagacatgtatctgcattatataataacttacattcctttgtgtatataccctgtaacaggatcgctgggccaaatggtatttctagatatttgaggaatcaccacactgtcttccgtgatagtcaaattaattcacact

SEQ ID NO: 417788 - DNA, 541 bp, Homo sapiens
tctgctatacaacattatccctatagttaacaaaactatattgtatatataaaattttgttaagagggtagttcttaggtttagtgtgcttaccacaataaaataaaatttattaaaaaataacctaggctatagagttagaaggactgtgtttgaattctaattcagcctcttactagttagacgatattgaagttgcattttcctcatttttagaatggcagtattactagaaacattcagggctgtgagaaaatgaaatagtgtaaataaagcacttaatgttacatagtaagctcggtaaatgttagctatttggctatttgggttgtaattgttgattaaaaaacagttatttttcaaatttttttttgcttagtaataaacatatatattgtcaaatctaaaatcatgrtgactttaatctctgggaaattatggtatttaatatttattaagttccaagaatgctgctaaaagctccactgaatacaagacttccattcctgtatgaaagaaacgtgtagctgggactttagat

SEQ ID NO: 417789 - DNA, 435 bp, Homo sapiens
atttcaccttggataacaaaatggacaaggaagtagtaaagtagtccaaaattttcaaagggaattagattttaattatactaaagaatattaagtaacatgtagtaggaggatgtacactaaaaagcttttaactagaattatgggtgattttatttgcagtactaagcagaacatgcagatttatgttagaaagaggtatggtaaaaagcatttaactaaaattatgggtgagtttatttgatgttttgccataccatgccaattaaaagaagcaaacaaacaaacaagcatgcacatagcctatctttcttacctgagtttctgtgttacccatagcactcaggaaatccatcagaatttgactaattagactctgaaaataagtgcyatggctagatatatgcagctggtgtgacttacatattgttgact

SEQ ID NO: 417790 - DNA, 610 bp, Homo sapiens
aactctggtttcttttatcttattgctccagcactcggtagagtcctctatgggggcaagcagatccaccgccaccaagtccatgatccagacagccaggaaggagtaactgggatgaaggaagcagatgctcaatccttggtagagctagtcccaggtgtgacacaagagtcatatatgcatgtcccattggccaaagcttaatcatatggccatrcctagatgaaggaaagttaggaattgtaccctccaaccggatggccattggtatagccagaactctttaactatggagtaaagggacaatgaccatttggaaacaattatagctctagagtcagtctaactgtaggtagaagcataagactagcagtgataaatttatgtattaaaaataaaagagagtagcagtggctatagtagaaaaaacaccagccaagaaatcagaaccctaggtgtaggttgctttggtattaactagaaatgtggtcctgggccacttattttacttcttctaaaccttgacttcttcaactgtgaaactttgactgaaggatctataaaaagtcatctaaaaagagtagtctatggctctaacctttctaagtaa

SEQ ID NO: 417791 - DNA, 533 bp, Homo sapiens
atcccttcaagcatttctcctttgtgttacaaacaatctaattacacacttagttattttgaaatgtacaattaagttagtattgactattattgactattatagtctccctgctgtgctatcaaatagcaggtcttattcactctttctactttttgtacccattaaccattcccagccccccgccaacccctcactaccattcccagcctctggtaaaccattcttctattttctatatccrtaagttcgagtgttttgattttttagaccccacaaataagtgaaaacatgcagtgtttgtctttttgtgtctggcttacttcatttaacaaaaggatctccagttctatccatgttgttgcaaatgacaagatatcatccttttttatggctgaataccacatgagtaccctgtgtgtatatgtaccacattttctttttaaaaaaatttattttaagtcccaggatacatgtgcagaatgtgcaggtttgttgcatgggtatacatgtgccatgatgatttgctgcac

SEQ ID NO: 417792 - DNA, 533 bp, Homo sapiens
atcccttcaagcatttctcctttgtgttacaaacaatctaattacacacttagttattttgaaatgtacaattaagttagtattgactattattgactattatagtctccctgctgtgctatcaaatagcaggtcttattcactctttctactttttgtacccattaaccattcccagccccccgccaacccctcactaccattcccagcctctggtaaaccattcttctattttctatatccataagttcgagtgttttgattttttagaccccacaaataagtgaaaacatgcagtgtttgtctttttgtgtctggcttacttcatttaacaaaaggatctccagttctmtccatgttgttgcaaatgacaagatatcatccttttttatggctgaataccacatgagtaccctgtgtgtatatgtaccacattttctttttaaaaaaatttattttaagtcccaggatacatgtgcagaatgtgcaggtttgttgcatgggtatacatgtgccatgatgatttgctgcac

SEQ ID NO: 417793 - DNA, 634 bp, Homo sapiens
atatatgaatatttatatataataaatgttatttataatagatgttatttataatatataaatatttttatataacaaataaaaacataatatatattatatataacatgtataatatagttccaccactttggacttttcctaaaacctcaagagaaaacttcattatttgttagatcatggtttttctgaatcacatacattctaaacctgcaattgaaatcattactggatattttctaatttagttcattgttttgaatctaactatcaagtaagaaaattaattttcaagtatcttcacaattttgtctgttataaaggtgtaagtcatttatcacaatttctcagttgtctgtgctggtctgaaaaaaaaggctagattattgatccaatcataatttaaaccaayatttccaaagcctttctaagttgttgttttggtcaagttgttattatataaaatagctggtttagttttgttattggaaaggggtcccaatccaggccccaagagagggttcttggatctcatgcaagaaagaattcagggcaagtccttaaagtgaaagtgagtttactaggaaagtaaaggaataaaagaatggctctccgtagaacagccccaagagct

SEQ ID NO: 417794 - DNA, 593 bp, Homo sapiens
attaatattttttagtttccttatctaaaaattgggggaaataatagtgtccatcccttaaagggtattgtaatgattgaataagatcacacaataaatgttcacacaataagatcacagttaataaatgttagcaactattttgggcagtgggtatttttttaaattattatgatttggtcccttgccatttggatgccctcagatcattcaccmctcctctctcctaataattgtatacataagccagtggctatggactggttcagagactgcacagaacagccatgggcccagaaacacttcatggaatcctctccagtctaagatgctgtaaaaatttccagatccttgatctgtaagtccagaaggaacctaggtcttttgatttaatccatctttgctaaaatttctcaacagggccatctaagagccctctgagctgtatttgcagcctgtgttcacttagatgcccctcaaagagtggagagtcagcctgaaggcctccaggtaaacatagtgggcttccaatcttagcaaaaatctacacagaccagtaactcttaaagataccgaacctagattgcagaagc

SEQ ID NO: 417795 - DNA, 593 bp, Homo sapiens
attaatattttttagtttccttatctaaaaattgggggaaataatagtgtccatcccttaaagggtattgtaatgattgaataagatcacacaataaatgttcacacaataagatcacagttaataaatgttagcaactattttgggcagtgggtatttttttaaattattatgatttggtcccttgccatttggatgccctcagatcattcacccctcctctctcctaataattgtatacataagccagtggctatggactggttcagagactgcacagaacagccatgggcccagaaacacttcatggaatcctctccagtctaagatgctgtaaaaatttccagatccttgatctgtaagtccagaaggaacctaggtcttttgatttaatccatctttgctaaaatttctcaacagggccatctaagagccctctgagctgtayttgcagcctgtgttcacttagatgcccctcaaagagtggagagtcagcctgaaggcctccaggtaaacatagtgggcttccaatcttagcaaaaatctacacagaccagtaactcttaaagataccgaacctagattgcagaagc

SEQ ID NO: 417796 - DNA, 599 bp, Homo sapiens
gttcttggtcatgaactctttgcctaagccaacatctagaagggcttttccactgttatcttctagaatcttcatggtttcaggtcttagattaaagtctttgatccatcttgagttgatttttgtatgaagtgagagaygaggatccggttttattcttctacatgtggcttgccaaatatcccagcaccatttgttgaatagagtgtcctttccccactttatgtttttgtttgctttgtcaaagatcagttggctgtaagtatttggcttcatttctgggttctctattctgttccactggtctatgtccctattttcataccagtaccatgctgttttggtgactatgaccttatagtataagtttgaagtcaggtaatattatgcttccagatttgttctttttgctttgtcttgctttggctatgcaggctcttttttggttccatatgaattttaggactgttttctctagttttgtgaagaatcatggtggtattttgttgctctgattgctctgggtagcacttctagcaccatgttgaagagaaatggtgagagtgggcgtccttgtcttgttccagttcttaggggca

SEQ ID NO: 417797 - DNA, 599 bp, Homo sapiens
gttcttggtcatgaactctttgcctaagccaacatctagaagggcttttccactgttatcttctagaatcttcatggtttcaggtcttagattaaagtctttgatccatcttgagttgatttttgtatgaagtgagagatgaggatccggttttattcttctacatgtggcttrccaaatatcccagcaccatttgttgaatagagtgtcctttccccactttatgtttttgtttgctttgtcaaagatcagttggctgtaagtatttggcttcatttctgggttctctattctgttccactggtctatgtccctattttcataccagtaccatgctgttttggtgactatgaccttatagtataagtttgaagtcaggtaatattatgcttccagatttgttctttttgctttgtcttgctttggctatgcaggctcttttttggttccatatgaattttaggactgttttctctagttttgtgaagaatcatggtggtattttgttgctctgattgctctgggtagcacttctagcaccatgttgaagagaaatggtgagagtgggcgtccttgtcttgttccagttcttaggggca

SEQ ID NO: 417798 - DNA, 571 bp, Homo sapiens
aaggagactttaataaatttattcttatctgttcaaactcattttacagatgagaatattaagcaccgagaaaagttaaagagcttacacttatacaagagcagscaatttctgatatatgtaagactagaatccaggtttactggtcccctgccttgtgcttcatccatcataatctcacatgtaacataatgataccataaagaacatttaaaggattctgatgcacttcaataggaagaactctgagtttaaagacagggctcatcaagtcttaaaaataacacagcaaggaccttaggaggaaagggacattcttattcaaatgaaaacaatactgttgaaatattattacttgcttttttcagtcactatattttcacctattaaaaaatgccagatgaagatattaagaacataaaatagtttattccaacgtaagttcacatcttaaactgaagagcacccccgccgaactctgcacatttcaacaacaatattttctctccagattcaattgtatttatgctaaagaaattacacctgagacttttgatgcaaacttgtttgg

SEQ ID NO: 417799 - DNA, 453 bp, Homo sapiens
tctgttgttagaacaaagcaaaccccttactcctgagaggctttgtttgaaaaattagtttgaaagaaagcagaatgggagtttgtggcaagccaggtstcactaacagctaatcaggcaggcctccacgacagctgtttcggcactgactgagtggttgagttagacattcaaagctgaaagagccagtgccagtatacacaggttgcaaagtaacaaaatcccaacaagagtcttgcttaggcctttcctgggccttgaagcatgacaagttaatgaaggaattcttaacaggacccgttcaggattaaacaagttttgctgggggtcggaagaaactccccagacctccacaaacaagttttgttgggagcctaaaggaactccttaaacctccatgatttagcaggggacaagataagggtaatcaccccagcacctgggcccgtctag

SEQ ID NO: 417800 - DNA, 453 bp, Homo sapiens
tctgttgttagaacaaagcaaaccccttactcctgagaggctttgtttgaaaaattagtttgaaagaaagcagaatgggagtttgtggcaagccaggtgtcactaacagctaatcaggcaggcctccacgacagctgtttcggcactgactgagtggttgagttagacattcaaagctgaaagagccagtgccrgtatacacaggttgcaaagtaacaaaatcccaacaagagtcttgcttaggcctttcctgggccttgaagcatgacaagttaatgaaggaattcttaacaggacccgttcaggattaaacaagttttgctgggggtcggaagaaactccccagacctccacaaacaagttttgttgggagcctaaaggaactccttaaacctccatgatttagcaggggacaagataagggtaatcaccccagcacctgggcccgtctag

SEQ ID NO: 417801 - DNA, 563 bp, Homo sapiens
agggctcaaaaaaggagtggcttaaagcactcctggaagaggaactcgcatatttaaagacctagagactgaatatatatacatatatgtgtatatatatatatgtgtgtgtgtgtgtgtgcatgtgtatatatatatcacaatccttgtccattagcattaagtctagatgcccagaatgttccaaatggtttgctctcataatgaaagatgccaaaaggaatagatcttaaagttgaagatttttgtcagaagagatatacactccaaaatgtttatcttccctatcactatgccttaacactgctgcaaaaggtgaaaggccagtttaattgtaccttttcagtcccagtctctaaaccttgagggagaagagagctagtaatagaagtgtggttgacatacagcttgtctgtgtgctaataggctgaggccacaygccatttcacatacgcactcagtggcccttagatatcagaacccagtcattctcagactgagctaaattaaaatagtgcccaagggacaattctatacaaggtcgataactcacactggacttc

SEQ ID NO: 417802 - DNA, 449 bp, Homo sapiens
tgagaagtctatagtcattcttaattttgttcctctgtatgtatctttctctgattgctttgaggttttctttttatcattgatttttaaaagctttattaytatgagcctctgtggattttgtgtgtgtgttaatgttgctaaagttttgttgagcttcttgaatttgtggctttgcagtgtttaacacagtattgctgaaaagtttaaaaattttttgaaaattcttgaaaaatttgaaaattttctgctctaatttcttcaaatttctttttccattttccccttttgtgactttaattgcacattagattgttcggctgcttgatactgtcccacaggtcactgaagctttggtcttttttcagtcttttctatgtgtttcactttgttagttcctattcctgtgttttcaagttcatgcattttttcttctgcagtgtttaacc

SEQ ID NO: 417803 - DNA, 449 bp, Homo sapiens
tgagaagtctatagtcattcttaattttgttcctctgtatgtatctttctctgattgctttgaggttttctttttatcattgatttttaaaagctttattactatgagcctctgtggattttgtgtgtgtgttaatgttgctaaagttttgttgagcttcttgaatttgtggctttgcagtgtttaacacagtattgctgaaaagtttaaaaattttttgaaaattcttgaaaaatttgaaaattttctgctctaatttcttcaaatttctttttccattttccccttttgtgactttaaytgcacattagattgttcggctgcttgatactgtcccacaggtcactgaagctttggtcttttttcagtcttttctatgtgtttcactttgttagttcctattcctgtgttttcaagttcatgcattttttcttctgcagtgtttaacc

SEQ ID NO: 417804 - DNA, 449 bp, Homo sapiens
tgagaagtctatagtcattcttaattttgttcctctgtatgtatctttctctgattgctttgaggttttctttttatcattgatttttaaaagctttattactatgagcctctgtggattttgtgtgtgtgttaatgttgctaaagttttgttgagcttcttgaatttgtggctttgcagtgtttaacacagtattgctgaaaagtttaaaaattttttgaaaattcttgaaaaatttgaaaattttctgctctaatttcttcaaatttctttttccattttccccttttgtgactttaattgcacattagattgttcrgctgcttgatactgtcccacaggtcactgaagctttggtcttttttcagtcttttctatgtgtttcactttgttagttcctattcctgtgttttcaagttcatgcattttttcttctgcagtgtttaacc

SEQ ID NO: 417805 - DNA, 533 bp, Homo sapiens
atgttacaagcccaactatatactgttgtaatttttaccttgtataatttcatgtcttttaatgaagctaagagaaagaggacaagtacatatttacacagtttgtaatactcactttattatttgccatttctggttctcttcatttcttcttgcatatttttgtttttatctsatgtcattttcttattctaaaatagcttagtttctactcacaagttccatgttattatttgcaaatgtattacatgtctacacactataggtgtaaaaatacaattatatacatattatttatgcaactgcttcttaaatcagttgagaaaagaaaggttaaaattaagaaatgcaatattcatttataccatcttttacaattaccatgtcattacctttagcagccctctttgcttctttctgtgcatttgaatgtaaatgtggtgtcacctgctttcagcctgaagaagttacttcagtgttttttctcacatgggtctgacagcaacaaattcaggttttgttcattttggatg

SEQ ID NO: 417806 - DNA, 643 bp, Homo sapiens
cactctcctttccctaggccccttatttggagttaggtcaggtgccatgtgactaaatctgcccaaaggaatgtgaacatatgtaatgtcagccacaccaggtctaggccttgtaacaatctcacacaattgttcatactgtttcatgaaggtctgtgccaaaaatggcagtatctcaaggtacatgatgccagaatccccaaaggattgcttggagagagctccaacatccgttagactaaaacatgaaccagaaagaggttctattatattaaaccactaagatttttaggatttttcttaaaacaactagtgttacttatgctgattaaaatagtactcaataaatgcttgttggataaggaaattgggtcaaaacaggatatcatttcacttaataagacatccacagtaacttctgccaaaacaaagcaaaaaaaattaaattaaattaagaattttacactcttccactccacaaggggatccataccatctgtatctgaaattattcactgctaattactcagtttttarcacatacctggcactgagtatgtgtttaataaacatttattgcaacttctaaatgtttggagttccacagagtcgtccttaagcctgattgtatatagaattacat

SEQ ID NO: 417807 - DNA, 610 bp, Homo sapiens
tggcattcacgcactcattatttagtacatgatactttttatgaagatatgtaaactctctgggcacagatccattttaaaaacctagttcctctgaaacaaagaaatkcttgaggaaagaaagctgcaaaaataaaatagctgactgcagagacagccacctgtggagtagtgtacattctggagaattttcaatgtagaagacaacaggacatcaaatcacatgtattctaaggagctgcagagtttaaactatgaaatgaggaggcatcaaataaaacagaaagcaaacaaatttaatatgggaaggtcactggagatgccaataagaaaaataaaggttgtccaggaaagattgcgagtgtgcattttgaacctgcaacaggcgatgcagacattgtacctcaacccttgcagaggagcactaagctagtgtcctgtgacttactgagcatattgatggtcttgctttactgcttacttttaggtcatcttctattcattagaaaacactaggcactgcatgaagcactcctatcatcttgttcaattcttataatcttgtagtaattccccttacgatgtgatagttgagataagatacataaga

SEQ ID NO: 417808 - DNA, 602 bp, Homo sapiens
aagctagtgtcctgtgacttactgagcatattgatggtcttgctttactgcttacttttaggtcatcttctattcattagaaaacactaggcactgcatgaagcactcctatyatcttgttcaattcttataatcttgtagtaattccccttacgatgtgatagttgagataagatacataagatatgcttttttgcccaagtcacctacctaggaaatggaagagacaacgtttgaactcaagtctgattgagagcaaggatgacatctgtataatgccagcttcctggcatagattactgctattcatcaagagagtaaacccagagaaaaatttgttttaccctacataccttttaaaattgtatttatttgtaattatttacaaaattatctaacagcactttctcttgcactttaggttggctgcaacacagcaatcatgattgttgatttttctgtcattattgatcctactaattctaacacatgcttatgggattttagatgaataagtaaacgaagttatttttgagaactagagaagtatgaaatctggggacccatcctttgtaatctttaaaaatgccacaaaaggccag

SEQ ID NO: 417809 - DNA, 622 bp, Homo sapiens
tttgtactgattgatcagagggactagtggttcaactaatcatttgtgagacaaataatgggaatttagaggagctatatttggctttgtcaatagataaataagggagatatctgtgaatctgttgttttatttttattttaaacaatttattgtggacaatttaaaaatataccacacacaaagatagtgatatattcatcactcagcttcaattatcaacttttgctaattttgttttatatacagtagtccccgccttatcycccttttatccactgttttgctctctttggtttcagttacctgctgtcaacccctgtccaaaaatattaaatggaaagttccagaacaatttataaactttaagttgtatgccattctgaatagtgtgatgaagtctcttcctgtcctgctgacacgaatcgtccttttgtccagtgtaggtgtgctttgtacgctccctgtctgtgatttacttcacagccatctggattaccagatcaaaaaaaagcagtacagttgaccctcgaacaccatgggtttaaactgtgtggatccacttatatgcgaattcaaaatacagtattctctggatgagtgaaacacacatatgtggagc

SEQ ID NO: 417810 - DNA, 622 bp, Homo sapiens
tttgtactgattgatcagagggactagtggttcaactaatcatttgtgagacaaataatgggaatttagaggagctatatttggctttgtcaatagataaataagggagatatctgtgaatctgttgttttatttttattttaaacaatttattgtggacaatttaaaaatataccacacacaaagatagtgatatattcatcactcagcttcaattatcaacttttgctaattttgttttatatacagtagtccccgccttatcccccttttatccactgttttgctctctttggtttcagttacctgctgtcaacccctgtccaaaaatattaaatggaaagttccagaacaatttataaactttaagttgtatgccattctgaatagtgtgatgaagtctcttcctgtcctgctgacacgaatygtccttttgtccagtgtaggtgtgctttgtacgctccctgtctgtgatttacttcacagccatctggattaccagatcaaaaaaaagcagtacagttgaccctcgaacaccatgggtttaaactgtgtggatccacttatatgcgaattcaaaatacagtattctctggatgagtgaaacacacatatgtggagc

SEQ ID NO: 417811 - DNA, 450 bp, Homo sapiens
acagaaagacgtcttgttagtggattctgcccatgttcacccctccttcatcattcacgtcacatttactttttctaacacacattttgcctgtgttttcttacttaggtcactatgctcatttttaatttgaaaaatgtytatgagtggtgaggataagccatgagacagttacgtgcatggaacatgggccttccaaggtacataaactctttaaggataccaatagaaaacagggtcccagtaggaaacaaaggccacactcagattagaataattcaaggagaatttaataaagagattgtttacaaatcatgtgtttccttagtacatcagatttttttttttttttttttttttttttggtaaatagctgttactgcccttagacttgaagggacaaggagaaggagaagatgcaggaagaaaaggaagttctctgtaacagta

SEQ ID NO: 417812 - DNA, 550 bp, Homo sapiens
ttcaggcccaaacggaactgtatttgagactcagatcctccatttataagctgtcatatcttgttatgtgaaatgagtataaagtattatttgtcaaatagagtacttgtgtgccaaatagaataatgcatattgatatggtttccttctgtgtccccacccaaatcttatcttaaattgtcataatccccatgtgttgggggagggacccagtaggaggtaattgaatcatggggacaggtctttcccatgctgtttttgtgatagtgaataagtttcacgagtctgatggctttataaaaggaagttcccctacayacgttctctcttgcctgccaccatgagccctttgcacttcctttgtcttccaccaggattgtgaggcctccccagccatgtggaaccgtgagtccattaaatctctttcctttataaattacccagtctctggtaagtctttattagcagtgtgagcacatgctactacatatatgaagggcttagtgcagtttctggcatgtgtttatactcaatgtataataggagatgg

SEQ ID NO: 417813 - DNA, 550 bp, Homo sapiens
ttcaggcccaaacggaactgtatttgagactcagatcctccatttataagctgtcatatcttgttatgtgaaatgagtataaagtattatttgtcaaatagagtacttgtgtgccaaatagaataatgcatattgatatggtttccttctgtgtccccacccaaatcttatcttaaattgtcataatccccatgtgttgggggagggacccagtaggaggtaattgaatcatggggacaggtctttcccatgctgtttttgtgatagtgaataagtttcacgagtctgatggctttataaaaggaagttcccctacatacgttctctcttgcctgccaccatgagccctttgcacttcctttgtcttccaccaggattgtgaggcctccccagccatgtggaaccgtgagtccattaaatctctttcctttataaattacccagtctctggtaagtctttattagcagtgtgagcacatgctactacayatatgaagggcttagtgcagtttctggcatgtgtttatactcaatgtataataggagatgg

SEQ ID NO: 417814 - DNA, 595 bp, Homo sapiens
agttttcaaagaattagctttggaaatcaatctacattcaaagattggaaggtgcttcaagatcttccagtggcctcagggtttttttaaagtatgaacaggaattatttcttccaatgatggaayacaatctgttggtctttgttgttctggttaataacatgatggatatcaatgttgcctctattaatttaactttctcaatttcatcttctttgttatcgggtgatattcttttttaatattattttattttctatttatataagcaacacacgctcattgaagatactgtagaagacagattaaatgttccaaaggaacaaaggaaaatcaggtcattttctattagtacaactatggcaaaaagcacagtgtgaatattatgagattttagagcatcacagtttttctctgtgcataatgtgggtgttaatcaactttgataacactttttaacatttctgttagatattttatagacataatttttctattattttaaagaatcaaaatggaaaaaatatttatgtagtagcttgttgagcaaaccataatctatagaaatcaagcagaaaataagcttattcattct

SEQ ID NO: 417815 - DNA, 636 bp, Homo sapiens
atcccaaacaaactctgtattcctcattctccactccccacagctcctggtaagctctattctactttgtctctgaatttgctggttctaggtgcctcagatgagtggagtcaaacaacgtatgtcctcttttttgtgtctgcaaatacttcttttttataccttttagttagtggctgataagctaaaagtttacaaaactagttctacgaactttttatcgtatgctgctatggtggcctggcagtttttgtggtgttctcagcttcaagaccagagccaaaacagagagggaaggccatcttgacagcctgcccacattgatatcagctcataataatctaaacactgtatatttcattgagacaaatcaaacatacggttttgcccattagcaatacatcctkccatatcatacttggatagaccctgatgcataaagtagtatgattataatgttgctggaaggctcaggagggcctctggatgctggtggaactccagccccagccagtttttcagattcttgacaccatcttgagaaagaattcagggacaagtcagaagaagctttcattgcaaagcaaaagtacacacttaacagagaagtgcaggggtagtactgaggggtcactc

SEQ ID NO: 417816 - DNA, 592 bp, Homo sapiens
ttacttgcatgcaaataaggattaagttggatcacattggtcacactttcaagctggcctggctcttccaattttttcatttcattgatattattattgcaaacttgatttttaagtacgtttcamatatttatacatgccaatgcaagtcaagtaacaattattacgtgtgattatgtaaatggggacaaaggcagatttgaattgaaagtagaagaaataaaagccattactcctgctggtgaggattagatgtgttcatgcttttaaattttcctaatgctacattttattttcaaaaaatatttcttaacagttgaagtgcattaatgagcaacagacatccacaaccaattaattttgacatgaccaatttgagatttgtaggttggaactagactggagtttactcttgtattttcagttttagcgatcaaagagtaaaataagcataaccagttgattgaacagtgtgaatagggcaggacaccagcatgaaatggtccacggtttcgttttgtttttttttccaataactgccttcgactgtgtcctgtcacatcttccctgtactttaaggacatctctggca

SEQ ID NO: 417817 - DNA, 569 bp, Homo sapiens
tgctttattttttctacatgtaaaatttcacttgaaaatatgagatgagcagtttagaagtaaagtgcatggaatttggaggcaagaagatttgagcttgtgtaggtgcaatatcaacacttgactctgtcatctggaacaatcacataaactctgtatcccttggattatttacatgttcggtgggaattaaaatactacttaaaaacagaattattatgggagataattgtgatcatacctataagacattaaaacatactccatgacatatagtaagcacccaatgaatataacttgctccattaaaccaccaaaatctttactatttttcagatatacatggtttataaggcaatagaatgtgacatgtacacaatccattcaagctttgtgcactctagtattcccagtgtttagtacaccataaatcctctacaacaatttgtatttaataccagcaaagttacactastcgtcaggtaaaagcaaaccaagattaccagataccacttcacatctactaggatgctaagacggccttaatcaaaaagacaaataatgtggag

SEQ ID NO: 417818 - DNA, 530 bp, Homo sapiens
tgttttatagcaggagatatgacataatcaagaccacaaacaggctacctgcaggacaaattgggaccccaaggaaatggtttgctttgtctgcatagtggtttttgaatattcttttgtcaatatctcaagtggggcaagtgctctgtaattcaccaggatcccactgcctccctaagtgacgtgcccattctcaatctacttatttacyttcttggtctctataaacatttgagtttgtgactgatagtctaaaaatttaaataaaagaaggtcacccactgaagttcaggtttctcgtaggcattgtaaaactccaaagaagctggcacatgccaaactttccttcttgagccccacccagctataatctgagaaccatcgggtggctaaaccatggttctcacacttgattgtgcatcagcatcacctggagggcttgttaacacacagatttctaggtcctacctccatggtttctgattcattgggtcctgggtgggacctgagatttgcatttctaatgaatt

SEQ ID NO: 417819 - DNA, 530 bp, Homo sapiens
tgttttatagcaggagatatgacataatcaagaccacaaacaggctacctgcaggacaaattgggaccccaaggaaatggtttgctttgtctgcatagtggtttttgaatattcttttgtcaatatctcaagtggggcaagtgctctgtaattcaccaggatcccactgcctccctaagtgacgtgcccattctcaatctacttatttactttcttggtctctataaacatttragtttgtgactgatagtctaaaaatttaaataaaagaaggtcacccactgaagttcaggtttctcgtaggcattgtaaaactccaaagaagctggcacatgccaaactttccttcttgagccccacccagctataatctgagaaccatcgggtggctaaaccatggttctcacacttgattgtgcatcagcatcacctggagggcttgttaacacacagatttctaggtcctacctccatggtttctgattcattgggtcctgggtgggacctgagatttgcatttctaatgaatt

SEQ ID NO: 417820 - DNA, 530 bp, Homo sapiens
tgttttatagcaggagatatgacataatcaagaccacaaacaggctacctgcaggacaaattgggaccccaaggaaatggtttgctttgtctgcatagtggtttttgaatattcttttgtcaatatctcaagtggggcaagtgctctgtaattcaccaggatcccactgcctccctaagtgacgtgcccattctcaatctacttatttactttcttggtctctataaacatttgagtttgtgactgatagtctaaaaatttaaataaaagaaggtcacccactgaagttcaggtttctcgtaggcattgtaaaactccaaagaagctggmacatgccaaactttccttcttgagccccacccagctataatctgagaaccatcgggtggctaaaccatggttctcacacttgattgtgcatcagcatcacctggagggcttgttaacacacagatttctaggtcctacctccatggtttctgattcattgggtcctgggtgggacctgagatttgcatttctaatgaatt

SEQ ID NO: 417821 - DNA, 569 bp, Homo sapiens
aacagggtgctagagaataatagaaaggtaattcataaattcattcagttgtaaatgactggcattgggactaacaatagttcccactgatgttgggttttaattggccaaaagccttaatgtgaagaaatggcattttcatagttcaatggttcctaaagttgttcaagtattgaaccacctggaagttgtagtgttcccttcagaacataatgaaatagcattacgtgtaatgatattatgaaggtagttagcacaaacttaaataagttggttaagtttatggtacttagggatactcaatttaatgaaatattcatgcagcaaaacaaagtctgaaaaaatcacgatggtaagcaaacacttccctaaaaactaaaccactgtacattagatccactgatttgcaattcttctgtcagtactgatgcactgcaatcaaatcataagckgatgtaaaagatttaagaaaactttatgggaggggggaaaatccttaaaattgagaaaattttattcattgtcttgtctgttcctgctgtgcttccccacaaccaattgagaatatt

SEQ ID NO: 417822 - DNA, 597 bp, Homo sapiens
tagtttgttttccttcttttacagagactgaaatgtttttatgtagagctgccatttttttttttaaataggtacccttgtttaacttggtaatgctgcctaaatatagtggcatattttagtcgtacttacaggaccaagaactattgaattatcatcattataaatatatatgtgaaatttgcatttgttcttttttgtgggcatacattatctgccaataaagctttacaaagaccttctcaacttttgtggagtgccaggtattaagaattttaatgaaaaagaaaatcaattattgtggggtagcacagaaagcttttagtttgcaaatgataatctccctcttaacatcttaacagtaacagatatgagctgataatgaaattctcaggactgcttggaaacagaagcacgtcttcctgctccttctgacaattttcctcatgtatctgccctggaatctgatggcttytgcagtctctggttcattggtgattagctccagataacagaaagccctgcacataaaatttctgaagcagctcatttttatgtcactcttcagtaaaccaactcttctatatccacatttaa

SEQ ID NO: 417823 - DNA, 387 bp, Homo sapiens
atggcatgaagattattttataattaggtaaagacagtattttgacagaaagggatacccagtcaagaaaaatttgaaattgagcaacttggccttaagacccttggtgcagataaggtatcccttatccaaaatgtttgggaccagagaagtttcagattttgaacttatttttggatttggaaatatttgcatatacataatgccatatattgggaagagacccaagtgtaaacaggaaacttatttatgttttatacacactttatacacatagaattagcctgaaggcaattttatataacattttaaataaytttgtacatgaaacaaagtttggattgcgtttggactgcaatctgtgacatgaggtcaggtgtggaattt

SEQ ID NO: 417824 - DNA, 408 bp, Homo sapiens
gcttccagaagccacccaacccaatagctcttgggcttcttcctccatattcagagccagtagtggcagttcagagtacctcttgggcttcaaattcctccagcctcttcttacatatttcctctctttgactaactcttcagcctcactcttctactctaaggawgcttgtgataattttgggcctgcctgtgtaatccaggatcatatttatattttaaggtcagctgattgattaataaccttaattctatctgtaagcttaattcctttttccatagaaagtaacatatttccagttttggggattaggacatggacatcttaaggggggcattatttttcttaccacatctcccaatgactttattttatcaaacaaatttaaaaaaacctgtttgaagattc

SEQ ID NO: 417825 - DNA, 540 bp, Homo sapiens
tagcatgatactagcagagatgaygagatgtcactggggtctgaatacgcccataaggtagggccaacaggatttcctgacatattggatttgggttttgacagaaggactgaagccaaagatgtctgtgaggtttttggtgtaagaaactggaaggttggaggtaaaatcggtggagatgggaaaggctgtgggtgaaacaggattggtgggatgaagaggaagaactcagttttggatatatttagatttgagacatgtttagatttaaggccatggattatagaagtgaaggtttctgagagatttaagtctgttgaagtctgaaagaacaggaactcttccctcctgttaggaggtcatgtaaggaacagaacctgagagatacttcactcttgaccttgactgtcttgcttccctctggtacatgaggatactgaggtcagttccttgcaagatcacaagcctgccgagacatcagagttgtcttagtcggcttgggctgccatgaaaaatactacagactaggttgcttaaaca

SEQ ID NO: 417826 - DNA, 621 bp, Homo sapiens
atttattgagcactaactatgtgccaatgccctaagctaggaaccaggatatttcagtgaacaaaattgatatttcctgatgttatggggcttacattctgcacaacatcatgagggacgggctttaatcttggcaaaacagatgaagacactgagagtagagtcatctggggctttgcccagggtcatgtagcttgttaccctgctgcactaagtgtgtaccttctagtcacacacccagcctcgggtagctagagtgaggctgcctagggcacacaggaccctttccagttcccagaaagatcttcctctatcccatcaagtgaacataaacaggcccaagaacacagctgtgatacctccctgaggactaaggttatttttkgttccaaactttctgctcacttgttttcacatcactccaggctaaactgttcgagaaatcagggatgggtgagttgtttttgtgtcccaaggatctcatgagaatgaggagaagtccacaaaaagccgagaacctagatcacagaatgttactttatactttcttttctttcaaaacccttgagaaattgagaagcacacaaaatgggttaggctgtcaattgcttttcatttttt

SEQ ID NO: 417827 - DNA, 592 bp, Homo sapiens
acccagcccggggacaaacttagaaggtatgcattcatgagttgctttagccacactttactcaggataacatgagtaatcatgtatggtatggcaactcaagtcagttgctgatcatgaacatctacagcttttggttccgtttcttatttgtgttaatcctgtgcccagtctggcctgaggagcgtgatgggatcatagaggaacccatgtgtggtakattaaagttcacaaagccaggttaggattcaaattcttttgcttgcaagttgtataaccttgggcaagtcacttgatctttctgaattcattttcctcatctaatttacaacttatccagattttttgtaaacaacaacaaactctaaaattgcttacacatggaagccattaccaaatgtgctctcccttcccattggaaagctatagactgttgatgaagacctaataaatcattcattcgtcatgtaataggtgattaattcatgactcaaagaagttgtatacttgcccagtggcatgtgaggagacatacccaacttctctctgaagttggagagagctagatgacagtcctctttctgctacttgc

SEQ ID NO: 417828 - DNA, 539 bp, Homo sapiens
cgttagatgaggaaatagggatgaggtcatgaacacaggatgagcagggctcagaaaagcaacatgctctgctctgctgtgttataagatggctcagtcgccctgtgctttgctgggctttcatctgtgcatcccaagtaatgctgagttccagaactctgctgcatattgtaggctcagctgaaaacaagacagacccgtttttgccttagtccttggagctgatgatccagctgggaaaagttgaataagcaatgatggaaaaagagaagactggcttagctgagagaattttgtatatgacagaaagggggtagcttaagggcacrttgggctacttgaatggaaaatgcggtagcttggtggccctcctggctggacccatgtccttttgggagccctgtactagaaactagtattggcaacacaagtgtgtccaataaactttcttacacagcttgagctcatgctccatttatttattatgagacctttgcttagaggatggagttcagtttactctgtgacagaggccaggc

SEQ ID NO: 417829 - DNA, 509 bp, Homo sapiens
atcagctcctgttggggccttgacagtatcattccaggaaacataaaatttaccagactcactattatatctcaacttagcctgaaaacaggtgtttgacctcccccgtcttcctggtaaaatttgataacaatcatcctagcacaacacacctgttcatcaacytaagcttggtaaacatggcctttcatacttgatttttcttatagcatggatctatggtacaacacttacatgctccatacttcattttttatttttattttaagttcaggggttcacgtgcaggcttgtgacataggtaaacttgtgtcatgtgggtgtgttgtacagattatttcatcacccaggtattaagcctagtacccattagttatttttcctgatcctctccctcctcccaccctccatcctatgaaaggccccagtgtgtgttgtttccctctatgtgtccgtatgtttccatcatttagctcccacttataagtgagaacatgcggtatttggtt

SEQ ID NO: 417830 - DNA, 509 bp, Homo sapiens
atcagctcctgttggggccttgacagtatcattccaggaaacataaaatttaccagactcactattatatctcaacttagcctgaaaacaggtgtttgacctcccccgtcttcctggtaaaatttgataacaatcatcctagcacaacacacctgttcatcaacctaagcttggtaaacatggcctttcatacttgatttttcttatagcatggatctatggtacaacacttacatgctccatacttcattttttatttttattttaagttcaggggttcacgtgcaggcttgtgacataggtaaacttgtgtcatgtgggtktgttgtacagattatttcatcacccaggtattaagcctagtacccattagttatttttcctgatcctctccctcctcccaccctccatcctatgaaaggccccagtgtgtgttgtttccctctatgtgtccgtatgtttccatcatttagctcccacttataagtgagaacatgcggtatttggtt

SEQ ID NO: 417831 - DNA, 511 bp, Homo sapiens
tgtccccttggctgtatttgaccgttcttattaccatcgcaccgcccaaagcacatgcacacaatyacacaaggctagctgatcaaatttgccctgccaatcacattcagcagaattttgaagcttgtgacctgggtgcaatatgttttgcctgatcactggttaaaaagaaaatttgagttagatgcctgctttaaaaaatcatgagattttaacataagaagaatctgcatttccttcttcttttaaaaaccaaacgatgtcttcaccctgcacccaaattcctgcacaacaacaacggactagagcccagcagcaacatcacctggagaccctgtaaccaggcagggtatgctccccatttgccacctgctgagcccttcttccctgccctaactgtgaccatagttagttacatctgcaatcctgacatctgaaacttcccctgagagaaatcctagtagagattatttttccatgcctttacttttacaatgatatcttatctttt

SEQ ID NO: 417832 - DNA, 576 bp, Homo sapiens
tgttacttaagctctctggccctcaatttccagctgctcccccgttaaaaagaaaataatgcaaggcttttgtgaggatcagatatgatgatggatttaaaaagggtcaaacacaacacctggcaacaggaaatattcagtaaaggtaacagtctcatactcaataaatctgtaattatgataataagtcctgcctcattttttaccactcttcataatgatttcyaatgtaacggttattttcagagtttgatgagccatccattttaagcagctgatatattgtcctacttttctcaaacagatgtctcacattgctggtccacaggcaaattgcaaatggttttaaaacattagaaccaacattaaaaaaaaagagatttcccataaattccaaatttcagtaaaaattcagatttctggcttctctaaatgtttgaaatatctttgaacagaagattcacaactccacatgttacaataactggaaactgagaaccagttgtcagtttgagcagggcagtgtttgtcaactcaccacaggccccaactgttccacttgccttccctacactg

SEQ ID NO: 417833 - DNA, 649 bp, Homo sapiens
tatgatgatggatttaaaaagggtcaaacacaacacctggcaacaggaaatattcagtaaaggtaacagtctcatactcaataaatctgtaattatgataataagtcctgcctcattttttaccactcttcataatgatttccaatgtaacggttattttcagagtttgatgagccatccattttaagcagctgatatattgtcctacttttctcaaacagatgtctcacattgctggtccacaggcaaattgcaaatggttttaaaacattagaaccaacattaaaaaaaaagagatttcccataaattccaaatttcagtaaaaattcagatttctggcttctctaaatgtttgaaatatctttgaacagaagattcacaactccacatgttacaataactggaaactgagaaccagttgtcagtttgagcagggcagtgtttgtcarctcaccacaggccccaactgttccacttgccttccctacactgaattcagagtcatccagcacagtaactcttaatttttccacctgtttgccattctgtttgtgactctgctttaggctactcattctccctaagtgagatgcaataatgtacatgaagcatttagaatatagagagctgtctgatatagagagcaga

SEQ ID NO: 417834 - DNA, 589 bp, Homo sapiens
gataactagacacatctttctaaaggggaaagaaagactaagagtaaacaatcacttggatagaatgaggcccgcgacctttgattacttaaagttagataaccacctagagatatgataagagaataggtttgcctgctgcctccacaaagagaaccagaaacttgtttgggaaagtccagattgagataaaataatagtatagttcctagttgccactaaayatagttagcaaattttaaaactaacatgacaaaacaaataagggcctaccagaggccctcataattgaagactttagagttttagaaggaagcaaaattggggaagacagcagagaacatgacttgctgatcagatctattttagtgatggtcaatatctcattacagttgaaactgtggattctatatttatagcttccatttaatacattcttaataaattgcaagcaccaggcaaagttttctattaattcttataacaattatatgagagatgtattactagcttcattatatagaagtggatattgagactcagaaaggttctatgttttactcaatacagtgggtagatatcagaaata

SEQ ID NO: 417835 - DNA, 485 bp, Homo sapiens
aacaagaaacatatggtatatctaaattaggttaatttgaggaggcttatttgcaaaggagatcattacaaaggtgtgaatagggtgtagaggaagcatgaggagttgtaccagaactcagggtaagtagcagcagagctgtcattacctttaggttctaaacgacaaggtagagagaygtgaatggaacccaaaaaagagaaagaacaggagctattttgagagaagcagtgaagtagctatgaataccatcatgggtatgtgacatggggctggtgactaccattgtgaatacatgatatatgtctgtggacaccatcgtgagtacatggcagatggctgtggatgccatattgatctcagagtgagagaaacagactctgacttagctctcctttctgcttccaatttcctacagatgccggaactcagctaggggatagaagacaagagaaacctcagtgtggtccatacaggtggatatt

SEQ ID NO: 417836 - DNA, 434 bp, Homo sapiens
gaacagtctcagctcactttctgagggaccaccagtgatgtgtgtggtaagttcttcatatccggtagataatttcattgtcaaaaactctttggaataggtataaagcccccactttaccgatgaaaacactgatgtttagggttaagtagcttgtccaaggtcacygagtggtgcatggtcaatgtataaacctaggggtgtctgatgtcaaagcgtaacttttccactgcaccctgttgcctcccagaacaagaggacaatgctgaccatcagcagtgctagtctatgatgaaaaagggaacataggaaaagagacaagtttgagttttgagtataaggtgtagcaaatgaggtatataatatttaagcctggaaatgggtatacttttttttattcctaggactttagtttgcaggattgaatcaagtta

SEQ ID NO: 417837 - DNA, 514 bp, Homo sapiens
tgaaaggatgattaaggggccttggcgatcacttgggaagaatattcaaggcaaatggaatagccagtgcaaaragcccagagcagaagtgtatagttagctggttttgaggaacagccaggaaggccctgtgaatgaagaggatggaattaatgggtggggcattcacactgagagtgttctgttttaatcagaaactctaattgggagggaaatacaatttaacagatattagagaaactcccttggggcatttaattttgacaaataagatactgtagaatattgttaaattgattacattttattggcccaaattaatttgattgctcttttcacattttcaaatcccagtccttacctcatttatttgaaatctcagaattggaaacacttttgatcatttgacttcctatgtctctgatccttaactttgctcaagaggctttctgctggagaagaaaacctccgtcgtgaggagtagaaatgggctctgcagtcaaacttcgtgagg

SEQ ID NO: 417838 - DNA, 589 bp, Homo sapiens
ccttgagggtgcagatgctttctggttcccctccatgagacttccccaagacctagaatgtccaccaggacctctacttgatccagtaactaaaacggtttacaccaagcacaccagcagtcttctaggagcacttccatttatgccgatggatcatacccactgatcatcattttctctgctcctggaaaaactctgaagacagacattgcaaaarccaactctcaacttgttctattctttctcaagatatacaacctaagcactatcagctcagctgcagcatgataaaggaggaagtcctctttccttttatctcatcaaatgcttattataaatttcaacttaataagaaaaagaaaagggcaggcaatagtggcaggtaattgtgactagtaattgaactggcaaacctgaaatgtcctaaagaagatttagggttctataaggaaccataataatcattttcctttcaactttagcttttaattcttttttttttttattttttgtcccaggcctcccattgtattgaatgtttaagagtaatctgatgaataagccaatgtggaaactatgttctggaagc

SEQ ID NO: 417839 - DNA, 433 bp, Homo sapiens
gagtgtttttgatgtctagagtgacgtgttytatatgacctcaggaaagataaagcttatacactgaggcagtgttgaaaaagaattgcaggcaggagaagaattgctgcctagagatttgatatggggagtgttatgggctgaatggtgtccaaaaattcatgtgggtggtccttaaaccaatatgatgggtaaccttataggaaagagaaatttggacactgacatgcatctgtggaataacagaaggaagactatgtgaaggcacagggagaagacagccatctacaaacccagaagagaggcctagaacagatcccttccttcccccacacccctcaggagtaaccaaccctaccaacaacttgatcttggacttctaacctccagaactgtgagaaaataaatttttgttgttaaatatacccagtct

SEQ ID NO: 417840 - DNA, 433 bp, Homo sapiens
gagtgtttttgatgtctagagtgacgtgttctatatgacctcaggaaagataaagcttatacactgaggcagtgttgaaaaagaattgcaggcaggagaagaattgctgcctagagatttgatatggggagtgttatgggctgaatggtgtccaaaaattcatgtgggtggtccttaaaccaatatgatgggtaaccttayaggaaagagaaatttggacactgacatgcatctgtggaataacagaaggaagactatgtgaaggcacagggagaagacagccatctacaaacccagaagagaggcctagaacagatcccttccttcccccacacccctcaggagtaaccaaccctaccaacaacttgatcttggacttctaacctccagaactgtgagaaaataaatttttgttgttaaatatacccagtct

SEQ ID NO: 417841 - DNA, 433 bp, Homo sapiens
gagtgtttttgatgtctagagtgacgtgttctatatgacctcaggaaagataaagcttatacactgaggcagtgttgaaaaagaattgcaggcaggagaagaattgctgcctagagatttgatatggggagtgttatgggctgaatggtgtccaaaaattcatgtgggtggtccttaaaccaatatgatgggtaaccttataggaaagagaaatttggacactgacatgcatctgtggaataacagaaggaagactatgtgaaggcacagggagaagacagccatctacaaacccagaagagaggcctagaacagatcccttccttcccccacasccctcaggagtaaccaaccctaccaacaacttgatcttggacttctaacctccagaactgtgagaaaataaatttttgttgttaaatatacccagtct

SEQ ID NO: 417842 - DNA, 596 bp, Homo sapiens
atttactctcacaacagtccactgttgaaagttttaagatgaggagataagaaaaatcagaatgtattaaaatattgagaggacaacaattttagtcactaccatttcttgagaatatataatggaccaaagtctgtgctaaaggctttttatgtgctcactaatggaattcctagacaactccagcaggttaatagtattattatctccactttacagatgagaaaactgaggcrcagggaactcgaaaattgtgtgcagggacacatctgataagtagtcataccaggtttggaagccaggcagttagagacaagagtttggctcttgtctataattagttgtcaaggatcacatagcaaacaaaaaataggagtagagaaacaacccaaaggtccatcagctgagaatggataaacaaaatgtgatgtatccatactacggaatactactgagcaataaaaaggaatgactgacacatgctgcaatatctaagtgagagaagccagtcagggaagaccacaaattatatgaatccatttatatgaaatattcagaataggcatatctgtaaagacagaaggtacattagtgac

SEQ ID NO: 417843 - DNA, 557 bp, Homo sapiens
atttggttcttggagtgatgtctcatcagattagaatcttatcagattcacaggttccaacccactcaacagggaggcaattatacagccacaaaggtcatcagggttttgtcgtagtccattttcttataacagaacacctgaaatggagtaatttataaagmaaatacatttatttcttacacttatggaggctgaagagtctaagggcatagactggcatctagtgagggccttcttcctggtggggactttgcagagtcccaatgtggtacagggtatcctcacatgatgaggaggctgagtatgctaacatgcttgctccggaccacagagccctctttctcttcttataaagccaccagttcatctcccatgataacctattactctgttaactcattaatccattaattcattaatggattaatccattcataagagcagatccctcatgctccaatccactcttaaaggcccacctctcaatactgccatattagggattatttttccacatgagatttggagaagatgaatatgcagtccatatcaga

SEQ ID NO: 417844 - DNA, 557 bp, Homo sapiens
atttggttcttggagtgatgtctcatcagattagaatcttatcagattcacaggttccaacccactcaacagggaggcaattatacagccacaaaggtcatcagggttttgtcgtagtccattttcttataacagaacacctgaaatggagtaatttataaagcaaatacatttatttcttacacttatggaggctgaagagtctaagggcatagactggcatctagtgagggccttcttcctggtggggactttgcagagtcccaatgtggtacagggtatcytcacatgatgaggaggctgagtatgctaacatgcttgctccggaccacagagccctctttctcttcttataaagccaccagttcatctcccatgataacctattactctgttaactcattaatccattaattcattaatggattaatccattcataagagcagatccctcatgctccaatccactcttaaaggcccacctctcaatactgccatattagggattatttttccacatgagatttggagaagatgaatatgcagtccatatcaga

SEQ ID NO: 417845 - DNA, 557 bp, Homo sapiens
atttggttcttggagtgatgtctcatcagattagaatcttatcagattcacaggttccaacccactcaacagggaggcaattatacagccacaaaggtcatcagggttttgtcgtagtccattttcttataacagaacacctgaaatggagtaatttataaagcaaatacatttatttcttacacttatggaggctgaagagtctaagggcatagactggcatctagtgagggccttcttcctggtggggactttgcagagtcccaatgtggtacagggtatcctcacatgatgaggaggctgagtatgctaacatgcttgctccggaccacagagccctctttctcttcttataaagccaccagttcatctcccatgataacctattactctgttaactcattaatccattaattcattaatggattaatccattcataagagcagatccctcatgctccaatccactcttaaaggcccacctctcartactgccatattagggattatttttccacatgagatttggagaagatgaatatgcagtccatatcaga

SEQ ID NO: 417846 - DNA, 549 bp, Homo sapiens
gggaatacccagccatggtcagaaattggagggctttgtggcagtcactatatgagatgctgaggttatagttgtgaatyaaataaagtccctacttccaggagcttatattctagtgaagaaaatagatattacattaaaatgttgcacatgttatcattgcatgggtgcaaagtgctttgaaggagaggtacaggatgctgtgaaaatgtataatgggggctcactcatctagaaagaatgtggaacaatgacaaggttggaatagctagagaaggggaaatgagttagaaatggcacaaaagagggctggagagagagacattaaatcccacagatcctattgcatcatggagtttgggctttaatctcagagcaaaagaaaagaaagagtcagaataggtgaggttatgctgcagtagccaactaccatctcttaaatctttgtaattagacagaagaaaatattgcattcattactcacactgtatgcatgatccatatgcagggagtatcaactacacagtttttcaaagacccaggcagtga

SEQ ID NO: 417847 - DNA, 547 bp, Homo sapiens
tattcttatcaagagtacagtcaaaagagtaactactgccaatttctcttacacattaaaaacatatagaataaatatgccattatattaagaaatttgatctttgagtccaatgaaatagaataatgtgttcccttgggttcatctctttttttctggttcatattgctaacccaaatctgcctataaagtttgtggactttataaaataataaaagtatttaatttttcctactttttagggatcagatataaaaccttaaaatcaattatctagtcattagtgaaataaagatcaaaaccacaatgggataccacttctcactcrctagggtggctgtaatctaaaagacaatgacaagtgtgaagaaacgggaatactcacacattgctggtaggaatatcaaatagtgtaggaagtcagtccagcagtttctcaaagattgcacatagttattatgtgaccagccattccactcctaagtatatgcccaggagaacttaaaacatatgtttacattaaaacttgcacacaagtgttcatagc

SEQ ID NO: 417848 - DNA, 519 bp, Homo sapiens
tatgagtccattaataaaaaatacccagaacatggaaatctgtagatacagcaagcagactcayggtcacttagtgctcggtgggaatgtcggggtgttggggggattgggcggtgataactgaagggtgtccttcaaggtgatgaaaatggtctaaaattgattgtgtattgcacacatgagacactgaattgtacactttaaatggatgaattgtataatacatgagttacatctcaatgacggcatattttaaaaaaataggtagacttgtatgccgacatatttgtgataaagtttggttctgtctctttctctctcactgtctaatagatgatcataactatagtttcatcagccaggatgtgctagtttatgctggtaacaaacaactctcacatctcaaatggcttataaaggtttttttttttgctcacatattcgtcatttggtggttgggacctcacttggctctgtcagcctcactacaggatccatgctgctatagctgccactaaa

SEQ ID NO: 417849 - DNA, 642 bp, Homo sapiens
cctcgaggtgacagttcaagtgctaggggaaccagatccatatcaggcaggtgtatgagcagccctggccccacaggagcaaawagctcttgtaacaacaacataggcagagttcttagggtgcatgcaaggcatatgcccggttacaagagcactcactgcactcaggaagcccatagctatggcttcctattagatatatgtagttctccctgtctaaatgtaatcttccaatgtgaagtcattttatccttagcaatgttgcctagcaacagttgacatattatccttatcaggttaccaggggaacagagctccagaattaaccaaaaggttaaattcttatgcagagtaggaaagggttttattaaccctttgcccatgattgccttccaatcccttagaatggccggtgacagggaacatctggtcctctaaagttaccaaggaaactgaacagcagcatgtcccatttagacaagggagaatattgaccctctcaagtaagtcctggaggttctgagttgttatgcaactatgaataaaaagcaatttgaatgatcaccaccctctcattcttaagacctcttctcaaatacctcttgttcccagaagccctctctgaccgctgtgattaaagtg

SEQ ID NO: 417850 - DNA, 642 bp, Homo sapiens
cctcgaggtgacagttcaagtgctaggggaaccagatccatatcaggcaggtgtatgagcagccctggccccacaggagcaaatagctcttgtaacaacaacataggcagagttcttagggtgcatgcaaggcatatgmccggttacaagagcactcactgcactcaggaagcccatagctatggcttcctattagatatatgtagttctccctgtctaaatgtaatcttccaatgtgaagtcattttatccttagcaatgttgcctagcaacagttgacatattatccttatcaggttaccaggggaacagagctccagaattaaccaaaaggttaaattcttatgcagagtaggaaagggttttattaaccctttgcccatgattgccttccaatcccttagaatggccggtgacagggaacatctggtcctctaaagttaccaaggaaactgaacagcagcatgtcccatttagacaagggagaatattgaccctctcaagtaagtcctggaggttctgagttgttatgcaactatgaataaaaagcaatttgaatgatcaccaccctctcattcttaagacctcttctcaaatacctcttgttcccagaagccctctctgaccgctgtgattaaagtg

SEQ ID NO: 417851 - DNA, 642 bp, Homo sapiens
cctcgaggtgacagttcaagtgctaggggaaccagatccatatcaggcaggtgtatgagcagccctggccccacaggagcaaatagctcttgtaacaacaacataggcagagttcttagggtgcatgcaaggcatatgcccggttacaagagcactcactgcactcaggaagcccatagctatggcttcctattagatatatgtagttctccctgtctaaatgtaatcttccaatgtgaagtcattttatccttagcaatgttgcctagcaacagttgacatattatccttatcaggttaccaggggaacagagctccagaattaaccaaaaggttaaattcttatgcagagtaggaaagggttttattaaccctttgcccatgattgccttccaatcccttagaatggccggtgacagggaacatctggtcctctaaagttaccaaggaaactgaacagcagcatgtcccatttagacaagggagaatattgaccctctcaagtaagtcctggaggytctgagttgttatgcaactatgaataaaaagcaatttgaatgatcaccaccctctcattcttaagacctcttctcaaatacctcttgttcccagaagccctctctgaccgctgtgattaaagtg

SEQ ID NO: 417852 - DNA, 554 bp, Homo sapiens
gacaaaagatgagtgctttatgaaagaatactttctgacctttggtccttctccctaaaccccaccacattcataaccaagggctgctaaaacaggagaattagtggggaaaaagaatgtggatatgggtgggcttcaagaaggacccctgaacccttggctgagccccaaggtggggacaatggaaaacctagaacagcatgttctccactcataagtgggagctgaacaatgagaacccatggacaccgggaggggaacaacacacaccagggcctgtcrggtcccctcggggtgaggggagagagagcgtcaggataaatagctaatgcatgtggggctcaatatgtaggtgacagattgatagatgcagcaaaccaccatggtacacttttgcctatgtaacaaacctgcacatcctacacatgtattccagaacttaaaataaaatttaaaaaaaaaaaagaaaagaaaaaagaaaacctagaacaggaaggaaggaccttgtcccaggtgtagcagattctccttggttaccctcaatacgtacacca

SEQ ID NO: 417853 - DNA, 445 bp, Homo sapiens
tatgtatgattcaaaaaaatcttagaatttagctgtggttccagaaacactatggacaaaagattcttcataygtaggcaaaaataactagagaagactctagtttttttttctagactctagattgatttttctaaaactttacctaaattttctcaatggcttcttaaagctgaagccagtgaagaccttaaactaattgtgacccctacctgggacactccaatttacctatgaaatgattgaaaaagacattttactggtgcagttatttgtaaattatgtaaggtcttgccccttactcaaagtcttcactgtttttgttattctcaataatctgaaaaagtagaaaaacacaagtaaaacattaaaactgaaattacctaaccaatcagtgcctttcagctcccatagtcacacatcctgctctaagttcttttcgtcc

SEQ ID NO: 417854 - DNA, 626 bp, Homo sapiens
ggaacaaaaggttaatcaaatggaccttggcaaacaacaccacaagcactctgggccctccagcccacagaggttgatgttggatagctgttgaccataattcaggataacaaatgtcttttcatttcatggagctatggcatgctgggactatcttgtttatgaacttgagaaatcagatgaaaggctttcccaatgttgtctgatactaattatcctttaatgaaaccttcctgattggtataaaaagtactctgaagtctgttttcaggcaataagccagtaccacacagttggcaccagctaatgatactattgtgttgtcatcactggagattccttgcttatctttcccgaaataaggaaaacatgaaatatcaggattcatgctctcatttctatggtatattttcaataaacatttctttcagaaatgatatacactaygttgggagttaaagggggaaaaatcaaataattctctccttttctaagaccaaaatccttctgatgatatgtttccagcatatctgcgctcatctttcaacaatctgtgtttcaaaaaagatcatctctcagcttaaatttaaaattatctgttatttcttcaagaggcaagatgtttg

SEQ ID NO: 417855 - DNA, 606 bp, Homo sapiens
tgtgcctttgaaagaagaacaatttcagatgatgttgtctggctcttcattagcaagaggaatatagactgattgtacatgcgtgtagctgtagtgaggctaaaactacaagcccaaactgggaaccaagtatatgggcatgtttggcagactgctggcttttggggctcagaaaccaataccccaaatacagtgctttgatgacaccttgaactgcagaagtctcaaggtttctctgacttattatgcctttccctcccccacccaaagcacgggatgaagttgtcctctgaaattcttttatctgcctgaggtctggacctgccaaagaaaaaaaccaattacctcttgtcccttctttgagttttcattaactgaactcatrttgcaggaagagagactgaattctgtcaacacacctggacagacttttgtcagaaaccactgcctgctctgctggcccagcatactgtgtcccaggcgattgtatgttcttcaagtccactgaatttgcctaaaaatcatttactacttgcctaaaatcatccacattttcccatctcatttttccctaagaagaagggtatataatcatctgtataccat

SEQ ID NO: 417856 - DNA, 489 bp, Homo sapiens
ctttttcaggtaccccaatccatcatagattcgttctctttatgtaatcccatattttttgatggtatcgttygttccttttcattgttttatctctattcttgtctgcctgtcttatttcagaaagatcgtcttcaagctctgagattcttttcttggcctattctgctgttaataattgtgatttcattgtgaagttcttgtagtgtgtttttcagctctaacaggtgagttatgtttttctctagaccggctattttggctgtccgctcctgtactgttttgtcatgattcttagtttctttgcattgggttacaagatgctcctttaggtcattgaagttcactgttattcacattctgaagcctactctgtcatttcagccatctcaggctcaacccagttctgagcccttgctggagaggtgttgcagggatactctggctttttgagtcctcaggattttggggttatttctcatctctgtg

SEQ ID NO: 417857 - DNA, 489 bp, Homo sapiens
ctttttcaggtaccccaatccatcatagattcgttctctttatgtaatcccatattttttgatggtatcgtttgttccttttcattsttttatctctattcttgtctgcctgtcttatttcagaaagatcgtcttcaagctctgagattcttttcttggcctattctgctgttaataattgtgatttcattgtgaagttcttgtagtgtgtttttcagctctaacaggtgagttatgtttttctctagaccggctattttggctgtccgctcctgtactgttttgtcatgattcttagtttctttgcattgggttacaagatgctcctttaggtcattgaagttcactgttattcacattctgaagcctactctgtcatttcagccatctcaggctcaacccagttctgagcccttgctggagaggtgttgcagggatactctggctttttgagtcctcaggattttggggttatttctcatctctgtg

SEQ ID NO: 417858 - DNA, 489 bp, Homo sapiens
ctttttcaggtaccccaatccatcatagattcgttctctttatgtaatcccatattttttgatggtatcgtttgttccttttcattgttttatctctattcttgtctgcctgtcttatttcagaaagatcgtcttcaagctctgagattcttttcttggsctattctgctgttaataattgtgatttcattgtgaagttcttgtagtgtgtttttcagctctaacaggtgagttatgtttttctctagaccggctattttggctgtccgctcctgtactgttttgtcatgattcttagtttctttgcattgggttacaagatgctcctttaggtcattgaagttcactgttattcacattctgaagcctactctgtcatttcagccatctcaggctcaacccagttctgagcccttgctggagaggtgttgcagggatactctggctttttgagtcctcaggattttggggttatttctcatctctgtg

SEQ ID NO: 417859 - DNA, 562 bp, Homo sapiens
tccatcatagattcgttctctttatgtaatcccatattttttgatggtatcgtttgttccttttcattgttttatctctattcttgtctgcctgtcttatttcagaaagatcgtcttcaagctctgagattcttttcttggcctattctgctgttartaattgtgatttcattgtgaagttcttgtagtgtgtttttcagctctaacaggtgagttatgtttttctctagaccggctattttggctgtccgctcctgtactgttttgtcatgattcttagtttctttgcattgggttacaagatgctcctttaggtcattgaagttcactgttattcacattctgaagcctactctgtcatttcagccatctcaggctcaacccagttctgagcccttgctggagaggtgttgcagggatactctggctttttgagtcctcaggattttggggttatttctcatctctgtgggtctatcttaaactttgaccttgaggatggggtttttgtggctttttaaattgttattgttgttgtttcctgcttgtttttcttttaaca

SEQ ID NO: 417860 - DNA, 489 bp, Homo sapiens
ctttttcaggtaccccaatccatcatagattcgttctctttatgtaatcccatattttttgatggtatcgtttgttccttttcattgttttatctctattcttgtctgcctgtcttatttcagaaagatcgtcttcaagctctgagattcttttcttggcctattctgctgttaataattgtgatttcattgtgaagttcttgtagtgtgtttttcagctctaacaggtgagttatgtttttctctagaccggctattttggctgtccgctcctgtaytgttttgtcatgattcttagtttctttgcattgggttacaagatgctcctttaggtcattgaagttcactgttattcacattctgaagcctactctgtcatttcagccatctcaggctcaacccagttctgagcccttgctggagaggtgttgcagggatactctggctttttgagtcctcaggattttggggttatttctcatctctgtg

SEQ ID NO: 417861 - DNA, 587 bp, Homo sapiens
aatttgagactatgtagatatctctgttcttcatcaaactcaatttattcatttacttgatttgatatttacttgtggtttatttcatttaataggttataatttgacaattttttttaacaatttttttctttttagaaatgttttattttgacaattttagacttatagaaaaatagtaagaaaactacaaaacattcttggatamtattccccaaatgtgaacattttactgtatttgctttatcctttctcccccttttcctcttctctttctaggtaaatataaatgtaggtgcataatatagactttttctgaatggtttataagttgcaggtatgatgcctctttatttctaaataattttatgtgtgtctcctaaaaacaaggcattatcttgcataattatagtataactatcaaaatcaggaaattaaaaatggtttactgttactatctcaaccataaaccttattttacatatttcagttgactcaataatattttttatagccaaataatttaagatgggtgatgttacaatccatgatgttgactttcataatccatgatgttgagaggattc

SEQ ID NO: 417862 - DNA, 569 bp, Homo sapiens
accctctccacatttctgaccctgtaatcctgatctcacttcatgaggcagttcgcttctcttttgcatttagctttccccggggtacactgtcaatagcctactgtctgatgtcatcagtcagcacttcatcagaggcaattatgtccacagagcttttggctaattactgtcactcctctttacatgtgtgcatatgcatatcatctttccctaatgagactggaaatcatgattcattctcctggagcagtggtttccataagtgaccaacccacagaccagtgcaaactggacatgcaaaagagcttcctctgaggaacttattagaatgcagattctttgactgcatgggagaggaggatctcataaatctgggtgtaataggcacagaacgttaggtgtaatatgggcgggactctggactcagcatatccaacaagctgctggctgattccgacgatgccgatgaattgccaggttgggaactgctgcccccagagaacctagcagagagctctgtacgtggtaggtgctcactsccctattgtttgggtgtatgcctcctg

SEQ ID NO: 417863 - DNA, 385 bp, Homo sapiens
gcacaaaaacaagaagagttttaaagagactgttagtggaagcctgatggtcctcgaagaagctggtaggaagggcttcaaggatagtgaagaaracgatacgggaacctgaaggaaagggcactgttactacacagccgctgaaagtaaaaccaatgcaagagataagctaaagaaagactactacatataaaagaaccaggactttctaggttcagtatcctttttatagcctctccacatgtcagattcccaaatatagacagtccttgacttagcatggttcgactcaccattttctgactttttataatactgtgaaaatgatatgtgttgagtaatgaaatgatatgtgtaagccttttggcttacaggggtggttaca

SEQ ID NO: 417864 - DNA, 421 bp, Homo sapiens
gcactgttactacacagccgctgaaagtaaaaccaatgcaagagataagctaaagaaagactactacatataaaagaaccaggactttctaggttcagtatcctttttatagcctctccacatgtcagattcccaaatatagacagtccttgacttagcatggttcgactcaccattttctgactttttataatactgtgaaaatgatatgtgttgagtaatgamatgatatgtgtaagccttttggcttacaggggtggttacatcaggataaagtcactgtaagtggaaattatcgtaaatggaaaacccacccataacttctgatatttgcaatttatgatggcctataaattgcaaatatcagacataacaaatgcaaatgccatccagacataaacccatcctaatctgaggagca

SEQ ID NO: 417865 - DNA, 421 bp, Homo sapiens
gcactgttactacacagccgctgaaagtaaaaccaatgcaagagataagctaaagaaagactactacatataaaagaaccaggactttctaggttcagtatcctttttatagcctctccacatgtcagattcccaaatatagacagtccttgacttagcatggttcgactcaccattttctgactttttataatactgtgaaaatgatatgtgttgagtaatgaaatgatatgtgtaagccttttggcttacaggggtggttacatcaggataaagtcactgtaartggaaattatcgtaaatggaaaacccacccataacttctgatatttgcaatttatgatggcctataaattgcaaatatcagacataacaaatgcaaatgccatccagacataaacccatcctaatctgaggagca

SEQ ID NO: 417866 - DNA, 421 bp, Homo sapiens
gcactgttactacacagccgctgaaagtaaaaccaatgcaagagataagctaaagaaagactactacatataaaagaaccaggactttctaggttcagtatcctttttatagcctctccacatgtcagattcccaaatatagacagtccttgacttagcatggttcgactcaccattttctgactttttataatactgtgaaaatgatatgtgttgagtaatgaaatgatatgtgtaagccttttggcttacaggggtggttacatcaggataaagtcactgtaagtggaaattatcgtaaatggaaaacccacccataacttctgatatttrcaatttatgatggcctataaattgcaaatatcagacataacaaatgcaaatgccatccagacataaacccatcctaatctgaggagca

SEQ ID NO: 417867 - DNA, 421 bp, Homo sapiens
gcactgttactacacagccgctgaaagtaaaaccaatgcaagagataagctaaagaaagactactacatataaaagaaccaggactttctaggttcagtatcctttttatagcctctccacatgtcagattcccaaatatagacagtccttgacttagcatggttcgactcaccattttctgactttttataatactgtgaaaatgatatgtgttgagtaatgaaatgatatgtgtaagccttttggcttacaggggtggttacatcaggataaagtcactgtaagtggaaattatcgtaaatggaaaacccacccataacttctgatatttgcaatttatgatggcctataaattrcaaatatcagacataacaaatgcaaatgccatccagacataaacccatcctaatctgaggagca

SEQ ID NO: 417868 - DNA, 285 bp, Homo sapiens
agatagcaaagaaatacatggagtcatgagagactattatgaacaactatatgccaacaaactggaaacgtatggaaaatggatacattcctggaagtgcataaccagcaagaatgaaccaagaagaaaaggaaacctggacagaccaataacggtaatgtaattgaatcagtaataaagtttaccaacaaagaaaggtctaaaactgggtaagttactctgaattctactaaacttttaaggaaaaactaacagcaatttttyataaattattccaaaatcttc

SEQ ID NO: 417869 - DNA, 549 bp, Homo sapiens
tctctgaagtttttttatgataagatttagatgataatttttttttttggcaagagtatcacagaagttatcccatgatcttctcactgcattctatcaggtgacctgcaattattattattttttattttcatcttttaagttcaggggtacatgtgcaggatgtgcaggatgtccaggtttgttacataggtaaatakgtgccatggtggtttgctgcacagatcatcccatcacctaggtattaataatagcccagcatccattagctgttcttcacgatgctctcccttctctcacccgccaccatcccacatgcccctgtgtgtgttgttccccgccatgtgtccatgtgttctcattattcagctcccacttgtaagtgagagcatgcagtatttcattttctatttctgcgttggtttgctgaggataatgttctgcagctccacccatgtccctgcaaaggacatgtctcattccttttcatggctgcatagtattccatggtgtatatgtaccacattttctttatccagtttatcattg

SEQ ID NO: 417870 - DNA, 652 bp, Homo sapiens
atcccagtctcatctagtaacctattcaagcagttacagtttatatgtcagtcgcttgagaggtaacactttaaatctccagtcatttacagtgtcattggtttacttttgccttcagaaaaagttccaaattccttaacatgtaatataaacacccacattcatttggttcttgtcaagttactcaggcttatctctcaccacttactttactctgcccctttgctctaggatccagccaaactggactgcacagaattccacagtgctcgtccttctcctccagctctttgcacttgcttctttgctctatctgccaacctttttttctcatccttcaggtatccactaaccatgcctccaccgaaaarcctacagtatcgagacaaaactgggataggtgtccctcttgcattccaatagtgccctgttttatacctgtcagggtatctatgacttggtatggaaattgcctatttgtctgctttttcaggttatagcatgtgattgctgaggggtggactgtatcatcttcatcttgtaactccagggcatagtctagtaccttagcatgcggttgttgaataaatgaatgaagaatgagaaaaccagaagctgtgatacacaaccacaatgatcatttagtgtgcaa

SEQ ID NO: 417871 - DNA, 652 bp, Homo sapiens
atcccagtctcatctagtaacctattcaagcagttacagtttatatgtcagtcgcttgagaggtaacactttaaatctccagtcatttacagtgtcattggtttacttttgccttcagaaaaagttccaaattccttaacatgtaatataaacacccacattcatttggttcttgtcaagttactcaggcttatctctcaccacttactttactctgcccctttgctctaggatccagccaaactggactgcacagaattccacagtgctcgtccttctcctccagctctttgcacttgcttctttgctctatctgccaacctttttttctcatccttcaggtatccactaaccatgcctccaccgaaaaacctacagtatcgagacaaaactgggataggtgtccctcttgcattccaatagtgccctgttttatacctgtcagggtatctatgacttggtatggaaattgcctatttgtctgctttttcaggttatagcatrtgattgctgaggggtggactgtatcatcttcatcttgtaactccagggcatagtctagtaccttagcatgcggttgttgaataaatgaatgaagaatgagaaaaccagaagctgtgatacacaaccacaatgatcatttagtgtgcaa

SEQ ID NO: 417872 - DNA, 378 bp, Homo sapiens
acttcctgtcttcctatttgaatagcttttctttctttctcttgcctgattgccttggtgagaatttctaatactgtgttgaataggagtggtgagagagggcatctttgtcttgtgtcagttttcaagggaaygcttccaggttttcaggtactcaggcaacaaatagcgttacgaatagaatagtacctcacatctcaatgctaatgttgaacgtaaatggcctaaatgctccacttaaaagatatagaatggcagaatgggtaagaattcaccaaccaagttgctgctgtcttcaggagactcacctaacacatacggactcacataaacttaaggcaaagggttggaaaaagacacttcgtctaaatggacaca

SEQ ID NO: 417873 - DNA, 378 bp, Homo sapiens
acttcctgtcttcctatttgaatagcttttctttctttctcttgcctgattgccttggtgagaatttctaatactgtgttgaataggagtggtgagagagggcatctttgtcttgtgtcagttttcaagggaatgcttccaggttttcaggtactcaggcaacaaatagcgytacgaatagaatagtacctcacatctcaatgctaatgttgaacgtaaatggcctaaatgctccacttaaaagatatagaatggcagaatgggtaagaattcaccaaccaagttgctgctgtcttcaggagactcacctaacacatacggactcacataaacttaaggcaaagggttggaaaaagacacttcgtctaaatggacaca

SEQ ID NO: 417874 - DNA, 388 bp, Homo sapiens
gtgacacaacctatcaaaaactctgggatacagcaaaagtggagctaagaagaaaattcatagcattaaatgcctatatcaaaaagtctgaaagagcacaaataaacaatctaaggtcacacctcacagaattggagaaactagaacagtccaaatccaaacccagcagaagaaaagaaataacaaaatcagaacaaaactaaatgaaattgaaacaaaaaaatacaacagataaatgaaacaaaaagctggttctttgaaaagataaataaaattgataagcattagcaagattaatcaagaaaagaagagagaagmtccaaataagctgtattagaaatgaaatgggagatattaccactgataccacagaaatacaaaagattat

SEQ ID NO: 417875 - DNA, 490 bp, Homo sapiens
gacaactgtgaatgctttccagattggttataacctatcccctcaagcaaactatgaaaaatggtacaaaaatatgagaatatcaacttttcactttaccctcttttcactttacccaatctttattgacaaatattccagattatctaacaaaataaagatcctctttcctaacccccaacaatgtaaataatatacatttcatacacaaaaygtgaaaggattttatcactctattaaacatatcagatatttaatatatttagggaatatttaaatgttcacatataaataatagtattttttaaaagaaaaagctcaaatgaaagtttgaaaaacactgcctgcctcacaagaaaataatcgcaaagactttatatatttgtttaccaagctacacttagataaataccaaaaatctaacagtattctagttatataaagtgttctaaatattttaaactgtatttatttgggtctatagaaataa

SEQ ID NO: 417876 - DNA, 581 bp, Homo sapiens
ggtgcctataatcccagctatttgagaggctagggcaggagaattgcttgaacccaggcaatggaggttgtagtgagtcaagattgtgccactgcattccagcctgggtgacagagcgagactctgtctgaaaaaaaaaaaaaaaaagatagaaatcaattatatttcctaaggatttagtactttaatttcaattaatttttaattaatgtaattatagtttctattaaagagattgaataggatgaattacatcttgattgtgtgtcgttcagcatagtacttacttcagaagtcacatggatcctaagttttctttcatgtcctctaagattcatttcaccgtgacaatatcactgaaaaacagcaaacaggaattacagctctcactatgttgccaaggctggtctcaaactcgtgggctcaagcaattctcccamcttaacctcccaaagtgttgagattacaggtgtgagccactacacccagctttattaaatctttaactttcactttagtgttaaaaacagtaaatactaaggctaaaagtgacaggaatcttaaaggtagatcagtcaggc

SEQ ID NO: 417877 - DNA, 551 bp, Homo sapiens
acaagggtgaagtttcttacactgtcttgccaagtgtttaccagagagacataatttgatttagaaaaagaaacaaatgtgacctttcttagaccmagtcttgtaaagtaatattcatacattaggatatttgagtgtcatcactttgatgttacgccttttcatgtttttaaaccattgcatgtttctcattaaattttaagtatcttagacaagagacaatgacgtattctttcttcgactctcattacctgttacttgagacgaaagtgtgaaagataaatacttgtcaatgaataaacgaatcagaagctcttgaacctaggagtgtttatttaaaacaaagaccaggccctgtgtggatacccatgttggccataggacacttttgcttttatattttctgtttgccaactgtcagtaccttttgccaaatgtaaggttgtggataaactagttactaaggaaggacaccgtttcaccaggctgttgacttatcaacaaccttggctagatccatctgagagcacatgacagtagaatggataaga

SEQ ID NO: 417878 - DNA, 553 bp, Homo sapiens
gacacttttgcttttatattttctgtttgccaactgtcagtaccttttgccaaatgtaaggttgtggataaactagttactaaggaaggacaccgtttcaccaggctgttgacttatcaacaaccttggctagatccatctgagagcacatgacagtagaatggataagagctatgaactcttttgagtgacccacaaccttcccaggtgctcagagaatgtagtctcctgagcaggagaggggcagcagccagcctcakacacatgggctttctctaaaatatcaaccacatcattctccttttttaaaaaaaagaatagccttattgaagtgtaactgatacacaaaagctgcacatatataatgttaaaaatttaacaagtttggacatgtgcaagcacccatgaaaccatcagtataattcaaggtaagagacaaatccatcacctctcaaagattttttgtgccctttgtttttttatttttgtgttttggtgttttatgtgtgtggcgagaatacttaagatccactgtcttaacacatttaaatgc

SEQ ID NO: 417879 - DNA, 578 bp, Homo sapiens
gtgtaggggtgcacgcctgtaatcccagctacttgggaggctgaggcaggaaaattgcttgaacttgggtggcggaggttgcagtgagccaagattgcgccattgcacttcagactgggcaacaatagcgaaactccatctcaaaaagtcgaaaaaaaaaaatgaaaaaatggttcctggatgtaacagattggggcagtgcaggccacgtctgcatgctagctgcaaaggaggcagaaaatgtaatcaaacaacaagctttcgaaaaaatatatatttatttattatatatattattacacataaaattctattatatgtaaaacatgtattatatgtaaaaaataaatatatattatatataaatatatattattatatattattatatgtatttttggaaagcttgtttgattgatatatatatgcttggtgcttaaatcagtgtcctttttttaaaaatgtatccataaagttttgagtttctttttgtttgctttttrtttttagtttgaaaatcctaattaagcttcagaaactcttttttttttgcatgtgacattggaatctattttgtt

SEQ ID NO: 417880 - DNA, 580 bp, Homo sapiens
gtaaactacctgttcagaattatgccaatgtttactctagcatattcctctttaacatgctactttaaaggcttcctataatattaaatctttttaatcttttgattttctccttctctctttcttttgcatttaaattttactaagatatatatgttatatctacattttaaaattatcagtaattttcttaaaggagttgataaatttgtgattacctctacagcacatatttgtttatgtatgttttattatatttctttcattatattaagctctctgcatttgtatgtttatgatttaacttttgcagtttactatttaatacatcaggaatttaatcttttgtgttttaaatgtgagccttgtatgtgtttttttttactccaaacaataaactttcataagtagattattttgatctaactttatccattgatttccaatgccatttctataatakacccaaatttgtacttatatctatgtatgcaattttcattttattctattaagtagctgattattccttgaactaatattgtataattttaataattagagctttattctattatta

SEQ ID NO: 417881 - DNA, 568 bp, Homo sapiens
gaatcacacaaatgcttttcctggcctgtagcagtggcccagatagctttagtatcctagtgggttccagaggaaagtctctgctgcttctgagtggtattgtggactagaagaacgagataaagttttgacactagccaggaaatgatttggcagtgaggaagtagagccaagaatatctttaagcccagagaaataytgagaagagaactgcttctccaacctcatctgtttcttgctcccgtcttctgcagagagcactggtttctatgctttatgaaaaatgtctgccatttgcagttactgaacatgatttgattgaatgttcttatgctgatttcttccacactgctgcctctaaatttcttcacaacattatttcctgacttgcacccagccaacaacctctaagagagtgaatccttcctctgtgctgcatttctaccttgtacaaggttttagccgccattcccacgttgtcctgtgcttatttctttgtatgactctaaaacataagcaggggtgatggtgtaatagagggtgtgaaggttcgtggccactcacacca

SEQ ID NO: 417882 - DNA, 513 bp, Homo sapiens
gactctgcctatagtcagacaagttcaaaagtcttctttctgtatctgctgtatctccaaagtcttcattttataataatctttgcaccattctgaggcccttcacatacatgctctggcaaaccactggttgagcatattggtgcaatatttttggaaggtaatttggcaccatctataccattatctattgattcaacattgattcaacaataaagcttcatgatatttattgcacaaatgaacacacatgccttcagaatgatgcatttcatttttcaatgcatataatattaaattaaattttgttttggaataataaacracaaaagcaaacaaacaaatcctaactattaatcaaaatgaggacttgtggaataaattttgataagtagtccctgggaagaataagttagttttatatatagtaatgtaaaaaataaacaatattataatgttatgattctttctgtatgcccttattcctaaaacaataattttaagtgaatactg

SEQ ID NO: 417883 - DNA, 513 bp, Homo sapiens
gactctgcctatagtcagacaagttcaaaagtcttctttctgtatctgctgtatctccaaagtcttcattttataataatctttgcaccattctgaggcccttcacatacatgctctggcaaaccactggttgagcatattggtgcaatatttttggaaggtaatttggcaccatctataccattatctattgattcaacattgattcaacaataaagcttcatgatatttattgcacaaatgaacacacatgccttcagaatgatgcatttcatttttcaatgcatataatattaaattaaattttgttttggaataataaacaacaaaagcaaacaaacaaatcctaactattaatcaaaatgaggacttgtggaataaattttgataagtagtccctgggaagaataagttakttttatatatagtaatgtaaaaaataaacaatattataatgttatgattctttctgtatgcccttattcctaaaacaataattttaagtgaatactg

SEQ ID NO: 417884 - DNA, 602 bp, Homo sapiens
caggtggattgcttgagcccaggaatctgagaccagactgggcaagatgacaaaatcccatctctacaaaaaaaarcagaaaaattagccaggcatggtggtgtgcacctgtagtcccagctactggggaggctgaggtgggaagatcacctgagaccagggaggctgaggctgtaatcgcaccactgcactccagcctgggagacaaagtgagacctggtcttataaaaaaaagattatatgggagctcgattttttattatttaaaaatccttgccagttttaatagcatgagaagctgtgaggacactacaagtaggtgcagcccacccagtgcacacagggtcagtaccacaggttttcagatgttcttggatcttcttagcctccttatcatcaaggtcagtcacctgagtcctccccaatattcaggagtaattgttatacagtattcaaatgacttaagcccttcatttataagaagactaaaggcaaatattttaaatattgctatgatttccatgtgtcccccacaaaaatgtgctgcaaacttaatacccagtgcaaccatgttaggaagtggggcccaataagcggtgagt

SEQ ID NO: 417885 - DNA, 615 bp, Homo sapiens
ttactaataagcctgttgtatgtaacacatgatactggaaaatgtatacttrggcacataatctagaggaaatttggaaacattcattaaaagcctcaagtatttttaaatgacttactccacaatgtcacttacagaaatgtattttaaaataagggacatatatcaaaaaaagaaacccattaaaatattaatacttaaagtattaaagaaaaagcaacagacatttaaatgcttatgcaaatttgacaaggctcattaaaatgataagatcatattattacgtatgaatgctgtgtttatatgtgcttatgacctattgtcaacttttttctttttttttttttgaaacagggtctcattccatcatgtaggctggagtgcagtggctaatgactcagtcgtggcttactgcagccttcacctcttaggcacatgcagtcctcccacctcagcctcaccatgttgcctaggctggtcttgaacttctgggttcaagcgatcctcccacctcagcctcccaaagtgctgggattataggcatgagccaccaagtctagtctatttttttaagtatataatagacttaaatatgcataggtaataaatatttta

SEQ ID NO: 417886 - DNA, 615 bp, Homo sapiens
ttactaataagcctgttgtatgtaacacatgatactggaaaatgtatacttgggcacataatctagaggaaatttggaaacattcattaaaagcctcaagtatttttaaatgacttactccacaatgtcacttacagaaatgtattttaaaataagggacatatatcaaaaaaagaaacccattaaaatattaatacttaaagtattaaagaaaaagcaacagacatttaaatgcttatgcaaatttgacaaggctcattaaaatgataagatcatattattacgtatgaatgctgtgtttatatgtgcttatgacctattgtcaacttttttctttttttttttttgaaacagggtctcattccatcatgtaggctggagtgcagtggctaatgactcagtcgtggcttactgcagccttcacctcttaggcacatgcagtcctcccacctcagcctcaccatgttgcctaggctggtcttgaacttctgggttcaagygatcctcccacctcagcctcccaaagtgctgggattataggcatgagccaccaagtctagtctatttttttaagtatataatagacttaaatatgcataggtaataaatatttta

SEQ ID NO: 417887 - DNA, 534 bp, Homo sapiens
acgaggacacagaatcctgctggaaggagaaggaaggataattgtttcaggagcagaagctaccctcagtagagaattggtagcattttctagaattctatrtaaatagaattacataaatacgtatttttgtttggcttccattactcatcttaatgacttagagactcatccccactgtggcttgtattaataggttacttttattctttgcagttgtggttttcatgaataagtggtatttcattgtataaacagaacatggcatgttaatgtatttttcagctgatggacatctgggttgtttccagtctttgactactaaaagtaaagctagtatggatatttgtgtgagtaaatgttgtcctttctgttaggtaaattttaggaatagaatggctgcgctgaatttgaagtacacgtttagctatttaagaaacagctaaatgctttccaagtaactagatatgctgtttcgcgaaagggctatatatgcaaagcaacccccaaatgcagaaggagcagagaaagcaa

SEQ ID NO: 417888 - DNA, 534 bp, Homo sapiens
acgaggacacagaatcctgctggaaggagaaggaaggataattgtttcaggagcagaagctaccctcagtagagaattggtagcattttctagaattctatataaatagaattacataaatacgtatttttgtttggcttccattactcatcttaatgacttagagactcatccccactgtggcttgtattaataggttacttttattctttgcagttgtggttttcatgaataagtggtatttcattgtataaacagaacatggcatgttaatrtatttttcagctgatggacatctgggttgtttccagtctttgactactaaaagtaaagctagtatggatatttgtgtgagtaaatgttgtcctttctgttaggtaaattttaggaatagaatggctgcgctgaatttgaagtacacgtttagctatttaagaaacagctaaatgctttccaagtaactagatatgctgtttcgcgaaagggctatatatgcaaagcaacccccaaatgcagaaggagcagagaaagcaa

SEQ ID NO: 417889 - DNA, 379 bp, Homo sapiens
agacatctcctttacaataagaaaaaaatgcaagaatatccactctcacctcatctatttagtagaatgctgccattcctrgcaaatgttatgaggagaaacaaataagggtgtatagtctagaagaaaagagattgaactacctttattttgaggtaatataggacctagctaactgaaatagccaacagaaacaacagacagcaataggcactaataagtgagataaaaaatgtttccattgctttaactatgaaaactcatgcatactggtaattttaattcagaaatgtaagataccctttaaagaggcaatagaattgtaacgtttctaggaagttattcaccaagaagatacataaaatccacagagaaggct

SEQ ID NO: 417890 - DNA, 619 bp, Homo sapiens
agagacacacacacaggtatgtttattgcagcactatttatggtagcaaagtcatggaaccaactcaaatgtccatcaatgatagtctrgtaaaaggaaatgtggtacatatacaccatggaatactatgcagccataaaaaggaatgagattgtgccccttgtaaggacatggataaagctggaagccatcatcctcaacaaactaccacaggaacaggaaaccaaacactacatgttctcactcataagtgggaggtgaacaatggacacagggaagggaacaacacacaccagggcctgttgtggggtaggaggcaatgggagggaacttagaggacaggtccataggtggagcaaaccaccatggcacacatatacctatgtaacaaacctgcacattctgcatatgtattccagaacttaaagtaaaataaattttaaaaaaagaaaaagaaaaaactcatcataccattagtttctaaattgtagtaatacaagcttgataattttagcatatctctacgtaacatgcatcctatcagatgatcattacctagatctgcttttaagtgtagtctgcaataatttatacagtttttagaattcatgggtaaatg

SEQ ID NO: 417891 - DNA, 638 bp, Homo sapiens
cacaggccacacccacaaaacaatttcaaaaatgtaacctttgcctggggagtgggcttgtgccaccttgacttttggtttgttaagcagtgaggaatatccagggaattaagaggtcaatcaaataagtatttggatattttacctgctcctcctcttttctgtagataaaaatatttagtttgaagggttaagaatatttagcttgaagggttaacatttagttttataagtcagaaaaagtattctccaaaatccccatctaactgatatttctattatatgtcactcacatataaaaatgttgctttttatcttacactacactatgaaacgatttcttttaacttagggatgtaaatatttaatatattgagtaaataaaattatttttataatactgattttgtatkgtaatcataattttaaaatttttatggaacactgttaggatttaattgatcaaatttgactaaattatggctatatatgtcaacttaaaggtatttggaaattgaaagctagtccatgagaaagagaaagtaagctagtacttttcccagaatgtccatccctgcttggtgtaattggatggaggccaccaggtacagaagcagtggagctggtgtgttctggtt

SEQ ID NO: 417892 - DNA, 638 bp, Homo sapiens
cacaggccacacccacaaaacaatttcaaaaatgtaacctttgcctggggagtgggcttgtgccaccttgacttttggtttgttaagcagtgaggaatatccagggaattaagaggtcaatcaaataagtatttggatattttacctgctcctcctcttttctgtagataaaaatatttagtttgaagggttaagaatatttagcttgaagggttaacatttagttttataagtcagaaaaagtattctccaaaatccccatctaactgatatttctattatatgtcactcacatataaaaatgttgctttttatcttacactacactatgaaacgatttcttttaacttagggatgtaaatatttaatatattgagtaaataaaattatttttataatactgattttgtattgtaatcataatyttaaaatttttatggaacactgttaggatttaattgatcaaatttgactaaattatggctatatatgtcaacttaaaggtatttggaaattgaaagctagtccatgagaaagagaaagtaagctagtacttttcccagaatgtccatccctgcttggtgtaattggatggaggccaccaggtacagaagcagtggagctggtgtgttctggtt

SEQ ID NO: 417893 - DNA, 638 bp, Homo sapiens
cacaggccacacccacaaaacaatttcaaaaatgtaacctttgcctggggagtgggcttgtgccaccttgacttttggtttgttaagcagtgaggaatatccagggaattaagaggtcaatcaaataagtatttggatattttacctgctcctcctcttttctgtagataaaaatatttagtttgaagggttaagaatatttagcttgaagggttaacatttagttttataagtcagaaaaagtattctccaaaatccccatctaactgatatttctattatatgtcactcacatataaaaatgttgctttttatcttacactacactatgaaacgatttcttttaacttagggatgtaaatatttaatatattgagtaaataaaattatttttataatactgattttgtattgtaatcataattttmaaatttttatggaacactgttaggatttaattgatcaaatttgactaaattatggctatatatgtcaacttaaaggtatttggaaattgaaagctagtccatgagaaagagaaagtaagctagtacttttcccagaatgtccatccctgcttggtgtaattggatggaggccaccaggtacagaagcagtggagctggtgtgttctggtt

SEQ ID NO: 417894 - DNA, 597 bp, Homo sapiens
aagcagtggagctggtgtgttctggtttatcctcacttcctgaactttctgtccaactctactttgacctggattctaacaagagggaggagccacaatgcccccctggaccatgccactccagcagcaggaagtactgaccttctggtgagttctctctagttcttccttcaccagggctggcaggcatcttatctctgatccttcctagatagttacttcatcaaatccactcacagctacataaggaccatttcctataataatttttatttcatrccattctataatctcaactttcttctaccaatattcactatctgtaatgtagaggtttatatgtagtataggtaaaggtaatcttttcattgaaacaatttcacaaccagtgattcttactactttatgtggcacgtgaagggaattcagcagcggtgtccgtttcttgtgataggcaacagggcataatcttatttaagaacactgcttctacttgtataaatcagtatataagctcctttaccttatcttaattttgtctttatttttcaattttgataaaatatctagctgccttatttgctcataataaggcat

SEQ ID NO: 417895 - DNA, 597 bp, Homo sapiens
aagcagtggagctggtgtgttctggtttatcctcacttcctgaactttctgtccaactctactttgacctggattctaacaagagggaggagccacaatgcccccctggaccatgccactccagcagcaggaagtactgaccttctggtgagttctctctagttcttccttcaccagggctggcaggcatcttatctctgatccttcctagatagttacttcatcaaatccactcacagctacataaggaccatttcctataataatttttatttcatgccattctataatctcaacttkcttctaccaatattcactatctgtaatgtagaggtttatatgtagtataggtaaaggtaatcttttcattgaaacaatttcacaaccagtgattcttactactttatgtggcacgtgaagggaattcagcagcggtgtccgtttcttgtgataggcaacagggcataatcttatttaagaacactgcttctacttgtataaatcagtatataagctcctttaccttatcttaattttgtctttatttttcaattttgataaaatatctagctgccttatttgctcataataaggcat

SEQ ID NO: 417896 - DNA, 494 bp, Homo sapiens
gaataaacagtaattccctgattgtgagagtttatctgtcgttatttatgaacatatccttgttattagaaaatgcacactgatttatttaactgtaaagaggcatcatatctgtaagtttctttcaaatgactgaaaaacaaagtatctgcatggatatcgataccagactgtattgttggaaaaaagaatcaagcaaataaggtgctgacaactggggaatgtgggtgaaaggactttgaggatttttgtgctagccttgcaaatgtccagtaggtttgaaataatattagaatttttaaaatttaaaaatctgtctttttcatgttccttttacygattgaggtgcctagtgttcttacaatcccccgtaagtcaagatatgatccatatataatgcacataattaatctttgaatctgtataattttctatttccgagaagtaaacctttaatttattccacataaattgttaaattgatattgtgatgg

SEQ ID NO: 417897 - DNA, 578 bp, Homo sapiens
ttttgttttggttagatgcaggtcatggggcccattggtatactaaaaaagtgatagtatgttttcagaatgtccagaggtgggtgatattatttggccattttctggtgatgttacatttgatgatctggtcaaggttttgtattgtattcttgttgtgggcttttatttaccactttatctattaaaaatagcatgtaatctgtattgacacactttcagactatccaaatttctaagtttcagtcaaatcaaacaacacccttgcctccaatttagcatctactgatgattcttgaatgagttcatctttagtataatgggtgcaaaatgggaattttccarctccagcatacatttgatcagcaaatggttgaaattctatcatacaaaagactcctctcttctccaacatttatttattggtgtgcttctttatttattattttttgatactcttacctattcactataaactcattaattcccattttaatcaatgatttacaacacattagttagtttttgtaggtaagaaatgcattacgcttcatgtatttctctgcaaaaataatcag

SEQ ID NO: 417898 - DNA, 653 bp, Homo sapiens
aatttagttccctagggattttatcaacttacatccttagcaataatatatgagttcaaaacagggtttcccaaagccttgccaccaaagtgtatggttaaacttttaaattttcactacttcctcttcaaatattttctattttcttatttttctatgattacttttccatataactttagaatgaaatcatctacctccagaaaagcttgttggcttggttactgaaattacaatcatttttcaaattaatttaccaataattgatcaataattgatatgatgatgatattgaggcaacctatcaaagaacaagagatgactttccatttgctcacatccacttttgtatattttcagaaatacattttaagttttttaaaatcaagtttattaaaattttctttttctaaaactttcttgttaaatttagtgytaatttgttacttggatataggaaaggaattgataatttcttattaattttttccctcccatcttgctgaataattatatttttgagttatttctattattgattagttgggggtttcccagatacattgtcacataatctgccaaggagatgcatttcattgtttttcaattcttatgcctctaattgttttctcagtacaggactaaattggtaa

SEQ ID NO: 417899 - DNA, 589 bp, Homo sapiens
ctggtgtagcccacataaacaaaaatgtaactgagtactccggttcttagggaaaggggctggcaggaggaggtcaataataggtgacagccaggcttgtagaaggctggccgcgcgtccccacaaatgtgcctctgtgagaatcaggmaagatacattttgctcaatgctgatatagactggggcagggcacagaggatgggaatggggctcaggctagacatcagccctgatagtccaccctctctcccttgtgcaacacagcaccttcagaaaggttgaactacctggcttggatgccagccagggggcaggaacctgacgagggccacttggatcagagggacctgggcatgagagaggaggcagaacagcagcaaacagaaggtcctcagtccagccaggcggtgcagggtgttgcctctgtgtgggtgctgcctaccccagctgccctcagcttctcattatttcccaaacctggtgtgactgtgctgagactctattcattgggctgagaggaaggaaagggcagctaggaaaggttaggggagcacgcagtatcatggtaagaaggtgtgtcttcaagtgg

SEQ ID NO: 417900 - DNA, 589 bp, Homo sapiens
ctggtgtagcccacataaacaaaaatgtaactgagtactccggttcttagggaaaggggctggcaggaggaggtcaataataggtgacagccaggcttgtagaaggctggccgcgcgtccccacaaatgtgcctctgtgagaatcaggaaagatacattttgctcaatgctgatatagactggggcagggcacagaggatgggaatggggctcaggctagacatcagcccygatagtccaccctctctcccttgtgcaacacagcaccttcagaaaggttgaactacctggcttggatgccagccagggggcaggaacctgacgagggccacttggatcagagggacctgggcatgagagaggaggcagaacagcagcaaacagaaggtcctcagtccagccaggcggtgcagggtgttgcctctgtgtgggtgctgcctaccccagctgccctcagcttctcattatttcccaaacctggtgtgactgtgctgagactctattcattgggctgagaggaaggaaagggcagctaggaaaggttaggggagcacgcagtatcatggtaagaaggtgtgtcttcaagtgg

SEQ ID NO: 417901 - DNA, 590 bp, Homo sapiens
tctcatcttctactgggcttcactctcagaaataataaaatatctgaagtgtaagaagtctgaatgaagcataaagattcctctaaaacmgttaaaatactttcaaaaaattttgctgaaagcaagatatgatcccgtttgtacggaatggcatagctgtatgaagagatagttatcatatatccacattggttttatcaagtatacattatgacaaagtctgaggaatgggtaaaaagtgtgaatgcattttagatattaaattcctttcttttgtgtgatgcacgctactaagttatggggataaggcttgtgacaacaaggatattttgtataattagaataatgttttgtaatcatgaaaatgttgtagcaagcactttattttaaagaaaaattagtctagagaggggcgccgcatcattgaaattgcagtgtgttgaggtcaattgctgcttcatttgcctaggcatccaatcaatcaaagaagacactggtcatgatgatgtgatataagaatttaagccatgagtgcatttctttcttggggctgccttctattccctaggaaacaatcagtaactatcaat

SEQ ID NO: 417902 - DNA, 590 bp, Homo sapiens
tctcatcttctactgggcttcactctcagaaataataaaatatctgaagtgtaagaagtctgaatgaagcataaagattcctctaaaaccgttaaaatactttcaaaaaattttgctgaaagcaagatatgatcccgtttgtacggaatggcatagctgtatgaagagatagttatcatatatccacattggttttatcaagtatacattatgacaaagtctgaggaatgggtaaaaagtgtgaatgcattttagatattaaattcctttcttttgtgtgatgcacgctactaagttatggggataaggcttgtgacaacaaggatattttgtataattagaataatgttttgtaatcatgaaaatgttgtagcaagcactttattttaaagaaaaattagtctagagaggggcgccgcatcattgaaattgcagtgtgttgaggtcaattgctgcttcatttgcctaggcatccaatcaatcaaagaagacactggtcatgatgatgtgatataagaatttaagccatgagtgcatttctytcttggggctgccttctattccctaggaaacaatcagtaactatcaat

SEQ ID NO: 417903 - DNA, 590 bp, Homo sapiens
tctcatcttctactgggcttcactctcagaaataataaaatatctgaagtgtaagaagtctgaatgaagcataaagattcctctaaaaccgttaaaatactttcaaaaaattttgctgaaagcaagatatgatcccgtttgtacggaatggcatagctgtatgaagagatagttatcatatatccacattggttttatcaagtatacattatgacaaagtctgaggaatgggtaaaaagtgtgaatgcattttagatattaaattcctttcttttgtgtgatgcacgctactaagttatggggataaggcttgtgacaacaaggatattttgtataattagaataatgttttgtaatcatgaaaatgttgtagcaagcactttattttaaagaaaaattagtctagagaggggcgccgcatcattgaaattgcagtgtgttgaggtcaattgctgcttcatttgcctaggcatccaatcaatcaaagaagacactggtcatgatgatgtgatataagaatttaagccatgagtgcatttctttcytggggctgccttctattccctaggaaacaatcagtaactatcaat

SEQ ID NO: 417904 - DNA, 579 bp, Homo sapiens
cccatctctcagatctaactccattctttcatttttccagtgctattgccaatttttgtcttttatatttatctacctgcatatattttaatgtgaagttgagataatctttttttttggaaaacaatttcaactgtaattaacctgatgcctagcttcagattcctccttcttcttggaactgtcctgcatctacatttagagttcttggggtgcagtcaaaaaggcttgcctcggggattaaaaatgtgttctgataaccagtccagtatgcctgatgggccctggcacaccctcaggatttgaatctgtttagcttatattaaatacytaatataatttaaaatagtttatgtgggatttttatttactctgtatacaaaaacatgtcattgttcttagaatcatttagtctaaatatcaaagtgaaagttgaaggatattaagaaactatgggtagctcatacttcagtatcagttttagcttttccaagaaagtgaaattgctattggatattacagtgaatgatcccttacagcataggcaaggtggaatgaaaatggcaacacttatatagt

SEQ ID NO: 417905 - DNA, 581 bp, Homo sapiens
gaaattgctattggatattacagtgaatgatcccttacagcataggcaaggtggaatgaaaatggcaacacttatatagtgatttttagggtatcaggggcattttcatagtaataataataaagtgcagtcatattttgtgcaaagattaggtcaagctgatttgtttaagctgaatttggagtagaaaaggatcaaatcmaatgtcttgatcagtttcagtgctatttttattcttgtcatgtacccttcaagcttgcatcatttggcataagcagtgtcttaccagacttaggagttttgctttcattttataaataataaattctagatgtttctgcaacttcatattttcttctattttttaaaataccctctccaaatatattttttgttttatgctaagaaaatggaaattattcacagctaatactgttaagtagaatcaatgtttcattaatactacacctaatttgataacgaaacatgatttaagtatacaaaagcattgataactaaacatgatttaagtaaacaaaggcagagaatataatgaccatttacaattgtttaagagctgc

SEQ ID NO: 417906 - DNA, 587 bp, Homo sapiens
tgtttcattaatactacacctaatttgataacgaaacatgatttaagtatacaaaagcattgataactaaacatgatttaagtaaacaaaggcagagaatataatgaccatttacaattgtttaagagctgcatcccttacagaaaataaataacaaatttgagtaacaaaaattacaatgcagagtaattgggttggagtataaatttttttaaatagtgtgtgagttgactattgctattataacaaattaccacaagcttaatgkcctagcacagcatgaatttattaccttacagttctgaaagtcagaagtttgaagagggttttagggattcgaattaaggtgtcagcagacctgtgcttctctggaaggctctacgggagagatttaccttctccagcttccagtggctggctgcccacacaccttggctcgtggccacctcctcacgtcagtccagcctctgccaccatcgtcaactctcccactatgactgagaccttctgcctgtctcaggtaaggaccttggtgattacattggattcactcaggtaatccagaataatctcccctttccaaactc

SEQ ID NO: 417907 - DNA, 552 bp, Homo sapiens
ttcaaatgctatattaatgaatgtataactatctccttgagaagaggcatttttaattgacaaagtaatggcatatcttaaagatttcaacataaatgctatgttttctttaagcacgttagaacagtatctattatggctcatarcactcagcaaaggcttgatgtatcctcaatacattcacaagaataaaccccacttttctaaaaatgactaatgagatttcaagatataatggaagtgctcttagcttactgaatgccatgttaactcttaacagcaaaatacaaacaaatataaaactcaaagctgacatcaatgtctgcagcattttctggttctgaataagatgctatcacatttagcaggacacatctctagcactctcctgtgatcaattgccagttactcagcaagatgtcttattactgttagaataattggcaaataaaactttgtcaatgcacgttgttaccacgtatagaatctaatagcaaaaaaagagaaatgatagtttcagaatgattagacgaatatttctgtttactctca

SEQ ID NO: 417908 - DNA, 552 bp, Homo sapiens
ttcaaatgctatattaatgaatgtataactatctccttgagaagaggcatttttaattgacaaagtaatggcatatcttaaagatttcaacataaatgctatgttttctttaagcacgttagaacagtatctattatggctcatagcactcagcaaaggcttgatgtatcctcaatacattcacaagaataaaccccacttttctaaaaatgactaatgagatttcaagatataatggamgtgctcttagcttactgaatgccatgttaactcttaacagcaaaatacaaacaaatataaaactcaaagctgacatcaatgtctgcagcattttctggttctgaataagatgctatcacatttagcaggacacatctctagcactctcctgtgatcaattgccagttactcagcaagatgtcttattactgttagaataattggcaaataaaactttgtcaatgcacgttgttaccacgtatagaatctaatagcaaaaaaagagaaatgatagtttcagaatgattagacgaatatttctgtttactctca

SEQ ID NO: 417909 - DNA, 552 bp, Homo sapiens
ttcaaatgctatattaatgaatgtataactatctccttgagaagaggcatttttaattgacaaagtaatggcatatcttaaagatttcaacataaatgctatgttttctttaagcacgttagaacagtatctattatggctcatagcactcagcaaaggcttgatgtatcctcaatacattcacaagaataaaccccacttttctaaaaatgactaatgagatttcaagatataatggaagtgctcttagcttactgaatgccatkttaactcttaacagcaaaatacaaacaaatataaaactcaaagctgacatcaatgtctgcagcattttctggttctgaataagatgctatcacatttagcaggacacatctctagcactctcctgtgatcaattgccagttactcagcaagatgtcttattactgttagaataattggcaaataaaactttgtcaatgcacgttgttaccacgtatagaatctaatagcaaaaaaagagaaatgatagtttcagaatgattagacgaatatttctgtttactctca

SEQ ID NO: 417910 - DNA, 649 bp, Homo sapiens
acttttgtcttctgaggagggggaattttctttcccttcatggaaaagttagacatttggtaagtttttctgatagtacccagaacagaaagaaataagtacatttatagttggccctctatattcgtgggttctgattttgcagattcaattagtcatagatggaaaatattcagaacaaaaaggatgatgtgtctgtactgaacatgcacagacatttttttcttgtaattatttcctaaacaatataatacaacaactacttacatataaatttactgtgtattaggtgttataagtaatccagaaatgacttaaattatacaggaggatgtgtgcaaatatatttatatcagaaacttgagtaatcacagattttggtatccacaggggtcttggaaccaatccccacaggtaccaaaamacagctgtattcaaaagttggctcagctaagggacataaaagcatgcatgtagagtacaggaacatagatgcacacacaccactgtcggcatggctttcattctgttctcacacagagaaatgatgggaactcactctactcttctgtttgcatggctgttctggaggaaatgtttgaatctgacacaaatagctattgctgtgtaaagagttttattaactaca

SEQ ID NO: 417911 - DNA, 543 bp, Homo sapiens
ttggattgtttagattttcagcctctgtaaggtaagacttgataatttataatctagaaaatcactcatcttatcaatttcaaatatattagtctagaattgagcaaacaattctgtaatactcctgctaattctcctagtacatttggttattttcacatacaattttcttattttgtatatttaatattctttgcttcctctttcttgattaggttagctgacagaacagctatttattttcctcaaagaaacagttcttaatttattagttatacttttttctgttttcttacatatttatttttgtttccttattgcttactgttgcttcttttgcacatattatgttgttctatctatttgaattggactattcaattgatatctttttactctttcttgttattgatgtatgccttttatttaagaactgagaactgaatacctgggtactattacaacgtgatatgttatgtagwgtccccagatacgaggaagtgatttatgatagtcaatatgctcagcaaattagatatgtgt

SEQ ID NO: 417912 - DNA, 575 bp, Homo sapiens
cttgggagcatatttaaaaataataagagaaggactgagcttggagagagcaaaaaaaactcacctcaaatttgagaytcacaaataaaaaataaggcctaaataatattttgaacaatggccactttacaatattgaatgcctggaaaaccattcatgtagtatctaatatgtattattctccataagtcatactatttttttcataatttaaaatcagggtcttttttctcagagttggggttacacgttggaactgctcccagctcttcttttcaatttagcactgtaattttgcatagtgttcaaaagtagtttctactataacctcagcaatatgccagatttgaatttactatatatagtttatataagaagatgaggaaaatgcaatcgtaaaaggataggtgtgcatctctttagttaactcttctccagcaatcagcttattccaatgaaatctgcattctttatacaaggcattaaaaaaaactaaaagcaaaaatactaaaaaaattaattaaaatcaaagaatgctgtaagaaacagcaccaaaaacctaattcttgattcac

SEQ ID NO: 417913 - DNA, 575 bp, Homo sapiens
cttgggagcatatttaaaaataataagagaaggactgagcttggagagagcaaaaaaaactcacctcaaatttgagactcayaaataaaaaataaggcctaaataatattttgaacaatggccactttacaatattgaatgcctggaaaaccattcatgtagtatctaatatgtattattctccataagtcatactatttttttcataatttaaaatcagggtcttttttctcagagttggggttacacgttggaactgctcccagctcttcttttcaatttagcactgtaattttgcatagtgttcaaaagtagtttctactataacctcagcaatatgccagatttgaatttactatatatagtttatataagaagatgaggaaaatgcaatcgtaaaaggataggtgtgcatctctttagttaactcttctccagcaatcagcttattccaatgaaatctgcattctttatacaaggcattaaaaaaaactaaaagcaaaaatactaaaaaaattaattaaaatcaaagaatgctgtaagaaacagcaccaaaaacctaattcttgattcac

SEQ ID NO: 417914 - DNA, 575 bp, Homo sapiens
cttgggagcatatttaaaaataataagagaaggactgagcttggagagagcaaaaaaaactcacctcaaatttgagactcacaaataaaaaataaggcctaaataatattttgaacaatggccactttacaatattgaatgcctggaaaaccattcatgtagtatctaatatgtattattctccataagtcatactatttttttcataatttaaaatcagggtcttttttctcagagttggggttacacgttggaactgctcccagctcttcttttcaatttagcactgtaattttgcatagtgttcwaaagtagtttctactataacctcagcaatatgccagatttgaatttactatatatagtttatataagaagatgaggaaaatgcaatcgtaaaaggataggtgtgcatctctttagttaactcttctccagcaatcagcttattccaatgaaatctgcattctttatacaaggcattaaaaaaaactaaaagcaaaaatactaaaaaaattaattaaaatcaaagaatgctgtaagaaacagcaccaaaaacctaattcttgattcac

SEQ ID NO: 417915 - DNA, 561 bp, Homo sapiens
  misc_feature (1)...(561): n = A,T,C or G
ttatatatattttatctttaaaagtaaatgccattattcacatttttcacattagaacactgaggctcanagatactgagtaacttgctgaaggtctcatggaacaaatgacagagcttagatttacatgcaggtttgtctgaatagccaagtctctgcttttttttatgctgtcctaatgccccttcagctagaaaaacatgagtgcagacagaaaatctgttctagaaaacagtaatgccactgaagatcaaatagcttaaattgatatgcagggttcatgagaacatactgtttttacaggccagtgtcccacagactttcattaggactaatttcctgcattactgaggctgcattgctgagcagcttattgaaaacagagctatgtcccaaatsccagcagattacctgccccttcacccccatccctctttcaaatcctacacccaagattagcagaatgatttttccattattcattacttctactagttacaaggtaagtctcaattacaactcccccttctctcccaagtctccaaattcatacttaccatg

SEQ ID NO: 417916 - DNA, 561 bp, Homo sapiens
  misc_feature (1)...(561): n = A,T,C or G
ttatatatattttatctttaaaagtaaatgccattattcacatttttcacattagaacactgaggctcanagatactgagtaacttgctgaaggtctcatggaacaaatgacagagcttagatttacatgcaggtttgtctgaatagccaagtctctgcttttttttatgctgtcctaatgccccttcagctagaaaaacatgagtgcagacagaaaatctgttctagaaaacagtaatgccactgaagatcaaatagcttaaattgatatgcagggttcatgagaacatactgtttttacaggccagtgtcccacagactttcattaggactaatttcctgcattactgaggctgcattgctgagcagcttattgaaaacagagctatgtcccaaatgccagcagattacctgccccttcacccccatccctctttcaaatcctacacccaagattagcagaatgatttttccattattcattacttcyactagttacaaggtaagtctcaattacaactcccccttctctcccaagtctccaaattcatacttaccatg

SEQ ID NO: 417917 - DNA, 591 bp, Homo sapiens
aggagttcaaacaactctataggaaaaaatctaataatctaatgttttaaatggccaaaaggtctgaacagacatttctcaaaagaagagatacaaattgcaaacaggtatataaaaagatgctcaacatcattgatcatcagagaaacataaatcaawactacagtgagatatcatctcattccagttaaaatggtttttattcaaaagacaggcaataacagatgatggcaaggatgtggagtaaagggaatcctcatacacggttggtgggaatgtaaattagtacaagcactatggagaaccgtttggagggtcctcaaaaactaaaatagagtcaccatatgatccagcaaacccacttctaggtatatacccaaaagaaaggaaatcagtatatcgaagagatacctacagcattgttcacaatagccaggacttggaaccaacctaagtgtccataaacaaacaaatggataaagaaaatgttacatatatttttaaaaagaatgagatcctgtcatttgcaacaacatggatggaactggaggccatcatgttaagtgaattaagccaggcacagaaagacaa

SEQ ID NO: 417918 - DNA, 591 bp, Homo sapiens
aggagttcaaacaactctataggaaaaaatctaataatctaatgttttaaatggccaaaaggtctgaacagacatttctcaaaagaagagatacaaattgcaaacaggtatataaaaagatgctcaacatcattgatcatcagagaaacataaatcaaaactacagtgagatatcatctcattccagttaaaatggtttttattcaaaagacaggcaataacagatgatggcaaggatgtggagtaaagggaatcctcatacacggttggtgggaatgtaaattagtacaagcactatggagaaccgtttggagggtcctcaaaaactaaaatagagtcaccatatgatccagcaaacccacttctaggtatatacccaaaagaaaggaaatcagtatatcgaagagatacctacagcattgttcacaatagccrggacttggaaccaacctaagtgtccataaacaaacaaatggataaagaaaatgttacatatatttttaaaaagaatgagatcctgtcatttgcaacaacatggatggaactggaggccatcatgttaagtgaattaagccaggcacagaaagacaa

SEQ ID NO: 417919 - DNA, 518 bp, Homo sapiens
tcctgtcatttgcaacaacatggatggaactggaggccatcatgttaagtgaattaagccaggcacagaaagacaaactgtacatgttctcacttatctgtgggagctaaaaagtgaaacaattgaattcacagggatagagggyagacggatggttaccagaagctgggaaaggtattggggcaggggtagtggagagcaagtggggattgttaataggtacaaaaaatggttagaaagaatgaataagacctactatttgatagcacaacagggtgactatagtcagtaataatttaattgtacatgttaaaataatgaaaagagtacaactggattgtttataacacaaaagataaatgcttgaggtaatggatacctcatttaccctaatgtgattattatgcattgcatacttgtgtcaaaatatctcatgtaccccacaaatatatacacctactatgtacccacaaaaactaaaaataaatttttaaaaattccttctgtaaaagtacaaa

SEQ ID NO: 417920 - DNA, 518 bp, Homo sapiens
tcctgtcatttgcaacaacatggatggaactggaggccatcatgttaagtgaattaagccaggcacagaaagacaaactgtacatgttctcacttatctgtgggagctaaaaagtgaaacaattgaattcacagggatagagggcagacggatggttaccagaagctgggaaaggtattggggcaggggtagtggagagcaagtggggattgttaataggtacaaaaaatggttagaaagaatgaataagacctactatttgatagcacaacagggtgactatagtcartaataatttaattgtacatgttaaaataatgaaaagagtacaactggattgtttataacacaaaagataaatgcttgaggtaatggatacctcatttaccctaatgtgattattatgcattgcatacttgtgtcaaaatatctcatgtaccccacaaatatatacacctactatgtacccacaaaaactaaaaataaatttttaaaaattccttctgtaaaagtacaaa

SEQ ID NO: 417921 - DNA, 577 bp, Homo sapiens
gtatggcaaattttctttgaccaatgtcttttaaaaattaaattcgttgctttatttagtactgtgtcccttatggagaagaattgaaaatttaaaatacactcgtgtgtgtgtgtgtgtgtgtgtgtgtgtgtgtgtgtgtgtgaccagttgactcagtcatcctccagtagctacttgtaatatacttatggaagagatttcaaaattgcctaggggaaataataaattcaggtatagattcaagttatgatactcagagaatttctagaaaacaaatatatgtgatattaagtgtawaataaaaattcacatgttcaatttgccttaactcactattagcacttctagcacaaatagatgctagaaatagtctgaaaagggtctttatatcagcattaaattagatgactaacatctcattgggaacagcaggagaaagaaagagaggattctccgggttccctttttggccttttcaaggtaagttctagaagagaagtcccaattcaaatgcccccagaagccacgtgtgtgacataaatgaattaaatgagcctggtaggcatcagagcac

SEQ ID NO: 417922 - DNA, 577 bp, Homo sapiens
gtatggcaaattttctttgaccaatgtcttttaaaaattaaattcgttgctttatttagtactgtgtcccttatggagaagaattgaaaatttaaaatacactcgtgtgtgtgtgtgtgtgtgtgtgtgtgtgtgtgtgtgtgtgaccagttgactcagtcatcctccagtagctacttgtaatatacttatggaagagatttcaaaattgcctaggggaaataataaattcaggtatagattcaagttatgatactcagagaatttctagaaaacaaatatatgtgatattaagtgtaaaataaaaattmacatgttcaatttgccttaactcactattagcacttctagcacaaatagatgctagaaatagtctgaaaagggtctttatatcagcattaaattagatgactaacatctcattgggaacagcaggagaaagaaagagaggattctccgggttccctttttggccttttcaaggtaagttctagaagagaagtcccaattcaaatgcccccagaagccacgtgtgtgacataaatgaattaaatgagcctggtaggcatcagagcac

SEQ ID NO: 417923 - DNA, 610 bp, Homo sapiens
ggaagtccaaaacaaggaattatctcactgatcagtaattttattacctcagaggctttctttgtctgacatggaaatgtttctacccagttagtgaaagtatctattcataataggaggtactgcatgtacctttcctttggcatatgggtgaatccatttgccagttttcccctgggtagcctcctatcctttgggttcctgggagaataagctgtcaattaaggggattgttttcaaggcaggtcttgcaagtattaatgacctgttgaaccatttgtatcaggtttttacctgagaataatytctgggccagttgataggttttatccttacctaggtggaaggcctggtgaaggcttttaagaactttccatgggttggcagctggtggatgaagcttactatcctctgattatagccatcctgaggactgcaggatgtatccctaagaggtggcccattctatttccacaagagaatattgaggttttatttctatcacggggcactcccagatcagtgggacttcaaatgggtcagagacctggggcccacttgctgctgattaaactgcttggtctgccagcctatttccctcaactatttc

SEQ ID NO: 417924 - DNA, 590 bp, Homo sapiens
gtttctttctgagtaactggatttgtcagtttttctttagcctctcagcttcctcagcctttctgggtagttttgcaaagacctgcctactgaagaacaaaagttaacacttccgcctccaagcttcagtctgaagactacagagccttgagacaggagattaaggggtctagagaagggtaagcaggcaatgaatggcaaatatagttcctgaggaaccttagtcacccagtaaatccagacagccacaggcacagcccttgactctcccaacagtgtttttatccccagacaacatttcccatgcagtacttgaaagttccacaaatatctgattcatattaatgggcttggcaattaggaagtggctgattattgaagatcatccccaaaaaatgcctacggaactgctctaggtgaggctgggactgtcacagaagggagcccctgccccaccccttttaacctactgtatctcccccacccccacgtctaacatgactctccccacaggatcaaatacctaaragctgagatgccaagtaaaatacaagtatttccttgatttaaaaagtagtttgaaaaaatct

SEQ ID NO: 417925 - DNA, 549 bp, Homo sapiens
ttgtttgtttgcttgtttgttttgaaacatagccataaggaatgtttttcattgctctctttcctgccctgaatgaggaatagacacttggggtagagaacgaagaacatttctcagttctactggaagttggctgcagcatatcaaatgcatgaataaagcatttggttcttaagatagagttatatcttcactgactcctttacyctctatagagtagcgccaactggtgtttccaaatggcaagttagtagtccttagataggataatgctggtgaaagcatcaactgcagcttaaaccctagcaaaacgtgtgtgtgtgtgtgtgtgtgtgtgtgtgtatgtgtgtgtgtgtgtggagagagagagagagcgagcgagcatatcctgacctgttgccagggtttacaggacagcctagtgtcttgagacagaaatcttacctaaagattctaaaagttagctttaaatcaaagtctatttgtcagaagcaagagtggatgggaaagaataccgcctggcagcttaagagtcctagttgaaaacta

SEQ ID NO: 417926 - DNA, 307 bp, Homo sapiens
gtcatcaggggaaccaaggcttattcagatgcctatttcagaacctaggacagttccattgaaaaggcgcaggcgttcgggctggctgactagatggatcaggcctggctgcctgatggctatattcctccttcctccctctccacttccatctcaacccttgaggctgcatattgaatgtgagtagctcttctggctttgtgtgttgctgcarcagtctgcctactgtggctgttcttgtttctgcttttggtttggtggttcaaggctgcctttgatgattatttcgaacaaagtattccctaaa

SEQ ID NO: 417927 - DNA, 563 bp, Homo sapiens
tgtctctctccttccccctcttaatggtgagtgtccttaccctcctagcattcatgggggcatggggtccatcctgtgcccactgacaggccaatccttactcttagttgatgtcaccaatccctgccaagaatgtaacaatatcaaagatttcagttattcctgtaagggcatacttatgtcaccyaagtggggatatagaggaccgagaagcttttactctttattaaaaagctttctgttggtatggtgaccagtagcaggtaggaaatctcaggccatttcttgctcttgaccccaaacatgttacctagctaatcactgggctctggaggaaggaaggcaacagtgtgtggatgatggagcgaggctaaggtacagagagtattttagatgacagcatttgccagggaaaaggattgagaggacacatccaaggtcatcctgggtttcagaagctcctgcaggaccctgtctgaaaggctctggccttagagctcttgtctagtctcagtaatggctcttagggaagccatgggaaagagtagaaaaaagagatgcta

SEQ ID NO: 417928 - DNA, 605 bp, Homo sapiens
gggaactcctctcctgcttctcttccccctcatgggtgaatctctctcagtctcattttctctacctcaaaacactggggtgccctgggcccagccctcttccttaggtgagctcatcaagcttcctggattgagttaccttccacccactgacctttctaaaatttctatcttcagcctggaccccttgtcagaacaccagattcataccctatatctcacatccaacccatgagaaaatcctattggcacttctaaagatgtatatccactgtttggtgacttctcggcacctctgctgtggcaactgacatttaagatgccatcacaagttgyctggactcccattctctctgcttccacccttgctgcctatagtctaatttccatgtagcaaaccgggtgatacttttaaactatcagatacactgcctcccgaagcttcccttcatactcagggtaaaagacaaatccctatgcatggccctaatgaccagcccaatgtacttctctgaccttgctaccagcagtcttcccctcgtttgcaaggcttatctccacaagcatctctttatatgtcattgaacctgcaaagcatcctcctg

SEQ ID NO: 417929 - DNA, 605 bp, Homo sapiens
gggaactcctctcctgcttctcttccccctcatgggtgaatctctctcagtctcattttctctacctcaaaacactggggtgccctgggcccagccctcttccttaggtgagctcatcaagcttcctggattgagttaccttccacccactgacctttctaaaatttctatcttcagcctggaccccttgtcagaacaccagattcataccctatatctcacatccaacccatgagaaaatcctattggcacttctaaagatgtatatccactgtttggtgacttctcggcacctctgctgtggcaactgacatttaagatgccatcacaagttgcctggactcccattctctctgcttccacccttgctgcctatagtctaatttccatgtagcaaaccgggtgatacttttaaactatcagatacactgcctcccgaagcttcccttcatactcagggtaaaagacaaatccctatgcatggccctaatgaccagcccaatgtacttctctgaccttgctaccagcagtcttcccctcgtttgcaaggcttatctccacaagcatctctttatatgtcaktgaacctgcaaagcatcctcctg

SEQ ID NO: 417930 - DNA, 497 bp, Homo sapiens
tatggtaggtctatttttagtatattaaggaacatccaaactgtcctccataatggttgtattaatttacattatcaccaacagtgtgtgggggtttccttttgactacattctcagcagcaytggtgattgcctgtcttttcaataaaagctattttaattggggtgatatgatatctcgttgtagctttgatttgcattattctgatgttcaatgatgttgagcaccttttcatgtgcctgtttgccatttgtatgtcttcttttgagaaatgtctattcagatcttttgcccatttttaaaattggattattagatttttttcctatagagttgtttgagcttcttatgtattctggttattaattccttgtcagatgggtagtttgcaaatattttctcccattctgtgggttgtctcttcactttgttgattgttttctttgctgtgctaaagtttttttaacttgatgtgatctcatttgtccatttttgc

SEQ ID NO: 417931 - DNA, 468 bp, Homo sapiens
tgattttttaatgtattgttgaatttggtttgctagtattttgttgaggtttttgcatcaatattcatcagagttattggcctgtagttgtttttttttttttttttttttttttttttaaaggggcctttccctggcctgggtatcagaattatactggcctcatagaatgggtttggaagtttgccctcctcctctctttttcagactagtttcagtataattgatattagttcttctttaaatgtttggtaraattcagcagtgaagccattggttcccaggcttttctttacttggagagtttttattatggctttgatcacatcacttgttattggctgtttgggttttaggtttcttgatggttcaatattgacatgttgcatgtgtctagaaatttatccgtttcctctagatttggcatatagttcctcatagtagccactaatgatcttttgaatttct

SEQ ID NO: 417932 - DNA, 468 bp, Homo sapiens
tgattttttaatgtattgttgaatttggtttgctagtattttgttgaggtttttgcatcaatattcatcagagttattggcctgtagttgtttttttttttttttttttttttttttttaaaggggcctttccctggcctgggtatcagaattatactggcctcatagaatgggtttggaagtttgccctcctcctctctttttcagactagtttcagtataattgatattagttcttctttaaatgtttggtagaattcagcagtgaagccattggttcccaggcttttctttacttggagagtttttattatggctttgatcacatcacttgttattggctgtttgggttttaggtttcttgatggttcaatattgacatgttgcatgtgtctaraaatttatccgtttcctctagatttggcatatagttcctcatagtagccactaatgatcttttgaatttct

SEQ ID NO: 417933 - DNA, 555 bp, Homo sapiens
agtggcttacaataatatgcatttacttatcttgcttataagtctttgggctggccagggtggctttgtttctggctgcaacttggtggggcttggttctaggttttggaatctgtgcaccaggctttgaatttcaggcttcacttctacaacatgggtctcatggggcccagactgaaggaacagaggctacctaggatattctcttctyatggtcatcataggagggcaaaaggccaagccaatttgcacaaacatatttaagacttctcttcaagttatatttctttggtcaaagtaagtcacatggcaaagcccaaatcaatggggcagggaagtacttaatgtacctcaaggagaagagaggctaagtgagtattttctgggcaataatccaaactttcacaattggtgtgatttttctgaaatgcatctgcaaatgtcattaaccttaaaacctttacatggctccctgcttgtgtaaaagtcacactttttactaaatagggttcttcacaatctcctcacatttctatccttcttctgctgtgttcc

SEQ ID NO: 417934 - DNA, 555 bp, Homo sapiens
agtggcttacaataatatgcatttacttatcttgcttataagtctttgggctggccagggtggctttgtttctggctgcaacttggtggggcttggttctaggttttggaatctgtgcaccaggctttgaatttcaggcttcacttctacaacatgggtctcatggggcccagactgaaggaacagaggctacctaggatattctcttcttatggtcatcataggagggcaaaaggccaagccaatttgcacaaacatatttaagacttctcttcaagttatatttctttggtcaaagtaagtcacatggcaaagcccaaatcaatggggcagggaagtacttaatgtacctcaaggagaagagaggctaagtgagtattttctgggcaataatccaaactttcacaattggtgtgatttttctgaaatgcatctgcaaatgtcattaaccttaaaacctttacatggctccctgcttgtgtaaargtcacactttttactaaatagggttcttcacaatctcctcacatttctatccttcttctgctgtgttcc

SEQ ID NO: 417935 - DNA, 469 bp, Homo sapiens
tgttcattcctgtttttatcttcctgttttcatcttcgtgacattctctttgtctggaatggtctttctttctgaattcccacacatccattagggctcctatattagttcgttctcatgctgctatgaaaaaatacctgagactgggtaatttatattaaaaaacaggtttaattgactcacagttccacatggctggggaggcctcagaaaacttataatcatggcagaagggggaagcaaacacatccttcttcacaaggcagcaggagagagaagtgccaagtaaagggggaaaaacccttataagaccatcagatctcatgagaactcattcactatcacaagagcagcataggggtaactgctcccatgattcaattacctcccactgggtccctcccaccacaggtggrgattatgagaattataattcaagatgagagttggatggggacacagccaaacc

SEQ ID NO: 417936 - DNA, 590 bp, Homo sapiens
ttgaggctgcaatgaactatgattgtaccactgcactccagcctggtcaacagagcaagaccctgtctcttaaagaaattagtgaattaaaattaaaattaaaaaattctggatgctggacatgtgggcatgattkctcgtgcctgtaatcccagcactttgggagactgaggcaggaggcttatttgagcccaggagctcaagaccagcctgggcaacatagtgagatcccatctctacaaaaaatataaaaattagccaggggtggtgtgcacctgtagtcccagctatttgggaggctgaggtgggaggatcactgaagcccaagaggttgaggctgtggtgaactgtgattgcaccactgtactccagcatgggcaacagagcaaaattctgtctcaaaaaaaaattctgagattggacagatacatgctggctgttctgcctattttttatcttttaaaaattattttcaaacaataaaagttatagaagaaaaacactcttaaacctattatataataatgattgatataactactaccatttatagacagcattatatttgagtattttctagtcatttgcat

SEQ ID NO: 417937 - DNA, 546 bp, Homo sapiens
aagcccctaattagttgacattaatttaatcaaacgggatattggctgagtgagcatgacctaaagaggtgatccctttaaaacagagtttatgcaaaaagaaaaaaagtaatggagacacagactttacacccttcaaaaaaattaactcgaaatggatcacagacgtaaatgtaaaatgcaaaactataaaacccctggaagataacatrggagaaaatctagataactttgggcttaacaatgacttcttagatacaacactaaaggcatgatccatgaaagaaagaactgataagctggacttcattaaaattaaaaatatctgctctgcaaaagacactgtcaacagaatgaaaagatatgccactgactggtagaaaatatttgcaagagatacatctgataaaggactgctatccgaaatataccaaaaactcaataattaaataagtaacccaatttttaaaatgggccaaagaaattcacagacacttcaacaaagaagatatacagatggcaaataagcatatgaaaagatattcc

SEQ ID NO: 417938 - DNA, 493 bp, Homo sapiens
tcaaaactatgcagatagtaaaaagatcagtggttctcaggagttggggggaaataagagatgaatacgtagaacacagaggatttttagggcagtgaaacttctctttatgatactatattggtagacacatgttattacacacttgtcttaacccataaaatgtacaacaccgagaatgaaccctaatataaaacataggctttgggtgataatgatgtagcaatgtaggttcatgaattgtaacaaatgtaccactctagtgtgagatgctgataatggcgaaggctatgcatgtgtggggctagggagtatatggagaaatctctataacttcctcccagtcttgctgtgaacctaagaatgctctaaaaaataaagtctattcaaacaaacaaacaatccccacacattaacaacaacaaaagaatgcytagagattagagagattctcctgctggttttgaagaagcagctggccaccaacaagaaa

SEQ ID NO: 417939 - DNA, 599 bp, Homo sapiens
tatattgggtagcaatatgaaataatatgatcttcttctcatagaaccaattatctccttttcagagacttttcacatttctcggttaaattaatttatatctcccttattttattgcaaaatccatgatgcaggaacaatgttaagtttttatctccatccctagtacttaaaaaaggacctcagtgatacataaaaatgtattaaataagtaaacaaataaattgataaggaaaagaagacaggaggataaaacaaccttaacattccctaaggattctgtctaaagacctcttatttctctctcaaggcaagagatgatggtggcttggcctagtgtatgccaacggagatagaagctacaggactagcaaatgggttgctgtggaggataagaaagaggcatgagtcaagaaagactttataatctgaatakccaagtgaattgtttattgatatgtagacactgagagatgaataggacttgtattagttatattagttatctaatactatgtaacaaattacccccaaaatgagcagcttaaaataacaaacatttattatgtcattatttccgtgggtcaggtgccccagtg

SEQ ID NO: 417940 - DNA, 450 bp, Homo sapiens
tgggtgtcctataaacaatagaaatttatttctcaaagttctggaggctgaaaagtatacgatcaaggcattggcagatgggagtctggtgagtgtcttctttctgcttcctagttagccatcttttcactgtaacctcatatggtagaagggatgagggagctttctgggttctcttttgtaagggcactaatcccatacatgagggctccaacaatatgacatagtcacctgacaaaggacacaattcttaattccataaccttgagagttaggaattcaayatctgaatttcaggacaacacaaacattcagtccatagcatagtgcagacagggataaaaaaacaagatgagatttgaactgatggtttcaagtcacatcgatagtggcagcaagactgagtgtggtagggggaaagagggaggattgggggacgtgagacagagt

SEQ ID NO: 417941 - DNA, 606 bp, Homo sapiens
tcaacctctcaatatttctgtaactctttatgccaggcttcttatcctttcctttctcagtcacacttctaacaagatgaatggcaaaatatgggaatctcaagatttttgattcaaacaatcgtttaaattgtatatctgtaatttatatgtcaatttaatgtatttgtctcctcctctctattgttgtcgctaataaatgagagttgccaataaaaaagagaattagagtttagagatayaaagtgattagagacaggcactgattacctatcaaaaggcaggtctttagggaaatacataagacaagggagaaagatggctttggggactgaacattactaaagtggactaaaaattaaatgacaatgattagtgaaagaaaatattttttctaactcccagggaaacaaagatttctttggaaaatttgagtcgcaggtgagaacagggaaaatattcattaattcatttgtcacatatttggtgtgctctggttatgtgctaggcagtgtaataagcactgagaatactatggtgagcaatataggcatggagcttcatggaacttatcatctagaaacaggcagcaattactatatgtct

SEQ ID NO: 417942 - DNA, 670 bp, Homo sapiens
tttggtgtgctctggttatgtgctaggcagtgtaataagcactgagaatactatggtgagcaatataggcatggagcttcatggaacttatcatctagaaacaggcagcaattactatatgtctacactagatctctaaaacaaattgtcccatcaattacttggtggaaagagtatcgcatcatagtatgagtagtagaaaaaggcaatattttctgtaattartgacataaggaacactgtgggaaaaaatgaacttgcacatgtgtcacatccataatattggaaggggctttaaatttgcctgtaataatttattcattttataaataagatttgttaaaaatgatttaaaggattaagaaaagtctgtaaaatattacttttatctgtaaataaactgtcaaattgatgaccatgtatatttatatttagttgaatggattcctcaaccatgttttagcacaacaatactgataaacattggtggaggttaatgggggtaattgcccacttcagctatggctgctgacagataagtccctagtaaagaaataattgcagtcaagagcataatcgccctgtcccagggacctctaaagtattaatcaaaaaaaattttaagtaatttttaataattatctttactgtctggaaagtagtgatcatc

SEQ ID NO: 417943 - DNA, 607 bp, Homo sapiens
aaaaatgaacttgcacatgtgtcacatccataatattggaaggggctttaaatttgcctgtaataatttattcattttataaataagatttgttaaaaatgatttaaaggattaagaaaagtctgtaaaatattacttttatctgtaaataaactgtcaaattgatgaccatgtatatttatatttagttgaatggattcctcaaccatgttttagcacaacaatactgataaacattggtggaggttaatgggggtaattgcccacttcagctatggctgctgacagataagtccctagtaaagaaataattgcagtcaagagcataatcgccctgtcccagggacctctaaagtattaatcaaaaaaaattttaagtaatttttaataattatctttactgtctggaaagtagtgatcatcatctatttgaagagatattttacttttaatctcgaaacatgtaacactatgtgtgccaggctcactttmttttattttacaaatagtagcccctttatttcacacaaaatttcctgttatcttagtccattcaggctgttataacaaaatatcacagactgggtaactattaagtgacagaaat

SEQ ID NO: 417944 - DNA, 608 bp, Homo sapiens
aaattttaagtaatttttaataattatctttactgtctggaaagtagtgatcatcatctatttgaagagatattttacttttaatctcgaaacatgtaacactatgtgtgccaggctcactttcttttattttacaaatagtagcccctttatttcacacaaaatttcctgttatcttagtccattcaggctgttataacaaaatatcacagactgggtaactattaagtgacagaaatgtgtttctcacagttgtggaggctggaatccaagattaaggcactgacagactccgtgtcaggggagggccgattttctggcttataggctataattttctcactgtaacctcacatcatacaagtgacaagggagctctggggttcttttcataaaagcactaattaccttcaaaggycctaccttctgacaccgtcaccttgaggtttagaatttcagcatatgaaatttggggggacacaaacattcagtgtatagctcccagcgtttgtcttttatgttcttaaaaattgattagacatactactataccaggcatgaaggaaattgaaaatctttatttagggatatgaaccaacctagccatt

SEQ ID NO: 417945 - DNA, 597 bp, Homo sapiens
ttctgcctgtggctctctagtggaccacatgtyagggaatgctttctaatttttaggttggtgaaaaagcaatcacagtttttgccataaagtaatggagtttttcactgcccatgaagtaatggcaaaaagtgcgattactttttcatcagccaaatattaattctgtgtacccttttcccacaaaatacgtattaatacttagccatgtatttggtgtcagggaaagttgctaccaaaggcaaacagtttttttcccccaccttattattttgacataatgtaatcgttcttatgaatagaattattgggtccaaaaaataagtagatagatctaagcttaaaacatttaattttgaaaaataaatctcataatgacatttgtcctagggatttctaaaaaataataacccaggcacattaaaattttaaagattttatttaagcaaacaggaattcatgaatcgggaagcgccaaaatgcaagttgttcagggctccaccaaaagtccaaggggggaaacttttacaaggtataaagacagacacctagatagacagatagaagcaagacaacgaaaatgattggttagagaga

SEQ ID NO: 417946 - DNA, 526 bp, Homo sapiens
caaatattttttaaagggattataaaatctgtggtagctttcagtttatgtgactttaatctttgagaaataaaaacagccttaaagattattggtaaaatgcaagtcagatgcaaggttttctaagtgttttaaggttccaaactgctttatgggttttctraactatttcacttgctggctttagagttggtaaggcctagggacatatggaactaaccagaatcttaactaagaaggcaaaccttggctgcagttaatgcacaattaaagcaacttaccaagttttaccttaaagtcaacaattggtagaagttactattataacatgtaattgaaactactgaaaataaatttaaatgcaaaaggtataaaaacaataaaatgtgtttttatgtagaaggttataagaaggcatggaaatgtaaacttttgcccagggttcaaaggattgtattcagttagatagggaaagctaaaggttcaaacaagtggtggaaaagctgtggaaattaatcttgcagaa

SEQ ID NO: 417947 - DNA, 615 bp, Homo sapiens
atttgcatatttttctagcctgtctcaaagggccccacctagtgactgggttttcttctgcctgtccatctgtgtactgtatgtaatgtctgtcaaaagagttctaattaattttgcctaaagaaagacaagttcttggatcaaatattttttaaagggattataaaatctgtggtagctttcagtttatgtgactttaatctttgagaaataaaaacagccttaaagattattggtaaaatgcaagtcagatgcaaggttttctaagtgttttaaggttccaaactgctttatgggttttctgaactatttcacttgctggctttagagttggtaaggcctagggacatatggaactaaccagaatcttaactaagaaggcaaaccttggctgcagttaatgcacaattaaagcaacttaccaagttttaccttaaagtcaacaattggtagaagttactattataacatgtaattgaaactactgaaaataaatttaaatgyaaaaggtataaaaacaataaaatgtgtttttatgtagaaggttataagaaggcatggaaatgtaaacttttgcccagggttcaaaggattgtattcagttagatagggaaa

SEQ ID NO: 417948 - DNA, 496 bp, Homo sapiens
accttgctttactcaccctttaaaccatctttgagcctaaattttcatgtctataggatagacaagaaccctgtctttagctaaactaaggaaaactcctgcaacaatatttactcataacattacaactgtcctacgtacaactggaaatatatcagttcccaacccaaatactattacatagagttaacaatacttaaatgctgatgtgaagtcaataaatcttaygtcacatggtaaaggaaaaggaaataaaatgaagatattttcttagtacacgtgtatatatgtaaaaacatgtatacgtgggtcagaaagcacccagttcatgataggcagtttgggttgcatagtaacttgatgacccatagtcaaacgttcagtttctaccaaagcccagttttgtcatcgatgaaatggaccagtgtgatatcttgcataagcaaaaagcaatcaagttctctccaaataagattatgacacaaagctggaaagt

SEQ ID NO: 417949 - DNA, 496 bp, Homo sapiens
accttgctttactcaccctttaaaccatctttgagcctaaattttcatgtctataggatagacaagaaccctgtctttagctaaactaaggaaaactcctgcaacaatatttactcataacattacaactgtcctacgtacaactggaaatatatcagttcccaacccaaatactattacatagagttaacaatacttaaatgctgatgtgaagtcaataaatcttacgtcacatggtaaaggaaaaggaaataaaatgaagatattttcttagtacacgtgtatatatgtaaaaacatgtatacrtgggtcagaaagcacccagttcatgataggcagtttgggttgcatagtaacttgatgacccatagtcaaacgttcagtttctaccaaagcccagttttgtcatcgatgaaatggaccagtgtgatatcttgcataagcaaaaagcaatcaagttctctccaaataagattatgacacaaagctggaaagt

SEQ ID NO: 417950 - DNA, 496 bp, Homo sapiens
accttgctttactcaccctttaaaccatctttgagcctaaattttcatgtctataggatagacaagaaccctgtctttagctaaactaaggaaaactcctgcaacaatatttactcataacattacaactgtcctacgtacaactggaaatatatcagttcccaacccaaatactattacatagagttaacaatacttaaatgctgatgtgaagtcaataaatcttacgtcacatggtaaaggaaaaggaaataaaatgaagatattttcttagtacacgtgtatatatgtaaaaacatgtatacgtgggtcagaaagcacccagttcatgataggcagtttgggttgcatagtaacttgatgasccatagtcaaacgttcagtttctaccaaagcccagttttgtcatcgatgaaatggaccagtgtgatatcttgcataagcaaaaagcaatcaagttctctccaaataagattatgacacaaagctggaaagt

SEQ ID NO: 417951 - DNA, 482 bp, Homo sapiens
cattatgaaccttcaaaaacatgcccagcaaggagtcatgatggctgtgcatacccasgaacagggttgattagaaacaactgtttcatttacacaacactgggtcatatgacaaataaataacagcaacctgcctatttttaaaattttgacatcttgcttctcatgaatttttttaatttttgattttttaaattcattgccttaactattatttagcctgattactgagtttttggcaccacttttaaaaaaataactcatttattttgaaatgattttcattgtatatatttatggggtacaacatgactttttcatatatgtatacataatggaacaattaatcaaagtaaataacatatcttcacctcataaacatcttttctgtggttagaacatttaaaatctactttcttagcacttttcaagtatgtagcacattattattaactatagtcactctgctgtataacaaaata

SEQ ID NO: 417952 - DNA, 554 bp, Homo sapiens
catctttaattcaatcttttcatggaacttccagagaagaagccatggatagctttcctcttttcattggaagagaaaaagtgatgtatctgattattttatgtatgagaggccaagacagacataggtatggatcgcagtaacagctctcttacggggtaaagctctcttatgaggtgaagctggactggataagaaaagaaaacgatgaacattcccctcccctcacaaaatgcacacacattaaccttcagcagactagttgctttcttagaaattttgtagatagaaatttatgtcatccattaactatgataaatgttctctagcacatagtctctgctaattaaataattatctgccaatgttttgttagtattctgagctataaaacatgagargtggtatatatttcattttatgttggtgaatgatggaatagtgggaggatatctggaataatatttaagaattgcaagtaatttgtccctaaatagaaattttcacatgcacagagggttagttattactgctcttctgaaaagtgactgaaa

SEQ ID NO: 417953 - DNA, 579 bp, Homo sapiens
agccattctgttctgtcaattaacaacgatatgactttggttgactttgctaaatattttgaacttaattttcttatccataaaatggaatgatgatgatgataataataataataataataataataataatattgctagcaccttctatgggaagttggtacaattaaataaaatttttaagcaaagaggtttgcaaatttttagcattacaaaaaatgtacatagtataattygtaagaatgaagaacaatgactgaagccttatatttggcaccatctgttcttagaaatccataggatgagccacacagaataagagctgagtatattgactgacctataggattatgcaaagtcaaaattcagttcttcatatacagaaaaggtgagttagatatttgaatggtgaacatgtaagcacaaagtaagtttgaaaataagttgaaaattagaaaattctgcaatatgtacccccaaattaaaattatatatatatatgtattatatgtgttgtgtatacatataagaaaattccacgcagaaaaagcaacagatgagatgtcaaaaataaataat

SEQ ID NO: 417954 - DNA, 559 bp, Homo sapiens
tatgcaaagtcaaaattcagttcttcatatacagaaaaggtgagttagatatttgaatggtgaacatgtaagcacaaagtaagtttgaaaataagttgaaaattagaaaattctgcaatatgtacccccaaattaaaattatatatatatatgtattatatgtgttgtgtatacatataagaaaattccacgcagaaaaagcaacagatgagatgtcaaaaataaataatataatggtgactgttataattctaacagtgtccaaaattcaggaagtttgtttcaacagaagtggaacaaataatcactaaaaaatgaagagctatgcaatgtagcagtcaagttaygtagatgggaagctggcattcacaggaatttaagtaaaaattcaatctagtcatgctgctattaggcgtgttcttaattttgttgggtttttttaatatagtacagtggtcaaaaacagttatgactaaaaggtaaataatataacaaaaatctcttgttggacaaaccacaagacggatttaatatttggtcctgtgacagtgaccaaagg

SEQ ID NO: 417955 - DNA, 536 bp, Homo sapiens
cataaaagtgaaaggagacagaagagggctcagggccatatatatttaaatgtgctatactgctagatttgaagatggaggaaaggctttgaaccaagaaatgctggtggcctccagaagctaaaaaaggcaaagaaaagattctctgctggacttcctagaaggaatgcaactctaatgacaccctgacctttacccagcaagactgagtttgacttctgacctgtagaacaatgatataataatgtgtattgttttaagccactaagtttgtgaaaatttattacagcaacaaaagaaaactaatacacaagcctgtacttatatgtctgtcagcaattttctgcctcgggatcctcatcttcmttaataacttgctgcagtttttaattcacatcagtgaccaagattgttagcaaatccacttgagttggtgtactgcacagtagttacagttttccattactcagaggaaatagaaaaaaaaaagttctcctgaaagggagcactagaaaagccagcattagaaattatta

SEQ ID NO: 417956 - DNA, 590 bp, Homo sapiens
gtaattgctaaatgtaaatagaaacctaacagtcaaaaccagtaagttgttaaagtattgcatatttcaaagagagagagagagagagagagagacagagagagagagagagaagggagtgagatgatgtaagacagaacagagagatgaaaggaaggaagggaggaagggagggagggagaaaggaaggaaggaatgaatgaaggaaggaaggagaaggggaaggggaggcaagggaagtgaagggaagggaaggagggaggaagggaagggaaagaaggagctatcatgtatttgaagcagaaattctaagtattttggtttagaacatctcatacagaacacccaaagaagtacaaaagaataaatcagagtaactttcactgcaatataaagagagctatctttagaacaatagcaaaattactaataaaaattattatcttgaagggataaaattgctattgacttggaattcttaargttagaggaagtaacttcaataaaccgtgtcttgaattgctgttggcaactctgaaagtaatcttatatatcttacaatgcctggacaaggaaatacatttatttca

SEQ ID NO: 417957 - DNA, 465 bp, Homo sapiens
tgtggggttgatcaaacaatctgcaaaaagatgacagtatttttctcctttcttgtccrtatacctaatttttttcctttcctataaattttgttaaaacacttaataaaatgttgaagagtaatggtgttgaggtacatgtctggtcatattaatcttaaacagaacataaatatttctttctacatttcctgttgttaggtgtttggtactatggcttttgatatgctatggaagctcccctctatctgtagcttcctaaagtatttttttcttttgtagtcttaactagatattaattttatcacttatttttctaattctattgaaatagttcattgttttccttccattaatacagtaaatcgatacattttctgttgtggaacaatcacttgcatttctggaataaattctaattgatcataataaactattctaaatagtttttttatttttgcatgc

SEQ ID NO: 417958 - DNA, 618 bp, Homo sapiens
agcttagacatgtgtgtaagatcagaagggatgttgcatgcatcactcagtaattgttcagtattttaaaactttgatgggtatactgatgtgaagctggagaagattaggaataggatgaggctcagrtaaataataattttcagggatggttttgtatgtataactggtaaaataatattttgacatgactgatttcatgaggctgagacaaaattgctacatttaaatgccataattctaatgaagcaaatcttaaatattaacgtgactcatttgtttattgcctactgtaagctaagcactacaatatgcttctgcttctcagacaggaaagtgttttcatatacattgccctgtctgattcttcaatttcatggcttactgaaggacccaggtcttctgattccacaatcttaacactttctaccagacactagctgttattccctgagcagagttaaccctgaatataattaatgatataagttaaacatctgcctctttatttccagtgccctcattctgattctcagctgtgcagggatcccctctgaataaaacttccatggaaatgccatgtccacaaactttgacattcatggcctcatgaatcct

SEQ ID NO: 417959 - DNA, 553 bp, Homo sapiens
ctggttagttaaactagtataactagtttattgagtcctcaataagtaaaattgattcctccatcattttcctagtctaacaaactaggaaactactttgttaaactaagaaaaaagattgaggacttaataactacttgttaatgaataaarcagtagaaaattgttgtgccatatatataggtacataggaatcatataattttgaaataattccatatcaacgaaaatagaaaaatgtttatgaaaacgccttaaagtacataatgttttatataaataaaggcattattaattttttctagttgctgacactttgtatagtttctaattatgatttttaatagtccaaggctgtgtaggactgactttttaatcatctgaataatttatatttgaaaatatttggatatataagtgtgatggttaatactgagtgtcaacttgattggactgaaggatgcacagtattgatcctggctgtgtctctgagggtgttgccaaaggagattaatatttgagtcagtgtgctaggaaaggcagaccccccctt

SEQ ID NO: 417960 - DNA, 433 bp, Homo sapiens
cactggcagctcaaaaagccagtgtcttcttacctacaaatgaccacactaagtatccagcaatggttcttaaccaggctgaaatggttgaaaagatagacatagatagaatagaatatccagaatattctattctggatagaattttgatgatcttcttcaagattcaggaaaaagttgaaacccaaactaaggartctaaggaatccagtaaaataatacaaaagttggaaaacaaaaaagccactttaagaaagaaccaaactgatatgatagagctgaaaacttactttgagaattttctagtacaattggaactattaatagcagaataggtcaaaatgaagaaagaatatcagaacttgaagactggttcttcgaaacaactcagtcagactaaaatgaaaaaagacaacatcctcaaatacgtttt

SEQ ID NO: 417961 - DNA, 510 bp, Homo sapiens
agacaattggttaatatatttctaagatgtaataatataatttcaaatggcagaagtatataacattaagtgttttctcttgtccagaagtgagagacagatcttctttatcctattcaatatgctctattcgatgagatctaatttttagttcaaatgaaaatcctacctcatcacactgagaaagcttttgctaagatcctggtaacctgtggttctgtgttaggagggacagaaaaagatgctataaattctcataacctaaaaagtaggataagggagctttaaagattgtttgacataatgaaacgtttaaattataacaaccaaaccatactcaaaaatataatgtgtctaatatgtgattttgagcaatgacatatttaatatgtactattataggataaaggtgagtatatagtgtgaaaagaagagaatgaaacyaaattaagatctattgtcctcacacgatataactagcaattctattgattactagtccacagtatt

SEQ ID NO: 417962 - DNA, 606 bp, Homo sapiens
ttttcgtcatttccaggaacagaaaactaagctacctaatagaacacttatttgctttttcggtgtgtgkcaaccagttaacactgtttgctcttattaatttaatttttaactgacaaactcttgttaagcaatcctttttattaagttcttaggtgtatgtttaaaaagtattttatttaagttcttaggctaatgtctcaggcttaatatgaattctttatgcatattatcacttcaaattttcaaaacaattttatacaattgattcctattttactgataagaaaccaacacattgtacgtaataaaattatttaccttttctttttcccatataatctttctatctggtaaatgtataaaagcatttcttttaatctttttcctttccaaatcctaattaccctttaggactcagagttcaaatctctgcaatcttgcaaaatcatgttatgctacattaatccttcccttgtttgaactcctagagacctataatctataccagatagttcagcactgagtaacaaactattctacattttctaattgctttacatatactgatctagtttttccaacaacataactaacattttactt

SEQ ID NO: 417963 - DNA, 606 bp, Homo sapiens
ttttcgtcatttccaggaacagaaaactaagctacctaatagaacacttatttgctttttcggtgtgtggcaaccagttaacactgtttgctcttattaatttaatttttaactgacaaactcttgttaagcaatcctttttattaagttcttaggtgtatgtttaaaaagtattttatttaagttcttaggctaatgtctcaggcytaatatgaattctttatgcatattatcacttcaaattttcaaaacaattttatacaattgattcctattttactgataagaaaccaacacattgtacgtaataaaattatttaccttttctttttcccatataatctttctatctggtaaatgtataaaagcatttcttttaatctttttcctttccaaatcctaattaccctttaggactcagagttcaaatctctgcaatcttgcaaaatcatgttatgctacattaatccttcccttgtttgaactcctagagacctataatctataccagatagttcagcactgagtaacaaactattctacattttctaattgctttacatatactgatctagtttttccaacaacataactaacattttactt

SEQ ID NO: 417964 - DNA, 533 bp, Homo sapiens
gagtattaactaaaccgactgttaccatatgatccagaaattgtgctccttgttatttacccaaataagttgaaattttatttccacacagaaacctgaacacagatgtttatagcagtaagatgtctgtgatagctaattttatgtgtcaacttgtcaacttgcctggatgcccagatatctggttaaataatattgctaggtaagtctctgagggtgtttccagaagacagtagcatttgaattaatagactaaacaaagtaagttgccttctccaatgtgagcgagtatcatccaattttttgtgggcctaaaaagacaaaagtgatgaaagaaatgagaattcactctctcttcttgactttttgatctggaacattgatcttctgtggcctttaactgggtcttatataatcagcactcytggctctcaagactttagactcagaaactcagactaaaactagtctactggcttttctgggtctctggcatacaaacatgacatttctcagccttttataaccatgtg

SEQ ID NO: 417965 - DNA, 507 bp, Homo sapiens
ggttttcgctgacaggcccagcaacacacccataccatctacctcaggagtatatcatactctccagccctatgtcataatttactttgcagaaatcttgatcaccttttccttccctaaaatatcacgygtcaattacatcaatagcattatgctgattggacttagtgagcaagaagtaacaaccactccagacttactggaaagagagtttcatgtcagaaagtagtaaacaaatctgacaaaaattcagagcattctacctaagtgaaatttctagaggtccagtggcatatggcgtgccaagatatcttttctaaggtgaggaataagttgttgcctctggcctctcctacaatcccaaacaaggcaaaatatataatgggtctctttggattttgaaggcaatatgtaattcattgggatgtgttactgctgcccatttacttagtgacctgaaaaactgctacttttgagtgggacacagaaagacaaggctttgcaaca

SEQ ID NO: 417966 - DNA, 468 bp, Homo sapiens
gtttaaggagctgcttttgaagtgccaagagtgccaagttgacaaggaatggatttgtgatggttaattttatgcatcaagttgactagggcagacatctagttaaacaatatttctgagtgtgtctctgagagtgtttctggaagaaattagaatttgaatcaatggactgagtaaagcagattgcctttcttaatgtgggtgggcaagatccaatctgagtgcctgaatggaacaaaaaagtagaggaggaaagattccactctctctgcctggctgtttgatctggcatgtcagtcttcttttcttggactgagacttacataagtactacttcctctcaggcctttggatttgaatgggaatttacaccatcagttctgattctcagrccttcaaattcagactgaaattataccacttgttgtcccgggtccctagcttgtggatagcaaattatgattatgg

SEQ ID NO: 417967 - DNA, 606 bp, Homo sapiens
ctttcattaattcttccacccctttatctatcctgccatactcagtagtaacaatcgtgcaaggagcaagaaatacaaaaagtgaatatgatgccagtctagtccttgaagatttctcagttcagtgaaggaaaaaatacaaataaaatctcttcccctccatttctttcctttttactttcttttgctgaatgttattcaatgtaacctcatatttacccatttaagctctactcagtgagccagaaacaaaagaaaacattctttatatccaaagagcttagaattaagttcagataaagcgcaccaagtctttgctaatgcaacccaagtgtttgcctctggataattctgagtcctcaaagccactgggtcacccattcatttgatacttgaagtaaattgctaacaaactgagttcctcttccttccatgggaaactctgtaccttctcagtatctccaagaattttcatgggtgctacatttccccttattacctggcattcttattttyatgactcttctgtgtttcttatacctataacatatcccgcctcccatggttaacttctctcctctttttgtcctctgctggcccaatacc

SEQ ID NO: 417968 - DNA, 560 bp, Homo sapiens
ttctgctactggacctgtgaaggaatttctcatttgctgaacatcacattttcagctcttcctccttctccttagagagcttttccttttcccctcttcagaattcaacctcagtttccaaatttctattatgttattgtcaagcatacttttgttctgtcttagaatcctaagattattatcctaagattagaatccagattatgacaagcgtttttagctttcacaaataaaaacattgcctctctggctgktttttttttttttaattggagacagagtctctctctgttgcccaggctcgagtgtagtggcacaatcttggctcactgcaaccttttcctcctgggttcaagtgattctcctgcctcagtacttgggaaagtagctgggattacaggcatgtgccaccatgtccagctaatttttgtatttttagtagagacggggtttcaccatgttggccaggatggtcttgaactcctgacctcaagcgacccatccacctcagcctcccaaagtgctgggattacaggcgagagtcaccgcgcctggcctct

SEQ ID NO: 417969 - DNA, 499 bp, Homo sapiens
tggaacattaaagaaagttgtggtagataaggctgaaaaaaatcagagcaaggttggaagtttgtctaacaakattgtccagcaatgtctcctttgtctattctgactttggttacttgaaacttctctcacgtttgtactactcacttatgccagaaatttctcattttaattacaaatttcaggaaatttatttttaaacattttattatatattttttattttattaatatttatttctatgatattctgactttaacattcttccaaatttactgggccagttttcttagactgacatttagtacactaatttcagattacattacaaaacatttacattaattttgtcaaaaaattataaaattgaaatgagataggtgacatagaaatacacacggtatatacaaaactgacacaaatagaaataaaaagccttaataattctagaaccatttaaggatttgattatgtataaccaaacaaataaacaaaaca

SEQ ID NO: 417970 - DNA, 473 bp, Homo sapiens
aacacaataacaaattgtccatttgaacaatactgaactatttgtcatttctaagatgggacaattttttttcctcttggtttctttataattattgtaccccttttctggaataatcttttcatcttgttcatctgtcaatgcctgcttgtcttctcagatttcaactcaggtatattatcttctcctgagttatttttttaactgctgtaaaggcgtatttctgtgccccatatctaygcttcctaggataaagcacgttcctctaatagtgtacaacatttggcaattgcctgtttgtctcttctctctgctagacgttgtgctacttgagaatatagctttcccttttattaatttatttcgtttacatccttctgtcacaggattctaccagcctggatcctatgcctgccaagggcaagtggagctggaagggatgtgtgagcaagcaagcatcaggtccggccact

SEQ ID NO: 417971 - DNA, 567 bp, Homo sapiens
atttcctgtacctggggcttaagacctggctgcctttgtgtakaaaacagatcatagcagggtctgaaaattgaaagaggacttttccatttcctacacatggttcaaatagttctgatacatgcatgttttgtattttataaaatgcacaggacataatgttagccaaattctgcacaaattttatgagttaaatgttaaataaacaattatttctaaagatgaaagaaaaggataatattttacctgttttttaatttttaaactaatttactttatatttaaaaactgttcattttctatctaggactttctttgcaaagagattataaatgttatgtagaagccctcatctcgaaggcttaacagtgagaaaactgtccctgacttgcctacttattccatggaatgataaaattttgccaaaatagcttagaaaagtgattttgaaagggacactcagagaggatattttaaatagagtaggtcacacttgagagttgaattgcaaaaggaaactgtactgattttataagaatctattaaaactatgcaaaattttacaaa

SEQ ID NO: 417972 - DNA, 567 bp, Homo sapiens
atttcctgtacctggggcttaagacctggctgcctttgtgtagaaaacagatcatagcagggtctgaaaattgaaagaggacttttccatttcctacacatggttcaaatagttctgatacatgcatgttttgtattttataaaatgcacaggacataatgttagccaaattctgcacaaattytatgagttaaatgttaaataaacaattatttctaaagatgaaagaaaaggataatattttacctgttttttaatttttaaactaatttactttatatttaaaaactgttcattttctatctaggactttctttgcaaagagattataaatgttatgtagaagccctcatctcgaaggcttaacagtgagaaaactgtccctgacttgcctacttattccatggaatgataaaattttgccaaaatagcttagaaaagtgattttgaaagggacactcagagaggatattttaaatagagtaggtcacacttgagagttgaattgcaaaaggaaactgtactgattttataagaatctattaaaactatgcaaaattttacaaa

SEQ ID NO: 417973 - DNA, 578 bp, Homo sapiens
aaggacgtcaatgaccatttgtttcctctgaagtcgttggttggtcatgaactttctagttcagatagttaccatgtcattcatgatggcggtctatcctcagacagccagggaggctattctaagagctttaaataygtttttttcattcagtcttctcaacaaccctatgaaatcgttactgttatggctctaattttgctgacgaagaaaacaaagctcagaaaagttaagtgttttgtactgactcaaacggctagtaagtagggaagccagtattccaaccaggcagtttgttgccacaggactagctgttaaccgtaacactgcatgaacatggaatgaacttcctctctagacagcaaatccttcgagatgagaggcagccactatggtacaagaacttgagcttcacttgggatactggcaagttaccccatcatgtccccctggtgatgctgaattcatattccactgtattaagctacttggtatcaacatgattttctagttttgaacagctatagttatatttttcatttttgtcaggaagttagtgtgccatttaagaagcagaa

SEQ ID NO: 417974 - DNA, 578 bp, Homo sapiens
aaggacgtcaatgaccatttgtttcctctgaagtcgttggttggtcatgaactttctagttcagatagttaccatgtcattcatgatggcggtctatcctcagacagccagggaggctattctaagagctttaaatacgtttttttcattcagtcttctcaacaaccctatgaaatygttactgttatggctctaattttgctgacgaagaaaacaaagctcagaaaagttaagtgttttgtactgactcaaacggctagtaagtagggaagccagtattccaaccaggcagtttgttgccacaggactagctgttaaccgtaacactgcatgaacatggaatgaacttcctctctagacagcaaatccttcgagatgagaggcagccactatggtacaagaacttgagcttcacttgggatactggcaagttaccccatcatgtccccctggtgatgctgaattcatattccactgtattaagctacttggtatcaacatgattttctagttttgaacagctatagttatatttttcatttttgtcaggaagttagtgtgccatttaagaagcagaa

SEQ ID NO: 417975 - DNA, 540 bp, Homo sapiens
aacattgtccaaatgataggtcaaagaaaatacatgtacaggttagaacaattcaagtaaattcttcattagtacttaagggaaacaaaatcagctggaaggctccccaacccctcactaccatgcactcacacacgcacgcacagccagcgttagtctctactcatttcagattgcatttagaacaaaaaaagttcaattaatcaaattttcctaagaaaagcatctacgagcatggccacagatgaagggtgaggaaatgcaggtgtgcaaactctgaaacccacagctgggctttcacatcctgaaataaatctgtttccaagaacagagatttctgttgcccacrtttgaatcttgaatcgtgtaaaactcaatgacatattcattttcgaagttagaatccttacttgggatacctgaatctcttatctcccaagacttatgagacattctttccaagtccgagaggtgaattaacgaggttatactgggcggtagagaggaggcagtgggaaaccggattgagcagcaacaaat

SEQ ID NO: 417976 - DNA, 401 bp, Homo sapiens
gtagaatttatgtagtctgtttttcccattcttcctttctttgtagcttttgatttgacctttagatgcttgtccttattcaagagaaaactgaggccttacttgtgggtttggaatggacaccaggatctagttgaagatgtttctgcataaactccaaacagatgactggacagtggttgccartagtctcaaacccaaaaagtggatgtggcgattttcatagacgctacctagcttaatacctatgaaaaagaggtagacagggaagatggccaaagatttaacaacctcttttggatcactaaccaggcacaagtaatgtttttgtattatatagcatagctaacctaacaaaataaatcattttcccagctctggagcaatggaattaatctata

SEQ ID NO: 417977 - DNA, 401 bp, Homo sapiens
gtagaatttatgtagtctgtttttcccattcttcctttctttgtagcttttgatttgacctttagatgcttgtccttattcaagagaaaactgaggccttacttgtgggtttggaatggacaccaggatctagttgaagatgtttctgcataaactccaaacagatgactggacagtggttgccaatagtctcaaacccaaaaagtggatgtggcgattttcatagacrctacctagcttaatacctatgaaaaagaggtagacagggaagatggccaaagatttaacaacctcttttggatcactaaccaggcacaagtaatgtttttgtattatatagcatagctaacctaacaaaataaatcattttcccagctctggagcaatggaattaatctata

SEQ ID NO: 417978 - DNA, 606 bp, Homo sapiens
ggagtattgatcacaaggtgaagtcccacagtaggctgtcttcaagctgaggagcaaggaatccaatccgagccccaaaacctcaaaagtagggaagccgacagtgtggccttcagtctgtggtcaaaggcccmggagcccctggcaaatcactggtgtaagtccaagagtccaaaagctgaagaaattggagtctgatgtttgagggcaggaagcatccagcatgggagaaagatgaaggccagaagactcagcaagtctggtcattccactttcttctgcctgctttattctagccacactagctactgattagatggtacccacccagattgagagtgagtctgcctctcccagtccactgactcaaatgttaatctcctttggcaacacccttaaagacatacctgggaacaatactttgcatccttcagtccaatcaagttgacgctcaatattaaccatcataccctgtcaagatctacaggggagacagagtttagaaattgagtcctatggcaattagagggccatgggaaacaaattaatccaatgaagtaaaagaccaagctttatacaagctctaggcgagcagcacttggtcag

SEQ ID NO: 417979 - DNA, 480 bp, Homo sapiens
tttccttgggcctcagttttctcataacacctgaagttgttgatctttaaaacctttcagtttaaaatttttaaatattttcctcttaccttcaccttcgtcccctgttctcttccctaccccacttatccatgacttttgctgggttcatcattgcaggattggcaggatgttttccccattgagtgatgacactgcatgtgtcagcatagggacttgtattgtgggtttttttttttttttttttgacgggtgctgtggggctggtttacatgctgctgtcgttgaaagaggaggaatctgactcttcaattttactgccttatcttggcccgcagccattaccacattgagtgacacacatttgacagggcttgagaaagtcgtcawaggcagaagccagtgggaatcagctctttgtgcttgtggaccctgcactgctctctggtaagatctggtttgggagacctgctctctcca

SEQ ID NO: 417980 - DNA, 622 bp, Homo sapiens
gattattctttgggtgagatcttattatgaagaaaagtcagccactgtgctgagatttgtaaactcttccacttagcctggaggaagcattttaccaaaagggcctggaagcactaaaagtattaggtaagtcacttaatttttctcagcccaaatttctttatccatagaagaattagagtactatgagtcctactcatcaaaatggctactgaatcaagtgaagtatggtatgaaaatgtgtttctgaaaattataaattctatataaacattagttgtttttaggaagcatcatatgccaaaactgttttaaacaccaaaaaagcaaaagctgttcatgtttttaccgattttcccacctagagattatttactgcagatgataacctgtagtaaaatttcctaaacttttcattgtgcagcaattggaagactgtgagttaagttgttctagaaaytatctgaatattgtgtatatttagttaataagaactgatattgttcaaggtatatagtagctcttctatggaagcacattaattttagataaattcagattttattaattcattataaatcattattagatcaagagctaggttcaggttgtaaaaagatat

SEQ ID NO: 417981 - DNA, 584 bp, Homo sapiens
ccggttggctagtgatgggagaaaagattttatattaattatttgattaaaaacctttatacagaaaaattgacttcttttgttgtacagctgatgaatttcagcacatgtatacatttgtgtatctaccaccataatcaggatatagtttttttgttgttgttgttgttttgagacggagtttcgctcttgttgcccaggctggagtgcagtggtgcartctcagctcactgcaacctccgcctcctggattcaagcgattctcctgcctcagcttcccaagtagctgggattacaggcatgtgccaccatgcccggctaattttgtatttttagtagagatggggttttgccatgttggtcaggctggtctcgaaccgctgacctcaggtgatccactcacctcggcctcccaaagtgttgggattataggcatgagccactgcgcccggccaggttttttaatttccaaaaaaaaaatttttgaaggctgtttaattttctggggccaatcaagtgatacagtgctgcagaaataacctctaggttacattcagctggtcattagtgcacatgggtttgca

SEQ ID NO: 417982 - DNA, 613 bp, Homo sapiens
aagaacgaaacgaaaacatttgttgaaacacattgaaatggaaacacacacactaaactctatgggctaaaagcagggctaagagggaaacaataaacgtatacatcaaaaaattagaagatttcaaataaataattaacaatgcatctcaaggaactacgaaaacaaggacaaaccaaactcaaaattgggtgaaggaaagaaataagaaaagattagagcatagctaaacaaaatagaaccaaaacaaaacaaaayaaaaaaaaaccccgaagaatcaacaaaacaaaactggctttttgaaaagataaagaaaattgataaacctttagctagactaaccaagggaaaggagagaagttcccaataaacaaaatctgaaacaaaaaaaggatacattaaaaccaaaaatacacaaataaaaaggatcatcagagattattatgaacatctatatgtgaacaaatcagaaaatctagaggaaatacataaattcctggacacacataaaacctaccaatagtgaacaaggaagaaatagaaaatctgaatagaccaataacaagtaatgaaattgaatcagcaacaagtctcttaacaaagaaaagcccag

SEQ ID NO: 417983 - DNA, 570 bp, Homo sapiens
tgtcttaaaagaaatgtttttaaataaagaagaattccaatcctcacaaactcttgaaaaaaattaaagacaaaacatttccaaactcttttaatgaggccagcatagctcttcttatgagccaaacaaggacattacaagaaaaggaaactacaggaaaggatccttcatgaacataaatgccaaaatcctcaacaaaatactggcaaactaaatttaatagcacattaaaataatcattcacctataattaagtggcatttatccctgggatgcaaagatgtttcaatatatgcaaatcaatrtatgtgataatcacattaacaaaataaaagataaaaaaagatcatctaattagatacagcaaaaacatttgacaaaattcaacattctttaatgataaaaaaaataacaaattaggtataaaaggaatgtaccttaacacagtaaaggccatatgtgattaaacacacagctaacattatatttaacagtgaaaaactgaaactcttttccctgagtcctagaacaagacaaggatgcccactcttgccacttctattcaacata

SEQ ID NO: 417984 - DNA, 585 bp, Homo sapiens
ttttagccacccgtatggtaaatccacctgatagcaataacataaacacagcctgagaaggaccctgtatggcagattcacatgaatgtgtgtgctgagctaatgaatcctggtgtagccaacttggggatttgttccttgtctatgaggaacatctgagcccccagcccatcccatggaacacaggctatacagtggatcaaggccccaagttctgggttgaataaaggttgccagatggaggttgctagcaaaatggtgctaactgaaaatgctatacaaactgcatgctttttgcaagtggttgctgttgtcctgtccagtctcccgccactggactctcttccctgtatgtaagccaccaggaaaggcccacgtcttgtttgctggctttgggtctcttcttcagtctygtgaacctggtgccatccccactagagttgacaggggtttggcagaccaccacctgcaatctcaagctatacattcaagggtacattaaacaattattaaatacctgctatgtgcttcatccagtcttgacatcctcagcttacatatatctgagcattctaatcctacact

SEQ ID NO: 417985 - DNA, 585 bp, Homo sapiens
ttttagccacccgtatggtaaatccacctgatagcaataacataaacacagcctgagaaggaccctgtatggcagattcacatgaatgtgtgtgctgagctaatgaatcctggtgtagccaacttggggatttgttccttgtctatgaggaacatctgagcccccagcccatcccatggaacacaggctatacagtggatcaaggccccaagttctgggttgaataaaggttgccagatggaggttgctagcaaaatggtgctaactgaaaatgctatacaaactgcatgctttttgcaagtggttgctgttgtcctgtccagtctcccgccactggactctcttccctgtatgtaagccaccaggaaaggcccacgtcttgtttgctggctttgggtctcttcttcagtctcgtgaacctggtgccatccccactagagttgacaggggtttggcagaccaccacctgcaatctcaagctatacattcaagggtayattaaacaattattaaatacctgctatgtgcttcatccagtcttgacatcctcagcttacatatatctgagcattctaatcctacact

SEQ ID NO: 417986 - DNA, 568 bp, Homo sapiens
ctaaagggcacggcagggggtgggggggcaatgacaaacatctccccaaggcagttcctcccaaggttccccaggcacagaaaccaatcataccraactccccactgcatctctgtatttactgcttgctgctgagaaatgcaaagcacttctcagatctcattccacatgctatagtttgagtaacagctttctttgggggtaacagaggagtcgacagtaattatccttatgccccatatcaaatggaaatgaggcagagagatattaaattaagattttttttattcctacagcacttggcactgtacgaaacaccttcatatataccctgtcaccctgactgagcaggatcgctcagttccattttacagataagaaagtaaagctctgaagaaatgacttacccggaggacagactgatgggaatctgccccataaccccagggggtttcggtttacccaactggaaccatccagcctcaaagcagggctctcccagaggttggcactgccacaagcctggtgccaggcagagggcagggcatcacctggctggagggctttc

SEQ ID NO: 417987 - DNA, 568 bp, Homo sapiens
ctaaagggcacggcagggggtgggggggcaatgacaaacatctccccaaggcagttcctcccaaggttccccaggcacagaaaccaatcataccgaactccccactgcrtctctgtatttactgcttgctgctgagaaatgcaaagcacttctcagatctcattccacatgctatagtttgagtaacagctttctttgggggtaacagaggagtcgacagtaattatccttatgccccatatcaaatggaaatgaggcagagagatattaaattaagattttttttattcctacagcacttggcactgtacgaaacaccttcatatataccctgtcaccctgactgagcaggatcgctcagttccattttacagataagaaagtaaagctctgaagaaatgacttacccggaggacagactgatgggaatctgccccataaccccagggggtttcggtttacccaactggaaccatccagcctcaaagcagggctctcccagaggttggcactgccacaagcctggtgccaggcagagggcagggcatcacctggctggagggctttc

SEQ ID NO: 417988 - DNA, 568 bp, Homo sapiens
ctaaagggcacggcagggggtgggggggcaatgacaaacatctccccaaggcagttcctcccaaggttccccaggcacagaaaccaatcataccgaactccccactgcatctctgtatttactgcttgctgctgagaaatgcaaagcacttctcagatctcattccacatgctatagtttgagtaacagctttctttgggggtaacagaggagtcgacagtaattatccttatgccccatatcaaatggaaatgaggcagagagatattaaattaagattttttttattcctacagcacttggcactgtacgaaacaccttcatatataccctgtcaccctgactgagcaggatcgctcagttccattttacagrtaagaaagtaaagctctgaagaaatgacttacccggaggacagactgatgggaatctgccccataaccccagggggtttcggtttacccaactggaaccatccagcctcaaagcagggctctcccagaggttggcactgccacaagcctggtgccaggcagagggcagggcatcacctggctggagggctttc

SEQ ID NO: 417989 - DNA, 323 bp, Homo sapiens
cattcgatgatgatcacactggatttcattccataattcyattcgattccattcgatgatgattccattcatttccatccgatgatgattccattcgattccgttcaatgattattccattcgagtccattcgatgattccattcgattccattcgatgatgattgcattcgagtccatggattattccattccattccattagatgattccattcgggtccattcgatgattctcttcgattccattcgataattacgtttttttccgtttgatgttgattccattcgattccattcgatgataattccattcgattctatg

SEQ ID NO: 417990 - DNA, 323 bp, Homo sapiens
cattcgatgatgatcacactggatttcattccataattctattcgattccattcgatgatgattccattcatttccatccgatgatgattccattcgattccgttcaatgattattccattcgagtccattcgatgattccattcgattccattcgatgatgattgcattcgagtccatggattattccattccattccattagatgattccwttcgggtccattcgatgattctcttcgattccattcgataattacgtttttttccgtttgatgttgattccattcgattccattcgatgataattccattcgattctatg

SEQ ID NO: 417991 - DNA, 323 bp, Homo sapiens
cattcgatgatgatcacactggatttcattccataattctattcgattccattcgatgatgattccattcatttccatccgatgatgattccattcgattccgttcaatgattattccattcgagtccattcgatgattccattcgattccattcgatgatgattgcattcgagtccatggattattccattccattccattagatgattccattcgggtccattcgatgattctcttcgattccattcgataattmcgtttttttccgtttgatgttgattccattcgattccattcgatgataattccattcgattctatg

SEQ ID NO: 417992 - DNA, 207 bp, Homo sapiens
ttccattccatcagatgattccmttcgggtccattcgatgattctcttcgattccattcgataattccgtttttttccgtttgatgttgattccattcgattccattcgatgataattccattcgattctatgcgatgattccattccattccatttgaagatgattccattcgagaccattcgatgattgcattcaattcattcga

SEQ ID NO: 417993 - DNA, 207 bp, Homo sapiens
ttccattccattagatgattccattcgggtccrttcgatgattctcttcgattccattcgataattccgtttttttccgtttgatgttgattccattcgattccattcgatgataattccattcgattctatgcgatgattccattccattccatttgaagatgattccattcgagaccattcgatgattgcattcaattcattcga

SEQ ID NO: 417994 - DNA, 454 bp, Homo sapiens
ttcgagtccgtggattattccattcaattccattagattattccattcgagtccattcgatgattctcttcgattccattcgataattccgcttgattccgtttgatgttgattccattcgagtccattcaatgttaattccattcgattctatgcgatgattccattcctttccattagaagatgattccattcgagaccattcgatgattgcattcaattcattcgatgacgattccattcaattctgttcaatgattccatyagattccatttgatgttgattccattcgattccatttgatgatgattccatgcgattccattagatgatgacccctttcatttccattcaatgaggattccattcggttccatttgatgatgattcctttgaattccatttgatgacaattccattcaataccaattgatgatggttatttttgattcc

SEQ ID NO: 417995 - DNA, 454 bp, Homo sapiens
ttcgagtccgtggattattccattcaattccattagattattccattcgagtccattcgatgattctcttcgattccattcgataattccgcttgattccgtttgatgttgattccattcgagtccattcaatgttaattccattcgattctatgcgatgattccattcctttccattagaagatgattccattcgagaccattcgatgattgcattcaattcattcgatgacgattccattcaattctgttcaatgattccatcagattccatttgatgwtgattccattcgattccatttgatgatgattccatgcgattccattagatgatgacccctttcatttccattcaatgaggattccattcggttccatttgatgatgattcctttgaattccatttgatgacaattccattcaataccaattgatgatggttatttttgattcc

SEQ ID NO: 417996 - DNA, 440 bp, Homo sapiens
aatcatcatcaaatggaatcaaaaataaccatcatcaattggtattgaatggaattgtcatcaaatggaattcaaaggaatcatcatcaaatggaaccgaatggaatcctcattgaatggaaatgaaaggggtcatcatctaatggaatcgcatggaatcatcatcaaatggaatcgaatggaatcatcatcaaatggaatctaatggaatcattgaamagaattgaatggaatcgtcatcgaatgaattgaatgcaatcatcgaatggtctcgaatggaatcatcttctaatggaaaggaatggaatcatcgcatagaatcgaatggaattatcatcgaatggaatcgaatggtatcaacaccaaacggaaaaaaagggaattttcgaatggaatcgaagagaatcttcgaacggacccgaatggaatcatctaatgga

SEQ ID NO: 417997 - DNA, 479 bp, Homo sapiens
cacacagtggacagtggatatgtaatatgccacatggtgatcaagactatgaaaacatcagtgagtggaatggagctagagtgggcagggtgccggtgctgtttagaacaggtagggaagggaaggtctctctgaggagctcctcctgcagaggcctggtagggagtggggaagagcctgtggctacctggtggggagtggggagggagcctgtggctgcctggtggggagcaccctatggggaggcacgtcctaggaggaggagtgtcctagagggagggcccggcacctgccagggccctygggtgggttggggagggcagagcagagggcagcatgacctgggccaggtgatgtgggaccacacccacaatggatggagatagacatcagtggctatgcctgtccctacctgaggtcgcccagctgtaagggtctcgctctcacatcagtgctgagaaccaggggcctcttcagca

SEQ ID NO: 417998 - DNA, 584 bp, Homo sapiens
tttctactcccaaaattgaaatcaaaggaaaagaatttagcatttattctgccttttttattaaagaactgtaatttatcacatgagrgaaagccctcatttactgaagaatgcctacatcttgccattcccaaagaaataactattccaggctcagttcatcagcagatgttaaaacttttaggctaaagattattgaggaatggaatagctgcaggtaccaaagtctcacccccaatagccccattccttctattggagaatgggttttaccagatagccagagttacctcaccggttaaaacctattttttatgcctaagcaaagagcgaatttaaactaagcttatacaagcacttctgtccaatcttcaggattactttcagcataaacaaggcagatatcgcctttatgacgaatgagatagaaggaacactgtgaaaatgtggaggcaatcttgacaaaactaaacgcttgtgcctggaatcaaaaaaggtaggatgcaatggcttcacagacccaaactgcaagtaagctggtaggcttagataagagaccagactgtcaattatgagcttagcag

SEQ ID NO: 417999 - DNA, 606 bp, Homo sapiens
cccgtgtctaaatcgcagggaagggctctgatgggtcctgctctcccagagacccgtgtctaaatcccagggaagggctctgatgggtcccgctctcccagagacccgtgtctgaatcccagggaagggctctgatgggtcccgctctcccagagacctgggtcwgaatcccagggaagggctccagttggtcctgtttgagtgatatgcctacagggtaaacctttgtgcccagatgggagaggatgattgtaatggttggtcccaccagagcctctggggtaggaaggggctgctccccaaggaaaaggggcagctggtcctggaagacacagggccaggggttgctgagccaacaaaaataataggtatgtcttattttgtatctagatataacagatcatgatgacaagaaacacatttagtggcttgtacatttcttctctgagaactaactgccttgggcgtatctgaaggacagaacttggagcgccagcagagctgggttgtcctggggtccttggtttgtgttccttcctgggctctggtttcctggaccttttatctagagctaagggacacgccctggctgttcccagcacctgg

SEQ ID NO: 418000 - DNA, 566 bp, Homo sapiens
ttttgggtttgttatggcaacacccactaccagaaaccaaagtctgttccaattgctgtttttcaaaaaaacacctcaaaacgtagtggtataaaactaccaatattttgtatgctcatggattacatgtgttaggaatttggacagggcatagtccaaatgtaggcatacattgcctctgtcccatggtatctaaggcattacccagaaaaccgagaaggggagagggctattttaatggctaggggataaaatcctctgaaggcttctttatgcacatgtctaaygcctaggctgggataacttgaagtcttaactggggcttccaaccagagtgcctacacatgggctctctctggggtctgcagttatccagagtgtggtaaaattggaatgtttagattttttacttggctatctcaggactccaagagcaagtcagaagaaagtagaagctaaacagctttttatggcccagtataggaagtcacctagcatcacttctactgtactctattggtcaaagtcattgcgttagtttcctatcattgccattacaaattagc

SEQ ID NO: 418001 - DNA, 566 bp, Homo sapiens
ttttgggtttgttatggcaacacccactaccagaaaccaaagtctgttccaattgctgtttttcaaaaaaacacctcaaaacgtagtggtataaaactaccaatattttgtatgctcatggattacatgtgttaggaatttggacagggcatagtccaaatgtaggcatacattgcctctgtcccatggtatctaaggcattacccagaaaaccgagaaggggagagggctattttaatggctaggggataaaatcctctgaaggcttctttatgcacatgtctaatgcctaggctgggataacttgaagtcttaactggggcttccaaccagagtgcctacacatgggctctctctggggtctgcagttatccagagtgtggtaraattggaatgtttagattttttacttggctatctcaggactccaagagcaagtcagaagaaagtagaagctaaacagctttttatggcccagtataggaagtcacctagcatcacttctactgtactctattggtcaaagtcattgcgttagtttcctatcattgccattacaaattagc

SEQ ID NO: 418002 - DNA, 557 bp, Homo sapiens
ggggctgctactataaagatacttgaaaatgtggaagtgactttggaactgggtaacagacagaggatagaacagtttggagggctcagaagaagacaggaggtctgaagttgaggttcaatgtgattaactcactgaacaaaatccacagagccaggatctgaactattgtcttcctcttcccaaagtgtttttcctattatttcatgctgccaaggtcttcctacgggagaaaaattataaaatgtttccttcctggagtaatttttgtcttagtacctagatcctttatctgtatcctctgtgagtccacgttgctttggctttgatggagattgaagcttctataacactttaaaagctcagtccagggtacaggactcttagtactcattcccaggtatagctctgctgtgtccagtcctaacattcagaccactgccttcattccctagtgctcagtatgcagagagcccactaaaactctagaccaaaagggatttcacattttacaaacagaatcaaagttrtagaattttgttcctctcaaataaaaa

SEQ ID NO: 418003 - DNA, 600 bp, Homo sapiens
gggcaggtgctattgattctcataattataatacctataatactttgtggggatgatttttccattttacagaagagtaaactgagagtatagaagctttattgagatgattgaatgaatgattgcagggcattttgcaaggcatgattttattttatcttatattatttagaattgctgtagctaagggacatttctacagcatagacaattcaagtgcttttggaatgactcatcatgaatcaagatatagccccttttctcctgtccccttggtattgaatcctcagtccatccttcataatttaagcttgatttaaatactagactctcagtaagtgttgaatgaagaatggcaacatgtagtctaaagcaaaccattttgcagtgttccatttgtttttgtttagagtttaatggaaggaagtttagttttttcaaacaatgtagtgttaacacaaaagtacagttctatgcagacagtgattaaatcttaagctacctaaatatccccaacctaattggaactttacgaaaaagcaccatttaaayttcgctatctaaataagggcacaagaaacagaaatgaactgagcatta

SEQ ID NO: 418004 - DNA, 600 bp, Homo sapiens
gggcaggtgctattgattctcataattataatacctataatactttgtggggatgatttttccattttacagaagagtaaactgagagtatagaagctttattgagatgattgaatgaatgattgcagggcattttgcaaggcatgattttattttatcttatattatttagaattgctgtagctaagggacatttctacagcatagacaattcaagtgcttttggaatgactcatcatgaatcaagatatagccccttttctcctgtccccttggtattgaatcctcagtccatccttcataatttaagcttgatttaaatactagactctcagtaagtgttgaatgaagaatggcaacatgtagtctaaagcaaaccattttgcagtgttccatttgtttttgtttagagtttaatggaaggaagtttagttttttcaaacaatgtagtgttaacacaaaagtacagttctatgcagacagtgattaaatcttaagctacctaaatatccccaacctaattggaactttacgaaaaagcaccatttaaatttsgctatctaaataagggcacaagaaacagaaatgaactgagcatta

SEQ ID NO: 418005 - DNA, 537 bp, Homo sapiens
ttagaaatgctctgattgtaacatgtattgtttctgacataattcattcttctggcaagtcatagagtgagtcattgggaaataggacagtatgaggaaggtggtccagatagaatcagtcttaggagatctgctgtaatcatagattattctcagtagctgggcttcttcagtgttctatttttaatttcctaaataaaatgttataatatagttggaatataaactatattcttggactttgtttaagccaacagctttacagagagaccacactgctcacagatggacccagattagaaatgaaatattcattcacttattcaaccaatgaatatttcttgagcttctactatatggtagacataccgctaagcattgaggataatttactgagtattacataggtggtcatttgatctgcggctgttcacagtcttatagtatttgcgtatttctatttctrtatagatttttagtaataagagaggtaattggttaaatgtaaaccctgtatggtaatacatcatacactat

SEQ ID NO: 418006 - DNA, 524 bp, Homo sapiens
tcttgtcactagcaggacaaatgtcagcctagggtagttctggcgagcttacagattcactgcacctgactcacttttagtcttttggtttgttcttttccactagttgagtaaataaacaaatataatgctaataggaaagatgtattaagtacctaatatgtaccagagctttgcaaaaaaatgtttctatgtatatgtgagtgtgagatagaaggtaatataaagaagcaaactgctgtgttatggtggcagaacaatgaaaccttttaaaacaactttttattgatattatcacatttcaattaaaaatgtaaaaagtaaaaagatctatatattgaagtatatatattctagttgcacttcttgatgatttgtattgatatccttcttctctctggtatgtgatggatagaatcaaggctaatatctctgagaatgacagaaktggggagaaatgtaacaacaaagctctaacagcttcattttgtatgttacatgttgaaaatatttactcaatgtca

SEQ ID NO: 418007 - DNA, 522 bp, Homo sapiens
attaagtttcagttactcaccattgtgatgcgttcaccgaagcggcctttagttactatcttctggtttctgtctccctaactcccttcccagtattccctggaatcatcacgcaaataaattacttgcactcggatcattagttttgggggtctgctctcaggaaacctaaactatgacactctatatctacagttctggtattcatatttgtttcagtcagctaatgttggactctgttagcacagctgtttggaatttaaacttttcaagaattctttcatccttattattcattcctgttttattcttggatatcctaagtgcatacccagactaatgataatatcaacacttgttcagtatggttggtcatttttaaaaataaacaggcaatttatgggtgaccacacaaagaacagctgctgccatcactcacgccctctccattgttgatggcctctgcaactgacattgtcccaagcagctgcygacagagctgccagtacctgtttccacgtc

SEQ ID NO: 418008 - DNA, 633 bp, Homo sapiens
atattccaagcagtgttcttcaaaaatatatattatagaagttcattttcattgagttagacaactttagttacaaaatgtaaaattaaaggagtcacagaaaagcttggtgaaactattacattcrttaagaatgaaagattagcatgcagtttaatgatacaaataagatgcatgaatagttaatttgccaggaatgttaagatttggtagactgaagtagaagcattccatgtaatagttacagaattttaaagccaatgaaaaccttagagattacatagatcactctgaaaatgaggaatctggggcccagagtggctatgtaactttcccgaggttaactgctggataatgttagagttgtgatcaaagacacatatataatagtttccagtccatcaagtaggttctattatttttaaatcaggctaatataatgtttaacatcttacaatttccatatgtattttaaacatttatttgtgcacatccatcattcccaaatttaacatacttagaaaagatagccataatgtcatgggtcagtaaaaatatctattttgttgagatgaggtctcattctgtcacctaggctgaagtgcagtggtgtgatcacagcacactgcagcc

SEQ ID NO: 418009 - DNA, 587 bp, Homo sapiens
tttctttatgtgagttaatacctctccttctggttcaagtcaatttgattgagaatatcttggttccaaaagcatgctcctgaagccaaagtacagcatggagtagcatatttgctacatttggtaacctgaggcttcataaggaatgcaagtagtctggcattttgaagattttagaagagacatgttctttattaacaaatttctacggacaaatctcacagctggatgrcaatatacccagaagtaataccattaatctttagggaaagcaatgtctttggagttcagaccacttgaatgcacacatatttgccaatcttgtacacaactcaaaattttggttttaattcatcatttcaaagtacaataaaatgttcaccagagcaaccaaataaatgagaaaaacttaaatttacggcttcaaaataatataggttataaattatttctcttagctcagcatttgaacttcctgtactcattcatcccgtaaatacttattgagctcctattatgtgctaggtgtacggaatatagaaataaaaagggcaaaaatcagtcctttaagggaatcagaggctatc

SEQ ID NO: 418010 - DNA, 575 bp, Homo sapiens
  misc_feature (1)...(575): n = A,T,C or G
aggacagccataagcctcctatagcaaagctatcctgtatgagaagctntgagggtttttgtggttgtcccatttatttaggtaaatcaaatcaattttygatgctcatggaagatctcctcctaggagaaaatgtgatgcaatgtaaaaagccatggtttttcacaactgtcacataaaattctgtcttttgtatgcatgtcagagttataaaattatagctaaacatggatataggactgaattcattcaacagcacttgtgtagagaggatgttatttttaaagacagacacatgtactctgtaagaactctatgctctaaaattactgttttcaagtatctcaaactaccttcaagaagtaacattctcataacttgcatttttggcagggcttttttaagttcgtaaatgattaaacatggaatattttttataatattttgtaaagatggagactgtatttacatttatgccatactttcattagctctagagtggtatgactgtcttcaaaatgataaatttcaaagtgttacttgcttaccacagcattttggatagaaattgagga

SEQ ID NO: 418011 - DNA, 552 bp, Homo sapiens
tcttcaaagaaatatattagttactaaatcctttaaaacattttattatgaaaaattttaaacatatacaaaagtggatagaatagtataatgaagcatcacatagccatcaccagcttcgacaattgaaaactcgtggctaatcttcttttgtctataccccatttgcttctcccatgtcctggcttatttttatacaaattccagagtttacatcactttatccatgaatattttatatatatcttttaaccataaggattctttcttcaaaaaaaacmtcacaatgctattatcacacccccaaattaataattcaatattatcaaatattatccaatattcagtcttcagatttttctgtttcccaagagatcgtttttttacaattgctttgttcaaatcagaaaccaaaatgcatgcattacacgttaatatgtcactaaagttccctttgatatatacgcacatttttcttctttgtctttctcataatttgttgaaaaaagtagataatctgtcctgtaaaatttcccacattctgaatttttc

SEQ ID NO: 418012 - DNA, 552 bp, Homo sapiens
tcttcaaagaaatatattagttactaaatcctttaaaacattttattatgaaaaattttaaacatatacaaaagtggatagaatagtataatgaagcatcacatagccatcaccagcttcgacaattgaaaactcgtggctaatcttcttttgtctataccccatttgcttctcccatgtcctggcttatttttatacaaattccagagtttacatcactttatccatgaatattttatatatatcttttaaccataaggattctttcttcaaaaaaaacatcacaatgctattatcacacccccaaattaataattcaatattatcaaatattatccaatattcagtcttcagatttttctgtttcccaagagatcgtttttttacaattgctttgttcaaatcagaaaccaaaatgcatgcattacacgttaatatgtcactaaagttccctttgatatataygcacatttttcttctttgtctttctcataatttgttgaaaaaagtagataatctgtcctgtaaaatttcccacattctgaatttttc

SEQ ID NO: 418013 - DNA, 518 bp, Homo sapiens
tacatacaagctgcttccctcctccctaaacatccaatgtatgacctgaatctctggatttgtttgctaggattgccgtaacaaagcgcaaactgggtagcttaaacaacagaagtatagtgtctcacggtttttgaggctggaagtccaagatcaaggtgctgtgagggaaagtctgttccatgctatgtcttagcttctggtggttttctggcaatctttggcattccttgatgagtgggtgcatcaccctgatctctgcctcatcttcacaccgtgctctcsctgggagtgtatatgtatccaattgctcctttttattaggacatagccacattggattagggcccatcctgatcacctcatcttaacttgatcatctgcaaagaccctaaatccaaataagatcacgttcacaggtactaagttaagacttcaacatctttttgagggacacaattcaacttgtaacagttggaactgtttgctttgattaagcaaagacccaatagtgattt

SEQ ID NO: 418014 - DNA, 570 bp, Homo sapiens
gtggttttctggcaatctttggcattccttgatgagtgggtgcatcaccctgatctctgcctcatcttcacaccgtgctctccctgggagtgtatatgtatccaattgctcctttttattaggacatagccayattggattagggcccatcctgatcacctcatcttaacttgatcatctgcaaagaccctaaatccaaataagatcacgttcacaggtactaagttaagacttcaacatctttttgagggacacaattcaacttgtaacagttggaactgtttgctttgattaagcaaagacccaatagtgatttttcggtctcctaaaatactaagattacttccaggatctcaagcaagaatcaagacctataaagaaagtgtatatatagcctctacctgccagacattgtattggaagtttagccatggcgatactgctaagtagatgttaataggctcattttatggatgaagagactgagtctcaggatagtcagagaccatacccaaagtcaagttcagctggagagggatggacccaggattctaatccatgtatgtctga

SEQ ID NO: 418015 - DNA, 570 bp, Homo sapiens
gtggttttctggcaatctttggcattccttgatgagtgggtgcatcaccctgatctctgcctcatcttcacaccgtgctctccctgggagtgtatatgtatccaattgctcctttttattaggacatagccacattggattagggcccatcctgatcacctcatcttaacttgatcatctgcaaagaccctaaatccaaataagatcacgttcacaggtactaagttaagacttcaacatctttttgagggacacaattcaacttgtaacagttggaactgtttgctttgattaagcaaagacccaatagtgatttttcggtctcctaaaatactaagattacttccaggatctcaagcaagaatcaagacctataaagaaagtgkatatatagcctctacctgccagacattgtattggaagtttagccatggcgatactgctaagtagatgttaataggctcattttatggatgaagagactgagtctcaggatagtcagagaccatacccaaagtcaagttcagctggagagggatggacccaggattctaatccatgtatgtctga

SEQ ID NO: 418016 - DNA, 591 bp, Homo sapiens
aagttgtagtgaagatgccagtctgtctgctatagcaggatttattttaaagcatctctgaagctttttgttttattctrctcagagtcaagagaacccctcttggggacagtgaaatatacttaggcacgtttctcctgagcacatgtttatattttagcgtgaaagagccccctaagcttgctaagaatttatatagcaaagattgcaatttctcaagtcccttgtaaagtcattatggttcatatgacctctgggataatgcacatcttaatgtgctgcagaatatcagtgtacacatttcttgatcagagtaggactctacctagaatttctgatgtgtatgtgcacgtcttcctcgctttttttctctctcaggtaataggacctatacccttcaaaaagtcatagtgtcttagaaagtgctattttagttgtgtagtagagattctttctgctgttcactaggagaagtgaatatttatttttccatttatttatttcttcacatattttacacttaaaacatttaaccattctggaaggaaatctttctagaataaatatttttcaactttttaaacacactaa

SEQ ID NO: 418017 - DNA, 554 bp, Homo sapiens
aatgcacatatctaataaggaggtgcttaaaaagggatgaattccctgagtcattaaacaggatacaaaccaaagacaggttgtgccacctagagaaaaactggaaattgtacattggttcttcagtagtaagtgttattcaaaagcttgaaacttttaacatgcccaataaccaagccaccgtccataccagctcaccaaactgctgcattaagcccccttgacaacactgccttctccacacaccagactggccggcctcctctggctttcctcgcccacctacccacgctgcgccgcttaacctcagcaccggctgtttcccacagcccatggagcccctgcatcctgaaacctatccggttccaaagcaccttcctcgaagacaggacaggacaggatagaagaagcaaagggataaacccyggtggaccttgccagccagcgttcctctggatgctagcagagccaccgtgcacatccctctagccccatggggcctgtataggaaattctggtgcactcagtacatcatatccaggttaccaagctga

SEQ ID NO: 418018 - DNA, 538 bp, Homo sapiens
agcacagaatggagtgcattttggttgaagagcaagatatttaaggagaaggagaaaatatacattaaaaaaatgtaggtgagataaaaacatgaagggtttggaagcaaagaagaagtttggacttcatttcctccagtaattttcctctgatcctccmagagcagcttagatacttctattaagtgcttacatgatatcttttatcaaacagatgtcatgtttattgttgttattgcttcttcaattgtgtgatttccccattaaactcaaattctgcgaggcaggaactatgtcagtcttgttcaccttcctctccctaggcacccagcaaagactctggtacatggcaagtgctcaatacatatttgttaaataagtgaatgaatgaataatgggaagccattgatgaccactaagttggggaggcctatggcttaaaagaatcatatggcaatgagatgcaccccacccaggcaataagattcaggagtctgctactccttaactttatcagctgctgggctaggagtatatc

SEQ ID NO: 418019 - DNA, 635 bp, Homo sapiens
catgcagggaatagaacagtgtgttctgtgggcccaaggaatacagagtgaataaataaattgataaatgatatggccaggtgactaagaaccacaaatgtaaatgtctaatacatatttggggaaataatattagcaattaaagacttacaaatagaaccatatgaaataactgttttttacttatgtgattagaaaagctttataaaaaagaggctgtccagtgctttcacaaggtgtgctgaaacaggtagtgctttggagaaagcaatttgatgataggtataggatgtctaaaaattgtttatacaaaccgtgactcagtaattcaacttctggaacttgatcccaagtaaataatcctaaatactgaaaaagcttttccacaaagatagaatatggcattgcccataattgtgaaaaattgaaagcaacstaaatgtgcagtgcttcggtaatggggtaatggcaatcagtaatcaattacagaatttattagttattcaataaatattaattcagtgcctaaactgtgcaggcattatttggatgctgaggagacaacagtgaacaaaacagacaaaatctcttccccaaatgattttttaaaagatttgcataacatgggaaatgct

SEQ ID NO: 418020 - DNA, 525 bp, Homo sapiens
attccttagtgtgcttagaatcccattaagtctcacactggcttactcaggtatttactcccagtgtatcatttgccttcctcaggccaagacagtgtgcaagtgactttgtttcccatccatgaactaaatggaaagacatgtccttcattatggcccttacaggaaagttgcctcctgtaacagacatgctattgggttggaggagcaacatagcacagatgttcttgartaataaatacaggatttccagctaatttatttgagctctgagtaacagggtgatcaggattctcctgctttcttaaaactcagcaaaagttcatgtagaatttctctctgtctctgtgtctccctcccttcctgtccttatccctatttctttacctgacactgaatcaacaggattttgctgactaattacttcattgaaaaaatcagagaataaagttacccactcttcccagtgggtaacttgggaatcttgattatctttttctaaacatgattttgaatcccatctcc

SEQ ID NO: 418021 - DNA, 612 bp, Homo sapiens
ccactaacttgtcatctagcattwggtatatctcccgatgctatccctcccctcttcccccaccccacaacagtccccagagtgtgatattcccttcctgtgtccatgtgatctcattgttcaattcccgcctatgagtgagaatatgcggtgtttggttttttgttcttgcgatagtttactgagaatgatgatttccaagatcttggtcctcacttttctaagagttgtgttgtcacaaccttccattgaaaatgttgcattgtgcagattacagttgaacagatttgtttcatgtcgttaaagtcacacatgaaggcttttcattcagcaaaatagttaaatatgaatatgatatgtattccatacaaatgtattccactatatccaaactataactccaacccaactttttgtctgcatcgccaaaatggttatggtcaccccaatgccgcccaacacaagggctcatgtgacagaggggaggcagaagtgggaagaaacagtatccttaataatctcatagttaaaaatatcttgcttttccaaatttatgacaacaccaatacccttatttataaaagcataaaaatccctcccttccttccttcc

SEQ ID NO: 418022 - DNA, 519 bp, Homo sapiens
cggtctcaaaaaaaaaaaaaaatactacctaaataagtataaatgggatattagaaatttggggaactatgttttcagtatcatgctcttgytatttcttaattgtctttaatccctggagttatgatgtgtgtccagactaaacatcttctaacttaaatactagctggttaatccttttgatctgcagtaacatttataatgcttttcaaatgtcaagggactttcatcaattctccctaattatctgatgattgccactctttatttttccatgatctccttgaagtttccttgacctccttggaaccttcattttaagtccaggtagccatttttccctttgttcctttgagttcagtccaggaatttaatgtgtataccttcagttagccatcataggtccaaactctttgccagatcatgaaaataaatgacaagagaggccatgaaggcataaaccatacacaatgcaaaatagacacaacttaggaaagcacattgaaatctcattgactg

SEQ ID NO: 418023 - DNA, 519 bp, Homo sapiens
cggtctcaaaaaaaaaaaaaaatactacctaaataagtataaatgggatattagaaatttggggaactatgttttcagtatcatgctcttgctatttcttaattgtcttyaatccctggagttatgatgtgtgtccagactaaacatcttctaacttaaatactagctggttaatccttttgatctgcagtaacatttataatgcttttcaaatgtcaagggactttcatcaattctccctaattatctgatgattgccactctttatttttccatgatctccttgaagtttccttgacctccttggaaccttcattttaagtccaggtagccatttttccctttgttcctttgagttcagtccaggaatttaatgtgtataccttcagttagccatcataggtccaaactctttgccagatcatgaaaataaatgacaagagaggccatgaaggcataaaccatacacaatgcaaaatagacacaacttaggaaagcacattgaaatctcattgactg

SEQ ID NO: 418024 - DNA, 409 bp, Homo sapiens
attaaccagcctcctttgcaatataagcagaaatcttgactgggacatccrggaagcctccttaaaataaagaatttgagcccttctctcttatttccttaatcctactttcatgtcacagcctagcaggtgcaatgggctggactgtgacatggaagcctcatacagaagaacagaaaactgataaggagcacagttctgtctttattcatggagctaagacaattgtcctagattgtctgcctcagaatttctttgtatatataatccacgattgaattaggtctttgttaatatcagccacatctaatcataatggattcaactaccttctctcttttcgaacagaaccctgactctactcagacaccctcctttctcaaggcaaccatatggtgcaacagaggca

SEQ ID NO: 418025 - DNA, 632 bp, Homo sapiens
ttctgttgaactctggtgttcccttttggataatgtattcaaagtgtgtttgtctatacactgttttggttctaggtgaatgaagcatgctcgaaatgcttctaagcagccatcttctagtccaatattttaaaacaagtatgcatggaacagagaagtgaaatcacagaattttttttcttagagatgaagggagcagagacagaggtaaatagtagtgatgattgtatattgggatgcaaattactcaggaatggtattctaaaatcagctcaagacaaaatggaggtgttcaaaattgcatttgaaaactacccaggaaggcacctgatgcagatgagccaaccatctcttaygaagctcaacactgccaggttttctttggttgagcagcagataaaataatttatttgcactgcaggggccacagtgaacttttaaatacggctacgtgctcacaagggatctgagacagacttgggtcatggcagatttctgtctcttgtctcagtctggggaggataatcattgatggggacagcaggagagtactattttaacatctctcggtttctctaaaaagcaggcatagtttaatttgcatgaattatttaaaataattatttaatgca

SEQ ID NO: 418026 - DNA, 632 bp, Homo sapiens
ttctgttgaactctggtgttcccttttggataatgtattcaaagtgtgtttgtctatacactgttttggttctaggtgaatgaagcatgctcgaaatgcttctaagcagccatcttctagtccaatattttaaaacaagtatgcatggaacagagaagtgaaatcacagaattttttttcttagagatgaagggagcagagacagaggtaaatagtagtgatgattgtatattgggatgcaaattactcaggaatggtattctaaaatcagctcaagacaaaatggaggtgttcaaaattgcatttgaaaactacccaggaaggcacctgatgcagatgagccaaccatctcttacgaagctcaacactgccaggttttctttggttgagcagcagataaaataatttatttgcactgcaggggccacagtgaacttttaaatacggctacgtgctcacaagggatctgagacagacttgggtcatggcagatttctgtctcttgtctcagtctggggaggataatcattgatggggacagcaggmgagtactattttaacatctctcggtttctctaaaaagcaggcatagtttaatttgcatgaattatttaaaataattatttaatgca

SEQ ID NO: 418027 - DNA, 498 bp, Homo sapiens
ttgttgtgatgctggtgtaaacaaacctactgctctgccagttgtgttaaaaatgtacagtcgtgttctaggctttcacattcactcatcatttactcactgagtcacctggctcaaggcccmgtcctgcaagcaccattcatggcaagtgccttacataggtgttccattttttttatcttttatattctatttatattgtaccttttctatgtttagatacacaaatacttagcattatgttatggttgcttacagtattctatactgtaacaggctgtatgggtttgtagcctaggtgtgtagcaggccataccatctaggtttatgtaaatgcactctatgatgtttgcacaacaatgcatttcgtagaacttatccctgtcgttaagccatgcaaactatgattaggaaatagaagtcattccttcgtcccctggtgagtttcagtacaggaagcaggctatgactctaacccagttctaggtaaagggaatt

SEQ ID NO: 418028 - DNA, 619 bp, Homo sapiens
gattctagcctggcaaattttcattttcataactaaaattacagggagaaaatgtgaaatggtaacaaagaaactaaacttatattgccttgttcaaggttttcatttaacgaaaatgtgctctgcacatacyagaaaattatacgtgtaaaaagaaacacttgaattcatctgtaaaatgcaattctaaatgccacttttttaaatcaacaatcctgacacgaagaggacaatgtgaaaatccttacaactatcaaagtttgatttcatgaggatattagtatattcctctcagtggtttacaatggaatttgtgagtatcagtaatagtagatataaatatcagacatcagaagatatgacggaaggaaaccattcacagattatataccagaataaacaaataaatacctatcacattactgtgttattctctactgttttatcatcattgcttttttaatgtaccaataggtgaaaactacattcagtacctttctcaaatgatgaactgtgccttaaaaagacataaatcctagtaatttgtgatgtcaaattgtgtatcagattttcaattgtctatattcagacaataaatgaaagtgaaaaagaaacactt

SEQ ID NO: 418029 - DNA, 593 bp, Homo sapiens
ccccgtcactaacttactgagcagcctttgataagcaacgtattctccctgaacctcaatttactcactctggtaaagggaaaataatagcataagacacatagtgttttggatatagtgatcatcttaaattcttacttatgacaaaattgaatccagctcggccactctattagatgggtagtcactggcaggttttggatatggagatgatgagctctgatttactattttaaaagacacccctgataccctatgggaggtcagagtggacaccaggggatcagataagtggctactgaactagtgcaggcatggagtgatggtggtttggatcaagatagaagtgaggtagaggatggagtaatagagaggcatttctggattgttrtaaagattagtgtttattaggagcttaataaaaaatagttaatgtaataattataattatgactttcatccttaataacacttgtcaattgcagaaatgtatttgaaaatatggcaaaaacatatacatttttgttatgtattatgtattcaataaattcctatatagtgcttactatgtacttggcattgtactaagaact

SEQ ID NO: 418030 - DNA, 556 bp, Homo sapiens
acaggcatgagccactgcgcccagcctttgtaatcttatttaacaatttcttgaattctgagcaataaaatgtatgtcttatttgttattgaaagakaatttgaagtgtggttgatagtattaaagctcataaaacaggatcattttaacaaagagatgttcgaaattacttaagagagatatacctaagttcttcatttcaagaacctgcgacaattaggtttttagttttaagtctacatttcctggaaaccaaggaaaagaaggacattgatggttttacatttttcatagtttaatgaaagcaaagatggaaggatttttttttcctgaccctaattcctagaaagaatcttcctgaagaagtctatgttaagagaagacaagcctgcctcctgctagtttgctattctgcaaagtgctctacatatgaaggaggaaatgacggacccatcactgtcctggggcataactttatggcatgtcctccaactaggacacaatgacagtggtggcccctggaacacatacatgaatgaaagaagacccatgagag

SEQ ID NO: 418031 - DNA, 446 bp, Homo sapiens
aggagatgttttagcataagtgacctagtggttaccttaggagtataaggtgttgaactaattcagtgattcagccggtgacttggtgagcatttcatgtttggttcaccagggtcactcaatatcttttataaaatttcttatttgtttccactaaccaatattgggttctgttgtttgtaactaagaatccaaggtgatacacctaggttgaatctcaggccttcaatatattagctggatgtttctgggtaaattatttaacttctttcaccctcagtttcctcatctgcaaaatgaaaaatattcagtgcaataactcatgggcttgttgggaaggttggtgggggttttcattagarttttccagccttgatgtctcaatatgctcttcttaaataactgtcattctaagaattcaaggaatggatttttgtttctctccc

SEQ ID NO: 418032 - DNA, 560 bp, Homo sapiens
ctcagtggcctagtgacatgtgggagtggcagaccatgagatgtgagtgtgtagggatgggccaggctgtcagagaggccaggtgatttctggcttggttgtttttctctggaaaaagtcttggtggggtcattaattcaggaagtgtgaggaagagagagaggagyatggggtaaggctaggaagaaggcaaggggagagagagaggttttgccctcatacataacctccttcctctcctgaatggaggttgcaggctccaaatctgaaagagcagctcccctctggaaaagccccttcaaaagcccctcacagccccagctttccccgacctctgaggctctcctgcagtgcctgtcctggcagacacccttcctcatgcctgttccttggctggaccagaacctctttggggttgtattaggcaacatagctagacatcacttgggctaagaggtaggaaatggaataactttgagccttgaacagggtgtccttggagatgattttattaacgtgtgacttgcttcaattcagagccctctgagggcacagtctac

SEQ ID NO: 418033 - DNA, 589 bp, Homo sapiens
cccctttcacttgattctcattctctcttctctgccagcatgtgagatatgcctttcatcttccaccatgattgtgaggcctccccagccatgtggaactgtgagtccattaaaactctttttctttayaaattacccagtctcaggcatgtctttatcagcagtgtgaaaacggactaatacagataccaaaggcattaatgccttgtaaaatagctaatagcacaatgtatataatgattcttacatgccaggccctgttctaagcattttatgtgaatcatttaattttgtattaaatatatgcaatgactgctactatcatcaccattttatagattgtattagttatgtattactgcatagccaaaatttagtggcctcaaatgacaaacatttatgttcttaccattattgtggatcaagcatccagatgtggcttagctggttcttagagttagagccttcctaagtctgtaatcaaggtgtcaggcaggactacatacatctcagggctagcctgggaggggtcactttcaagctaagttgtttgaccgatggtcggattcagttccttgtggctgttgga

SEQ ID NO: 418034 - DNA, 559 bp, Homo sapiens
acggcagctcacaacatggcagcttgcctcatcaattgagcaagtgagaagagtcagacagagatggtgggcaagatttaagtcagtctttcataacttaatcttggaaatgacatctrttatactatggtttgaatgatagtgcctcccccaaaatttgtgttgaaactgaatcctcaatgcaacagtattaagagatgtggccattgggaagtgattaagtcatgaatgggattagcacctttataaaatggcttgaggttgaagggagccttctgttgcccttccatcccttcttccacgtgaggacacagcgttcttcccctcaggaaaccactgcaacaagatgttatcttgaaagcagagaaggcagccctctgttgctcttgctgtactctattaagtagaaggagtttactgggtccagtccacacacaagtggaggagattacaaaagggtatgaatgccaggagacaggagcctctgggaatcatgtcagtagctgtctatcacaaagatgaagaaactgaggcaccgaaaatttatggatttggccaa

SEQ ID NO: 418035 - DNA, 559 bp, Homo sapiens
acggcagctcacaacatggcagcttgcctcatcaattgagcaagtgagaagagtcagacagagatggtgggcaagatttaagtcagtctttcataacttaatcttggaaatgacatctgttatactatggtttgaatgatagtgcctcccccaaaatttgtgttgaaactgaatcctcaatgcaacagtattaagagatgtggccattgggaagtgattaagtcatgaatgggattagcacctttataaaatggcttgagrttgaagggagccttctgttgcccttccatcccttcttccacgtgaggacacagcgttcttcccctcaggaaaccactgcaacaagatgttatcttgaaagcagagaaggcagccctctgttgctcttgctgtactctattaagtagaaggagtttactgggtccagtccacacacaagtggaggagattacaaaagggtatgaatgccaggagacaggagcctctgggaatcatgtcagtagctgtctatcacaaagatgaagaaactgaggcaccgaaaatttatggatttggccaa

SEQ ID NO: 418036 - DNA, 559 bp, Homo sapiens
acggcagctcacaacatggcagcttgcctcatcaattgagcaagtgagaagagtcagacagagatggtgggcaagatttaagtcagtctttcataacttaatcttggaaatgacatctgttatactatggtttgaatgatagtgcctcccccaaaatttgtgttgaaactgaatcctcaatgcaacagtattaagagatgtggccattgggaagtgattaagtcatgaatgggattagcacctttataaaatggcttgaggttgaagggagccttctgttgcccttccatcccttcttccacgtgaggacacagcgttcttcccctcaggaaaccactgcaacaagatgttatcttgaaagcagagaaggcagccctctgttgctcttgctgtactctattaagtagaaggagtttactrggtccagtccacacacaagtggaggagattacaaaagggtatgaatgccaggagacaggagcctctgggaatcatgtcagtagctgtctatcacaaagatgaagaaactgaggcaccgaaaatttatggatttggccaa

SEQ ID NO: 418037 - DNA, 601 bp, Homo sapiens
actttctgtctacattcactgtattgttgcgacacctttgatctcccaaatcagcaagaatcccaaagggaagctagcagtggttttgattattatctttaaagtctaaaattccttaggtgaaattcagtatgaaacgcatccatgcaatggggaaggtgagtggctgtgtcaacatctgggtcttattaaggagcagctattttcactaggcagtgaactggagaaaccaaattccttgataaagctagaaatttccaggaactgcttgtaaaaggcatttcttctgtctggttattttgtataacacacagcactgtgagttcctgcccagccaagccttggggataaaaggcattatctatttgtcgagttgtctctaaagctttaatgctctggttcactgtttggttttgacctttgtagaacactatgcaatttayaacacctttccacatacctcctgccttttgatctccatagcagccctgagaaggggcagaggcagatgctgtcctcattttacagttggagaaactgaggccgagagagattctgtgatttgggcaaagctggtgagacagtgcttaccttcagtgag

SEQ ID NO: 418038 - DNA, 612 bp, Homo sapiens
attccttgtcatatgcctgtcgctcccatagacagttcaacagagagacttaagggctaagattcagcccctttatttggcttcacaatctcratgtctaactcgaccttggcatacagttggtgctcaacacaggcgtgaaggcagaagcctgctggccagagttcaaatcctggctcggccacttgatagctgtgaagccttaggcagattctttctccaacactcagtttcctgtaaaacaggagcaatgctgctcacttcacagtgctactgtgaagactaagtgagatccctgatgtaaagagcctggcacacaaaaagcactcaatcaacagaatctaaaagcacgtgggagtgttcactctcagggtctagacaactgttcacctgtgtccacccagttcaaatggaagtctgggtgtgatgagaaccccagtatctgcacatagcagatacttaatatgtatttgcgaatgaatgggtgatgttccctgtcctccctgtcctttgtctcactctcctctctgcccttagcaccatattctccatatccagccccatctctgtgggtaatttgaaattaaaatcccaaagttatttttcataagc

SEQ ID NO: 418039 - DNA, 612 bp, Homo sapiens
attccttgtcatatgcctgtcgctcccatagacagttcaacagagagacttaagggctaagattcagcccctttatttggcttcacaatctcgatgtctaactcgaccttggcatacagttggtgctcaacacaggcgtgaaggcagaagcctgctggccagagttcaaatcctggctckgccacttgatagctgtgaagccttaggcagattctttctccaacactcagtttcctgtaaaacaggagcaatgctgctcacttcacagtgctactgtgaagactaagtgagatccctgatgtaaagagcctggcacacaaaaagcactcaatcaacagaatctaaaagcacgtgggagtgttcactctcagggtctagacaactgttcacctgtgtccacccagttcaaatggaagtctgggtgtgatgagaaccccagtatctgcacatagcagatacttaatatgtatttgcgaatgaatgggtgatgttccctgtcctccctgtcctttgtctcactctcctctctgcccttagcaccatattctccatatccagccccatctctgtgggtaatttgaaattaaaatcccaaagttatttttcataagc

SEQ ID NO: 418040 - DNA, 612 bp, Homo sapiens
attccttgtcatatgcctgtcgctcccatagacagttcaacagagagacttaagggctaagattcagcccctttatttggcttcacaatctcgatgtctaactcgaccttggcatacagttggtgctcaacacaggcgtgaaggcagaagcctgctggccagagttcaaatcctggctcggccacttgatagctgtgaagccttaggcagattctttctccaacactcagtttcctgtaaaacaggagcaatgctgctcacttcacagtgctactgtgaagactaagtgagatccctgatgtaaagagcctggcacacaaaaagcactcaatcaacagaatctaaaagcacgtgggagtgttcactctcagggtctagacaactgttcacctgtgtccacccagttcaaatggaagtctgggtgtgatgagaaccccagtatctgcacayagcagatacttaatatgtatttgcgaatgaatgggtgatgttccctgtcctccctgtcctttgtctcactctcctctctgcccttagcaccatattctccatatccagccccatctctgtgggtaatttgaaattaaaatcccaaagttatttttcataagc

SEQ ID NO: 418041 - DNA, 625 bp, Homo sapiens
ctttggggcagtggagtaccttgctcaggtgacacagtgcccatgaggcagagcttggactctgttcaggtttaggggacttttcaaggctcccttcccacttctcaagctgctggtgactgactctttctcagaaacsccccaccctcagggtttcagaaccccttctttctgctcctgtctctacctttcttctttgatggctgcctcctccatttccagtgggaaagaagtatccaggagacccatgggagcatgggagagattgggctggaacatctagttggtggagacccttggaagccttgggacgaagggatctcttggggccccccaccctttgtgctgagtattcatgaagtcccagaagctgacccaagggaccctggcctctcacccaaactgttcagaagctttcttgttcacagccacatcatgacttccgtaagtttgaggtgcatttgtcttcatgggcgccttcctccataaaagcatatgaaaataatttaatggattttggggggccttaaacatttcattttttttctgaaaaataaaattaaaacattttattcaacttcatcagttcatttgtctttcctttggattttaaggaaatgagaac

SEQ ID NO: 418042 - DNA, 574 bp, Homo sapiens
tgctctgcttaataggaaataaaaagtgcaaggaacacactacccttaaggtaccaatagacatgctccccggggaggactaagcaatgcatgatggtgactcaggaggctagagggtctcatggaggaggacgagtgccaggggctggggacaggtggctgagctggagttatccagttccctggcagtctgggtgcacagggtgatcctgcagaacagcaaatattctgcttgtctgctgctggtatttagacgctgctggaatgtcctggcaggactatctgtccaaatccattcaaaattgatttttgtgtctttgatggggaattttggccaggatccccacggtcccccaattcagttagacattctcctctcccttctttagcttattagctgcttctcggtgggagtctgggccttcatgttccctcttcagccagttcaagtgatctgaagctstaggaaggatggaagtgggtctgtgctgtgaatctgaaatgcctagatgcatttatttaaagcagcagcctcttagcagggttgacacagcccaatgctgaaaagttgggt

SEQ ID NO: 418043 - DNA, 565 bp, Homo sapiens
tccccagttttcccactcaatcctaagaagggttcctacccagggccattttgagcagaatccctcttgcagcctcccagagaaagttctaattacacggctccctggcttctatctctacagmagaattcctgatgaagccctcaggactacattccttggatccaatccaagctcttaggaaaactggcacttggggcaaccacttaaaactaggaaggctgagggagaagtaggtggaaagaaggagcactgatttggaagccgactactgtgccacacaaccccagcaggcactgtctacactgtatctgtgtgagaatagcccttgggtgttgtgcggtagcccaggtggagagtcaagcaacctggtcccacctctgaatgtttaacctgactgcatcattccccacacacaccacaaaacctcaagccttgcatttatgactccagcatacttgattcctttcacagattccatataccaccaatgtcccatgcctaaaacaatacactgcttcccgggcttgaattcacaacacgtatgtgatgtgtaatgagagga

SEQ ID NO: 418044 - DNA, 552 bp, Homo sapiens
tgattaggtcatgatggttgagcataagagacttgagagagattatttctctctcaacactgcatgaggacgtaagaggaaggcagcatctttaagccaggaagcaagccctcaacagacaccraatttaccagcaccttgatcttggacttcccaacctccagaactgtgagaaataaatgtttggttttttttaagccatgcagtctatggtattttgttaaagcagcccaaactaactatgactcccaactcagcctgctggccatggacatgatgactctccccatcccccagactcccaggagttccctcatgcagcccctatctgaaggactctaaggcaagagaattttgagacaagtggtaggggaattaaataaaaagataatccaagaagaaaggctggagtgaagctgttgcatagcttgtaggtgctggttaacaagattgggcaccaataggtgttatctccccagcagaatgttcactctgagaaaaaaagaaccattcactgtctcattctctgtaaaaaccccagtgccctggtca

SEQ ID NO: 418045 - DNA, 552 bp, Homo sapiens
tgattaggtcatgatggttgagcataagagacttgagagagattatttctctctcaacactgcatgaggacgtaagaggaaggcagcatctttaagccaggaagcaagccctcaacagacaccaaatttaccagcaccttgatcttgsacttcccaacctccagaactgtgagaaataaatgtttggttttttttaagccatgcagtctatggtattttgttaaagcagcccaaactaactatgactcccaactcagcctgctggccatggacatgatgactctccccatcccccagactcccaggagttccctcatgcagcccctatctgaaggactctaaggcaagagaattttgagacaagtggtaggggaattaaataaaaagataatccaagaagaaaggctggagtgaagctgttgcatagcttgtaggtgctggttaacaagattgggcaccaataggtgttatctccccagcagaatgttcactctgagaaaaaaagaaccattcactgtctcattctctgtaaaaaccccagtgccctggtca

SEQ ID NO: 418046 - DNA, 552 bp, Homo sapiens
tgattaggtcatgatggttgagcataagagacttgagagagattatttctctctcaacactgcatgaggacgtaagaggaaggcagcatctttaagccaggaagcaagccctcaacagacaccaaatttaccagcaccttgatcttggacttcccaacctccagaactgtgagaaataaatgtttggttttttttaagccatgcagtctatggtattttgttaaagcagcccaaactractatgactcccaactcagcctgctggccatggacatgatgactctccccatcccccagactcccaggagttccctcatgcagcccctatctgaaggactctaaggcaagagaattttgagacaagtggtaggggaattaaataaaaagataatccaagaagaaaggctggagtgaagctgttgcatagcttgtaggtgctggttaacaagattgggcaccaataggtgttatctccccagcagaatgttcactctgagaaaaaaagaaccattcactgtctcattctctgtaaaaaccccagtgccctggtca

SEQ ID NO: 418047 - DNA, 552 bp, Homo sapiens
tgattaggtcatgatggttgagcataagagacttgagagagattatttctctctcaacactgcatgaggacgtaagaggaaggcagcatctttaagccaggaagcaagccctcaacagacaccaaatttaccagcaccttgatcttggacttcccaacctccagaactgtgagaaataaatgtttggttttttttaagccatgcagtctatggtattttgttaaagcagcccaaactaactatgactcccaactcagcctgctggccatggacatgatgactctccccatcccccagactcccaggagttccctcrtgcagcccctatctgaaggactctaaggcaagagaattttgagacaagtggtaggggaattaaataaaaagataatccaagaagaaaggctggagtgaagctgttgcatagcttgtaggtgctggttaacaagattgggcaccaataggtgttatctccccagcagaatgttcactctgagaaaaaaagaaccattcactgtctcattctctgtaaaaaccccagtgccctggtca

SEQ ID NO: 418048 - DNA, 565 bp, Homo sapiens
cattcactgtctcattctctgtaaaaaccccagtgccctggtcagtgtctggcactatttgtcaaatgaataaataaacgagtgaatgaatctctttcggtctctattgcaaccttatagagggttgttatacagacttgacagatgagaacactgagattctagacgtcagataaatcccaggcagaaagttgcagaccttggacacagatctgactctatagacacatagggaagatgcagatcattgtcaatgtaattccatgaactagatcmatcaaaaagaaagctctttttcttcaaaatgctcaggacactttgagcttgctttgtttagattttacttcaaatatctactgtattatatttatagcaatgtgaatctcttactctcttttttgtcccgtcattttacatgaggtgtagcacactgatagtatttattacactttactgcaataattttctaacgcctcattagaccatgaatttttatctcaacatctccagcacctagtaaagtccactgcatggatggatggatggatggatgaatacgtaaaac

SEQ ID NO: 418049 - DNA, 565 bp, Homo sapiens
cattcactgtctcattctctgtaaaaaccccagtgccctggtcagtgtctggcactatttgtcaaatgaataaataaacgagtgaatgaatctctttcggtctctattgcaaccttatagagggttgttatacagacttgacagatgagaacactgagattctagacgtcagataaatcccaggcagaaagttgcagaccttggacacagatctgactctatagacacatagggaagatgcagatcattgtcaatgtaattccatgaactagatccatcaaaaagaaagctctttttcttcaaaatgctcaggacactttgagcttgctttgtttagattttacttcaaatatctactgtattatatttatagcaatgtgaatctcttactctcttttttgtcccgtcattttacatgaggtgtagcacactgatrgtatttattacactttactgcaataattttctaacgcctcattagaccatgaatttttatctcaacatctccagcacctagtaaagtccactgcatggatggatggatggatggatgaatacgtaaaac

SEQ ID NO: 418050 - DNA, 564 bp, Homo sapiens
gcacgacattgctctaactggctcttgattctggaagaaagatactggccatctaccttggagcttcccctttctgtccatctccacactcatgtctgcctttctcagtggcttctttttatcctctcccctctgccctccaaggagtctaagagctggtgggacccaggagggcagaggcccagcagggtagggtgggagcaagccttcccgggtagggttgggacttcaggaggatcaaggccctcagttcaggacttcaagggtccccagtgttttcttgagtcaaaccagtgggacaagagcacatcatggccaatgaagtacaggagctggcacyttccacagggcacctgtaaaacacagttgggaactctgaaattcatcctaacctcagacagatgggtggctcctgtctgaaattcctcctccaaccccttgctttttaaagagaacaactcagtttttgtttttttttaaggaagagtttggagttgaagatggtctgatcatttcagatgtttctccatagaacacaaaatgctgggtgctaagtgtgtgcac

SEQ ID NO: 418051 - DNA, 590 bp, Homo sapiens
tggggaacctgccccaatagtcacataggttcttttctgttttccctaagcatcggccggtttgagwaataaagggacagagtacaaaagagagaaattttaaagctgggcgtccgggggagacatcacatgttggtaggttctgtgatgccccacaagccgtaaaaccagcaaggttttattagggactttcaaaaggggagggactgtgcgaataggtgtgggtcacagagattacgtacttcacaaggtaatagaatatcacaaggcaaatggaggcagggcgagatcacaggaccacaggacggggcgaaattaaaattgctaatgaagttttgggcaccattgtcattgataacatcttatcaggagacagggttttgagagcaaccggtctgaccaaaatttattaggtgggaattttttcttcctaataagcctgggagtgctatgggagactgggatctattttacccctacagtctacagaccataaaagatgaccacgcccagagagccgtctatagacctacccccaggcacatattctctttcccagggatgttccttgctgagaaaaagaattcagt

SEQ ID NO: 418052 - DNA, 590 bp, Homo sapiens
tggggaacctgccccaatagtcacataggttcttttctgttttccctaagcatcggccggtttgagaaataaagggacagagtacaaaagagagaaattttaaagctgggcgtccgggggagacatcacatgttggtaggttctgtgatgccccacaagccgtaaaaccagcaaggttttattagggactttcaaaaggggagggactgtgcgaataggtgtgggtcacagagattacgtacttcacaaggtaatagaatatcacaaggcaaatggaggcagggcgagatcacaggaccacaggacggggcgaaattaaaattgytaatgaagttttgggcaccattgtcattgataacatcttatcaggagacagggttttgagagcaaccggtctgaccaaaatttattaggtgggaattttttcttcctaataagcctgggagtgctatgggagactgggatctattttacccctacagtctacagaccataaaagatgaccacgcccagagagccgtctatagacctacccccaggcacatattctctttcccagggatgttccttgctgagaaaaagaattcagt

SEQ ID NO: 418053 - DNA, 664 bp, Homo sapiens
tgataattctcaccatatttccctactggaatggtctccagataacttatggcagttttcagattctgaacccatctttataagaatgtttatttataaaatgtttattgtaataaatgtgtcttgattttcgawgaaaattctaagacaagacccaagagacattgtgggtcatctaagtatcacagaaataattgcataacttaaactaaacactctaccatccactgctccaatccaattaattggcattttcttgtatgtacaatgcacccttatgtcttattagcttagcatttattacactgggggacaataatgtagtaatgtttgattgtcatatatttccatattcttaagcaacaatatttggcaaaatgtctagctgagagtagcaaatacattgtttgtcttcagacaactatggagaaaataactggttctatttgttcaaataaatctgtcacagaaagtgagaagtagatgtggttaaaaatgtatgggaaaatattcaacctcactatcaaaagaaacacaccttgtaaaaaatattaccaggctttcaatttgttaaattcataaaacatttgagaagattgcctatggtttgtgagagtgtgtgcagtggatgcaaattgtcatttggtgagctttttgacaacat

SEQ ID NO: 418054 - DNA, 605 bp, Homo sapiens
cattgctgtgggccctcccttagtttatctaccattggaaagcaacttgtaagtatcattttcaaggaacaagaaaagaatatatttttgctgtgacagaagtcacttcttgtaaccctgcctgttacattccttgcataatgtcaggtccatattcccagacatctgtttgaacacaatgtaggggcatctagccattcccaaaagtgagaaacctacaagaacacccaacattgttttggggtttgatctgattgatccacattgaattgagttgaagaggaaaaaaacaaaacaaaacaaaaatgagaaaggttttccatttttccggtttcctgtaactgtacaacagaaaactccaaacrcatttagagtggtgattcaatgcatagtagtaatccatgctttgcaatatcccatcatgcataacataataaaacaaatcaagctggggttatagaggtggacttttaatcactggcttgttctgaatttccctgcataaatacttttgcgtagaatcagtcattctttgaaaaatattctcaaccgttaaaaatcacaaaacagattgaatgttatttagccacaaacaatagaaccta

SEQ ID NO: 418055 - DNA, 605 bp, Homo sapiens
cattgctgtgggccctcccttagtttatctaccattggaaagcaacttgtaagtatcattttcaaggaacaagaaaagaatatatttttgctgtgacagaagtcacttcttgtaaccctgcctgttacattccttgcataatgtcaggtccatattcccagacatctgtttgaacacaatgtaggggcatctagccattcccaaaagtgagaaacctacaagaacacccaacattgttttggggtttgatctgattgatccacattgaattgagttgaagaggaaaaaaacaaaacaaaacaaaaatgagaaaggttttccatttttccggtttcctgtaactgtacaacagaaaactccaaacgcatttagagtggtgattcaatgcatagtagtaatccatgctttgcaatatcccatcwtgcataacataataaaacaaatcaagctggggttatagaggtggacttttaatcactggcttgttctgaatttccctgcataaatacttttgcgtagaatcagtcattctttgaaaaatattctcaaccgttaaaaatcacaaaacagattgaatgttatttagccacaaacaatagaaccta

SEQ ID NO: 418056 - DNA, 475 bp, Homo sapiens
ccaaacgcatttagagtggtgattcaatgcatagtagtaatccatgctttgcaatatcccatcatgcataacataataaaacaaatcaagctggggttatagaggtggacttttaatcactggcttgttctgaatttccctgcataaatacttttgsgtagaatcagtcattctttgaaaaatattctcaaccgttaaaaatcacaaaacagattgaatgttatttagccacaaacaatagaacctacatccttcagctgccatgcagctaccatttccttctgtagcattacaagttgcttgcaatgctttatttgctcccaccgtgcctagaatatatatttggtacataataaaattgacccacagccaagtgaatggtttgatttttgcctgactcatttactgagatttgttatccatctgtcctagaatggaatatttctgccttgctgtagacatgtgaaaatgaatg

SEQ ID NO: 418057 - DNA, 586 bp, Homo sapiens
tgtttttcactacaggtgaattttaaaagtcaacagaggagtttgtttggagtcattttgagtttttattaattaatttaggcagcttcaacatttctacaatgtgtcatctcacttactgacaatttatgtttcaattttctgaagcacttttttcttaagctttatgcttttcttcacatttttcattcctgctacttactaaattggctcccgagaatgtaattattttgtttgctactaagaatgtgatttttctcacataatattttctgagtgtcatttggatgtagaaacctgtttatgtaagtatctttctgaattcttctgaattcatgtgttttgtcaaattcttttcaaactcttctataaggtttttttwaaaaaaaacccttcatgagattatttaatcatttttatgatagcagaacatatttatttattctgattgtgcttaaaaagattttcactgcttcagtgcttagcatgaagatggtatttgtcttatgtcatctttcagatcaagaaagtagtaaactgttctgaattttgtcagatttggcattttaaaaatcttttgaaagtt

SEQ ID NO: 418058 - DNA, 586 bp, Homo sapiens
tgtttttcactacaggtgaattttaaaagtcaacagaggagtttgtttggagtcattttgagtttttattaattaatttaggcagcttcaacatttctacaatgtgtcatctcacttactgacaatttatgtttcaattttctgaagcacttttttcttaagctttatgcttttcttcacatttttcattcctgctacttactaaattggctcccgagaatgtaattattttgtttgctactaagaatgtgatttttctcacataatattttctgagtgtcatttggatgtagaaacctgtttatgtaagtatctttctgaattcttctgaattcatgtgttttgtcaaattcttttcaaactcttctataaggttttttttaaaaaaaacccttcatgagattatttaatcatttttatkatagcagaacatatttatttattctgattgtgcttaaaaagattttcactgcttcagtgcttagcatgaagatggtatttgtcttatgtcatctttcagatcaagaaagtagtaaactgttctgaattttgtcagatttggcattttaaaaatcttttgaaagtt

SEQ ID NO: 418059 - DNA, 570 bp, Homo sapiens
actgttctgaattttgtcagatttggcattttaaaaatcttttgaaagttggaattttcagcctttttgccaaaacaaaactgtccattaagatctttggcaccagagtatccaagagaacccctttaacctctttttcattgtttatgtagaactatattggggttttcacagtgctcttgcttttctaggtgtggctgttttatgggctcttgtgacacctgtgcatacttcctgcakcacaataatgtacgtacatacatatacatacacacactccatatatatatatacacatatacatacatacacacacagttggttcttgttatttatgatagtaatgctctataaagccactgtgaatgctgaattatcataataccattgctcttaggagaaacacaggcttagggagtctatgaagtctctggtcacaacattttcatcaattggtcaatacatgaccttggtttgtgtatctctgtttaaagacactgtatttaatatacatagttgattcattaatgctgaatgcacagccaacagcactatgactcatgcctgaga

SEQ ID NO: 418060 - DNA, 577 bp, Homo sapiens
tgtttctatttctattttcggttgaataatttaattaaatacctgaaaaatagagattgtctttctaaccattttttcagcaccttcccattttcaaatgaggccggatagatgtgggtgaaggttcttaaggtatctaaagcctaattttattacaagaggatgcaacattatgctcagattagttttcctgtctaataggatgcattcctagcattggtaacacttatgacaccattagagggaattattttggggattttggaaaatcttggtacaggatgttaataattattttggttcatctgcgggaatttcttggcttctacattcctttacagaaaaaccaaaaagagctctcttgaagcaaactacagtagcttcacagagcaggactggcggagcgcaaygttgcctgcaacactaagggaggtggccttctctgcccagactgtttcccagcaagcagatccttggactccaaagtttttgttcatttactcccatcagtagaaatgtttaaggcattcattctcaattggttggcatttcttactttacaaagtataggtatgca

SEQ ID NO: 418061 - DNA, 560 bp, Homo sapiens
gggatcttggtggccatgccattttgccctctgatattatttggaaataggggaagatcataggttttagacccagaaagagatgtgtttgaatcttggctctgcttctaatgcaaattctgacccaaactcactacgtctgaagtgcttgcacatgggaagcaccccattaccatgtgcttctttgaatatcaaattatatttgtttagacattaggaggtggtgtttatgtatggcaagatatttgtgtaatatatttattcaaaatacaaaatatttacaggacccagaaggctcattcattttgtactaaaaactactgaccaatggagatattccaaatacacaattgcatctcacatcatgacttatatgctttaaatgagttaaacttgaatcactttagwatatgaacattttgatcagccagtgaagctttccataaatgctatcagatgctagactggtgaaaagatatagacattagagtgagtattggcctatatactggaaatgtattatgttattatgaatttattctcatcaaaattacccctct

SEQ ID NO: 418062 - DNA, 614 bp, Homo sapiens
acttagttgataattcttgtaatagtactattgtgtttatacgaatctgttcaggctatcttaacaaaacactacaaactacatggcttaagcaacagaattccgtttctcacagtactggaggatgggaagtttaggatcaaggtctagcaacgtggagattctggtaaaggctctcttgctggcttcaggcagccacattctaacatggtagagagagagtgctggtgtctcttccccttcttataagagcaccagatctattgagtgagggcccactcttatgacttcattttagtatttcctcaaaggccctgtcttcagacacagtcatattgggggttagggttccamattattaattttgagggacacaattcggtccatagcagtgtttatatccatttaggttgttgggtgcaagagtgcacatccaaagattgaaaaccacagatttgaaaactgtgaagcttagtaaagaaatgaatctaagatttgaatatgtagtttcagaaaagttgtcaaactagaagtccaaggaccaaaccaccccactcatggctataagaactttgcctaactgtataatctgtctgattatattttgttttcaa

SEQ ID NO: 418063 - DNA, 642 bp, Homo sapiens
tgtggctttgtccttcactgtgagcacaaagttcctggaaatatatgtttatacacacacaaacacgattgactaagaaaagaaaaaacatatataggtgtgtatataatctatgtatattaaaatctattttattagttattctgtagttttagctgctattatgaataaaaatataatctaattttaaaatttattctattggcataaaatgcaagacaattttgacatatacagcttttatcattcattttactactctgcctcactaattcttaagtacctttaattgttttttcaattttctagatatttagtgtcaacatctgcaaactaaacattgttgtagctttaaaatatatgttaataatttaacaattgctttagctttctggtttatcaagaatcttcaaagccatgttaagtaagagtggtactggtgttcattctrtatttttcccttgatttttaaaagaaatatataattgcttttttctttccaatgatatttgctgttaagtaatggtcatgttcttctactcttatcttacctagagattttttaggaatagcctcacatttttaggcaatttaccaaatgcctttccatcatcacctcccatgaatataaacagatggttt

SEQ ID NO: 418064 - DNA, 642 bp, Homo sapiens
tgtggctttgtccttcactgtgagcacaaagttcctggaaatatatgtttatacacacacaaacacgattgactaagaaaagaaaaaacatatataggtgtgtatataatctatgtatattaaaatctattttattagttattctgtagttttagctgctattatgaataaaaatataatctaattttaaaatttattctattggcataaaatgcaagacaattttgacatatacagcttttatcattcattttactactctgcctcactaattcttaagtacctttaattgttttttcaattttctagatatttagtgtcaacatctgcaaactaaacattgttgtagctttaaaatatatgttaataatttaacaattgctttagctttctggtttatcaagaatcttcaaagccatgttaagtaagagtggtactggtgttcattctgtatttttcccttgatttttaaaagaaatatataattgcttttttctttccaatgatatttgctgttaagtaatggtcatgttcttctastcttatcttacctagagattttttaggaatagcctcacatttttaggcaatttaccaaatgcctttccatcatcacctcccatgaatataaacagatggttt

SEQ ID NO: 418065 - DNA, 602 bp, Homo sapiens
aagttacatataaagatgtagatgcagacatgaaaatgcatgcaaatacatacacatgtagataaatataggtagagctatcacaggcgtattcctttcgatcttcttttgartataattcggaatttatcctgagaaatactgataaaatatagggctaggcaaatgtaatttgggatgctgtcgagtgttattagtggaaacgacttctcttttctgagccttgtgaaatagcttccaaggggcagctggtagtgatttaagggcagtcacagagacagccaattagcattgatcagtcattatacttatagcaccagactatcatgcaatacaaaactgatgccgacttgaccttttcatcccctatatttccttccccatctcaaacagcagccaatcatatgcaatgggcttcattatgaataataggaagcatcttacattccttcgtagggtggtccacctcggtatggcacaggatgcttcacaaggccctgcctgtagctttttgtagtttacttgagagaccactaatggaattaacctctacagctaacatttactgaggaaccactaattgtaaggtacactaagtgcat

SEQ ID NO: 418066 - DNA, 562 bp, Homo sapiens
tttgaacttgctaacgagattcagaactggatctgtaacagattttcagttaatacattttgaatataaaatgtttacatttccagtctcttttaggggttctgtttcctttgcatcaacttttaatttttgaataattttagatatagagaaaagctggaaagacagtgcagagagataacacgaacccctcgcccatattcccctaatgttaacatattatggaaccacagagtatctgtcaaaatgaagatattaacattggtaagttactatgagctaaactccagacctcattgggatttcctctgtgtttccatgggctccctttctctgttccaagattcaattcagaatcccatgttgagatcatgtcattacagttcactggcttcctcccatatgtggcaattaattagtctttccttgtcttcatgaccttgacaattttgaggagtactcctcagatattttgtagaatgtcccttgattggactgggttwaccagatgcttttgtgaacattatactgtggttctgggttaccgggcagaatatcacag

SEQ ID NO: 418067 - DNA, 433 bp, Homo sapiens
agtgcaattttctttattcatgcttgcgtttaacatgctggtggttaattgaaaaagcacacagtgaagaaaaacatttcacaaaattacaaatattctaggaagcatcaggagggattgggagaggtcagttggctcaatctctgccttacaacaaatatcaagaatgcaatgatcctgaatcttaagattcgttaagaattctacctttctctcaktaacttctgctctttgcaggaaagatattccaaatgccatgaaatcaaacaattcttacaatgtgaaatgatttattcaactttttattatatttccttggaaggttgtttcaaactggggatttaggagatatataggatatccatctatccaactatccatccgtccgtctttctatctatcctcctctctctgtgtatctacctatctacat

SEQ ID NO: 418068 - DNA, 567 bp, Homo sapiens
aactcctgggcacaaacaatcctcccaccctgcttcccatgctgggatcataggattaagccactgcgccaggcccctcttatttttcatttcatagctaaaggaagcgaggctgacagaggttaagycccctgctccagggtaggcatcttgaaatgggtggagctggaacttgaaaccctgggtgtttccttaacttaaagctgtcagtgcattctctttgtaacttccctccttctccaacagagaagacacatcacgtcttttagaagacagctctcccaccagggctcatgactctaacctgtttaacccactttaggactttagggaccaggttgcttttcctgtatcttcaacctctcccctcttctgttctctttccatgagcatccacatgtcaagtattttctgcaaagtcttccctcaactctgtctctccttggatcaaccaattaatgcctcaccttcctttcagggtcacatttctgtttattttctctctctctctttttttttttttttttttttgttatgaggtcacaccatgttgcccaggctggtttc

SEQ ID NO: 418069 - DNA, 622 bp, Homo sapiens
  misc_feature (1)...(622): n = A,T,C or G
agctgactatatgattcagaagaatcatcctctttacaagaatacagtccactattctttaaacatgagattacntttactttctttaagatnaaatgaactcccctgaaggatgttccagaggaatgtctattttgactagtctgcccattcttaatgctggcaggctcttccctatctaatccacaaatgagttgttcctttaaaatctgagcactttggctgggtgcggtggctcacrcctgtaatcccaggattttgggaggctgaggcgggtggatcacctgaggtcaggagttcgagaccagcctggtcaacatggtgaaaccccgtctctactaaaaatcaaaacaaaaaaaaaaattagctgggcatgctggtgtgcacctgtaatcccagctactcaggaggttgaggcaggagaattgcttgaacctgggaggtggaggttgcagtaagccaacatccagccactgccactgcactccagcctgggcaacagaaccagactttgaaaaaaaaaaaaaaaatccaagctctctaagaaggcaaatggtataggcacaatcaacttgtttattttattctctggctttttttttttttttttttgaggttaggt

SEQ ID NO: 418070 - DNA, 560 bp, Homo sapiens
aaagagctgtatctttactcaccattggtgagctaygaaaacgatttctccagggattcatgctcaaggtatattcatgtatatgcatgtgtctgtgtgtatatacatgtatatgtacatatatttgcatatatatacacatgcatttataattatatagacatgcatatctatgcacatttcaaaccatgtatgtgagtattccttcaagaaaaaaaacagtattaaattaaacttctctgcgttttaggttgttacaatatacactgcaacactctatattgataacacgttttgacttaagttcatgctacaaggcactaatttgtagcataaaacatttccaaaaagtaagatatactagatttgaaagcatatgggtgaattaaatgcaaataactgtccttctctatcaatcaaaggaatttttaaaacattaccaataatattctagcacacaaagacctttctttgattaagaaaaggcaaatctctgcaaagatttaaacatgctcaatagttgggattttttcatttgaagcaagaagttttgtgaattt

SEQ ID NO: 418071 - DNA, 560 bp, Homo sapiens
aaagagctgtatctttactcaccattggtgagctacgaaaacgatttctccagggattcatgctcaaggtatattcatgtatatgcatgtgtctgtgtgtatatacatgtatatgtacatatatttgcatatatatacacatgcatttataattatatagacatgcatatctatgcacatttcaaaccatgtatgtgagtattccttcaagaaaaaaaacagtattaaattaaacttctctgcgttttaggttgttacaatatacactgcaacwctctatattgataacacgttttgacttaagttcatgctacaaggcactaatttgtagcataaaacatttccaaaaagtaagatatactagatttgaaagcatatgggtgaattaaatgcaaataactgtccttctctatcaatcaaaggaatttttaaaacattaccaataatattctagcacacaaagacctttctttgattaagaaaaggcaaatctctgcaaagatttaaacatgctcaatagttgggattttttcatttgaagcaagaagttttgtgaattt

SEQ ID NO: 418072 - DNA, 500 bp, Homo sapiens
atcccacacatgattttttttttttttttttgaagccaaggaattaagtggcctggaagacaggccaactcattacagcctcgagccaaatttgaagttgcggggaagacggacaaacaacaagcttcttttagctattcctgccctycccaattcaacacttcaaacagggcatgttcacttggaccagagagacatgaggttaacaaagatagaagaaaatggctcaatcacttatatacaagatagggtaaggtcttttcatgagttggctctagccatcaaactttatctagatggcagcttatgctacttcttagctatgcagtcacatttgtgatgtgttaatgcttgcaaaagatacactcagaagaagaaaatgcaaaaataagactcaatagtgcagcacacagaatgacagaggtagccacctctgaaggtcagtaaaaaggagcagtagataccaatgacacagacatagtacaagaggtgggacctac

SEQ ID NO: 418073 - DNA, 438 bp, Homo sapiens
tttcaagtgattctcctgcctcagtcttttgagtagctggagttacaggtacatgccaacaagcccagctaattttttatttttagcagaaatggggtttcaccatgttggccaggatggtctcgatctcctgacctcgtgatccacccgcctcggcctcccaaactgctaggatcacaggcatgagccaccacacctggccaattccatcctttttaagtgtgcattkaaaaattatattcttcatagagctgatggagcattcagatggaacctaaacagtgcacttttctccctcactgatatctgaggacccagcaccatccccaataagaatgttttatattcccacctgcccaggctgacctgtcaacatagggaatacttccaatatttcagcatataaactcaagatgagtattatttgtgatatgtaag

SEQ ID NO: 418074 - DNA, 574 bp, Homo sapiens
gtcaattttatttaaaaataaaataatactggacagcatcataaaaccatatataaaataaagctctctattgaatgtaaatatacaaatgtagaaatctttactatcataatgatgatgcataaaacccttaaagctcttctgtagaatatttaaaacaataaaaatctgcataaatgttaatacacaaaataatttttatattaataaactgaaaaatacagaggtataatttttatattcaactgaagttgtcatgagattaaaatatatttttaagttttagatgttttatgtaaaytccatttttaagatgatgtggttggccatgtcccaacccaagtctcatctttaattcccatatgttgtgggagggatgcagtaggaggtaattgaatcatgggggcagatgttttctgtgctgttctcatgatagagaataagtctcatgaaagcagaaggctttataaggcagttttcctgcgcaagctctttcttttgtctgccaccatgtgagacatgcctttcactttccaccatgattgtgatgactcctcagtcacatgaaactgtg

SEQ ID NO: 418075 - DNA, 554 bp, Homo sapiens
gttgagaattcaatgtctaattccagtgactttggattacagtcaccccctgatgatcttatttctttccatgaagagctggtrcttgtagctcctgtggccccgattcacacagcccaggaccatatacatgctaattcttttcttttcaaacctacagagtcacctaatcgctctgggaccaactaccatttacctataattctttaggccctcccccatccacttcaggccctcactctcctgtcatttcagttcctcaactggtcaccttgccatccactcagcctgcttctctttatccttcttcacatatggatgcccgtaatcaccagtatacttctgctccttctgctcccctaatgcccctttctcacactctcattctggtccgaccccctcaccctcagtttccctgatctacacatgtttttcctgtcacttctatgccgactccatctcagatgcctactctggaaacttcaatgcaatgcttattatgccaaaacaaagaaacaaatatattagatatgtggacttatctggtcgtgtta

SEQ ID NO: 418076 - DNA, 630 bp, Homo sapiens
taaacattgggcaagtaattgccactctaagtatgatatagatggaaacctcctgccaaaacaccagggaaatggggactggggccaattctaggccctaatatcaaatgggrtacttcagactcagatcaatgttgggtttccacttcaggcagtctcaacacagcccccattacaaacaaatttacctacagccaacccaaattagtccaagcctctccttctctctcagtacaatgcttgtccacctccacagtagggggtggggcagtcgatctctctagtactattcctttaaatttactacctaactctttgcctttaattgttcccacgggggtcactggccctttatctcgaggtttggtaggcctggtgttagatagggcatccacctctggtaaaggaatgaccattcgtaatggtctcattaattctgattccattgatgagattaaattaatcatgtctgccaaggttcctgtttccattctggctggtgagtcaattgctcaattgcttttactacctaatatcgttttaaacaaaggaggtaagacacatggccctggaattggctcttctggtgaaaagcctgatattggattattataatttctaaacaatggc

SEQ ID NO: 418077 - DNA, 630 bp, Homo sapiens
taaacattgggcaagtaattgccactctaagtatgatatagatggaaacctcctgccaaaacaccagggaaatggggactggggccaattctaggccctaatatcaaatgggatacttcagactcagatcaatgttgggtttccacttcaggcagtctcaacacagcccccattacaaacaaatttacctacagccaacccaaattrgtccaagcctctccttctctctcagtacaatgcttgtccacctccacagtagggggtggggcagtcgatctctctagtactattcctttaaatttactacctaactctttgcctttaattgttcccacgggggtcactggccctttatctcgaggtttggtaggcctggtgttagatagggcatccacctctggtaaaggaatgaccattcgtaatggtctcattaattctgattccattgatgagattaaattaatcatgtctgccaaggttcctgtttccattctggctggtgagtcaattgctcaattgcttttactacctaatatcgttttaaacaaaggaggtaagacacatggccctggaattggctcttctggtgaaaagcctgatattggattattataatttctaaacaatggc

SEQ ID NO: 418078 - DNA, 615 bp, Homo sapiens
tcaggcagtctcaacacagcccccattacaaacaaatttacctacagccaacccaaattagtccaagcctctccttctctctcagtacaatgcttgtccacctccacagtagggggtggggcagtcgatctctctagtactattcctttaaatttactacctaactctttgcctttaattgttcccacgggggtcactggccctttatctcgaggtttggtaggcctggtgttagatagggcatccacctctggtaaaggaatgaccattcrtaatggtctcattaattctgattccattgatgagattaaattaatcatgtctgccaaggttcctgtttccattctggctggtgagtcaattgctcaattgcttttactacctaatatcgttttaaacaaaggaggtaagacacatggccctggaattggctcttctggtgaaaagcctgatattggattattataatttctaaacaatggctcacctgcacaatacacattcaaggaaataagtttaagggactagtagatactggggctgatgtttctgttatttcctctactttacagccttcctcctggcttaaacatcctgccaacatggcactagtag

SEQ ID NO: 418079 - DNA, 598 bp, Homo sapiens
acaatatgagtgattacaacctgatgaatcaaaagctatgtttaactctgtgatgtgaagtcatactttaaaatgcagtttcacagatagcttctttctagtttttatcaaggtatattcagtttttcacaataggcctctaagggatcccagatttcccttggyagattctaccaaaagagtgattccaacttcctgaatcaatataaatgtttaactctgtaagataaatctagacattgtaaataagttaaacaggtagcttctttctagtttttatctggagttattgagtttttcaccataggcctctatgggctcttaaatgtccctttgcagatgctaactaaagactttttcatacctgttgtgtcaaaagaaatgtttaactctgtgagatgaatccatacatcacaatgcagttacacatttagcttttttctactttttatctggggatattctgttttttaccataggcctctatgggctcttaaatgtccattcacagattccatctaaaaaatgtttcaaacacgctatattgacagaaatgtttaactctgttagatgaataaatacatcccaaacagtttca

SEQ ID NO: 418080 - DNA, 557 bp, Homo sapiens
atctggaaatattgggttgttcaacataggactcaatgggctccaaaaaggctcttcacagagtctacaatatgagtgattacaacctgatgaatcaaaagctatgtttaactctgtgatgtgaagtcatactttaaaatgcagtttcacagatagcttctttctagtttttatcaaggtatattcagtttttcacaataggcctctaagggatcccagatttcccttggtagattctaccaaaagagtgattccaacttcctgaatcaatataaatgtttaactctgtaagataaatctagacattgtaaataagttaaacaggtagcttctttctagtttttatctggagttattgagtttttcaccataggcctctatgggctcttaaatgtccctttgcagatgctaactaaagactttttcatacctgttgtgtyaaaagaaatgtttaactctgtgagatgaatccatacatcacaatgcagttacacatttagcttttttctactttttatctggggatattctgttttttaccataggcctctatgggc

SEQ ID NO: 418081 - DNA, 567 bp, Homo sapiens
taactctgtgaggtgaatccacgtatgacaaagcagtttgactgatagcttcttcctagtttttatctggggatattttattttcatcataggcctcaaagtgctcccaaatgtaacttcacagattctacctgaagagggagttgcaggaagtcagggaccctgaactgagaactgaggcacccrctgaagccatggcagaagaacatgaattgtgaagatttcatggacatttattagtttcccaaattaatacttttataatttctcacacctgtctttactgcaatctctgaacataaattgtgaagatttcatggacatttctcacttccccaatcaatactcttgtgatttcctatgcctttctttactttaatctcttaatcccatcatgaccctgtgatgattctgttaactgcacaaattgtttaaacaatataaaatctgggcaccttgaaaaaagttcatagtaacaacgatgttcagggaccaagggagataaccattagttctggctgcctgagacctgggtggaacagagccatatttctcttctttcaaaag

SEQ ID NO: 418082 - DNA, 539 bp, Homo sapiens
agcagatattggtgaagtgcaaatgctgctgcctgatcgttcctctggaagttttgtctcagaggagtacctggtcctgtgtgttgtcagtctgcccctactggggggtgcctccttgttaggccactcagggatcagggacccacttgaggaggcagtctgcccgttctcagatctcaagctgtgtgcttggagaaccactactctctttaaagctgtcagacagggacatttaagtctgcagaggttattgctgtcttttgttagtctgtgccctgcccccagaggtggagcctacagaggcaagcgggcctccttgagctgtggtgggctccacccagtttgaccttagaaatcacccgtcttctgtgtcactcatgctgggagatgtagactggagcagttccttttcagccawcttggctccacaaaggtgtgcattcttctaagagagttaaatctttcttttgattgagcagtctggaaacactgttttggtagaacctgcaaagggatttttgggagcgcattgaggccta

SEQ ID NO: 418083 - DNA, 566 bp, Homo sapiens
aatttcgccctggtcctttgatctcaccctgcctccctttgccctttgatattttattacattgtgaagcatgtgatctctgtgacccgcatcctgytcgtacaccccctctccttttgaaaatcactaatgctggttttatggctcagggggcatcacggaacctgccaacatgtgatgtcacccctggacacccagctttaaaaatttttgtctttgtaattttctgttaatttcttagaccagtcaacacttaggtaaaatagaataggactcatgttgaaatatcgggggctgaatttcccctaacagagagtttcaaacctattgtatcaaaataaaaatttatctctgtaagatgaatgcacacatcacaaagcagtttcaaagacagcttttatctagtttttaactagggatattcggtttttaaccataggactcaaaattctcccaaatgttccctcatacattctaaccaaagagtgtttccaacttgctgagtgaaaagaaagattcaacactctgagatgaagcgacatatcaaaaagcagtttaacagatag

SEQ ID NO: 418084 - DNA, 422 bp, Homo sapiens
agatagtctcttcctagtttttatctgcagatatttggtttctcaccaaaggactcaaaggactttcaaaagtcccttcgcagactctgcaaaagtactgtttgcaacatgctgaatgtaaacaaaggtttacctctctgggatgaatccacacatcaaaaagaagtttcacagatagaccctttctagttttgatcttgggatattyggtttgtcaccataaactacagtgggctcaaaaaagtcccttcacagattctagaaaaaaagtgtttctaacctagtgaatcaaaaacaagtttaaccctttgagatgaatccacatatcactaagctgtttcacagagagcttatttttagtttttatctgggggtattctgtatttcaccataggcctttggggttcccaaacctcccttta

SEQ ID NO: 418085 - DNA, 560 bp, Homo sapiens
taaatttcccaaacacttatgagtttacagtttcaaatctcttcaaaagtaggtttcatatgagtctttgaacagggctcagcactttcagtgaggttaaaagtgggtgtccacacaaaaggtttcaagagataagaaagtctcccactacccaccacacagaagaccagcagaatcacagagtccatgcccattctttttcacctgtgggaatatttcccaccatgtgaaagaccaccactttttcacataytattctttccaatgagaacatggtaaaaatttgatacttggcaggttttgttcagggtttcactctactttttcactgggtctcagtctgccagcattctgctttagtgtcttgttgaaccccccctctttaagggcacacaaatccaaatcagtcagttcatgcactaacatgacctctgcaagcccctcagtccacagaacaggaatctccattcctgaccatcacaggagggaagttctaacttacattgtcaaatattagctaaaattagctgttgaataggtaagctgtgatttatttctgg

SEQ ID NO: 418086 - DNA, 500 bp, Homo sapiens
tgttaatgtgataaattcaacttgtgaatttttctactgttgaataatattaattttattaaattgattttctttcctcatatataccattccttcatatggataaattccatatgtcyttaatactggttttttgatactaaggaactcaacttgttactattttatatggcattttaatccatatgctaaaaaggagattggtctatagtattctgttttatgacacttttacctggtttgtgtatcatgattttattggcttcataaaacatgttggctgttaggtgacaattttccatggatcaatgtgtgcctgcacatcttgcaagcagaagtactaactgcctttgttctggactatttttgaaagatatttgcacagcaaactgtctcggaagacagagtgtctccatttggagcagagtataggtttgtttgtattagaatatagcatatttaatgcctattataaaagatttgagttttgtaagcttaga

SEQ ID NO: 418087 - DNA, 500 bp, Homo sapiens
tgttaatgtgataaattcaacttgtgaatttttctactgttgaataatattaattttattaaattgattttctttcctcatatataccattccttcatatggataaattccatatgtctttaatactggttttttgatactaaggaactcaacttgttactattttatatggcattttaatccatatgctaaaaaggagattggtctatagtattctgttttatgacacttttacctggtttgtgtatcatgattttattggcttcataaaacatgttggctgttaggtgacaattttccatggatcaatgtgtgcctgcacatcttgcaagcagaagtactaactgcctttgttctggactatttttgaaagatatttgcayagcaaactgtctcggaagacagagtgtctccatttggagcagagtataggtttgtttgtattagaatatagcatatttaatgcctattataaaagatttgagttttgtaagcttaga

SEQ ID NO: 418088 - DNA, 686 bp, Homo sapiens
gtttcttaaaatcatgcatatatttgtgagtcccaaaaacaatgaaaaagaagccagatgtgcagtctcttatatgtcatgaagaggaattggctttcaaattggcttatatgtcatgaagaggaattggctttcactcaccccatcgttcctaaccttacaccattcttagcaaaattccatatgatcatcaatggtttacaatgatagatttgaaggatgccttctgggcataccccttgtctgatgatagctgagatatatttgcttttgagtggtaagacccctattkggggcagagacaacaatattgatggacagtcttgccccagggtttcacagactcccccaacctcttgttcaggtcccagaacaagtactagaaaaagtcacagtccctaaacaaatatgtctgcttcagtatgtggatgatcttcttatatctggtaaagacataaaagaggtaggtgacttctctacacacattctcaatcacttgcaggtgaggggttgctggtctcaaaagggaaaattcagtatgtagaacctgaagctaaatacttaggctacctaattaggcaggtaaatgaaaaacaggacctgaaagagaattgtttccctacccttgcctcaaactaaacaagaactcaggaaatttttaggactaattggatatgtcatttatg

SEQ ID NO: 418089 - DNA, 496 bp, Homo sapiens
aatcacagctattttcaaatcatattacagttgttgcaaatatggtaaaatattgttgaccctcatgattattcagaaatcacagtaattactagacttgctgccaagaactttatttagtatgctaataaagatgacttattatatcacaaatttgttgtttaatattttgataattgtatttcagtataaatgattttttacttttatttttaaatattttatgcatttaawaacattgttctgagaaggaattccatatgtatcacaatactgctaaagtgattcataaacacagaaaggttaggcttgagaaccattgctttaaattgttattatacatttcatttttactagttataatgttattattcacataattttcacatggtatggaggaaggatctagaagcagttttcagtagtagaaaaggtagttcatgtgtgcggttttagagggaatttatgcatgaagaacaaggttctgacaagttgg

SEQ ID NO: 418090 - DNA, 355 bp, Homo sapiens
gcagaccagactttcccttgtggcaccatttcctgcttctggaaaatgaaaacagacacatttctacatttttatatgatttgtccctaacattgctcctggcttctccaatactgctattttagcatctgtaagcatttggcttcatcattctaaaaaacaaaacaaaaaacaaacaaaaacacacttcatgtctttctaaactatgcagaggttatcaaggtacaacaatgttacatctgctgtgattctaataaattytaaattaagagtatgaaatccagaatgtctcttgttggtagcccatgccatgccaaaaaaaaaaaaaaaaaacaaaaacactggctgtctttgc

SEQ ID NO: 418091 - DNA, 355 bp, Homo sapiens
gcagaccagactttcccttgtggcaccatttcctgcttctggaaaatgaaaacagacacatttctacatttttatatgatttgtccctaacattgctcctggcttctccaatactgctattttagcatctgtaagcatttggcttcatcattctaaaaaacaaaacaaaaaacaaacaaaaacacacttcatgtctttctaaactatgcagaggttatcaaggtacaacaatgttacatctgctgtgattctaataaattctaaattaagagtatgaaatccagaatgtctcttgttggtagcccatgccatgccaaaaaaaaaaaaaaaaaamaaaaacactggctgtctttgc

SEQ ID NO: 418092 - DNA, 596 bp, Homo sapiens
attctaacatttatatgaagggatccagagtatgtatgcaaaacaactttgaaaaataaaaacaaagtttaatttgattttaaactttataaagttatgataatcaaaaaatatgttattggcctaagaataggcatatggatttatagaacagaataaatagttgaaaaacaggctctcacatgcattgtcaattcattctgaacaaggtgtcaaggtaattcaatgcaaataatctttagcacaaatgatgytggaacaattagatactcatgtcctccctccacccaacccttccccagaaaaaaaaagagaaaggaaaagaaaattgacaccttacattatataaaaaattatattctacatgaagcgtactcctaaatgtaagagttcaaactaaaatttactgaaggaaacagaagaaaattattgacatttaaggttaagcaaaactgttaatgcagttagcagttaggggtatctttactgtatataaaacttaaaataatgacaaacaatttcattatgcagaaaaacacttgcattttgaatgatagtattaataagatgaaaacataatacaccctgggaaatta

SEQ ID NO: 418093 - DNA, 596 bp, Homo sapiens
attctaacatttatatgaagggatccagagtatgtatgcaaaacaactttgaaaaataaaaacaaagtttaatttgattttaaactttataaagttatgataatcaaaaaatatgttattggcctaagaataggcatatggatttatagaacagaataaatagttgaaaaacaggctctcacatgcattgtcaattcattctgaacaaggtgtcaaggtaattcaatgcaaataatctttagcacaaatgatgttggaacaattagatactcatgtcctccctccacccaacccttccccagaaaaaaaaagagaaaggaaaagaaaattgacaccttacattatataaaaaattatattctacatgaagcgtamtcctaaatgtaagagttcaaactaaaatttactgaaggaaacagaagaaaattattgacatttaaggttaagcaaaactgttaatgcagttagcagttaggggtatctttactgtatataaaacttaaaataatgacaaacaatttcattatgcagaaaaacacttgcattttgaatgatagtattaataagatgaaaacataatacaccctgggaaatta

SEQ ID NO: 418094 - DNA, 596 bp, Homo sapiens
attctaacatttatatgaagggatccagagtatgtatgcaaaacaactttgaaaaataaaaacaaagtttaatttgattttaaactttataaagttatgataatcaaaaaatatgttattggcctaagaataggcatatggatttatagaacagaataaatagttgaaaaacaggctctcacatgcattgtcaattcattctgaacaaggtgtcaaggtaattcaatgcaaataatctttagcacaaatgatgttggaacaattagatactcatgtcctccctccacccaacccttccccagaaaaaaaaagagaaaggaaaagaaaattgacaccttacattatataaaaaattatattctacatgaagcgtactcctaaatgtaagagttcaaactaaaatttactgaaggaaacagaagaaaattattgacatttaaggttaagcaaaactgttaatgcagttagcagttaggggtatctttactgtatataaaacttaaaataatgacaaacaatttcattatgmagaaaaacacttgcattttgaatgatagtattaataagatgaaaacataatacaccctgggaaatta

SEQ ID NO: 418095 - DNA, 530 bp, Homo sapiens
tgaaatgttatgacaagtctcatgtcaatttaactatgctctcaataaactattcagtaggcaggcagcaaccacagtctgccagttgttcttttagaggtgaaaaatccttattccctgactataaaataaaatatataaatgtgtgtgtgtatgggtggacagttttatgcaggaatcatattaaattagactgatatacaatgcaaaaataaacacagtctcaactgcaacatgccacaaatgcctgacagcatgccaagaggaaaaatagcccttccttcccagccakccagattcctttgtaaaacaaatggagagacaaatatatgtctctctcaaaagaggaaaggagatgggtatggcaagaggagcaatggcaaggcagagatggcaaagggaacaccgcatgtgtcaaaatcccaaaagaggagatccattcataagacttaaggcaggaaattgggttaaatggtcatattttaaaaagaaaagaaagcaggccaggtgcggtggctcacacctgtaat

SEQ ID NO: 418096 - DNA, 436 bp, Homo sapiens
tagcctcatagtctcactggttcagcatamattttcagaagtctaaggaagttactgtcaaaggggacactaaacccaagttcaacatttttgtctgccaaagctgatgctgtcatctaagcagctagttttttatttcttaatacatacatatgatgagtaatatagaatacctctatattcaaactacatcattactgtttatttaccaagataaaaaaacaacacttagtggtatataaatcagccaaactaaatcttgtagtttaatctgatttagttgcaatcacatagacatgacaaaaatgaactctgctaataaaaagcaaaaatgacagtaattttaaaagggttgtaaagcaattatacaacacgtaggaagagtctcagtctaactaaataatattttttagaaatgaagacaaattgctatttc

SEQ ID NO: 418097 - DNA, 481 bp, Homo sapiens
tgttttattttcaatatgggaaagatagtgttatgtcctctagcattagaacaatgattaatcctacaatgaggggaggcagaccagggatgggaacaccggattctactttcacagcttatgcccaaatcygaaccctgctggctgtgactccatgaggcccccatctgttgaagaggttaccaggtagaaaagagagacaaggttctaggaacccttattaaggaggtatcacctcacccacattctgaaaagggcagcatgtggtgtagaatacacagtatcagaaaggaagtgcttttaagatgggcatgaatggtgaaccagttcaatctggctttgtagccatttgttgttagcctcctcagcacatattcccccttcatcttcctatcacaaccttaaattaaccagacataatatttgcatgaaaaaaatcacccactatagtaatgggaatagaccccaatttcactgtacc

SEQ ID NO: 418098 - DNA, 481 bp, Homo sapiens
tgttttattttcaatatgggaaagatagtgttatgtcctctagcattagaacaatgattaatcctacaatgaggggaggcagaccagggatgggaacaccggattctactttcacagcttatgcccaaatccraaccctgctggctgtgactccatgaggcccccatctgttgaagaggttaccaggtagaaaagagagacaaggttctaggaacccttattaaggaggtatcacctcacccacattctgaaaagggcagcatgtggtgtagaatacacagtatcagaaaggaagtgcttttaagatgggcatgaatggtgaaccagttcaatctggctttgtagccatttgttgttagcctcctcagcacatattcccccttcatcttcctatcacaaccttaaattaaccagacataatatttgcatgaaaaaaatcacccactatagtaatgggaatagaccccaatttcactgtacc

SEQ ID NO: 418099 - DNA, 578 bp, Homo sapiens
aatacagcgtagactttgagggaaagtaaaatgcctgcttgtatgttcacagaggtattaatccagtgagcttcatggttcaaatccactcatgcttttttttttttcttcgttgattgaatcatatttgctttggagaaatgaagtctcaccatacaaattatgtctctagagtacattggacacctggagaatgcaatgactttcaggcaactctgatgccatggggcagattcagatcatttagcaattgactgattgctttcaccaactgatagccaagcagcttgagagttaacgtagagatccatggttgcaataccgaaaaggartgtttgactatatccgagtcatacattctcattactgttggaaacaaggatttatatttggcatatctttcagttacacactataaaagaagaaaatgttgtgttcatcctggcagaaacaatattttcccttttagatttattttaaaaataatttactgattgaaaagtcacacaggtaaatctttttttattattatttatttatttatttatttttttaacagaaataatgacattcccaga

SEQ ID NO: 418100 - DNA, 575 bp, Homo sapiens
gctggaatgcagtggtgctatcttggctcactgcacacttcacctcccaggttcatgccattctcctgcctcagcctcccaagtagctggaactacaggtgcctgctaccacgcctgactaatttttgtatttttagtagagacagggtttcaccatgttagccaggatggtttcaatctcctgagctcatgatccgcccgctttggactcccaaaatgctgggattacaggcatgagccaccacgctgggccggataccagtcctttatcacgttttgcaaatattttatccgtcagtagtttatttttctcattctcttaacagtgtctttcacagagcagaaattttctaatacacctagattttcttttatgttatgtttcacakattttatagtttccaccttaacattaggtttagacctcttcgagtttttattaattatttattttgtgaaagttaccagtaagtgtctaagttcttttctttgtataaggatgtcaattgttccatcaactatccttattaattgaaatatcttggattctttgtcaaagatcagttggactatgt

SEQ ID NO: 418101 - DNA, 561 bp, Homo sapiens
ttgtatgtgggatagatagaaagtagataacttgtatttttagttcacaggtttctgaatcaagaagaactccatgcaaggggcctcatctgcattaagacctgatgacaacattggataagactttgagggatcctgagatgggtataagcatattttacctgtggatggagtatcactaattgtagtcagaaagcaaaatgtattcaattgaaaagatgctctcaatatttcacagcccctcccagcaagtgaagtctatgcctccatcccttgaattttagcttcacctcatgacttgccttgacaatgggatataagaaaacactatgcaagaagatgattaaaaaacagcttccacactgacacctcccctcttttgctcctgggaactctggaatcaccctgtgaagaatcccatttttatgagtttagttccactaacattgggcatakgtaagtcagaacacacggtatttgaaaaaataaggaaaaaacctcttagaaaactaggtaaagacaacttttttaaaaacctgataaagagtctctacaaaaaat

SEQ ID NO: 418102 - DNA, 517 bp, Homo sapiens
ctctgggcaccaaatcctgtttctggagccatcaatgtttttaattaaatacaagcagtctatatccaccaaggttggaaaatgttcatcctttacatgttaatttattaagatggaacttcacaaagatttaataaagtgacaaggaaattattttgcatcaaaagattcctgtattctgactcagccgggtcccagactgtttttcgaccattagaaaaagtggatgtgacatgatacatcttgttgcaagagaatatgctttccacttagtgtctacaataaacatggacacaaaattagtcctgttcccacatagagagcaaagggktctttattgcctcagaaaactcaagggacacatgagccctgtttactttgtggtgtacctctctgagtatgaaagtgggaatggatgggaaaatgctttgtcctttttacttctgttccatcagtgtttctttcattaatttcacaagcagttctgcttgaatacagccatgaaataaaccaagac

SEQ ID NO: 418103 - DNA, 587 bp, Homo sapiens
agtggctgggttcaggcaaaggcaaatttttaactggactgcagatcactttagcagcaaagcttgatatttgaggaggtgattattagccagaggtttscattagaggacagcagtcctatgtgggaatgcagacagttaagttatttcccattgttaacttcatggcatttcgtaccagcaagccaccaccaaactggtaagaggcaagctggccatcctctagccatcaagtcaagtttcttgcttaggtaacccactggttgttgacctggaccttgagccttagttaaaactcccagggtcattaacttcctttttgatacatagagattaaatgctttccttatgggaagattaagggttggtgctttaagtaaggctgcctttagttggttaaaggcttcttagttttagattcccaagttaccaagtgagtctttaggtgcttgagtttttgtaaggtggtataaaagattaactatttcaccattcccaaatacccagaatttgcaaaaatccagtaatgtctaagatccctcccaactgtttaagagtttttggaaaggaaaaggagaaaataagtt

SEQ ID NO: 418104 - DNA, 542 bp, Homo sapiens
ctgatattagagactgcctaagtaataaaccttttttcctgaatcacaacacagggaggtttgttttactaaagtttttytcagccttttcaaaaaggccatgggatttttatctggtttctgatttaacaaggagaggttagagtaattaatatgcttgattgtggttctttgcaaactttctaatatgcacatcagaaagtgttttcttttccacttctctataagatcacaagggctcccattagaatatttaaggggcattgtttttattcttattgggaatgcggattatgtctcttttttttcccttttgactgggtttcttttctgactggctctaggaaacctactgtttgtttttgagttttttttttttttttttttttttttttttttttttttttttttttttgctgcctgtaaggctgcctgtttcttaacagttagggtttggcttaaaagcagcatagcatctctccatgtaacattaaacacttgggttaaattttggaaagcctctatatatgagtcagtgtcat

SEQ ID NO: 418105 - DNA, 542 bp, Homo sapiens
ctgatattagagactgcctaagtaataaaccttttttcctgaatcacaacacagggaggtttgttttactaaagtttttctcagccttttcaaaaaggccatgggatttttatctggtttctgatttaacaaggagaggttagagtaattaatatgcttgattgtggttctttgcaaactttytaatatgcacatcagaaagtgttttcttttccacttctctataagatcacaagggctcccattagaatatttaaggggcattgtttttattcttattgggaatgcggattatgtctcttttttttcccttttgactgggtttcttttctgactggctctaggaaacctactgtttgtttttgagttttttttttttttttttttttttttttttttttttttttttttttttgctgcctgtaaggctgcctgtttcttaacagttagggtttggcttaaaagcagcatagcatctctccatgtaacattaaacacttgggttaaattttggaaagcctctatatatgagtcagtgtcat

SEQ ID NO: 418106 - DNA, 595 bp, Homo sapiens
attaaaacaagacttctgggtatttagaaacaccaaattattgataagcatatctatttttaacagatttttgatcttatatatatactactattaagtaaaacctagtactaatagatatgayttataaaatatttgtgaatatttattactgtagtaaaatatcaagaaattatttaaatctattgtctaaaagtttttcattaacatatttggtattttaattgaatgccagtattcatatagtatggcaaaccactcatttctttactattttgtcattttataactgaagcctgaatttgtagccatttttttaaaaaacaatcttttctcaagaaagatttacacatcaaaatgtagaggtattaatgtcacattataaacacagtttgctgaaccctacagtaatttgtaaagtttgtttgtgtataccaaccttagattttctaaagcacaataaagtctttttacgttgtatttaacatacaaaagtccaaaatatatccagacaggcaggaactatggctgccactttaaaacacaaatgtttcagcacgatacactattctgtgtatgtatggataaataatca

SEQ ID NO: 418107 - DNA, 595 bp, Homo sapiens
attaaaacaagacttctgggtatttagaaacaccaaattattgataagcatatctatttttaacagatttttgatcttatatatatactactattaagtaaaacctagtactaatagatatgacttataaaatatttgtgaatatttattactgtagtaaaatatcaagaaattatttaaatctattgtctaaaagtttttcattaacatatttggtattttaattgaatgccagtattcatatagtatggcaaaccactcatttctttactattttgtcattttataactgaagcctgaatttgtagccatttttttaaaaaacaatcttttctcaagaaakatttacacatcaaaatgtagaggtattaatgtcacattataaacacagtttgctgaaccctacagtaatttgtaaagtttgtttgtgtataccaaccttagattttctaaagcacaataaagtctttttacgttgtatttaacatacaaaagtccaaaatatatccagacaggcaggaactatggctgccactttaaaacacaaatgtttcagcacgatacactattctgtgtatgtatggataaataatca

SEQ ID NO: 418108 - DNA, 417 bp, Homo sapiens
tactaaacagggaaatcttgtaagcttttactctaagagcaagaagacaaaaatgcccactttcttcagtcttattaaacatagtatgaactatccaagacagaaawattagaaaataaaatcaaagtgctgagattagaaaaattgttaaattattcctttgcaattttttatttctatacataatcttaagtaaacaaaagcctaagacattactaaaaattagtaggactaataaacaaatttattgaactttcagaatacaaaagcaacatccaagtgtcagtagaatttctatatattgacaactatctctaaatgaaatgacagaaattaatacacaattggaaaatattactcctttataaattggcattactaatattgttaagcatctgtattatacaaaatgatgta

SEQ ID NO: 418109 - DNA, 417 bp, Homo sapiens
tactaaacagggaaatcttgtaagcttttactctaagagcaagaagacaaaaatgcccactttcttcagtcttattaaacatagtatgaactatccaagacagaaatattagaaaataaaatcaaagtgctgagattagaaaaattgttaaattattcctttgcaattttttatttctatacataatcttaagtaaacaaaagcctaagacattactaaaaattagtaggactaataaacaaatttattgaactttcagaatacaaaagcaacatccaagtgtcagtagaatttctatatattgacaactatctctaaatgaaatgacagaaattaatacacaattggaaaatattactccttyataaattggcattactaatattgttaagcatctgtattatacaaaatgatgta

SEQ ID NO: 418110 - DNA, 601 bp, Homo sapiens
tatttaaattaaaaaactgctgcaaagaacataatacaatcaacaggatgagacaaccaaaaaatggaaggaaatatttgcaaatcataaatgtgacaagggattaatatcaaaactatgtaacaaactcaaatgactatagaacaaaaaacaagtaactattaaaaatgagaaaaaggcttaaatatttttcagaaaaagacatacatatggccaacagatatatttttaaaatgctcaatgtcaattattatcagggaaagacaagcaaaaaaaaaaaagaaaaacgatgagatatcaactcgcttctgttagaatgactctaattaagaagaaaacgtgwtggtagaaatctgaagaaaagaaaatgcttgcacactatttgtttgaatgtaagtgaggacagccattatgaaaaacttaatagagttttcttaaaaaacttaaaaatcaaactaccatataacaattgcaccattgtatatccaaaacaaatgaaatcagaatgaagaaacatttgcacttctaggttgtttgcagcactcttcacatgtaaaatatataaaatcaacagttcaacatctaatgagtaaataaagac

SEQ ID NO: 418111 - DNA, 527 bp, Homo sapiens
acacatattatgtacacacaaaaactaagaaaaatttaaatgtaaaaaaaatttaacctgcaggaaccatattctttaacttatttgcagtttaaagccactgaaaaagaatactagagatgttagtctattatgttaccaaatagtgtattgttaccatcttttaaatatacccttaagtaaggtggaataggttaaaactagtggcataataacactttattgaatgtataacagtatttaacatgttataaatgttgaaataaaaaattaacacataatctaaaactttaaaaatgcaattttatcacataaaagtacaattaataaaatgacatactaatttaattaattttaactataaaatatgttattctctcataatattctctcataatactacattagtayatcacttagagccaggtgcagtggctcacacctattatcacagcactttgggaggccaaggcagacagatcacatgaggtcaaaagttcaagaacagcctggccaacatggcaaaa

SEQ ID NO: 418112 - DNA, 591 bp, Homo sapiens
tctgatttagtgtaatgtctgaagtttgagagataggtatttctactgtgaattatctatatttacataaacattttggattaaatatttttatatttactgtatctgcaaaaatatattttagtataaactcttttgtgttttataattctgtagtttttgtaaaaatgtttttccaaatttattaaatttgcacggtcattcaatataaattccctgatgtttagcaaagttggaacaactacctaaggttttcctgtagtacaaaatgtgtacaataaaatctgtgatacaagtaaaggcactacaaccctcttatatttgtaatgtttttcctcaaaataaatattcttctgtattttaagggcttttattttctgaaagatctagtgacaataattgtacttttaatactttatttaatatgaactctctggtgttgaataagatgtgagaagatattagtggcattcacaatttttttttcccagtctctctgttgcccaggctagtatataaatgctttcctttgcaataaggcatgagtattggttaaatgtgtgycacattgtttattctagtagttttctc

SEQ ID NO: 418113 - DNA, 586 bp, Homo sapiens
cattaggattacaaatatataaagcaaatattgatagaatagaagaaacacaaggagatcaatataattatagtaggatattattataccacactttcggtaataaaaatgaaaatagaggaggctggcaagatggccaaataggaacagctctgatctgcagctcccagcaagactgacacagaaggtgggtggtttctgcatttccaactgaggtacccggtttatctcaaygggactggttgaacagtggatgcagctcatggagggtgagccgaagtggggtgcagtgttgcctcacccaggaagtgcaaggggttggggaactccctctcctagccaaggaagggtttagggactgtaccataaagaacagtgctctccagcccagatactgtgcttttccatggtcttcacaacccacagaccagaagattccctctggtgcctatgacaccagggccctgggtttcaagcacaaaactgggaggccgtttgggcagacaccaaactagctgcaagagttttttcttttttttccccataccccagtatagtgcccagaaggccagtgagacagaaccat

SEQ ID NO: 418114 - DNA, 575 bp, Homo sapiens
tcctcacatacattagagaacagaactcttgctgtgcccacagccagggaaaggsgggcaatgtctatctacctcgtgggtcctagagcaccttgtcctgccaggacactcaccgtcaccctcacccccataaggtacagatggcaaccagggtgccgcataccacccactggtgcaccccaaaggatgctgagtcctgtaggggccgtgggcctgaatagtgtttcctagtcacagagtctttctgatttttttcactcactagccctgtgcctccgtttccctcattgtggcacaaagtcaacatcccattctgcaggctaggtgacccagagatgtcaccacagcccattaaatgactatagcatgtgaaagtgggaagtgagagtccctccctgctctgggtcttttgccccaggacagatgtttatcaggccagctgcctggggagggccacatctcctgctttgggagcattgtttccaaattgaagtcactacggttaaggactcccaatgcattgggggaggcacaggggtgggatggggtagaacaacaccgcatcacaagagcct

SEQ ID NO: 418115 - DNA, 607 bp, Homo sapiens
ttgtgagtttcttacaaaacatagtcacaaatgaacattacatacacgtatttctatgaccttgtgtctttgtatatgtttatctttttatttttgagactgtcttgctttgtcccccatggtggaatgcagtggtgtgatcacgactcaatgcaactttttcctcccaggttcaagtgattctcgtgcctcatgagtagctgggattacaggtgtgcaccaccatgcctggctaatatttgtatttttagtagagatggggttttgccatgtgttcaggctacggtcttgaactcctggccccaagtgatcaactcgccttggcctcccaatgtgctggaattacagacgtgagccagtgaacctggatgtgtatgtttatctatctacatacattatatctgtatttaaatgtacagaaaaraagtgtccaaaaaaaccctgaagtttgctttcagtatagcagtctatagtcaagtcccagacctcgtgttttattttcttacccaaaatgtcactaagtaagattttgcatttatggaagtttttctttacattgctataaatgcaaatacttatttatcctttgacctcctatatctttatt

SEQ ID NO: 418116 - DNA, 538 bp, Homo sapiens
ggaatgggatgttctccatgtgaagacttgccaacactctgtccaaaacttacagttccccaattattttcccttttacatccctttatcagtgataagtcctcatgccctatttgtaaacagaaaaactcagctttcaacagccagaagaaaggctttctaacaaaacaaatcttcaatttttacacatttttaaggcacctgttcttcatcaaactacattgaaatttaaacagaaaggaattttatgtttgaaagtaaactcgtcccattctctgggattctgatgttttcctggggccrtagtaagggaagccaaaaatggcattagggcattccctctaaaaagtatcttgcctaaatccaactactgcataatctctccccagccactggagtaccttgagagccttttgcgctgagtgggtctagaaaaccagcggatggaaagctaggtcttgagaaggtgagcacatctgtccgcctatgaactcctccgggaaccatgggtaaagttcatgcttccatccatgggtaa

SEQ ID NO: 418117 - DNA, 523 bp, Homo sapiens
gtagtaagggaagccaaaaatggcattagggcattccctctaaaaagtatcttgcctaaatccaactactgcataatctctccccagccactggagtaccttgagagccttttgcgctgagtgggtctagaaaaccagcggatggaaagctaggtcttgagaaggtgagcacatctgtccgcctatgaactcctccgggaaccatgggtaaagttcatgcttccatccatgggtaacatctatgatggttgctgggacacagaggaaaaaaaggaaggttgagaagtggtatgycctttttctctttccttccaccctaggccacactgaaaagagaaaggggactgaggaacgccttgtctcccctctttctctagataggtaacaaccatcgacagtctgcattcccctctagtgcattctgaaacactggaacttctttaaccctgaaattctaaagaaaaagtggcttatattctattgcataaacccatggccatcttagagacagtaggcctggctt

SEQ ID NO: 418118 - DNA, 523 bp, Homo sapiens
gtagtaagggaagccaaaaatggcattagggcattccctctaaaaagtatcttgcctaaatccaactactgcataatctctccccagccactggagtaccttgagagccttttgcgctgagtgggtctagaaaaccagcggatggaaagctaggtcttgagaaggtgagcacatctgtccgcctatgaactcctccgggaaccatgggtaaagttcatgcttccatccatgggtaacatctatgatggttgctgggacacagaggaaaaaaaggaaggttgagaagtggtatgtcctttttctctttccttccaccctaggccacactgaaaagagaaaggggactgaggaacgccttgtctcycctctttctctagataggtaacaaccatcgacagtctgcattcccctctagtgcattctgaaacactggaacttctttaaccctgaaattctaaagaaaaagtggcttatattctattgcataaacccatggccatcttagagacagtaggcctggctt

SEQ ID NO: 418119 - DNA, 584 bp, Homo sapiens
tagagaccaataatccaattagaaaattggcaaacaaaaaatcttatagttactgaattttcttctgttgtttagatggttatatacgtgtttgtgtgaagtctataaaaaacctctaattaattggtgtgcaaataagcacttcaaaaaaaattaagacaaaattaaggctgtagtgcctcttggttcatgtaactttaatatttaasaaataaaaacattcttggtaaaatacaaacgtcttaaaatgtaaacaggtggtctaaattatgcaggtcaaatactaggttgttaaatgttttaatgttgtaaactgcttctttggcctttaagtactgtcaacctgccagcttcacaattagtaaggcctggtgacatataaaagtaaccatgcccctaactatactggaagaagtcagactttatctgctcctagcacataattaaaacaacttaccaggttttacattaaagttaaaattacaaaaagttaccattgtcacaatgtaattgagactattaaaactggatttgctgaaatgtgtgtaaaatcagtaaaattttttactaaaaaattataagag

SEQ ID NO: 418120 - DNA, 584 bp, Homo sapiens
tagagaccaataatccaattagaaaattggcaaacaaaaaatcttatagttactgaattttcttctgttgtttagatggttatatacgtgtttgtgtgaagtctataaaaaacctctaattaattggtgtgcaaataagcacttcaaaaaaaattaagacaaaattaaggctgtagtgcctcttggttcatgtaactttaatatttaagaaataaaaacattcttggtaaaatacaaacgtcttaaaatgtaaacaggtggtctaaattatgcaggtcaaatactaggttgttaaatgttttaatgttgtaaactgcttctttggcctttaagtactgtcaacctgccagcttcacaattagtaaggcctggtgacwtataaaagtaaccatgcccctaactatactggaagaagtcagactttatctgctcctagcacataattaaaacaacttaccaggttttacattaaagttaaaattacaaaaagttaccattgtcacaatgtaattgagactattaaaactggatttgctgaaatgtgtgtaaaatcagtaaaattttttactaaaaaattataagag

SEQ ID NO: 418121 - DNA, 380 bp, Homo sapiens
ctgaaacagtgctcccttttctattattgtgaaggtgcaattctacccaggaggcctgcaggctctcctcctgctgctcaggcttcactgtctgatgtggcactggagtgctgctgtggcaawtggggttcacctaagatgtgagtttccagctgtgagccctgtgctgtgggctgtgcctcagtggcagatggtggggtcaagagagtacactagccaccaagagagggaaagcaggagtgttctagcccagtgctcagagagtagagagctattgctttaaaatgtaaatagccaaaaagatagcacccgaatcaacactttttgtagaagagtcaaagcctaccttcagcaggccctggggttcaagttgcaaaact

SEQ ID NO: 418122 - DNA, 563 bp, Homo sapiens
ccaaggctcttgtgatgcggtgttgttctaccccatcccacccctgtgcctcccccaatgcatgggagtccttaaccgtagtgacttcaatttggaaacaatgctcccaaagcaggagatgtggccctccccaggcagctggcctgataaacatctgtcctggggcaaaagacccagagcagggagggactctcacttcccactttcacatgctatagtcatttaatgggctgtggtgacatctctgggtcacctagcctgcagaatgggatgttgactttgtgccacaatgagggaaacggaggcacagggctagtgagtgaaaaaaatcagaaagactctgtgactaggaaacactattcaggyccacggcccctacaggactcagcatcctttggggtgcaccagtgggtggtatgcggcaccctggttgccatctgtaccttatgggggtgagggtgacggtgagtgtcctggcaggacaaggtgctctagacccacgaggtagatagacatgcccgcctttccctggctgtgggcacagcaagagttctgttctctaa

SEQ ID NO: 418123 - DNA, 578 bp, Homo sapiens
cccctcccgtggtccctgcacaatctcggagagacgcggccatgcgggtgcagagcggcccagagagggctccaggccagggcacagtcacagcgcatggaggagacaggtcgcccagggtcccgcagtcagcgcattcgccatcttatggctgaaggagactgaggccgagatgggaaagaactccaggcgcagattgtggagctgactgcggggaggccggagtcccgccacagccacttcccaccggttccaatcagccccttccccttctcgggatgtcggacccggcactctcaccatttctaggctgccaggggcacctggcatgttagctgtggatcttccaatgccgcaggttacagggccacagaggctgaggacacacagcagtgaaggcgagaccgggaactgcggctgcaacsagaaacaacggccccgccacatctcggatgccgccttttccgctccagctgcatgcctgattggacggttcctagcccagagtccctgattggataattcttaaatccccgcctcctcagatcctgagtgacaaaagatgtgatcagatgctg

SEQ ID NO: 418124 - DNA, 539 bp, Homo sapiens
caaacttacttttctatttgtccttggccctaatgtcaggccgtggttatctgttttctcctgtggtatgggggactgtgtgagtataggcaccaattacatgcatacatatccatatatatttctgcattactcagcattctcttacttggcatccaacttcaaatcagggggaaaaatcagtacctatagggtgcccactgttagaagagaactagtaatcaacttgtcaatgaatcctggcatcctgtctgcactgggtgcatgtattaattagctattgcagcataacaaatcattcaaaacttatttgcccataattgagatggtcagctatttargctgggctcagtgaggctgttctttttgtctcagctgagctcctccagacatgtatcttcagctgtttgttgaataggcagctgtgcttctggggatgagcttctgcttctggggctgtcaacaggggcaccttgcttctcctccccatggtatcttatcctccagcttgctaacatcggccatttttcatggaaatg

SEQ ID NO: 418125 - DNA, 539 bp, Homo sapiens
caaacttacttttctatttgtccttggccctaatgtcaggccgtggttatctgttttctcctgtggtatgggggactgtgtgagtataggcaccaattacatgcatacatatccatatatatttctgcattactcagcattctcttacttggcatccaacttcaaatcagggggaaaaatcagtacctatagggtgcccactgttagaagagaactagtaatcaacttgtcaatgaatcctggcatcctgtctgcactgggtgcatgtattaattagctattgcagcataacaaatcattcaaaacttatttgcccataattgagatggtcagctatttaggctgggctcagtgaggctgttctttttgtctcagctgagctcctccagacatgtatcttcagctgtttgttgaatargcagctgtgcttctggggatgagcttctgcttctggggctgtcaacaggggcaccttgcttctcctccccatggtatcttatcctccagcttgctaacatcggccatttttcatggaaatg

SEQ ID NO: 418126 - DNA, 606 bp, Homo sapiens
ccaatgctggaactctacagaagtcagactattctgattgccgtttagcctctgctgtccattayagtagctatgcccaccttgcctttgatggttgagtgccaccacttggcccctgccatcatgggatccaattattcccactgtatttaaattttgtagttgagagaccacggttcccactgttagatctgacatgcagagaaaagtaattacaaggttctttaaagattcaggtgctgctttcacaaatctattttgaagtcagtggtcaagggtatatcttctggactttccatgctggaattagtaggtctaaagtgactaatccactccagtatcccaatgtgcctaagccttttgattcctccctctacattaagccaaggggcatcaggcatttccagctcactcacaggggggccatcttttaatccatatttcagctaaccaagcaaataaactattagaagcttttttaactccccaagctgcaacattaaatgcagtattcctacttagtgggtccaaataaataaattcagcctggttcaactctatgttccttccaccataatcccacacccttaatattcatccccaagc

SEQ ID NO: 418127 - DNA, 606 bp, Homo sapiens
ccaatgctggaactctacagaagtcagactattctgattgccgtttagcctctgctgtccattacagtagctatgcccaccttgcctttgatggttgagtgccaccacttggcccctgccatcatgggatccaattattcccactgtatttaaattttgtagttgagagaccacggttcccactgttagatctgacatgcagagaaaagtaattacaaggttcttyaaagattcaggtgctgctttcacaaatctattttgaagtcagtggtcaagggtatatcttctggactttccatgctggaattagtaggtctaaagtgactaatccactccagtatcccaatgtgcctaagccttttgattcctccctctacattaagccaaggggcatcaggcatttccagctcactcacaggggggccatcttttaatccatatttcagctaaccaagcaaataaactattagaagcttttttaactccccaagctgcaacattaaatgcagtattcctacttagtgggtccaaataaataaattcagcctggttcaactctatgttccttccaccataatcccacacccttaatattcatccccaagc

SEQ ID NO: 418128 - DNA, 607 bp, Homo sapiens
ataataagagtttgtgtgtgtttttccacaatttcatctacaggagatgagactctcacacagggcaatcttagcagatttgaggctcagtaactgcttctgaagccaaaagatagaatgcctgagttcatcattttctatcatcactttgtccattgaacttaggacaaccagcttcattatgttccttggttctccacatatggtcaaacctccacctcccagtttcaagcaattctctgcctcagcctcctgagtagctgggattacaggcactcatcracacacccggctaatttttgtattttcagtagagagggggtttcaccatcttgaccaggctggtcttgaactcctgaactcgtgatccacctgcctcagcacccccaaagtgctgggattacaggtgtgagccaccatgctcagctggtgaaaggtatgtatagagtcactaaactccttgcctctcaagagtgataaatcaggagtgtcaaatgcatttattttacataactctctaaacagttcatccctaggactatcagtgttctccacactattagaagtagagtccttagcatttttgggtctaatcatattaagcagc

SEQ ID NO: 418129 - DNA, 647 bp, Homo sapiens
tgataagttactatttatctgttggcatggcctggtcagaagaggcaaatcaaaccacctgggtgctgggcccagtgatatgtctcaatgtcttccataggcaaagcccaggtaacagaggagactcacatcaaatagttgatgggcccagagatatttcacaatgctccctgtgagcagggtccaggcaggagactcacatcacctttgtgctgggccactatyttttgtgtgagcagaacataggaaaaagagaagcgttggctgggcacagtggctcacgcctgtaatcccagcactctgggaggctgaggagggtggatcacctgagatcaggagttcaagaccagcctgaccaacaaggtgaagccccatctctactaaaaatacaaaatacaccaagtgtggtggcaggcttctgtagtcccagctactcaggagactgagacagaagaattacttgagcccaggagcggagttttcagtgaaacaagatcatgctactgcactccagcctaggtgactgagtgagactccatctcaaaaaaagagagaaaagcatcacatcacctgagtgctgagcccagatatgtcccaatccctctgtgagcagaatccatgcagaagaagagagtcaacatacatgg

SEQ ID NO: 418130 - DNA, 457 bp, Homo sapiens
cccaacaatcttaaaataataataataataaagcaatgttgcaggcattaaagttcctgatttcaaaagacattccaagctacagaattaaaacaatctggttaagtataaggatgaaaaattagactaataaaatagaatgcaacatatatatatatatatatatatatatatatatatacayacacactttaagatatatggtcatatgaggagtcatttacatagcaataattattactgtaaactaataaaggcaatgcaaatttgttaccaaatcattcagtaaatataatttgaaatataaaaatactggaatatcactcagttttcaaaagcagaaattataaagcaattataaagataaatcttgataacattatgcaaaatgaaatgagtcagccataaaaaagacaaagattctatgagatagatagatataaagcaattacactct

SEQ ID NO: 418131 - DNA, 340 bp, Homo sapiens
aaaaaaaaaaaaagaacaagaacaagagaaatgaaatgaaatgaaatgaaataaaaaaagactggaagttcttgtgccaacaccctcatkggctgttgaggactggagttagtccaagggcttttaggtaacattgaggtatagactcagccaggaaccttcagtagccctaggacctcctttcagttccacacaatgagtaggcccttcatgaaagaaaactggattagaacagttttcaagttgtttttgaaagaaaaaaacttaggacaagaatttaatattttatttaataatttgaacttagaaatgaccaacctatctcattttttgttttggt

SEQ ID NO: 418132 - DNA, 591 bp, Homo sapiens
aaaacttttttttttcttttcaattctcaagacctagatttagaatttggagctgcaaattcaggtcctgcatgggtaaagtagcagcaggtggtatctgaatatttgtgggcattatagcatgaggagggagggagaactggattctcacgtctacaggtctactcaatgcacatattttactctgattgggtttctgtgccccatggtcactgaatcagtttcaggtctgaagacacaagtcattgaaagaggtaaaayggttaatatctgacctataaagtttgtgtagaaatctgttctagcctctctaaaagtgactgcagaggatgatagataccaagtaggcagagacacaattccacctggcatatttagggtacagcatgcacttcgcagcacaatgtgaatggactggaagcctgagtggaaaaggcccatctatagtaaagcttagttggtaccctatgtgtttatattatgtctggtaattctagacaaggtttggaaaatacagttagaagcaaaattttcttcagccccagaggaattaaataataacagaacagaaagaaaactgttttattacac

SEQ ID NO: 418133 - DNA, 526 bp, Homo sapiens
ataattttttattaaaaaattttactgattttacacacatttcatgcaaatccatttttaatagtctcaattacatgttacaatggtaactttttgtaattttaactttaatgtaaaacctggtaagttgttttaattatgtgctaggagcagataaagtctgacttcttccagtatagttaggggcatggttacttttatawgtcaccaggccttactaattgtgaagctggcaggttgacagtacttaaaggccaaagaagcagtttacaacattaaaacatttaacaaacctagtatttgacctgcataatttagaccacctgtttacattttaagacgtttgtattttacagaatgtttttatttcttaaatattaaagttacatgaaccagaggcactacagccttaattttgtcttaattttttttgaagtgcttatttgcacaccattaattagaggttttttatagacttcacacaaaacacgtatatgaaccatctaagacaaacagaagaaaattc

SEQ ID NO: 418134 - DNA, 526 bp, Homo sapiens
ataattttttattaaaaaattttactgattttacacacatttcatgcaaatccatttttaatagtctcaattacatgttacaatggtaactttttgtaattttaactttaatgtaaaacctggtaagttgttttaattatgtgctaggagcagataaagtctgacttcttccagtatagttaggggcatggttacttttatatgtcaccaggccttactaattgtgaagctggcaggttgacagtacttaaaggccaaagaagcagtttacaacattaaaacatttaacaaacctagtatttgacctgcataatttagaccacctgtttacattttaagacgtttgtattttacagaatgtttttatttsttaaatattaaagttacatgaaccagaggcactacagccttaattttgtcttaattttttttgaagtgcttatttgcacaccattaattagaggttttttatagacttcacacaaaacacgtatatgaaccatctaagacaaacagaagaaaattc

SEQ ID NO: 418135 - DNA, 541 bp, Homo sapiens
attattgatcatctgaagccttctctcaactcatctaagtcattttccatccaccttttttccattgctgatgaggagctgtgttcctttggaggagaagaggtgctctgatttttagaattttcagcttttctgctctggtttctccccatctttgtggttttatctacctttggtctttgatgatggtgatgtacagatggggttttrgtgtggatgtcctttctgtttgttaattttccttctaacagtcaggaccctcagctgcaggtctgttgcagtttgctcgagttccactccagaccctgtttgcctgggtatcaccagcggaggctgcagaacagcaaatattgcagaatggcaaatattgctgcctgatccttcctctggaagcttcatctcagagggccacccagctgtatgaggtgtcagtcagccactactgggaggtttctcccagttaggctactcgggggtcagggacccacttgaggaggcagtctgtccattctcagatctcaaactctgtgttgggagaacc

SEQ ID NO: 418136 - DNA, 574 bp, Homo sapiens
gcaaatggaatgacgcataaacacatgtttcttctgaggacaattaaactagccatggaagaagtcctagctgctgttttctacacagcacccctttccagcgaggaatagccaaaaatatcaatgcctcttctccctaacagcagttagggtctccactcctgaggaggaactgagagggattagctagctagcctaaggtagacagcaagggaagggtccctggagagcacccaacccatgggtcagtgcatcataactacatatccaccaagcccagcataatggcacacacctgtaatcctagtgactcaggaggctgaggcatgagaattgcttgaacctgggaggtggaggktgcagtgagatcacaccattacactccagcctgggcaacagagcaagactcagtcttaagaaaaaaaaaactcatctttcaccaatattttaatcgttttatgtctgcacacttaagcatcaaggacagggtcctggatgatgataagtgcatatttcaatttataaagtaaaaaatgaccatcagagtctaataaatgatgaatacagcaacatc

SEQ ID NO: 418137 - DNA, 479 bp, Homo sapiens
atacactcagcaaattagcaaaatataaaattaacatacaagtataagttatgattccatacacttaaactatctgataaaatagaraaagaaaaccatcttatttacaatagcactaaaataataaatatctgagaacaaatttaattgaggagctgaaaaacttttcaaggatttatcaatgaaaaatgagagaacacaaataaatttaaatatattttatgtctatagattcaaataaatgttaaaatatcatattacccaaagtgatctctagattcagtaaactctgtcaatattccagtgtttttctttcacagtaatgaaaaatacaatcataaaatttacatgaagctacaagaaactgtgaatagccaaagcaatcttgaggaaaaataaaaaagcagaaggatattatactttataatttcaaactatatttcaagactatagtaataaaaacagaatgaaatgtgcag

SEQ ID NO: 418138 - DNA, 604 bp, Homo sapiens
ccaacttagtaatgtgctcagtaaagaggatgtaatagaatattctaatacatttatcccaaaatactaaattataacatgtctgttgaagaaaaacgttatgtgcagttgcttaaagttctgttgaaacagtctggagctcaagttaattcacaaacattaagcttcttcagaaggttattgcgcataacccatggtttctgcaggcaggtactctcactgtggaaaactggaacagagtaggagatggattgaaatgggttcgtcaaaaaggtcttaaaggagacccttctgtkttttctgcttggggtttggtttgcacggtcctactgccgctgtctccttcttattttgtcagacaacaggagtcaggttttgagtctcaagaattaaaaagataatttcttcctccaacagcgcctattgaaaataatgagcaggagaaagggaagaattgtccatttgctaagcaggaaaaaggagaggagaattggcctctgctaccccctccaataacagaagtagaaactcccatacaaaaaattttgcatgctgatgctgcggctagggaacctttaggaccttgtgcttttcctattactgt

SEQ ID NO: 418139 - DNA, 631 bp, Homo sapiens
gacttatatgaatgactgaaattattcaataaaatagttttcaacacagaaatgttcactaatgtattctctaactctgagaaaagaaagtggtataagatccataacatctgtgtatatgtaatatttttctagataataaagtataaaattgagggcaaaaacactaacatgtacaattttgagtgctatatttacatcatacagaattgtgtgccaggcatggtggctcatgcctgtaatcccagcactttgggaggctgaggtgggcagatcacctgaggttgggagttcgagaccagcctgaccaacatggtgaaaccccgtctctactaaaaacacaaaattagccatgcatggtggcacatggctgtaatcctagctactcrggaggctgaggcaggagaattgcttgaacccaggaggcggaggctgcagtgagccaagattcattgcactctagcttgggcaacaagagtgaaactccatctcaaaaaaaaaaaaaaaaattcatcgtgtgtatttttcagatggaaaagacatagttttgcatattattcagatggaatagacatgttgagttagaaggtatgactcaaattttaatgtgtgcaataagctagagatcctg

SEQ ID NO: 418140 - DNA, 602 bp, Homo sapiens
tttaatgtgtgcaataagctagagatcctgtyaatgcaattttttttttttcagatctgggataaagtctgagttgctgaatttctaataagctcatcagtatgccaatgtttttggcccaaaaagactattttttaaaacatccagtaatagaatgagcctgtgtttttctgtttttctggtttgtaaacaaagataagagccttcattttccaaaaacagacaaatgcaaaggaaacctaagaaagaagggcagctgtcagattaaatgttttggtttattcacatcagctgcataaagatatttaatgatgaagaggaaaatgattaattccatagtaaaaaaatgtgtcagagagcttatcaaccaagtgatttattaacatcaattacactagaacacatttttttaatgtcctgatgtacccagaaggacacagtattactgctgagatattgccccccctctgaaaggtaaattatagtctgaatttaaccataaggaaacattagttttatggaaagttcaagatagagatatctcccatgttctgtaacttttagtagtgattttaaatagtatttcttcagcactgagagag

SEQ ID NO: 418141 - DNA, 601 bp, Homo sapiens
agaagaaaaaacagtggttccaaactgctgaatcaaaaaaaaggtttaacactgtgagatgaatgcacacatcactaagcagtttctcagaaggcttctttctagtttttatctgaagtaatgttctttttcacaattggcctcaatgcgctcccaaatatttcttcacagattctacaaaaacagtgtttccaaactgctgaatgaaaagaatggtttaatgcacgagacgaatgggagcatcaaaaaggggtttctcagatagcttccatctatttctaacctgggttattcactttttcacagttgacctcaatgagctcccaaatatctattcacagaatggacaaaaacagtgtttccaaagtgctgaatcattagaaagttttatctttgtgagttgaatgcatacatcaaaaagtttctcagaaagtttctttctagtttttatctgaaggtttttttttcaccataggccccaatacactccaaaatatccctttkctgatcctacaaaaacagtgtttccaaactgctgaatgaaaataaaggtttcactctaccagatgaattcacacatgacaaagctgtttgccagata

SEQ ID NO: 418142 - DNA, 582 bp, Homo sapiens
gcagggtgagatcacaggactggggcaaaattataattgctaatgaattttcaggcacacattgtcattgataacaacttatgaggagacagcgtttcagagcagacaaccggtctgaccaaaatttattaggtgggaatttcctcctcctaataagcctgggagggctacaggagactggggcttatttcttcccttctctacaaccataaaagacagatgttcccagagtggccatttcagagttctacccttaggaatacattctctttctcagggctgttctttgtggagaaaaagaattcagtgatatttctcttatttgcttttgaaagaagataaatatggctctgttctgcccaactctcaggaaaccagacctaatgattatctcccttgttycctgatcatcactgttgtcctgttcttttttcaaggttcccagattccatattgtttaaacaatttgtgcagttcatgcaatcattgcagggtcctgaggcgacattcatagtgataaatgtccatgaaatcttcacaatttatgttcagagatggcagtaaagacaggtgtaagaaatt

SEQ ID NO: 418143 - DNA, 626 bp, Homo sapiens
cactcccagggtcatgcaagtatagagttggccttaaaaaggagtgcctccttaaattttgtgccctagatgtctttcttgccctaccctmgtctgcctttctctgagatcactctgttagaggttaatggtgtcaatcaatcactcctgcgcctggagtaccaatcagttagaaacggatgtaataaaccaatatagcagaagctatattattaactgggcagtgccaacaactataaaatagcgagtttctattgtgttggagaatgtggatttacactgtaattttcttcaaatccacattagtgacattttctgaatacttctgtataagtagacaaacaagctcatcattgtttttcagcaaaaaatatcttcctatcattaggctgtaggtgcagagaaatgagttaatcattctcggtgtgtggcatattatttttgtttccaggatgtcttctgaacattaatgcccagccttctttaaatgtcccttttaaaaaactttattttttgcttttttgcttttttctaattattaattccttttaattgcagaaaatttagaaagtttattaaaatataaaaatactcataaccctacatccaaacagtaccattgttaa

SEQ ID NO: 418144 - DNA, 582 bp, Homo sapiens
gagaccactgcctactatgtgccacatactgttctaaatatgctatgaatgttatcttcttcttttttttttttagtagagatggagtttcaccatgttagccaggatggtctcgatcgcctgaccttgtgatccacccgcttyggcctcccaacgtcctgggattacaggcgtgagccaccacaccaggcaatttttgtatttttaatagagacggggtttcaccatgttggtcaggctggtctggaactcctgaccttgtgatccgcctgcctcagtctcccaaagtgctgggattacaggcgtgagccaccacgcccagccggatgttatcttctttaaccttggcaacaatgtgaaatattattgtcattatatccctattttacagatgaagaaactgagatatagagagtataagtggcttgcatacagtcatacatctggaaggtagtagatctggggagtattaatcttgatagtataactccagggtctatgtgcctaaccactatactgagctttcataggtagaaatgctagaaccccagagtcacatcaagtctgtctttcccccagtag

SEQ ID NO: 418145 - DNA, 489 bp, Homo sapiens
ctctctctctcaaaaaaaagacaaaacaaagcaaacaaaaaaaaataccgtatatcatttatgtaaattaaaatacatagaaatgtgtttataacctatataaaacacattaggytgggtgcagtggctcacgcctgtaatcccagcactttgggaggctgaggcaggaggattgcttgagctccgatgttcaagaacagcctgggcagcatagcaagacctcatctctacaaaagaaaaacacacacacacattagaggctgggcatggtgtctcactcctgtaatcccagcactttgggaggccaaggcaggcggatcacttgtgcctaggagttcaagactagtctgggcaacatctcgaaacttcatttcttttctaaaaacaaacaaacaacaacagcagcaaaagaacatcagtgtgaggagaaaaaaatgggattcaggattggggcattctttatgcagaacacagcaattctcactggtg

SEQ ID NO: 418146 - DNA, 489 bp, Homo sapiens
ctctctctctcaaaaaaaagacaaaacaaagcaaacaaaaaaaaataccgtatatcatttatgtaaattaaaatacatagaaatgtgtttataacctatataaaacacattaggttgggtgcagtggctcacgcctgtaatcccagcactttgggaggctgaggcaggaggattgcttgagctccgatgttcaagaacagcctgggcagcatagcaagacctcatctctacaaaagaaaaamacacacacacattagaggctgggcatggtgtctcactcctgtaatcccagcactttgggaggccaaggcaggcggatcacttgtgcctaggagttcaagactagtctgggcaacatctcgaaacttcatttcttttctaaaaacaaacaaacaacaacagcagcaaaagaacatcagtgtgaggagaaaaaaatgggattcaggattggggcattctttatgcagaacacagcaattctcactggtg

SEQ ID NO: 418147 - DNA, 489 bp, Homo sapiens
ctctctctctcaaaaaaaagacaaaacaaagcaaacaaaaaaaaataccgtatatcatttatgtaaattaaaatacatagaaatgtgtttataacctatataaaacacattaggttgggtgcagtggctcacgcctgtaatcccagcactttgggaggctgaggcaggaggattgcttgagctccgatgttcaagaacagcctgggcagcatagcaagacctcatctctacaaaagaaaaacacacacacacattagaggctgggcatggtgtctcactcctgtaatcccagcactttgggaggccaaggcaggcggatcacttgtgcctaggagttcaagactagtctgggcaacatctcgaaacttcatttcttttctaaaaacaaacaaacaacaacarcagcaaaagaacatcagtgtgaggagaaaaaaatgggattcaggattggggcattctttatgcagaacacagcaattctcactggtg

SEQ ID NO: 418148 - DNA, 611 bp, Homo sapiens
ctgtgatgcatacattcttggaatccccataataagacaaacaaaactgagaataattaggaaaggaaaaaggcagaattgatctttaaattcagcaagagtcagctttgcagcctggaaaacatgtcctctccacatgaagaataaatgttatttcttcaccattgctattttccatccctgacttgaagttacaaactaactccagcaggaatatttatggtgtattataaagcatctgtgacacagcaagccctgtcatgtttgwttgctgcatttatgtatagaaacatcctcatgacttatgaagtctccctagtactgacctgaacaaattggcccaatcaatcaataaatttacttatgtcatttataaaaagtgaaaggaacaataactaaagaaatgtaggctcatgtagggttctccaattaataaatgaaaatggaatgttctaactaaataaaatataaattaatgtattagtccatttttatgctgctgctgataaagacatacccaagactgggcaatttacaaaagaaggaggtttattggacttacagttccacatggcttgggaagcctcacaatcatgatggaaggcaaggag

SEQ ID NO: 418149 - DNA, 611 bp, Homo sapiens
ctgtgatgcatacattcttggaatccccataataagacaaacaaaactgagaataattaggaaaggaaaaaggcagaattgatctttaaattcagcaagagtcagctttgcagcctggaaaacatgtcctctccacatgaagaataaatgttatttcttcaccattgctattttccatccctgacttgaagttacaaactaactccagcaggaatatttatggtgtattataaagcatctgtgacacagcaagccctgtcatgtttgtttgctgcatttatgtatagaaacatcctcatgacttatgaagtctccctagtactgacctgaacaaattggcccaatcaatcaataaatttacttatgtcatttataaaaagtgaaaggaacaataactaaagaaatgtaggctcatgtagggttctccaattaataaatgaaaatggaatgttctaactaaataaaatataaattaatgtattagtccattttyatgctgctgctgataaagacatacccaagactgggcaatttacaaaagaaggaggtttattggacttacagttccacatggcttgggaagcctcacaatcatgatggaaggcaaggag

SEQ ID NO: 418150 - DNA, 648 bp, Homo sapiens
gaagaatgtggcaaagcctttaaccagtcctcacaccttaccagacataagataattcatactggagagaagccctacagatgtgaagaatgtggcaaagcctttaggcagtcctcacaccttactacacataagataattcatactggagagaaaccctacaaatgtgaagaatgtggcaaagcttttaacmagtcctcacaccttactagacataagagcattcatactggagaaaaaccctaccagtgtgaaaaatgtggcaaagcttctaaccaatcctcaaaccttactgaacataagaatattcatactgaagagaaaccatacaaatgtgaagaatgtgggaaagcctttaaccagttctcaaaccttactacacataaaagaattcatactggagagaaaccctacaaatgtgaagaatgtggcaaagcttttaaccagtcctcaatccttactacacataagagaattcatactggagagaaatcctacaaatgtgaagaatgtggcaaagctttctatcgatcctcaaaacttactgaacataagaaaattcatactggagagaaaccctacacatgtgaagaatgtggcaaagcctttaaccattcctcacatcttgctacacataaggtaattcat

SEQ ID NO: 418151 - DNA, 648 bp, Homo sapiens
gaagaatgtggcaaagcctttaaccagtcctcacaccttaccagacataagataattcatactggagagaagccctacagatgtgaagaatgtggcaaagcctttaggcagtcctcacaccttactacacataagataattcatactggagagaaaccctacaaatgtgaagaatgtggcaaagcttttaaccagtcctcacaccttactagacataagagcattcatactggagaaaaaccctaccagtgtgaaaaatgtggcaaagcttctaaccaatcctcaaaccttactgaacataagaatattcatactgaagagaaaccatacaaatgtgaagaatgtgggaaagcctttaaccagttctcaaaccttactacacataaaagaattcatactggagagaaaccctacaratgtgaagaatgtggcaaagcttttaaccagtcctcaatccttactacacataagagaattcatactggagagaaatcctacaaatgtgaagaatgtggcaaagctttctatcgatcctcaaaacttactgaacataagaaaattcatactggagagaaaccctacacatgtgaagaatgtggcaaagcctttaaccattcctcacatcttgctacacataaggtaattcat

SEQ ID NO: 418152 - DNA, 648 bp, Homo sapiens
gaagaatgtggcaaagcctttaaccagtcctcacaccttaccagacataagataattcatactggagagaagccctacagatgtgaagaatgtggcaaagcctttaggcagtcctcacaccttactacacataagataattcatactggagagaaaccctacaaatgtgaagaatgtggcaaagcttttaaccagtcctcacaccttactagacataagagcattcatactggagaaaaaccctaccagtgtgaaaaatgtggcaaagcttctaaccaatcctcaaaccttactgaacataagaatattcatactgaagagaaaccatacaaatgtgaagaatgtgggaaagcctttaaccagttctcaaaccttactacacataaaagaattcatactggagagaaaccctacaaatgtgaagaatgtggcaaagcttttaaccagtcctcaatccttactacacataagagaattcatactggagagaaatcctacaaatgtgaagaatgtggcaaagctttctatcgatcctcaaaacttactgaacataagaaaattcatactggagagaaaccctacacatgtgaagaatgtggcaaagcctttaaccattcctcacaycttgctacacataaggtaattcat

SEQ ID NO: 418153 - DNA, 558 bp, Homo sapiens
tccctttcaaaaaataagtgaccatattctctctccaccccaagtcctcactgcctctttgatagttccactgtggatcttgatcttgaactgctgaacctcctgcctgatatatattatggttcaggtttcaagacaatacctcatctgcatgsgccctagctgtcaccaaaatgcattctcttttactgtacaacacagagacaacaaaatgtgcagatcctgtccagttaaactataggtcagagttaatttctcaaactcatctaggaattttcctggatcttcagagaaatgaccaaacttctctttacatagagccaaatcagacatagaaaaggggacatgtcctctcacagtgccttcttccccatttgccacctctgtaagtggacagatttccctttggaggttgataggcagctccactagagtagtactcgttgggctcagttcctcagggagtggtgggtgtagagagggactagtccggtaaggaagaggagatgaaggattatcaacagaactttcaggtgggctagaggaagaaaggaccga

SEQ ID NO: 418154 - DNA, 558 bp, Homo sapiens
tccctttcaaaaaataagtgaccatattctctctccaccccaagtcctcactgcctctttgatagttccactgtggatcttgatcttgaactgctgaacctcctgcctgatatatattatggttcaggtttcaagacaatacctcatctgcatgcgccctagctgtcaccaaaatgcrttctcttttactgtacaacacagagacaacaaaatgtgcagatcctgtccagttaaactataggtcagagttaatttctcaaactcatctaggaattttcctggatcttcagagaaatgaccaaacttctctttacatagagccaaatcagacatagaaaaggggacatgtcctctcacagtgccttcttccccatttgccacctctgtaagtggacagatttccctttggaggttgataggcagctccactagagtagtactcgttgggctcagttcctcagggagtggtgggtgtagagagggactagtccggtaaggaagaggagatgaaggattatcaacagaactttcaggtgggctagaggaagaaaggaccga

SEQ ID NO: 418155 - DNA, 565 bp, Homo sapiens
ataaaaacctaccagattaacagcagacttttcagcagaaatattacaagtgagaagggattggcattctatctttagcctccttaaacaaaataattatcagccaagaattttgaatccagtgagataaaggaatataaatgaagaagagataaactctctttcacagaaacagatgctgagagaatttgccactgccaactcagcactacaagaaatgctgaaaggatatctaaatcttgaaacaaaacctcaaaatatacacgagtagactctccttaattcataaatcttacaggacctataaaacagtaacacaaagaaaaatatcaagatattcaggcaacagctggcatgatgaatccagcagtacctcacttctcactactaatgttgaatgtaactggcaaaagtgcttcrctttaaaaatacagaatagcagaataaataggaatccctacaacaagtagctgctgtctacaagagactcaatgtaagcatacaccaagaaactagagaaagaacaaatcaaactcaaacccggcagaagaaaagaaataacaaa

SEQ ID NO: 418156 - DNA, 565 bp, Homo sapiens
ataaaaacctaccagattaacagcagacttttcagcagaaatattacaagtgagaagggattggcattctatctttagcctccttaaacaaaataattatcagccaagaattttgaatccagtgagataaaggaatataaatgaagaagagataaactctctttcacagaaacagatgctgagagaatttgccactgccaactcagcactacaagaaatgctgaaaggatatctaaatcttgaaacaaaacctcaaaatatacacgagtagactctccttaattcataaatcttacaggacctataaaacagtaacacaaagaaaaatatcaagatattcaggcaacagctggcatgatgaatccagcagtacctcacttctcactactaatgttgaatgtaactggcaaaagtgcttcgctttaaaratacagaatagcagaataaataggaatccctacaacaagtagctgctgtctacaagagactcaatgtaagcatacaccaagaaactagagaaagaacaaatcaaactcaaacccggcagaagaaaagaaataacaaa

SEQ ID NO: 418157 - DNA, 565 bp, Homo sapiens
ataaaaacctaccagattaacagcagacttttcagcagaaatattacaagtgagaagggattggcattctatctttagcctccttaaacaaaataattatcagccaagaattttgaatccagtgagataaaggaatataaatgaagaagagataaactctctttcacagaaacagatgctgagagaatttgccactgccaactcagcactacaagaaatgctgaaaggatatctaaatcttgaaacaaaacctcaaaatatacacgagtagactctccttaattcataaatcttacaggacctataaaacagtaacacaaagaaaaatatcaagatattcaggcaacagctggcatgatgaatccagcagtacctcacttctcactactaatgttgaatgtaactggcaaaagtgcttcgctttaaaaatacagaatagcagaataaataggaatccctacaacaagtagctgctgtctacaagagactcaatgtaagcatacaccaagaaactagagaaagaacaaaycaaactcaaacccggcagaagaaaagaaataacaaa

SEQ ID NO: 418158 - DNA, 632 bp, Homo sapiens
ataaaacacataatgaaaatttaagtagagaggctcattatggttaacttataatgttaagtgatgtatgaggtaggtgttctgagtaatatttttgtccactatagtgaaaaaaactttttaagttttagttaaaattaattaaattagcagtaacttattaattgtacttttatgtaatatgcagtacatttaaaaatttttcagttatatgtgaatttaattttctagtaaaacattgtttaaaatgtaacatctattgtacattcaatgaagtgttttttttttttttttttgagatggcgtcccactctgtcacccaggctggagtgtggtggcaygatcttggcacactgtaacctccgcctcccaggttcaagcaattctcctgcctcagcctcccaagtagctgggattacaggcacttgccaccatgcccagctaatttttgtatttttagtagagatggggactcaccatgttggccaggctggtctcaaactcctcacctcaagtgatccacataaatggcatattttggtacaggcatataatatgtaataacgacattagagtacatgaggtatccatcaccactagtatttgttctttgtattacaaacaatccaatt

SEQ ID NO: 418159 - DNA, 522 bp, Homo sapiens
ggtgtcagaattcaaacgttagacaatgagtgttggaggattgcttkgtgttcagtaaactctacagatttggtgccagaaaaaagatatcacagaggcctggcctggaatggaactctgggtgcctggaatgggaggctctgctctcctgtacacaagctcgttgtcctgtgatttcaggtctcctccaagggtgagggaggactgaaaacttaaaggacaagagctgtgataacaaaccccactttcccacagctaccaccacaagatttccacccactcacaaacacacccactagacattgacgtgcccacacccctcccaggactaggtaccaccctcagaaaattcacaacagcattgtttatcctagtgcttcttgcgaaaaacccaaaaaatgactatgtctcctggaatatccccacctgcagacactgaatctgcagcagtaatctgttttctccaccatcctagggttttgaccaactgttcataatctcttctgccttcatgggcacaaa

SEQ ID NO: 418160 - DNA, 621 bp, Homo sapiens
atgaccagtttgaagaaataccatcacctgcgtcttcccttacaggttgtattttctcctgagtagattcagatgattatgtacttttctctccatcaatatcacagcagtaataaagggcccacctaagtgccttcttagtgcaatagacagcgtatcagtctcataatgggcccatctgtgcattggcccctaaatctggtttgtctcattacagctgatgctaaatttattcatctggctaaggtgttttctgccaaattccttcactataaagttagttatttttttctttatcaataatgagtatcttggaagggggatttacygaggtgtataaattatcaaatttaatttaaaaactcctatttcttttttttcttatatcttacttggagaataaatactttcctatttgtcaactatagatagcagcttttgaaactggaagttctgaaacaggtctcagttgtttaggtttccatttaatttcaccttcatttcacaagcatatactttattctctgtaattttagggacaaagaaaaaatatataatcaatatatctattgtcttaaaattctaaaacatactatggcacataaaataaacaaagcaaaa

SEQ ID NO: 418161 - DNA, 644 bp, Homo sapiens
cattctccataagaataaaaataagaaaaaaatatgcaccctaaatactcctattcaacatagttctaaaagtcctagccagagcaattcaacaagatcaagaaataaaagtcatccaaataggaaaaaaaaggaagtcaaattatcttcacaggtgaaataattctctacctggaaaactttatagatttcactaaaacacccctaagactaaaaaatgacttcagcaaagtctgaccatacaaaaccaacatacacatatgagtagcatttctgtacaccaataacattcaagctgaggacaaaatcaagaacacagttctgtttacaatagccacaaacaaataatatacctaagaatacattaaatcaagtagataaaatatctctacaaagaaaattacaaaacaggctgaagaaaattaaacacaaataaataaaaaagcattttatgctaatggattggaagaatcaatataattaaatgtccatgctgtttgaagcaacctacagattaagtgctgtttctatcaaactatcaatgccatttttcatagaattcarataaaatcttctaaaattcatataagaaattaaaaagccaaaaacccaaggcaatgtgaaagtgaatcaacttggatgcc

SEQ ID NO: 418162 - DNA, 564 bp, Homo sapiens
gtttgagaccagcctgggcaacatatggagattcccactctacaaattttttttttttttttttaacccaggcatggttgtgtgcacctgtggtcccagctctttgaaagattgagggaggaggattacttgagtctgggaatttgaggctacacttagccataattgtgccctgcactccaccttacgtgatagaatgagaccctgtctcagaaaaaagctgtacttttcagacatgttaagtgtattcacattgttatacaaagacttttaaaaattttacatctaataaaactaaaactcatatccattaagtaacagctgaacttttaccctctctccagcccttgacaatatccttctactttctgtttttatgagcgtgactacttaagatatctcctataaatgggatcatatagtagccatcattttgttaatggcttatttcaggtgacataatrattctcgaagtttgtcttaaagtgtgacagatttttttttaaggctgaataatattccttgtatttatatgttacttttttgatgtatttgtaagtcaga

SEQ ID NO: 418163 - DNA, 608 bp, Homo sapiens
attttcctgctggacaaggctttttatcattatataatgtcctttgtcttttttaactgctgttgccttaaagtttgttttgtctgatttaagagtagctactcctgcttgcttttggtgtccatttgcatgaaatgtttttccaccactttaccttaagtttttgcgagtccttatgtgttaggtgagtctcttgaaggcagcagatggttggttggggaatgcttattcattctgcaattctgtgtcatttaagtagagcatttagtctatttacattcagtgttagtattgagatgtgaggcaccattccattcatcatgctatttgttgtctgtatactttgtttgtttttgttttttaaattgtatttttgttttttaggtcctgtgagatttacgctttaaagaggttctgttttgatatgttttcagaatttgtttcaagatttagctctcttttagctgttttgtagtggtgacttgataatggcaaattcagcatttgtttgtctgaaaaytattatcttttcttcatatgtgaagcttaattttgctggatacaaaattcttggctgataattgctttgttcgagaaggctgaagata

SEQ ID NO: 418164 - DNA, 608 bp, Homo sapiens
attttcctgctggacaaggctttttatcattatataatgtcctttgtcttttttaactgctgttgccttaaagtttgttttgtctgatttaagagtagctactcctgcttgcttttggtgtccatttgcatgaaatgtttttccaccactttaccttaagtttttgcgagtccttatgtgttaggtgagtctcttgaaggcagcagatggttggttggggaatgcttattcattctgcaattctgtgtcatttaagtagagcatttagtctatttacattcagtgttagtattgagatgtgaggcaccattccattcatcatgctatttgttgtctgtatactttgtttgtttttgttttttaaattgtatttttgttttttaggtcctgtgagatttacgctttaaagaggttctgttttgatatgttttcagaatttgtttcaagatttagctctcttttagctgttttgtagtggtgacttgataatggcaaattcagcatttgtttgtctgaaaatkattatcttttcttcatatgtgaagcttaattttgctggatacaaaattcttggctgataattgctttgttcgagaaggctgaagata

SEQ ID NO: 418165 - DNA, 420 bp, Homo sapiens
ttattttcttacatttatttgttgttgttgttgttttgagacaggatctctttctgttacccaggctggagtgcagtgactgcagcttcaaccttcagggctcaagtgctcctttcacctcagcctcctgactagctggaactacagagatgcactaccatgcctggctaattttttgattatttgtagggatggagtcttactgtgttgcctaggctggtctcaaacttctggccccaagagatcctcmcatcttggtctcccaaagtgttgaaattataggcatgagccacagcacccacctggtattcctaaatttaataagacttgttgtgtatcctaacagaatacaccaggtgcaaataagaatattgtgtgttttcttgcttttaactggaaagtagtttacatgtctgttaa

SEQ ID NO: 418166 - DNA, 428 bp, Homo sapiens
aacacttttcaaaagaagacatacatgtagctaacaaacctgtgagaaaaagctcaccatcactaatcatcagagaaatgcaaatcaaaaccayaatgagataccatttcatgtcagtcagaatggtggttattaaaaagtcaagaaacaacagatgctggctatgttgcagagaaacaggaatgcttatatactgttggtaggaatgtaaattagttcaattattagaaaagacagtgtggcaattcctgaaagatttaaaaccagaaacaccatttgacccagcaactccattccttggtatatactaaaaataatataaatcattctattataaagatacatgcatgtgtatgttcattgctgcactattcacaatagcaaaaacatgatatcaacccaaatgcccattaatgatagactagtta

SEQ ID NO: 418167 - DNA, 623 bp, Homo sapiens
tgaatactaagtgaagatacaacttcattctttcccctcttcatatcttcctggaccctttttctcctttgtcacagcaaaataatataggctactaagtctatgcacaaggatatttrcaataaacatttgacagtctttgctattgctatatgaagtgcatgcacttgacaggtggctactaattattatagtaaaaacaatagcattgagtgatttctgccattatgggataagaagtttgctggcattatcttatttaatcttcaccacaatcttataaggtaggtgtcattaccctcattttagaaatgagacttgttcatatggaggctgggtgtggtgtctcaggtctgtaatcccagcactttgggaggccgaggtgggtggatcacttgaggtcaggagttcgagaccatcctggccaacatggtgaaaccctgtctctgctaaaaatacaaaaattacccgggcatggctttggacacctgcaatcccagctacttgggaggctgaggcaggagaatcacttgaacctgggaggtggaggttacagtgagccgagatcgtgccactggactccagcctgggtaacagagcaagattctatctcaaaaaacaaa

SEQ ID NO: 418168 - DNA, 636 bp, Homo sapiens
actaatgaccttctttgtttcttgcaatagtttttcacttgaagtctattttatcatatgtaagtacagccacgcttgctttcttttgattaccattaaatggaatatcttcttccattcttttactttcagcttatgtgtgtccttaaagctgttgtaggtctcctgtaggcaacatatagttggatcttgtttttctttttaactccatctaaccattctatcacttttgattggaaaatttaatccatttacattcaagtttattactgataaayaagttcttactactgtcattttgctatttgttttctggttgttttgtagttcctttgttcttttcttcctctttttgcctatcttatgatttcacaattttctgtagctgagctttgattcatttctcttatcattatctatctgctgtagttttttgttttgtggtcagaatgaagcttaaataacatattttatggttataatctactattttaagctgataattactcaacattgatgcatacaaaaactctggacttctaccctccccaccaatttacatttttgataccacagtctacatctttttgtattccttaacaacttattgtagttttaattatttctgatggtttt

SEQ ID NO: 418169 - DNA, 558 bp, Homo sapiens
ggtgagtatgactcttgaaggtacctgtggcaggagacaccaatggttcctaagaatgaaacagcagactcaggcatctctcctttcctgagccactattcctttcctaatccattcacacaggccaggagagatatttgggcagcctttaatctttacatttcagagtttcagcgctcataaaatatctaagacagtggaggagggattttcttccactagtaccaaatcaaaggtagagggctatagagctgtaacccacaagcatatataattcttggtgatagttttcaaccagttgtctacttctagcccaatattttacattgatggggtagcatgaggagagataagtggaatttggaggtgactttggggttgaaagagaggctgggctgagtgaggtgacatrcttctgagatagttgttcccttgtatataagcaaacctgacacgagctcctgggttggaggaatggtgatcaaataggtaggacaaccagaataagatccttatagtctgactgatgtctctccttttatagcagtggcagcaagc

SEQ ID NO: 418170 - DNA, 560 bp, Homo sapiens
aggaggcactccagcttgaaaatgtgatgattctataatctgacatgtcctacatatacttatgtgaacatgtaagactatctccacagataatatttttaaagcaattatagaagtcttacagataagctttcagaatttttaagactgcctactagttcaatgaattacctaaaatcttattagcttcctcatatttacaagtgtcctataaggaatctcaacttgttctatcacagaaaatccaatattayatcaaaatgcttggttattctgaaatgctttatataatatgatttagcttttcagatctgaaaagataaaaggtcttaaactacacccagaaagacagcagaacaattccaagtaacctatttcctatattagtgaaaatgtcctgtggcaagtttatagcacaccaatattacgtttaaactggacttcattaatgaattttttttaaagccacaaataaaatttcaatctgaaaatacataagaatatcacaatttaagaaaaaagattaacctattgtaaatttgtgtttgtgctttgcacaa

SEQ ID NO: 418171 - DNA, 652 bp, Homo sapiens
aatatccaaaatatacaaggaacttaaacaattcaacaggaaaaaaaactaataactgattcataattgggcaaaagatctaagaagacatttctcaaaagaagacatataaatggccatcaggcatgtgaagaaaatattcaacatcaatcatcatcaggaaaacgcaaattaaaaccacaacaagacataccttcgcacctattcraatggctagtatcaaaaagacaaaaggtaacaagtgttgtcgacaatgtagagaaaaggaaaaccttgcacactcttggtgggaatgtaaattagtatagccattatggaaaaacagtatggagatttctcaaaaaactaaaaatagaactaccatatgatctagcaatcccactactgggtatatatccacaggaaatgaaatcagtatgccaaagagatatctgcactcccatgttcactgtaatattatttagaataatcaagatagggaattaacttaagtgtctattgacagatgaacagataaggaaaatgtggtatatatacacaatggaactctattaaacatttaaaaagagggaaatctgccatttatgacaacatgaatgaacctggaagatactacgctaagtgaaataagacaggcacaaaaagacaaata

SEQ ID NO: 418172 - DNA, 557 bp, Homo sapiens
ttgtttgttagttctaacagttttttgatggagtctttaggattttttagatataagaccttgtcatctgtagagacaatttaacatcttcctttctgatttggatgccttttatttatttttcttgtctacttgttctttctaggacttccagtattatattgaatagaagtggtgagagtgggtatttttgtcttgctccagatcttagaggaaaagctttcaactcttcaccattgtgatgtaaactgcgggcttgtcatatatggccttattgtgttgaggtacatttcttctatgtctaatttgttgagagtttttatcgtgaaagcatgttgaattgtgtcaaatgctttttctgcatctaccgagatgattatatggtttttagccatcattctgttaatatggagtatcacatttattgatttgtgtataatgaactgttcttgaatgcttgggataaatctcaacttgatcwtgtgaatgatccttttaatatgatgctgaatttggtttattagtattttgttgaggaattttgcatttgtgttcat

SEQ ID NO: 418173 - DNA, 652 bp, Homo sapiens
tgttttgggtctgttaatagactttctattttaaggaatataattttgaatagtctgttgtttcaagctttttaccaaaattttgttttataagctgggcacagtggcacatgcctgtagtcccagctactcaagagcatgaggcggaaggatcacttgagcccagaagtttaagtccagccatggcaacatagcaagacctgtctcttaaaaaaagaataacacaaaatttgtttgatagaagtcatatttatgcaagattatttaaatgctgttcagtccatttccttctctgaaaattcagagatctattctccatactaaccatacagactgtcagctacctgactcttccatataatcttagcttccayatacttatcatcaatgagttgtgttataatgttaaacccttgggttttctcaaaacacactacataaaagagccattagaaaataaaacaactaaatatatttattgcacgagtattatagacaatgaagtcattatcactcagtattttcagtgtgaatcctccttgaaaaataccccagaaaatttttgtttatctagaggaatagtaatagttagttctttgagtttctacttttatttctatcttccctagtatttattatgctattgtaaatg

SEQ ID NO: 418174 - DNA, 643 bp, Homo sapiens
ttaggttttcatgtttcatgcattttcaaaggagtaaaaataattacagaaaagagaaacaaatgtagtttatarttatatcttttctgcttaactattatgatttagttaatcaaacacaaggtaaaaagctgaacttgaattcttgttctgtagtactttaaccaagtgtttatttcacaaaatcaaaatatgagcacttggtttaagtattacagaataagaattcaagttcagttttttacctgtctttgagatgttagtataacatctaaatgaagatgtcttgcagatagttagaactggattcatagtggaagtggggaagaaaggatcaagaaatagctttggaaggtatcagaaaggtcccaatcataatggtagctatactttgattgatatggaggacaaagatggctaattagagtaccttaggtacaaagcaccattaatggacagaaagaagaaaaggtattagcaaaattacattattatcctacaacaacataattttacctttgtgtaactgcttatacctttcaaaccagtaatatccattatcttacttgatactgaaatagtttgaaataaagcaggtgacttcttagtacaacatgttaattttagagaaactagctagtac

SEQ ID NO: 418175 - DNA, 530 bp, Homo sapiens
tgccaccctgaagggaaaggcacaagactagctggcttcactacctgctgactgtagagccctagggccttgagtgaacatacgcagcagccaggtagtggtcacagcaccccctggacaagattcaacactttactggcttcaggactgacccaatgcgtcccagtgttggtgccacagggctgcttgtgttacctcacccctaggtccaggcagttcagcacagagacagagagagactccgtttgtttggaagaaagtaaggtaacaagagtctctgcctggtaatccagagaattcatctggatcttacccaagaccatcgaggtgatacctctaygagtctgtatgaactacagcattactgggtttggggtgccacttaatgcagatatggctgcagtgaccaaaaacagatctcaacacccaagtccctttgaatatctggaaagccttcccaagaagcacaggtacaaataagcccagattgctaagaagtcaacaaatacccaactcttcaatgcccagac

SEQ ID NO: 418176 - DNA, 542 bp, Homo sapiens
tattctctaaaaacaaaaatacaacatgagattttcttcaatttctgaatcctcccatctggattgcctacaaatttatatccattcaccagacctctcattcattcatttcactaatatttatcgaacacttactgtgtattagggactgttttgggtggttgtagcagaacaaaaatccctgcccttgtacagcttagattctaggagagagacaataaatatcaaacatattaaattatatgtyagaaagtggttaagagagacagaagaaagaaaaagtactgcagggtaaaaagtagcaagtgcagaagcagggattggtgaagagggtcaggctatagtattacacctaacagtattaaataagtagggctcaagtttagaaacagaaaacctaatttatggggtgatgtaagtctgaatagtggttacatacgggtgggggtgagaggcagggagcttctgacagggaaagagtatacaagaatgttctagagagatgagaacgttcaatgtctcaatgtggatggtgttatata

SEQ ID NO: 418177 - DNA, 542 bp, Homo sapiens
tattctctaaaaacaaaaatacaacatgagattttcttcaatttctgaatcctcccatctggattgcctacaaatttatatccattcaccagacctctcattcattcatttcactaatatttatcgaacacttactgtgtattagggactgttttgggtggttgtagcagaacaaaaatccctgcccttgtacagcttagattctaggagagagacaataaatatcaaacatattaaattatatgtcagaaagtggttaagagagacagaagaaagaaaaagtactgcagggtaaaaagtagcaagtgcagaagcagggattggtgaagagggtcaggctatagtattacacctaacagtattaaataagtagggctcaagtttagaaacagaaaacctaatttatggggtgatgtaagtctgaatagtggttacataygggtgggggtgagaggcagggagcttctgacagggaaagagtatacaagaatgttctagagagatgagaacgttcaatgtctcaatgtggatggtgttatata

SEQ ID NO: 418178 - DNA, 414 bp, Homo sapiens
ttctggtgtgaggcacccccagctttcctgccccaaggaatattcctcagttccaagaagagagtgagtaatgctactaattaatcagatctcctgggctggcctgagatccaacactaattgtaaaatgcaatactttttggtttgacgatgagattagttttgactaggacaaaggcgtgactaaraaactcctaagccctggattagtgtgtgccctggctcactcaggacccgtgtgcctccagcctcccttctcacccccactcaccacccagcgaagcgcaggctggtctcactggcagtacggaccgtgacgctggttggagccacgtcgggtggggcctgcagggtctggatgacccgggaagacggactgtaggggctcggcccaacaatgttcacttgcttcat

SEQ ID NO: 418179 - DNA, 631 bp, Homo sapiens
tgttcctctctaaagtggttattctagttcacagctcctctaaactttaacaaggttcttagcttctttgcattggtttagaacatgctcctttacctcagtgacctttgttattacccaccttctgaagtctacttccatcaatttgtccatctcatcctctgtcctgttctgcacccttgctagagaagtgttgctatcatttggaggagaagaagcactctggtcttttgggtctttgcattgttttcattgattctttctcatctttgtgagtttgtctaatttcaatctttgaggctgctgacccttaaatgaggtttttgtggggactttttttgttgatactgttgctgccttctgtttatttgtttttctttcaatagtcaggtctctcttccgtatggctattgtggtttgctgggggctcacctaaaaccctattcatayggttccctcctgtgtctggagataccatccgaggaggctggagaagagcaaagacgggtgcctgctccttcctctgggatctctgaccttgaggggcaccgacctgatgccagtagggacactcctgtataggatgtctgacaacccctgttggtgagtcttaccaagttggcgagggcac

SEQ ID NO: 418180 - DNA, 576 bp, Homo sapiens
aagatgtggtgttaccggagcctcagagttaggcctgcttgatcccaagtagctaaatggcagaggatctccagggaaactgggcccagggagcgaaaacctgtcccttgcggatgttgctgctggaagaggctgcctgaggaagagagagaagatgagctatatcttggcctctcatttccttctgccttcctatctattgccattgcctcctgatggctggacttatctgtcagccagctgacactgtggcctgggaaatgtagcttgctgtggaaatgtaagaaatatgtttttttggtccaaaaagcaagtaactggcatggccagcattaagagattttcagacatggtgacaktaattgtcagtgcttcaaaaatgatagccaaattttgttaaaagtgaattagcacttattgagtgcttactacacgccagacacagtttgatgttttaatatttgcatacattatctcatttattctatacaacaaacctatgatgcaagtactattaagcatattgaatagaaaaagatactaaagtgcagaatatctaagtagtttatacattat

SEQ ID NO: 418181 - DNA, 576 bp, Homo sapiens
aagatgtggtgttaccggagcctcagagttaggcctgcttgatcccaagtagctaaatggcagaggatctccagggaaactgggcccagggagcgaaaacctgtcccttgcggatgttgctgctggaagaggctgcctgaggaagagagagaagatgagctatatcttggcctctcatttccttctgccttcctatctattgccattgcctcctgatggctggacttatctgtcagccagctgacactgtggcctgggaaatgtagcttgctgtggaaatgtaagaaatatgtttttttggtccaaaaagcaagtaactggcatggccagcattaagagattttcagacatggtgacagtaattgtcagtgctycaaaaatgatagccaaattttgttaaaagtgaattagcacttattgagtgcttactacacgccagacacagtttgatgttttaatatttgcatacattatctcatttattctatacaacaaacctatgatgcaagtactattaagcatattgaatagaaaaagatactaaagtgcagaatatctaagtagtttatacattat

SEQ ID NO: 418182 - DNA, 613 bp, Homo sapiens
acaagtactgccaccatattcaaaattaaagtaaaaataaaataactgaaataagaacaattgatggggtctgtgcatcgatatttgaaaatttatataacatatatgttttatcaccaaatttacattatcacagtaaacatgaaagtctaactttactagcgcccatggggagataaaataatcaactctcagcatccaaaatttctcctccattttactccaaatacatcttatcattcacttaaatgttggaattactccacataataaaacacatccaaatttaccccaacaccagagattcttccaaactctaagtttcagctgcggaaaggagcaattgaacagacttgatattcagaccatcacaagtctcctaggtcagttctgagggtttggtaaaatgataaaaatctactccccagtgggaagtctagctgactaccatagttagacatggaattctaatcattattcagcatgtcttataaaaaggtctaaaatcatgasaaaactctttgtttttttcttacttaagtggcacacaaggaggtgaaaacctacaaaagccattcaacatagttcttattaaccaacattaactgcctgc

SEQ ID NO: 418183 - DNA, 539 bp, Homo sapiens
ttacagcctcccaagtagctgggattacagtcatactccaccagacckggctaatttttgtatttttagtagagacggggtttctccatgttggtcaggctggtctcaaactcccaacctctggtgacccgcccacctcggcctccctgcatattcgttcctattaatcatggtttgagtagtgtaaaactctctaatttgtttagatttggtcagaaaccatgtttgtcagtggtacaatgacagagcatgcttttagtgagcctagatagtactgtgttttgaggtacagggcaagagagtgcagatcttcataagatcgtccttctactgaacaaaaagttgaatgaataaatgagctctctacagttaatagctggaatttgttacctagaattgaataacttgacagaaactctataaaaaaaggtttgcttatgcctttatgtgttttcctatagagggactacagccttcgttacgttctcaattggtctgtgaccaatcaagatgtatggagctgttaaatacagaaagat

SEQ ID NO: 418184 - DNA, 495 bp, Homo sapiens
gagctatgacggaaatagagaaagtgacaactgggagacaagaatgcctgaatgaagacattataagatatgagaagcaaataaagttttcttcttaagcaggatggtgaatatgctgcatggatgtgggtagagagacacaggaggagacgataccaatttggaatcactgaaataattgataggaaactttaaaggccatcaaaggatgagcaattgcagaagaagataaacccaagctataatactgaagtaaaattctcaacttctggcaagttatrggatgtgaaatggtgatgtactttaccagatattagtctaggaattcgggattagatgactggaatgatggcatttgcactaattgaaacaacaggtgaagggagtgacaactgaacacacatttctgacactgtcatatgtaaatttgttctctcaaaccagatcataaaactgtttggtacaaggactagcagagtaccccacataaatgtt

SEQ ID NO: 418185 - DNA, 548 bp, Homo sapiens
tgtttgtttacactttgcatttcctttctgtaatatttggacagttggcatccccagccctttcattttaaatataaacttgttggattggtctgagcagctgcaaataatttaacaaagatttttaagacatcaaaattccttaaatatatgcatacagttcatcaagtcatggacaaaaagtttttattaaccaagaagaatgggaactcagaatgtaactagcagtgtttaatagtatagaaataacgaaatggaacactttattccatttttttttcaagatgagtgaaaaaagatgaagcttacatgaccttcyaaaattgaatatgacagtatcctccttcatcctttccctattcaggtcctaaaataaacagttgcttcatccaagaaacttctgcctgattaatatggaaacattagataagctattgtttaatcaaaataatgttttaagaagaaggtcacatatcaccaccgatgaaatgatactttcccttcaggctttcatttattgataaattcaaacagaaagagaacaatga

SEQ ID NO: 418186 - DNA, 516 bp, Homo sapiens
ttcatttaaaaataagagtgaggatctatactttttataactgcagtgaaagtaaattagaagaaatatcctgccaacctgcaatgccagtcagtcaacacaaaaggtttatgaacttaggtcagggtaaagaactttgcatctccytcagtaggaaatcatagcagaattatttaaggcaacttctctgctaagcactgcatatccagttgaatacttaatgagactttgttagattttgtttggcttgggcttttggtagaacagttattgttatatggatataacatataaaatattgtactttacattgtggatgcttatgtagcaagattttctttttaaatctcttcctggggtttaacatgaacaaacttgatttgtgaacctttgccttccctgaagaaaagtggtcagactaaaatgaaagtggagaggctcccctagttctggaagtccaattcccacagtgtgaaaaaccacaatgagatagtgtaataaaatatggctgtgagt

SEQ ID NO: 418187 - DNA, 516 bp, Homo sapiens
ttcatttaaaaataagagtgaggatctatactttttataactgcagtgaaagtaaattagaagaaatatcctgccaacctgcaatgccagtcagtcaacacaaaaggtttatgaacttaggtcagggtaaagaactttgcatctccctcagtaggaaatcatagcagaattatttaaggcaacttctctgctaagcactgcatatccagttgaatacttaatgagactttgttagattttgtttggcttgggcttttggtagaacagttattgttatatggatataacatataaaatattgtactttacattgtggatgcttatgtagcaagattttctttttaaatctcttcctggggtttaacatgaacaaacttgatttgtgaacctttgccttccctgaagaaaagtggtcagactraaatgaaagtggagaggctcccctagttctggaagtccaattcccacagtgtgaaaaaccacaatgagatagtgtaataaaatatggctgtgagt

SEQ ID NO: 418188 - DNA, 526 bp, Homo sapiens
gatgatgccggaccccggggccccccaaatgcaccgtttaattctttccttctaatttcctcctctccagcccagcacactgcctcctccgggccctggtcccatctgttccctctgctgggcatacccttcaccactctgtggtgcccaccttcagcaccctgccctaccccagcacccccatccccttactctactcagttgtttttgaagaactcttcccattctaataggccgtatgtttgacctattgatcatgtttgttatttatgagtcacctcctcttctgtacggaagctccaggagggcagggatttttgtctgttttgttcactgtcttctcccaaacatctrtgacagccaggatttaataggtttaatgaatttgtttgtgaataacaataatatttgtttaatgaagaaaaattcatcaatattatgtcaggttgtatgataaatagtgatttatcatggcagagtgagaggctggaggtggacaggatggggtacagttttagctgggccg

SEQ ID NO: 418189 - DNA, 526 bp, Homo sapiens
gatgatgccggaccccggggccccccaaatgcaccgtttaattctttccttctaatttcctcctctccagcccagcacactgcctcctccgggccctggtcccatctgttccctctgctgggcatacccttcaccactctgtggtgcccaccttcagcaccctgccctaccccagcacccccatccccttactctactcagttgtttttgaagaactcttcccattctaataggccgtatgtttgacctattgatcatgtttgttatttatgagtcacctcctcttctgtacggaagctccaggagggcagggatttttgtctgttttgttcactgtcttctcccaaacatctatgacagccaggatttaataggtttaatgaatttgtttgtgaataacaataatatttgtttaatgaagaaaaattcatcaatattatgtcaggttgtatgataaatrgtgatttatcatggcagagtgagaggctggaggtggacaggatggggtacagttttagctgggccg

SEQ ID NO: 418190 - DNA, 607 bp, Homo sapiens
tgtccaccatgaagagtccaaatgctggggccagaggagggagaggcagaggtctggtccaagaccagccccgcctctggatcatgaagccttttgacaggggattcacagtggctgtctgggattagaagacgacagaacatttagaggcatctccagtctactgtgtttgttttacagaaaagggaactgaagcctagggtctggttgctgcctaagacagaaagtgagttaagagccagggtaggactagaactctgggctctgcttcctgcctgggggtcctttccctggattcttgacctcaagtgtgaaaaagagggtcaggcctgaatagggagccctacttgcatgagcacctgctgcttcctgatggaggtaaagtatggtctcatggacaggctttctccttggcaatgttggcagcagcagcagcagtatctgtgagtgggctgcccttcatcagcccctsgactttcctagaaactcccctttgcatcctcagaagtcagggcaatgtggtcctgtgtgggctggtgcagccctgtgcacagctacaggcagggccaggggcaagtctgcagcctccctgcccctcacagaggcc

SEQ ID NO: 418191 - DNA, 522 bp, Homo sapiens
tatagccccctcgaggattcagggaaggcttgtgggaargtgacacttgggctgggtatgaaatgattcataggaagaagtaggcaaggtgaataaggggagaaaatattagcataggagaaatcatatacagagctatgaaggcatgaatatatgttccggattctaggagatgaaaactattccaaggtgcttggaacatagggtaggggtgggagcagggtaagaaaatggtttgattttatttagatggccattgggagctatgagatttaaacagggaagtgccatggtcagatctatatttttatttatttatttatttacttatttatttagagacagggtctctctctgtcacttagcctggagtatggtggtatgatcatagctcactgcagtctcaaactcctagactcaagggatcctccacctcagcttcttgattagctgatagtacaggtgcaggccaccatgcctgactattttttattttattttttgtagagacaaggtcttgct

SEQ ID NO: 418192 - DNA, 522 bp, Homo sapiens
tatagccccctcgaggattcagggaaggcttgtgggaaagtgacacttgggctgggtatgaaatgattcataggaagaagtaggcaaggtgaataaggggagaaaatattagcataggagaaatcatatacagagctatgaaggcatgaatatatgttccggattctaggagatgaaaactattccaaggtgcttggaacatagggtaggggtgggagcagggtaagaaaatggtttgattttatttagatggccattgggagctatgagatttaaacagggaagtgccatggtcagatctatatttttatttatttatttatttacttatttatttagagacagggtctctctctgtcacttagcctggagtatggtggtatgatcatagctcactgcagtctcaaactcctagactcaagggatcctccacctcagcttcttgattagctgatagtayaggtgcaggccaccatgcctgactattttttattttattttttgtagagacaaggtcttgct

SEQ ID NO: 418193 - DNA, 511 bp, Homo sapiens
tattccctgtgttcctgttttccattcatttcatytgagttccaccttgttgattgttgttactcctttcaggttgagggttttcctgacatgccgatgatgactctctggccatacgaggatgtcagatctactgaccctcccctttccccaactggtcacccacttgtcctcacttccttccttgcctagcttagtgttcattataattacacctccccaagcaccttcaaccctctgcctccctctccccctgttgttctcactgttgggcccctaccctagttaagatcgaaccacctgtagctgtctgtcaaatggtgctagaggagacacacggaaccctgaaagagcccagtctgtatctgggagttgagagctctggcgagtactctccaagccttgcctcccctcctctgtgggagctggcaatgcctctcctctatcaacagccaaaccatcccagggctttgcatccaccctccctcttcctcgaagactgtgcttcagc

SEQ ID NO: 418194 - DNA, 511 bp, Homo sapiens
tattccctgtgttcctgttttccattcatttcatctgagttccaccttgttgattgttgttactcctttcaggttgagggttttcctgacatgccgatgatgactctctggccatacgaggatgtcagatctactgaccctcccctttccccaactggtcacccacttgtcctcacttccttccttgcctagcttagtgttcattataattacacctccccaagcaccttcaaccctctgcctccctctccccctgttgttctcactsttgggcccctaccctagttaagatcgaaccacctgtagctgtctgtcaaatggtgctagaggagacacacggaaccctgaaagagcccagtctgtatctgggagttgagagctctggcgagtactctccaagccttgcctcccctcctctgtgggagctggcaatgcctctcctctatcaacagccaaaccatcccagggctttgcatccaccctccctcttcctcgaagactgtgcttcagc

SEQ ID NO: 418195 - DNA, 562 bp, Homo sapiens
atagcatataaagaaatttacatttttaaatcacagatggagcaacatagactatcgatgtgattccacagctctgaagctctgcagacctcagtccagctaagcacgctacaggtaaactactcagaaacaactaagcctaaattaaattacgatctcacgtgatggtccccttgccattttgcccacagagtcctagcttctagaaagcttgagaggcaggaagggaagaggaattctagccgcccgagattcttagggaatctttgggaattatatttccgctacatgtctataaaagatttgtcggatacataactcttatgactgtagacgcaacatgttcctatctcattttttacccacacacatacttgtttctctttgtctcactgagcctgacatttggccagcaggtttttctcccccttatttgaaacttcatgcactgaaaaaatttggatctgattatttccggatcgcaggaccagcactttaaaatggatgaaatgcaagcaaattgcccacyggagccggaggggagaaatgctttaaaagtcac

SEQ ID NO: 418196 - DNA, 534 bp, Homo sapiens
atctgaaacctgaccccaggctgagccatactgtcttctctccggtcactgggcagctgtggccacaaaagacctgaagcttggcacctctcagcctcccctggctagcacaccacagttagcacccttcacattcagcattttaaaaatgtaaccttgcttccttctcactctgtcccctttatctcaagtgtcactgacccttgcrtgggccctgcacgaattaataaaagtgcctccttctacctttttagcttataaggcattcttacaactcttgttttatttaccctgcaaggtaggcaccattacctctcacgcaaatgaaaacccagaggttgagaatgtgaaacaggttacagtagtaatcctaaaaataaccaggcactgaggtggcccttgcacattctttatcactaatgatctcatcagtcttgcgaattaagtctcagggtaaatttacaaacgaaggaaccaaaggctcagaagagtaaaatcaattcccccaagtgccacagatcatagatggtgggg

SEQ ID NO: 418197 - DNA, 579 bp, Homo sapiens
ttcccattagttacccaataaggaaaagctattctttcaatattgaagaggatttctgggtcaccatcagatatatctctctatctgttaagtatgattttctaaaaattcttttctttttatttttccagaggaataccatccttatgttaaaataatttctttggtcatacataatattacatgatgattttaggggcttatacttttaattttactctttgttcaattcagagtaattttgccttgagatgctagggtaggttgatatttaaaaataatatggtgatgatttaatttgatttagtaawcacatatatgcataacaagtcataagccactttgagctgtgttaaaacactcgtttagaaataaacaccttgtagattgaggactgaatctggatcaatcttcttcctcatatagttttatataattaagtgatttttggaatggacatggtaaccttgttcatcttgcttgtaaacgtagctcctgggggctgatagaagcaggaggacctttggttgcactgagaggatatttgtaggcaccatgaaatagatgagacctggtaaa

SEQ ID NO: 418198 - DNA, 615 bp, Homo sapiens
gatactcagtaaagaagtttgttggaaactaggcattgaagaaacatacctcaaaataataagagccatatatgacaaacccacagccaatatcatactgaatggggaaacattgaaagcattttccctaagaactggaacaagacaaggatatctactctcaccactcctattcaacatgctactggaagtactagccagagcaattgggcaagagaaagaaataaatgatatccaaattggaaaagaggaagtcatattatctctgtatgctgatgacatgattgtttacctagaaaaccctaaagactcytccagaagactactagacttgacaggtgacttcagtaaaatttcaggatacaaaatcaatgtacaaaaatcagtagcatttgtatataccaataacattcaagctaagaacaaaatcaagaactccatttcgtttacaattgccacaaaaaataaaatacctaggaatatatttaatcaaggaggtaaaagatctctacaaagagaactacaaaacgtggctgaaagaaactgtagacaatacaaacaaatggaaaaacatcccatactcatggattggaagaatcaatgtcattaaaatga

SEQ ID NO: 418199 - DNA, 600 bp, Homo sapiens
aatctattttcaattcttagagacaatgaatttctgtaaaagatttaattctctattgacttagcaaaaaaaataataaacagcaaagttagtatacttttgaatatttgcaagtcatcagtgaactgatctcttaagatcatctggagggtgggactgccttccttgctcttacatttgtacacacagggtcaaccaaatacattccttgacttctggaggggytcaatcattattgaccaaaatgagtgaacttacacaaagaaattgtgaggtgattttataatctctctctcttccagttggagccaaaaataagccaccatctgtactatattcatgctttctgatttagctagcaggttcaggtgggagacaaattttaaaaatgagaaggaaaatgacttcaacaggagaaaaacaaaaataatttttagaacttcaaattgaatttaagattagccactataacataattgagtttgaaatcagggccctaaaaagacctgttgtagtgaatggaaatacgttatgccttttgaaacctagactacattatcccttacttgctgaacttcaaaatcaagcagccacattaca

SEQ ID NO: 418200 - DNA, 600 bp, Homo sapiens
aatctattttcaattcttagagacaatgaatttctgtaaaagatttaattctctattgacttagcaaaaaaaataataaacagcaaagttagtatacttttgaatatttgcaagtcatcagtgaactgatctcttaagatcatctggagggtgggactgccttccttgctcttacatttgtacacacagggtcaaccaaatacattccttgacttctggaggggttcaatcattattgaccaaaatgagtgaacttacacaaagaaattgtgaggtgattttataatctctctctcttccagttggagccaaaaataagccaccatctgtactatattcatgctttctgatttagctagcaggttcargtgggagacaaattttaaaaatgagaaggaaaatgacttcaacaggagaaaaacaaaaataatttttagaacttcaaattgaatttaagattagccactataacataattgagtttgaaatcagggccctaaaaagacctgttgtagtgaatggaaatacgttatgccttttgaaacctagactacattatcccttacttgctgaacttcaaaatcaagcagccacattaca

SEQ ID NO: 418201 - DNA, 600 bp, Homo sapiens
aatctattttcaattcttagagacaatgaatttctgtaaaagatttaattctctattgacttagcaaaaaaaataataaacagcaaagttagtatacttttgaatatttgcaagtcatcagtgaactgatctcttaagatcatctggagggtgggactgccttccttgctcttacatttgtacacacagggtcaaccaaatacattccttgacttctggaggggttcaatcattattgaccaaaatgagtgaacttacacaaagaaattgtgaggtgattttataatctctctctcttccagttggagccaaaaataagccaccatctgtactatattcatgctttctgatttagctagcaggttcaggtgggagacaaattttaaaaatgagaaggaaaatgacttcaacaggagaaaaacaaaaataatttttagaacttcaaattgaatttaagattagccactataacataattgagtttgaaatcagggccytaaaaagacctgttgtagtgaatggaaatacgttatgccttttgaaacctagactacattatcccttacttgctgaacttcaaaatcaagcagccacattaca

SEQ ID NO: 418202 - DNA, 600 bp, Homo sapiens
aatctattttcaattcttagagacaatgaatttctgtaaaagatttaattctctattgacttagcaaaaaaaataataaacagcaaagttagtatacttttgaatatttgcaagtcatcagtgaactgatctcttaagatcatctggagggtgggactgccttccttgctcttacatttgtacacacagggtcaaccaaatacattccttgacttctggaggggttcaatcattattgaccaaaatgagtgaacttacacaaagaaattgtgaggtgattttataatctctctctcttccagttggagccaaaaataagccaccatctgtactatattcatgctttctgatttagctagcaggttcaggtgggagacaaattttaaaaatgagaaggaaaatgacttcaacaggagaaaaacaaaaataatttttagaacttcaaattgaatttaagattagccactataacataattgagtttgaaatcagggccctaaaaagacctgttgtagtgaatggaaatacgttatgccttttkaaacctagactacattatcccttacttgctgaacttcaaaatcaagcagccacattaca

SEQ ID NO: 418203 - DNA, 560 bp, Homo sapiens
aaatcacacaagtatcagaatacagcatgttcatatgcttgatcttgaaatttggcaacttaggcccatattaatgtagattctatctccactggtaggacttacaactgtttttccttgcaattgtcaataatttcctacttttactaatttcttgtcttataattaattgcttagttttagtgtgactttaaggaatcattgaaaaatattcttaactcatcaactagccatagattcccactaactcccaaccccatttttcattctgacctgagaaccaagccttttgtccaaatatacacaaagtataaaatcatttccatcagatctggaaaatcttttaacctcgatacttacaattcactcctaggaattagccgtcacagtcaggcatgagttaacagagagcgagaacctgttctcctatttttcaaayatttctggggagagatgaattttcatattccaaatttatatgacagtgaatcaggatgatctctctctctctcccaccccacctttctctgggtgttaatcactcattgaaaagcttttta

SEQ ID NO: 418204 - DNA, 601 bp, Homo sapiens
tgggaatagttgtgcaccccatgatctcctctctcttggggaagactctgaactttcagagtgggggatgacagggagaaaatggatagatgtcaagctcaatgctttggggactcctatagtagactgtatgatcagaaaagttacagaattgccttccgtagagcccttagatttaaatctctgagagcttaggcctatgtctttgtcctctgtctatatcccacagtatttagcccaacactttacatttagtgagagctagtaagactaatgtctaatcttatctgggtccttttatgtgccagacattgttctaagagctttatatctggtaactgttttaataagagtctcttaataaatattttaggatatcaaatctaagcacataattgttacctaaaatgtttaggtaaatctgaagcaagttagacaaatcaattcastggatttttcgaaggctgttcaactctatgactttaataagcaataaatgatacatcactttcttatttctttttatcagtacacttttaaatttctgatatattttgattctcatttctactccttctgccctttctctggaaggctacaa

SEQ ID NO: 418205 - DNA, 541 bp, Homo sapiens
ttcaaaaactgataggctataagcctggagctgctggctgacacttttctcatgacttggttagagcctaagaatgaaggcagcacagaagacagcagagctgagaggcggagagagaaagattaaaaaaaaaaatcagcttttgttttagattcagggggtacatgtgtaggtttgttacatgagtatattttatgatgctgaggtttggcatacaaatgattctgtcamccaggtagtgagcagagtactcaatagatagtttttcaactcttgcccctgcttcttcgctcccctatctagtagtccccagtggagagacagatttgtaatgacagcatttgagcactcaagttcacgtgagcctgaactctcacccagactttcagttatgagaaccaactaattcccttttttatttaaatctatttaatcaggtcacttttaatttaaagagctcttactgatacatgtcgttgccaccactagacaacatacctgtgcaagtattttcagccactttttagaaaaagatgtgttt

SEQ ID NO: 418206 - DNA, 541 bp, Homo sapiens
ttcaaaaactgataggctataagcctggagctgctggctgacacttttctcatgacttggttagagcctaagaatgaaggcagcacagaagacagcagagctgagaggcggagagagaaagattaaaaaaaaaaatcagcttttgttttagattcagggggtacatgtgtaggtttgttacatgagtatattttatgatgctgaggtttggcatacaaatgattctgtcacccaggtagtgagcagagtactcaatagatagtttttcaactcttgcccctgcttcttcgctcccctatctagtagtccccagtggagagacagatttgtaatgacagcatttgagcactcaagttcacgtgagcctgaactctcacccagactttcagttatgagaaccaactaattcccttttttatttaaatctatttaatcaggtcacttttaatttaaagagctcttactgatacaygtcgttgccaccactagacaacatacctgtgcaagtattttcagccactttttagaaaaagatgtgttt

SEQ ID NO: 418207 - DNA, 576 bp, Homo sapiens
actttacacatttatagacaaaggtatacctatatttgtaatcaattcacacatagtcccaatctatgttttaaaaataaacagaatcctgagttattaatctctttattttgtgggactatagtttggatgataatatatataactcctacttctttttggatgtttctgatatttctgaggacttttgtctattcaggtaaaggaagcagcaatagaaaggcaatcttccaaattaatatttttagggattttgtgwttcattcctcatactaataaacccacaacttcccctaccctctccctacatcccagctcctaattcagtcatcagtggttgatgagctgattagggtttccagacttaacaagtaaaaatatagaatgaatactcaatttaaaaatttaaaacaataatagcttttattaagcatttattaagactttataataaccaggtactttgctgagtactctgcagacattatttcacattgaattctagcaacacctatgaggtagatattattgtgagtatctccattttacacaggaaaaaaaatggaatctcagagg

SEQ ID NO: 418208 - DNA, 531 bp, Homo sapiens
cttcctagaactgtgtttgtaaatattatctataggtgattcttcaaagactcagttttagagttttccaaaaagaatttcaagtatcttcctcaagacctctgaaaagcaagtcgttctagtattgcttttgttggatgaattttaaattcaattctttatctagttggagatatcgcatatgggtttcataaaccagataaggagagccctgaatgatctctgaggctccttgtaactctaacatcctacaacctttctcttctgagttttagctggcacagacttgctctatgttccaatgagaaaaataatacattttaaaaaactgtatgtctttttctgaatggaataaaaatacattttaaaaaagtcagacattctctagacagcaacaaagtgttttgctaaaacattaattaatatacataaatgtgagacaacaatcatgatttttttttttttttttggatcctgaraacaactgggggaaaccttattttcaaaatctattcctgtccaattgtggct

SEQ ID NO: 418209 - DNA, 547 bp, Homo sapiens
gatcttttcaaataaccaatgttttgtattgttgattttctctattgttttcctgttttcaattttattgatctttgctctaatttttagtatttcttctgctttctttcagattaaattgctcttctttgtctaatgtcctaagatgggggcttagattatcaattctagatatttcttctttactaatatattttrtttgagaccttgaaggaggttttattatttatttatgtataaagttaactaatgtattacttcaacacactataaatctccttgtaattattgcttttactgcatcttacaaattcaataagttgtattttaattttccttcagttcagaatattttaaaatttctcttgaggcttcttctttggcccatgtgttatttagaagtgtgttgcttaattttcaaatacatgaggaattttccaactatcttattgatttctagtttaattctattgttgtttgatagcattcattgcataatttttattcttttaaatttgttaaggtatgctttatgtctcaggatgtg

SEQ ID NO: 418210 - DNA, 618 bp, Homo sapiens
acaactgtcatatgtgagcgctttctcctcttttttttttttttttttttttaaataccttttatcatccccctctatggaaggagcagcactgggcaacaggaccccagggagaagacccctcctcgtcctcaaggacagaggccagagccggagaatagaggggtgaggaacattctaggagaagcttctacaaatgagctgatggctttaracgtttccttcttagccttacaatttttctccttgattataaaagtaaaggaaaacttgtaaaatacagaaaggaaaagagggggaaaaaagtcacttataaccacaccaatccagagggatttcaaggatttggatttggagatggtggcttccagatgtcttttggaattggggcatttccctttgggatatttgccacagcatttaatataaatgatgggcggcctcctccagctgtccctgggacaccccagtatgtggacgagcagttcctgtcacgcctcttcctatttgtggccctggtgatcatgttctggctcctgattgcctaatgctgggctcctgcctacatccgtggcagggctctggactggtgacatgccaccccaactcctggtgttt

SEQ ID NO: 418211 - DNA, 618 bp, Homo sapiens
acaactgtcatatgtgagcgctttctcctcttttttttttttttttttttttaaataccttttatcatccccctctatggaaggagcagcactgggcaacaggaccccagggagaagacccctcctcgtcctcaaggacagaggccagagccggagaatagaggggtgaggaacattctaggagaagcttctacaaatgagctgatggctttagacgtttccttcttagccttacaatttttctccttgattataaaagtaaaggaaaacttgtaaaatacagaaaggaaaagagggggaaaaaagtcacttataaccacaccaatccagagggatttcaaggatttggatttggagatggtggcttccaratgtcttttggaattggggcatttccctttgggatatttgccacagcatttaatataaatgatgggcggcctcctccagctgtccctgggacaccccagtatgtggacgagcagttcctgtcacgcctcttcctatttgtggccctggtgatcatgttctggctcctgattgcctaatgctgggctcctgcctacatccgtggcagggctctggactggtgacatgccaccccaactcctggtgttt

SEQ ID NO: 418212 - DNA, 671 bp, Homo sapiens
tgggggctcctcagatagagatgttcccctttcaaatcccagtgccgctctgttctctttccttcccctcccactccccctcttcttcctctgtagagatgcaagaaattgctgtcccataaaaatcataattgcagtagctaaagctggggtcacttcgtaaattcatcagagactcaaagaycttttattggctctgggctgtgctcagtgtctttggcctcagagaacaacttgaatgacttcctggtttcctggcataaattattcctggtgagacatgtggcttaactcacagatttcccatcagctttctccctaaaactatgtgcatctgcctctctctgcctgagaacatacagccgagaatactgctgaagctgagactgactactgtgcattaggaaagacctggagtcaggactttggtgggatttggagctccgaggcagtaataactgaacaagcagccctgtcccctaggctgcagaagcttgaatgcatcctctcccagaacctgccacaggaaactgggggctttgtcaggtcagcccaactgcatgcagaagaccaccatcctcagaagccaagttgtcttttatgaagaggcaaggaaaggggaaacccacatgtgaccctgattttggtatggcttgatagagttccctgaa

SEQ ID NO: 418213 - DNA, 545 bp, Homo sapiens
ttcctctgtagagatgcaagaaattgctgtcccataaaaatcataattgcagtagctaaagctggggtcacttcgtaaattcatcagagactcaaagatcttttattggctctgggctgtgctcagtgtctttggcctcagagaacaacttgaatgacttcctggtttcctggcataaattattcytggtgagacatgtggcttaactcacagatttcccatcagctttctccctaaaactatgtgcatctgcctctctctgcctgagaacatacagccgagaatactgctgaagctgagactgactactgtgcattaggaaagacctggagtcaggactttggtgggatttggagctccgaggcagtaataactgaacaagcagccctgtcccctaggctgcagaagcttgaatgcatcctctcccagaacctgccacaggaaactgggggctttgtcaggtcagcccaactgcatgcagaagaccaccatcctcagaagccaagttgtcttttatgaagaggcaaggaaaggggaaacccaca

SEQ ID NO: 418214 - DNA, 598 bp, Homo sapiens
tgtcttctgggaaatctttcttgtggattaaaccttaactatttctgaagactttctccaaattagcccagtkaaatctcatttttcctgcactttgtgtcccctcagttcttaataatgaaagtgtaatgcttcatttttcaggtttttttgaaggaataatctattctacagaaaggaaaattttaaaggcttaagtttatttcttaattgttaatcgttagtcacctatttttaaaggtaaattttctgtaatgatatgtcacctatttgttctacgttttataaccaagtctattgaatatatttttttcttgatgctcaaactgtccaaactgctcctcctatagtctttcccatttcatttatcagcaataccatacttatcattgcccagcaaaaaatttggagtcatccttctctcctccgtatctctcaatccccaaatctattccaagagtaaatcctgttggatctacctctatcatatacccagaatctgaccagtttttacagactacactctttgcattcaggggagtcctctgtcatctcctgcctggattgttgcaataacctcccaactggtctccctgct

SEQ ID NO: 418215 - DNA, 604 bp, Homo sapiens
actcataggctgggcaaagccatatttctcaatcacactctcaaaaatggtcagaagtaagtttcacagtcccatactagtcctgccctcaggtatgagagttaacatctcctatcagtttggtcgaagtacaggagtcacagtctcaacaatgggcaagatccatgtataagagccccaactctggccaggcactgtggttcatgcctgtaatcccagcactttgggaggccgaggtgggtggatcacctgaggtcaggagtggccaacatggtgaaaccccgcctctactaaacacagaaaaaattagccgggcatggtggcaggtgcctgtagtcccaggtactcaggaggctgaggcagaagtatcacttgaacccaggaagtggaggatgcagtgagctgagatggcaccactgcacaccagtctgggcaataagagaaaaactctgtctcaaaacaacaacaacaacaacaataacaaaaamcccactcccacttgaagatttcgttccagtaggagagtcaaagcaccacaggtctgctgagtcatgcttcaaatgtcaccaaaccacctgtggatcagattcatgtatgagagtaa

SEQ ID NO: 418216 - DNA, 445 bp, Homo sapiens
tttgttgcaactgagcagtgttttgatattaattattatggacactttttgaacaccttatatagagcaaatattgtcctaaaacatgtatattcatcctctcatttaatcctcccaagaatctgatgagctaggtataattaktattccattttaaagtggaagaaacaaagacacagtgaagtttactaagttacaaaagctctcacaggtagctgataatggacccaggattcaattgttggcagacttatttcatgcccaagtacctaatcaggatttatgtttatcttattattattttaaaattttcattggtacctggagttatgctacatactagaatatggtgtgctagaaagcatgctcaaccgagaatcaggcaccatccagagcctgaaccaaatcatcagctcttaggggtcccctcattccaagtctgtag

SEQ ID NO: 418217 - DNA, 543 bp, Homo sapiens
tcttctctaatgaagccaagaattcaaataagaagtacaattttaaaattgctttcttcttgttgtttatatttctttaatttaatgttgttttggttcattttgtccttctactttcatgctgttgatttttcttaaaggtctggagactctggctgactttccacatttatgagtgaagggcacagctgtttggtrtgggtagtgcatgaggaaccctttcctattgtgggtaaggcatggcaggatgcctgatgctgagcttgacagacaagcaggctcatctcatgatttccacccctggctgaatacaatagacttgacccttgttggagtggcactgttgccaggtctcattgcagttcatctgctgaggaggttggttgaattcccagtctcttctctccacttttctcaacatccacactgtgagcttcagggtgtcagctaggtttggatgcttcagccagcttccttggacctcaggaaagtatggcgtcacccagcccaggggataacaccccagtgaacgctggtgggtat

SEQ ID NO: 418218 - DNA, 584 bp, Homo sapiens
tttggttcattttgtccttctactttcatgctgttgatttttcttaaaggtctggagactctggctgactttccacatttatgagtgaagggcacagctgtttggtatgggtagtgcatgaggaaccctttcctattgtgggtaaggcatggcaggatgcctgatgctgagcttgacagacaagcaggctcatctcatgatttccacccctggctgaatacaatagacttgacccktgttggagtggcactgttgccaggtctcattgcagttcatctgctgaggaggttggttgaattcccagtctcttctctccacttttctcaacatccacactgtgagcttcagggtgtcagctaggtttggatgcttcagccagcttccttggacctcaggaaagtatggcgtcacccagcccaggggataacaccccagtgaacgctggtgggtattatccctgagggttgtgcaagctgatccacttggtgtgcaaagaaaatcttggaacttttacctacctgaatgttagctaaaatatgaaagatatcaaagcttactaattttaatatatggattgtcatact

SEQ ID NO: 418219 - DNA, 484 bp, Homo sapiens
agagttccataatccacttgtttgcttctttgattgtcttgtgatgaattscagttatatcttcttggttaaagggatttatggataatatgttccattaaaataatctaatccttgcaaaatggttaagtaattaaaatttctggcatagaaaatgtggatcaaggataactcaaaatgccgacactggtaaacaactagagaatagcaaagctgatacttctaacctttattcaccccattatgtgatgcaaatattgatgatttcataaaatccgatgagaatttggccccataaagttcaaaactatcatgaagactatttattttgaagataaattttcactcatgatcattaatgattaatctcacccaaatataaattatgttgagatatttgctaatgagaatagcaatatgtatattgctatatataaaaatatgtatatatttataaatacatttacgtaaattgtagttgtgt

SEQ ID NO: 418220 - DNA, 559 bp, Homo sapiens
  misc_feature (1)...(559): n = A,T,C or G
gttgtagtaggttgtagtctccaggctccggcaccagaaagagacctacctttcaaatcaagaggtgctgacgcaatatgacggtccatttgtcctaggcccttcctcgccttctaagggttgctgattgtaggaagggtattcattttattagaaaagatggtcttcaaaaattgttctctccttaaggcttctggaaatagctgatggctagtatagttacttttctaagtgaacagaggctgaagagagggtctctgccttgggggcatcangcccatgtaagtgtaaggttaccacgagggaaggagagggattaccaagcaagttatagactgaatgttgaagccaccagcctcttctcactttcaggtctcagaacctcagcagctagatgttaccttccaggaaggagatcagaagaatcttgtctgggcaatctgaccagactaggaggacaaattgaaggataatgaaattgaggatgcccaaagtaacagatcacagcactccataygtgacatccacgatggggaagcctagccacttgcacagcact

SEQ ID NO: 418221 - DNA, 610 bp, Homo sapiens
tttccctaccttgatacagaaaggtggatcccaggtggaccattatttcactcagctagggaggcagatagctgacttagaagctgctgaatatctgggagggatggctctgtgtgcatagagaaaggacctgtagtggccagcagggagtaggtgctgcagggtgaaagctggacagggctctcagaggtcttacagtgttcagagaccttagagtttgkatctagtcagggtgaagagtccttgctgaatccctggaatattcaaatgacaaccccacaaaaaagcccacatcttaggtataaaatccacatacattataagaaaaaaagataataacataaacaaaaaatccttaatgaaatattagcaaactgaatccagcactatataaaaacagtaaaacaattgaccaagtaagatttatcccaagaatgcagaattgaaaccagcaccttgtagaaatatctgcacttccgtgttcatcccagcgttactcaaaatagatatgggagcaatccaaatatccattgatggataaatgaatgaagaaaataggtgtatacatctaatggaatattatttagcctttaagaagaaaggaatccta

SEQ ID NO: 418222 - DNA, 442 bp, Homo sapiens
catccctttttgcccccttatgtcatgtgtggatgcagcaagaggatatcatcttggaagcagagagcaggctttaccagmaccaaatgtactggcaccttgatcttggacttcccaaactccagaactaagagaaaattaatttttattttgagttaccttgtctcaggcatgtaattatagcaggacaaatggactaagacccttcaataaacccaggcaaaaaaaaaaaaaaaaaatctagaaatgcaaccagaagaaaaaaaaaaaagacctaatatgacttacatgttacttttaatggaaattatggaaaagggaagactataatgacatacttgaagtacgaaagcaaatgagtcttaatttagaattctatacccaaaaaatataaccttcaaaaataaaacaaaataaagacatttaagacaggcaaaaattg

SEQ ID NO: 418223 - DNA, 547 bp, Homo sapiens
aatggtgccagtatacacaaatgaagcactggcattaaacagagagtctaggaacagatttgttcatatttagtcacctgatttatgacaaagatgtgactatgatttctgtaggggaattactgtcttcaattaatatttctgggccaactgaatattttcatggggaataaaagaatcttgaccccaatcacatcacttagaaaaatcaattccagatgaatcatggacctaaatatgaaaggtaaaacaataaatcttctagaggatataacacaggagaatatatttataatcctgagctaggcaaatacgtcttaaacaagataaaaaaagtgctaaccataaagataaagactgayacatttgagagaagatatttccaatacacatatctgaccaagaactcgtgtgtatgtgtatgtgatgccagcatcatcctgataccaaaaactggcagagacacaacaaaaaaagaaaatttcaggccaatatgcctggtgaacattgatgtgaaaatcctcaataaaatactaccaaactgaat

SEQ ID NO: 418224 - DNA, 547 bp, Homo sapiens
aatggtgccagtatacacaaatgaagcactggcattaaacagagagtctaggaacagatttgttcatatttagtcacctgatttatgacaaagatgtgactatgatttctgtaggggaattactgtcttcaattaatatttctgggccaactgaatattttcatggggaataaaagaatcttgaccccaatcacatcacttagaaaaatcaattccagatgaatcatggacctaaatatgaaaggtaaaacaataaatcttctagaggatataacacaggagaatatatttataatcctgagctaggcaaatacgtcttaaacaagataaaaaaagtgctaaccataaagataaagactgacacatttgagagaagatatttccaatacacatatctgaccaagaactcrtgtgtatgtgtatgtgatgccagcatcatcctgataccaaaaactggcagagacacaacaaaaaaagaaaatttcaggccaatatgcctggtgaacattgatgtgaaaatcctcaataaaatactaccaaactgaat

SEQ ID NO: 418225 - DNA, 639 bp, Homo sapiens
ttaactggcaggcatgagttctgtccgggatatgccccctaagacagcaccacaacttttggagcagaacaaaagtagtgctatctatataaatgatgaaagcattatgtgacttccaaagagaagatgcggaccatgaacaggcttcactgtcactgaagcggctgtaatcagaagacctatatatatctactatacagagtcttcatgagaagtttctcctctcctaaaattgactcctcctagcaatcacggcagttyccagttcccaaaaaagggcctcctcagctgaacagaggctgaacttaagcaagtgtttctctttatagcaggagcctggagtatcatcattgtggggctacctccagggaagccaggcccaaagaagcagaagccactgttgctgttgtgacagaacagcatacaaagtgaaagcatcggaccataatttctcatgtctgggtgagagtctccctcagtggacgcacctgggaagagcccttcaagatacagaacatgcgaactgtcaaacatgtgctgttgctctgtggacacatctgggtagtttccaggctagttgtgcagggatttcaccaaatctcctaagaaagtagggattctctgaacactcactctctt

SEQ ID NO: 418226 - DNA, 570 bp, Homo sapiens
ccaactcaatcccagcttccgggagtaaacattcataaaaggttccactccaaacactttccacattgcaggatttttcacaattccccccaacctcaacaccactgccaactcctccttcaccaacataacaattcatatcccaccattgatcatagaaaggctgagtctttgacattaggcttggggaggggtgttctcatccggtgacctcagggattccaaatgcatggattttaaaatcaccatctgaatcaggacactcccaacacagatattgctcagagtgggaaatggctcccggtgccttggcctcttcccacaagggtatggggagcaccagtctgcatatataggagatatatatatatatatctcctaaaagcaagcctggaaaaggtgaagaatctcaatcctctctacctatatcccaataaaaaagaaaagctattaaacatatttctataaatgttatgcasgttgtcactcaatggcactcacagtagatatagaaatgcagagtgtcagaaggcagtgtttacctttatcagatattatcaagaaaaccaa

SEQ ID NO: 418227 - DNA, 569 bp, Homo sapiens
ttgaaagttacaaaaactttatgctcattggcttaggcaagagagaaattatttgctcacataactgaaacacccctggatatggcacaatccaggatatacacaacatcccctgagttcatctcacaacttagccgcctctgggttggctccaagtccaggatctacacagggtcttccagtagtttcaatcttcacatatcatgattagcatgtctaggagagcccacttcccttagagagcagaccaaagtcctgggttgggactcactgataccacctgacatgacttgggttgagtgttcatccctaaactatagagggtgggctggaggtaaagtgcccccctcagttgatttagtctgagtcatgtgctccaccctggggttgccttctttgtcagagmccttgggataaatagaggaaagaattaattcctctcaatcaaatcaaagtcctattgtcacagtaagggagagtggtgctaagaggaaaatgcaacaaatatctactacacccagatttgtacacacatttaggtacaagtctgttacaatgaaaaaaattcc

SEQ ID NO: 418228 - DNA, 600 bp, Homo sapiens
ctccatttttatgttgttccagcccatacattagaggaatttggttcatggggaaaagaaaattgaatagcagctaaaggtcagtgagccagtcagctctttcagttgaaagttacaaaaactttatgctcattggcttaggcaagagagaaattatttgctcacataactgaaacacccctggatatggcacaatccaggatatacacaacatcccctgagttcatctcacaacttagccgcctctgggttggctccaagtccaggatctacacagggtcttccagtagtttcaatcttcacatatcatgattagcatgtctaggagagcccacttcccttagagagcagaccaaagtcctgggttgggactcactgataccacctgacatgacttgggttgagtgttcatccctaaactatagagggtgggctggaggtaaagtgcccccctcagttgatttagtctgagtcatgtgctccaccctggggttgccttctttgtcagagaccttggsataaatagaggaaagaattaattcctctcaatcaaatcaaagtcctattgtcacagtaagggagagtggtgctaagaggaaa

SEQ ID NO: 418229 - DNA, 569 bp, Homo sapiens
ttgaaagttacaaaaactttatgctcattggcttaggcaagagagaaattatttgctcacataactgaaacacccctggatatggcacaatccaggatatacacaacatcccctgagttcatctcacaacttagccgcctctgggttggctccaagtccaggatctacacagggtcttccagtagtttcaatcttcacatatcatgattagcatgtctaggagagcccacttcccttagagagcagaccaaagtcctgggttgggactcactgataccacctgacatgacttgggttgagtgttcatccctaaactatagagggtgggctggaggtaaagtgcccccctcagttgatttagtctgagtcatgtgctccaccctggggttgccttctttgtcagagaccttgggataaatagaggaaagaattaattcctctcaatcaaatcaaagtcctattgtcacagtaagggagagtggtgytaagaggaaaatgcaacaaatatctactacacccagatttgtacacacatttaggtacaagtctgttacaatgaaaaaaattcc

SEQ ID NO: 418230 - DNA, 640 bp, Homo sapiens
ctctttccatcttctgactactttattctagccacgctggcagctgattagatgatgcccacccagattgagggtgggtctgcctttcccagcccaccgactcaaatgtatatatgactcaaatcatgtcatctcccttgggaacagcctcacagacacacccaggaactttgcatccttcaatccaatcaagttggcactcaatattaaacattacagatagtttgcctatttttgaatcaggttatttgtttgtttttgcttttscttttgttgttgttagtggtgttttcgtgttttgttttgtgttgtttttgctatttagttatatataagttccttatatattttggatatatgatttgcaaatattttctctcattatgtaggctgccttttcattttgttgattgttttctttgctgggcagaaactttttaatttgattgtgacattgtgaaatatatctttagcctttgttccagtctcctgacatatagctcctaaaatctttggaatctctagagtgataaaagtgtcttcagtgtactgagttgactgatggctgggggcttctgggtaccctgagagggtcatgggaactctgatttacggccactgttcagaaggtccagaagcc

SEQ ID NO: 418231 - DNA, 488 bp, Homo sapiens
tgtttgtttttgcttttgcttttgttgttgttagtggtgttttcgtgttttgttttgtgttgtttttgctatttagttatatataagttccttatatattttggatatatgatttgcaaatattttctctcattatgtaggctgccttttcattttgttgattgttttctttgctgggcagaaactttttaatttgattgtgacattgtgaaatatatctttagcctttgttccagtctcctgacatatagctcctaaaatcyttggaatctctagagtgataaaagtgtcttcagtgtactgagttgactgatggctgggggcttctgggtaccctgagagggtcatgggaactctgatttacggccactgttcagaaggtccagaagcccaaacttgcaattggcatctgaagtaggggatgagcccttaacctgcaggttctgacaatatctccaggtagatagtgtcagaattgagctgaattg

SEQ ID NO: 418232 - DNA, 439 bp, Homo sapiens
aaggggctttgcaaggcatctcaagtggctcatgggtaagcctcctgaaggagactgtgaagttgttagtagaatacatggycatttgttgaatttcaagccctgctgctgtgagtccccaccacttttccctgctcccagcctctcacagccatatagccatggtgatcccctcagcattctgtgtgtggtgcggaagagctgggcctcttgtgtatcattccacacagctgggaaatccagctgctcattcactactcttgctttcttccatggaaggactcatgggccacaggagcctcttttggcagtgagatgtgatgccttggggaagtggtgacatgggtaaagtgaaatctattcaatgtatctattcttggatttttgggtcttttggttgtttagtttgttttgtttttgctccaatggcatgctagaa

SEQ ID NO: 418233 - DNA, 439 bp, Homo sapiens
aaggggctttgcaaggcatctcaagtggctcatgggtaagcctcctgaaggagactgtgaagttgttagtagaatacatggccatttgttgaatttcaagccctgytgctgtgagtccccaccacttttccctgctcccagcctctcacagccatatagccatggtgatcccctcagcattctgtgtgtggtgcggaagagctgggcctcttgtgtatcattccacacagctgggaaatccagctgctcattcactactcttgctttcttccatggaaggactcatgggccacaggagcctcttttggcagtgagatgtgatgccttggggaagtggtgacatgggtaaagtgaaatctattcaatgtatctattcttggatttttgggtcttttggttgtttagtttgttttgtttttgctccaatggcatgctagaa

SEQ ID NO: 418234 - DNA, 587 bp, Homo sapiens
cccattggaggttccccagtctagaaattcttgccttacactggcagcttagagtccctgcccagaaggatgtcagttatagaactgatccagtcacaaggctgtggaaggcttaatgcacgtcttgccacaggctgagtctgtgtcttgactccttgycccccaggttcacaggttgctggggccatcactgtggcaggccatggatcattggggtttttctttagggtttttcatgagctaggatgtcctttcccaggccctagcatcaagcattaggctttttctggcctctcatcttgcatggagccccttagttccattatccaacagatggcttacttctggactttctgccagacacagagaggagcagacacatgccttcagctttgctcatttccctgcctttctgtcttatttgaggtatgcagacatgtttatattgtgtttgagcctgttggtatcctttttgcttttaattgtttatctatcattgctgatcatatgcagcattggggatatcaaatcaaacgtgtgaacatactgatggtcttaatggatgacccagaagtggctttttaatg

SEQ ID NO: 418235 - DNA, 587 bp, Homo sapiens
cccattggaggttccccagtctagaaattcttgccttacactggcagcttagagtccctgcccagaaggatgtcagttatagaactgatccagtcacaaggctgtggaaggcttaatgcacgtcttgccacaggctgagtctgtgtcttgactccttgtcccccaggttcacaggttgctggggccatcmctgtggcaggccatggatcattggggtttttctttagggtttttcatgagctaggatgtcctttcccaggccctagcatcaagcattaggctttttctggcctctcatcttgcatggagccccttagttccattatccaacagatggcttacttctggactttctgccagacacagagaggagcagacacatgccttcagctttgctcatttccctgcctttctgtcttatttgaggtatgcagacatgtttatattgtgtttgagcctgttggtatcctttttgcttttaattgtttatctatcattgctgatcatatgcagcattggggatatcaaatcaaacgtgtgaacatactgatggtcttaatggatgacccagaagtggctttttaatg

SEQ ID NO: 418236 - DNA, 587 bp, Homo sapiens
cccattggaggttccccagtctagaaattcttgccttacactggcagcttagagtccctgcccagaaggatgtcagttatagaactgatccagtcacaaggctgtggaaggcttaatgcacgtcttgccacaggctgagtctgtgtcttgactccttgtcccccaggttcacaggttgctggggccatcactgtggcaggccatggatcattggggtttttctttagggtttttcatgagctaggatgtcctttcccaggccctagcatcaagcattaggctttttctggcctctcatcttgcatggagccccttagttccattatccaacagatggcttacttctggactttctgccagacacagagaggagcagacacatgccttcagctttgctcatttccctgcctttctgtcttatttgaggtatgcagacatgtttatattgtgtttgagcctgttggtatcctttttgcttttaattgtttatctatcattgctgatcatatgcascattggggatatcaaatcaaacgtgtgaacatactgatggtcttaatggatgacccagaagtggctttttaatg

SEQ ID NO: 418237 - DNA, 551 bp, Homo sapiens
gtcagtggagtgaaacatgaaaagagtcaaagaacttgtttttaacaagagaggagtgaagaaggggccaggaagcacaaagaagtttttcaataaaaatctagtggatgaaaataaataagtctcagcctgagagacagacaataaaccaggagagagtcacgctaggaagacaaaaatagaaaagagtttcacaaaagagagygaagtcagccaaacacaacagcattaaattaggccaagggccatgggaaaaaataggaacatgtctttttatcctgctttaactactgacttccctttagttctcctggggtgtcctccagaacccccagtttattataaacgaattttcctatagccttaacctcttcatggtcactctattcattttctgactcatctaaaatctgggtctctgctttcacctccagtgtcttgcaaggatactgtttctggaggttttctcgaggggaggcagctcgttctcctacaccccagctctccttggatccagaggtgatccaagcacttctccttgtgctgtctac

SEQ ID NO: 418238 - DNA, 551 bp, Homo sapiens
gtcagtggagtgaaacatgaaaagagtcaaagaacttgtttttaacaagagaggagtgaagaaggggccaggaagcacaaagaagtttttcaataaaaatctagtggatgaaaataaataagtctcagcctgagagacagacaataaaccaggagagagtcacgctaggaagacaaaaatagaaaagagtttcacaaaagagagtgaagtcagccaaacacaacagcattaaattaggccaarggccatgggaaaaaataggaacatgtctttttatcctgctttaactactgacttccctttagttctcctggggtgtcctccagaacccccagtttattataaacgaattttcctatagccttaacctcttcatggtcactctattcattttctgactcatctaaaatctgggtctctgctttcacctccagtgtcttgcaaggatactgtttctggaggttttctcgaggggaggcagctcgttctcctacaccccagctctccttggatccagaggtgatccaagcacttctccttgtgctgtctac

SEQ ID NO: 418239 - DNA, 564 bp, Homo sapiens
gtacagtgatagagataagagtagaacatacatgggcctaaggaagaggagcgtttcctaatttagacagggagggggttggagaggctttctggaagggtgatgcctgacttaggttttaagagctgaatcagaatttgggatgggagaaagacagtgtctttaagcatgagtgagtagcaagaaaacttggcaaaggtgcaaaaggtgtgtgcagtgtgctgaggacatggaaaactgtgtgcaggtatagggacgtcactacaaggtttgaaattgggatgttctgcaaagagctctaaacttttaaaacattacacttgagactgtaaagttaggggtgaccacayttggaggcaaggagacaagtcaaataagcttttgcattgactgaggcaagagctgatgagaaaagtgacagtagaaatggaagagataggcttctttttaaattagcagaataaaaataagcagccaaaataaaacattaaggacaggagcaacagggaggagaggcactagctattttggtctttggcctcataagactggtcctactagcag

SEQ ID NO: 418240 - DNA, 502 bp, Homo sapiens
ctggtgcctaggtcaaaatggcaaaccccacagaacccctcaaaaatgggaggagatgtgaatagaatgggttcctaaataaaacaagaagtaacaataataaattattatttaagcacatgaatttgcttcccttctttccaaattcccattggaatggtcaagagaaagggaaaaacagtaagaaacaaaaatctccaaagaaaatagggaagatctttgaggaaatttcataattttaatcaaaaatagaaccagatggatgaatcaggcactagtttttgttccaatacaaattatggaaaagactccctggaaagtgaagttaggcaaaaccttcagcagaatttttcatctccggatcctctaagctcatagaaatagagtctagaactgagggtgagccatgaagcagaaggaagccctaccctgctgaatcayttgagggcagcctcagagcttacccagagaaggtcttcctggaactgcatgcaaagtgccc

SEQ ID NO: 418241 - DNA, 511 bp, Homo sapiens
acgcctcagatctgaaggagtcaatctggacagtggaccatagcagccactataaaaagtattaaatggtgatgagtagataaatccagtaaaacttagaatagatgtctaaacaaagataatgtaattacaaaatttaacgtgaatttaacatctaattcttaaaagagaaaatatataatatatacaattaaataaaagtaaatctaaaaggccagattagtcaataaaaacatgaggtatacaagaatttagggctggagtgagctataatcataccactgaactaggtgacagagtgagactctgcctcaaaaaacaaaaacaaacaaacaaaaaaacytgaggaacagtggaggacagggaagtagtatagataaatagaatacatttcttcccttatacagagagtaaatatatttagagaaacgtgcattattaaattaaatgtcagtagaataaaacatgtgtgaacttccaaaatacattcccaaaaagaccaagaaagtct

SEQ ID NO: 418242 - DNA, 593 bp, Homo sapiens
taaaaagtattaaatggtgatgagtagataaatccagtaaaacttagaatagatgtctaaacaaagataatgtaattacaaaatttaacgtgaatttaacatctaattcttaaaagagaaaatatataatatatacaattaaataaaagtaaatctaaaaggccagattagtcaataaaaacatgaggtatacaagaatttagggctggagtgagctataatcataccactgaactaggtgacagagtgagactctgcctcaaaaaacaaaaacaaacaaacaaaaaaacctgaggaacagtggaggacagggaagtagtatagataaatagaatacatttcttcccttatacagagagtaaatatatttagagaaaygtgcattattaaattaaatgtcagtagaataaaacatgtgtgaacttccaaaatacattcccaaaaagaccaagaaagtctgaagcactactgcaaaatttagccaaggaaaaacaaggaagtataaaaataacagaagtataacagaatatatcaaatatacattaaatctgtcaaggctaacctagcctattaaggcatctcaaatatgttaa

SEQ ID NO: 418243 - DNA, 599 bp, Homo sapiens
tctatgcaatttatatcttcaatattgaaaatgatgtaaagatgaaatacatagcctagcaaattgtaaaatacaacattaacaatttaaaataatgaaaaagactaacaaaaagaaaagaaaaacattagacatgaaaagtatattaagtggatagataatggcaattgcacagaggttgtccataaggctggctaaccttcactatcattgactatattttgaagtcttgcatcacgatgaatagctgcttttttctattaggacatggctttcctcagagaatattttcatattcattttctatgtagtgctgctctttttgatattcttctgtgattcgatatgcaacaacatgaacatttyctgttaaactttcccatcttctgtttaggaattttgatctctagggatttcagtatttgggatgatggtgtttggaattgtgtctttcaggtttatgatccaaacccctctgagagcagggacacaagatgttgtgtcctctgtggtatcctcagggcctgttatactgacagcacaagtagagactcaagcagtgtggttggcagaatgaatggccactctcacatttgtgt

SEQ ID NO: 418244 - DNA, 527 bp, Homo sapiens
tcccttaaattttagatccatcagatcattgaaagttgatgccaactttgttttagataaacttcaagcctaggcactttaatctaaaattttctgtgaggtttatttcccttaatttgaaatgcaagtaaaaattacctaagatctggaagcatgtattgatcttgtcatcaactgtttataccacagacagaaatcaaacctggcccaagttgtacaacttcattattgacccaaacctatttaactctctcccaaagatcttaatgcaagcatcagactgcaagtcatgtaattctttctcacaaaattaccaatgacataaagaaacctgygtcctagatctctcccgatagtttttagatgatttgaatttgcatttgtctgctagagaagaaaaagatgggcagcatctactgtctgaaagtagtgtaacattccaaggaggagtcccacaaagtagtttctggtctgctaagaccagttaaccactagttatgcttgcggcagacactgctggttggtgg

SEQ ID NO: 418245 - DNA, 596 bp, Homo sapiens
cctctactattattgtattgctgtctattctttctttagatctagtaatattcgttttatgaatctaagtgctctggtgtttgatgcttatatgtagagattgttatgtatttttgttgaattgacccckttattattacctaatggctttctttgtctttgttttttactgtcattgattaaaagtctgtttcgttttatataaatatagctactctagtttccttgcatattctttgcttttttttctttatctgtttgtctttacggtttggtgacattctgtcatattgccatttgatatttttctcttcttcctttccatggttgctttataagatctctgagttttatacttttgagtgtttttatgatggtgagtatcaactatttgtttctatgtttagaactgctttgagtatttcttgtaagtcaagtctgaaggtgcccagtttcctcagtgtttgctcatctgggaaaggctatatttccttcctttataaagcttattctagaaggatataaaatttgtaattgacagttttttgtttaatttaaacattttgaaaatagaattccaatatcttctggcttgt

SEQ ID NO: 418246 - DNA, 671 bp, Homo sapiens
actttgcatggtttcagttcttttaaatttatcaaaacttgttttatggtctaacccatgggtgctccatgtgtacttgagaagaatgtctattctgctcttactgggtggaatgttctattgtttgttaggtctagttgatgtatagcatttttcaaatcttctatttatttgttgatcttctgcctacttgttcaatccattattgaaagcctgtcattgaagtctccaactactattcttgaaatgtttgtttgtcttttcagttctgtcagtttttgcttcacgtatttggagctctgttgttagttgatatttgattctttttagatagtgcattattttttctgcttttttttacattttaatcattttaataatattcatgtcrtttctatcttacagttttatatccgatgttcttgaccatcaaatcctttcattgtgcctgctgatctcacgaagcaaaaaaagctttttcacatattttgtgagtttttattgtgagctcatgtttaaataattttatctgtaggaaacgtatacagcctagattaaaggtatgtctttacaaattgatttttattttgcatctgtcagatgctccaagaatatcaccatcctggaattgttttttatgtatatttgtaatgtaggaaggtcctgcagaa

SEQ ID NO: 418247 - DNA, 575 bp, Homo sapiens
gatggagctggaagccgttatcctcagcaaactaacaatggaacagaaaaccaaacaccgcatgttctcacttataagtyggagctgaacaatgagaacacatgaacacagggaggggaacaaggcacactgaggcctgttatggggtgcaggggagggagagcatcaggataaatagctaatgcatgtagggctgaatacctaagtgatgggttgctaggtgcagcaaaccaccacggcacatatttacctatgtaacaaatctgcacatatatcccagaacttaaaattaaattaaattacattaaacttaaaaagatcaatggttactacaattccttaaggggatcctgagtttctcaataagatcactggttcatacatctcccttgggaagaccagttatgaataataaagctcattagcaagtacgatgttaattgttataactagaagataccttttctggagtaaaatatgttccttctgttccttatttctaacaatttatttatttatttttggccattacagtttgttgaattttctgaaatgaccatatggcttttctctcc

SEQ ID NO: 418248 - DNA, 575 bp, Homo sapiens
gatggagctggaagccgttatcctcagcaaactaacaatggaacagaaaaccaaacaccgcatgttctcacttataagttggagctgaacaatgagaacacatgaacacagggaggggaacaagrcacactgaggcctgttatggggtgcaggggagggagagcatcaggataaatagctaatgcatgtagggctgaatacctaagtgatgggttgctaggtgcagcaaaccaccacggcacatatttacctatgtaacaaatctgcacatatatcccagaacttaaaattaaattaaattacattaaacttaaaaagatcaatggttactacaattccttaaggggatcctgagtttctcaataagatcactggttcatacatctcccttgggaagaccagttatgaataataaagctcattagcaagtacgatgttaattgttataactagaagataccttttctggagtaaaatatgttccttctgttccttatttctaacaatttatttatttatttttggccattacagtttgttgaattttctgaaatgaccatatggcttttctctcc

SEQ ID NO: 418249 - DNA, 575 bp, Homo sapiens
gatggagctggaagccgttatcctcagcaaactaacaatggaacagaaaaccaaacaccgcatgttctcacttataagttggagctgaacaatgagaacacatgaacacagggaggggaacaaggcacactgaggcctgttatggggtgcaggggagggagagcatcaggataaatagctaatgcatgtagggctgaatacctaagtgatgggttgctaggtgcagcaaaccaccacggcacatatttacctatgtaacaaatctgcacatatatcccagaacttaaaattaaattaaattacattaaacttaaaaagatcaatggttactacaattccttaaggggatcctgagtttctcaataagatcactggttcatacatctcccttgggaagaccagttatgaataataaagctcattagcaagtacgatgttaattgttataactagaagataccttttctggagtaaaatatgttccttctrttccttatttctaacaatttatttatttatttttggccattacagtttgttgaattttctgaaatgaccatatggcttttctctcc

SEQ ID NO: 418250 - DNA, 594 bp, Homo sapiens
ctggcttatctacctaatcacttctccataatcatcacttcctccaagcacaataattctcttaacaacttgagctcactactttttagaaattctgataaacaattgtgagactttgaagtacatatactggaagtatattaaaaactgtatcctcattttatcaggtatagtctcccataatgtacagatacatttttaaaaagaattagaaattatatttttattttttttgtatgctgtgcttaagttcctacctaccagaaattatggaatccaaaatgaaagtgcagtctcagaaaccacaaggtcacttggagatcagctttgtgggcagaattcaagtttgaaggagaagtaataaatattatggactgattggcctagtaatctccatttgtctccttccgtccagcacagaattgaaaaggataaatagttgatcgtggattcctgattccatctaggactgcaagacactaagaacatctmctttccttgggacgaagatgcaatgtttttgtaaacttttatttaaaattacagacaaaattgatcttagtggggaagccaagcttctctcagcccctgaat

SEQ ID NO: 418251 - DNA, 596 bp, Homo sapiens
agtctgacttgaagaagctagagaggttcttttaaaagggatggctaggaggcygagtggggcagatcacctgaggtcaggagttcgtgaccagcttggctaacatggtgaaaccccgtttctactaaaaatacaaaatattagccaggcgtggtggcacatgcttgtaatcccagctactcaggaggctgaggcaggagaattgcttgaacctgtgaggcggaggttgcagtgagctgagatcacgccatggcactccagcttgagcaacaagagcaaaactctgtctaaaaaaaacaaaaaagaaatggctttggctttctgtggtatcctgtcccagctcaccacatgtgctttggtgcaggggctgcacaggggaagtggcgtagatgcatccaattctgccacatcccagttcaagctcagcagtaggtggcaggaaggagtgagcctggctctggcagggaggtcccccacttccagtttcttgggtctggatcatagagtgccatgtcctgggaagctgccacagggcaccacctggttcagcctcctcctacctctagctcaggggctcccctcagtagcttcccttc

SEQ ID NO: 418252 - DNA, 483 bp, Homo sapiens
ctggcctgagaatgtacctggcagggctggccgcggaagacccagtcatgcggggctggagtctgctttcctgtgaacgtcactgtctgcgtgcagaattacactgctgaggagcaagcagaatggatgatggaggctgacaggccrcgagaccccagagcaatttcacctggttttgattcatggcttgtcagagcgctaaccaaatattccattttcattttcgccctccactctctcccattgactggcatcataattgaaaactccagcatgaagagctgggaccacctgtctgcagggccctcaattccgtctgctccgaatgtcttgctcctcaaagaggagggcagaggggaaaatcagcaaacagatggtgtgaggattagattcatgtggaccagcctcggctgactctcagctgtctcatcttgagcaaccttggcctctcccaccctccgctctgccttttgagcttatttc

SEQ ID NO: 418253 - DNA, 592 bp, Homo sapiens
ggctttggaggtcagaagtctgaaccaggtggcactggatgaaaatcatggtgtcggcagggagttttccttcagccttttccagcttctcaaggcacccgcattccttgacttgtggccccgcattgctctggcctccacttatgttgtcatatcagctctcactctggccctccttcctccctcttatcatgacccttgagattacattcagcctacccagataatccaggataatctccccatctcaagatccctaatttaatcacagctgcaaagtccctgttgccatgtaagataacatatgcrcagattctggagattaagatgtggatgtctttgggggaatattatgttgcctaccacaaagttaataatgcacatgctcacttttgctcctgtgctggcaagggatgtaaaagcagggaatgtgaggactgggcacacaaactcaggcatttggaaggtggaggaaaggccaccttgcccaacagtgaagatgaccaggctgctcctggactgagtgaggtgagtggagacaacagcagaggaccctagtgtgtttgggggtgggtgtcactgtgtgtgcacg

SEQ ID NO: 418254 - DNA, 597 bp, Homo sapiens
gaattctcccttatatggatgttcttgccttagcatggtcttcaggaagatcgcttttcagatttggtgcctcaaagacgagcagttaagcttctactgaaatcacaggcttggtgctctcatggaaaactggtgatgctggagagaaatgcagacgtggcaaattttaatgctgccgaaacataatcagcttttgcttctgcagcaattagcataatattaccaataatgttttacatggcaattttgctgtaaacatttgtgctaatttgccatgacctaattattttatgacatataattaggaagtatttttcaagtcgaaatatttttgttttatgtttctataatccttttccagaaataaaatttaaaaatcagcactcccacaagtggaaacacacaattctctcttagccgttgtttgtgacactttatttcactaaataggaggaattccctagtgctggcacactgatgatcatgcatttccttgtgactaatttgaattgggmgtcattgaatccgcccgctccattattacaccaggagattgtcgaatctatgctgccagcctcctcccaacacccactcatt

SEQ ID NO: 418255 - DNA, 548 bp, Homo sapiens
acactcttgttcaagtggttgcttgaagcccagatcacattttctataaggctttgttaatggtagttcccagagacaactcaagtaagttgaggcagaaatgagaaagtaccaccttgatcttgcctttgaacctgggagtcatcagaggatgattaagaaagcaagtgagtctaccatattggcagagtattcatcaagaaaccacagacttacacaaccaagagggarggaaacaagctagggcacccttgataacactgtgccagatggggacatctgggtgcattctccagctgtccttggggcacccgaccacagcctggcctgagtgctgcaaaggacaagaccaaactgcaaaggacaaggcctgccttggtcaccagggaggataaggctgccaggactgcctggagaccttgggttctcctgaggtagcatcagacacagcttcattcagcctattcctcaactttacatgagttgtcctatctgtgcctctctgctccagagtctagctgctctttcttgcctaaaatattctgaga

SEQ ID NO: 418256 - DNA, 584 bp, Homo sapiens
tttcttgtctctgcaacaaagtaagaaattataaaagagataagtgcaaaaaagttcaggggtgaccacagtaattctcttttaataggtattaaatcacaatattcaagtggagtaaaacacaggttcgtgagtaaagcaaagagaaaacaggatttgtattaaaataataaagagtgcaatgaatgtttagaaatagaatggtaaccagagctctcattttatgttctctatcacttttccccaggaactttcatagtttagttgggcgtgagggtgagtgagtatgtggaaraaaaacaaaaaaaaactgtagctttccttctgaagctcaaattctttcctttcctacaccatcaggagtggctaatcagaatggtcagattccaggaccttgattgaaatatattcatcagcaggttgaatgactctgtatccatgcagccagaccagtaaactggcctttttatcttctcccacagctatcttggtcttggctcacactctaggtttcttttccaatcatccatgctccacaattggttcacatccactttcacttataagaaattctagctgtacag

SEQ ID NO: 418257 - DNA, 586 bp, Homo sapiens
tcatgaaaaacagtggcagataaaccttggaaggcattgtttagtacttttaactctgagaagcataatctttagtggcagagatatgtatctgaatgatttatacacaggsttcctgacagagcagcattacctttttactaatgatactcaatgactgcaaggactttgtatcctgaagttctgtcactctgtagctacttctgctagtgcatcctaattaacttgagaggacatcatggggaaaatggggtcttgatgcagaagctcagaagctaggatgttgttctatccaaagagtatttttctctttttagttctgggacaatagtatccaagaagaaatctctggagggaataggaatggccacgcaatttggagatgtcattacccaaggaaagttttccttcttgtcagggagctgtcataaaagaggagctgtggggaatgcccagcagacctgagttctgccactaatcagctcctaggtgcactctgagcatgttctcctcccaccattaaaatggataaataatatcttctttgtctactgcaatattgactgtaaatgtctatttacctatc

SEQ ID NO: 418258 - DNA, 586 bp, Homo sapiens
tcatgaaaaacagtggcagataaaccttggaaggcattgtttagtacttttaactctgagaagcataatctttagtggcagagatatgtatctgaatgatttatacacagggttcctgacagagcagcattacctttttactaatgatactcaatgactgcaaggactttgtatcctgaagttctgtcactctgtagctacttctgctagtgcatcctaattaacttgagaggacatcatggggaaaatggggtcttgatgcagaagctcagaagctaggatgttgttctatccaaagagtatttttctctttttagttctgggacaatagtatccaagaagaaatctctggagggaataggaatggccacgcaatttggagatgtcattacccaaggaaagttttccttcttgtcagggagcygtcataaaagaggagctgtggggaatgcccagcagacctgagttctgccactaatcagctcctaggtgcactctgagcatgttctcctcccaccattaaaatggataaataatatcttctttgtctactgcaatattgactgtaaatgtctatttacctatc

SEQ ID NO: 418259 - DNA, 530 bp, Homo sapiens
aagaataagggattaaggaaccaagtagaaacagtatatacttttggaagcagaagtgattataataaagtacaatttttttttttttttgagacagggacacgctttgtcactcaggctggagtgcagtggcacaatcacagctcactgcagccttgacstcctgggcttgagagatcttctcacctcagcttcccatgtagctgggaccacaggtgtgcgctaccattcctggctattttttttttttttaattttttttgtagagatgggggtcccactatgcagctcaggctgatctcaaactcctgggctcaagcgagcctcccaccttggcctgcccaagtactgggattacaggtgtgagccactgcacctggccagtacagttgtttttaaaagactgtctttgatgtttccatttctgagcattattatagtgtttgagactcaaaactttgcatgcttttgtcacctattataggctttactaacaggaatcttatacctttgtaaaaggaagggggaat

SEQ ID NO: 418260 - DNA, 530 bp, Homo sapiens
aagaataagggattaaggaaccaagtagaaacagtatatacttttggaagcagaagtgattataataaagtacaatttttttttttttttgagacagggacacgctttgtcactcaggctggagtgcagtggcacaatcacagctcactgcagccttgacctcctgggcttgagagatcttctcacctcagcttcccatgtagctgggaccacaggtgtgcgctaccattcctggctattttttttttttttawttttttttgtagagatgggggtcccactatgcagctcaggctgatctcaaactcctgggctcaagcgagcctcccaccttggcctgcccaagtactgggattacaggtgtgagccactgcacctggccagtacagttgtttttaaaagactgtctttgatgtttccatttctgagcattattatagtgtttgagactcaaaactttgcatgcttttgtcacctattataggctttactaacaggaatcttatacctttgtaaaaggaagggggaat

SEQ ID NO: 418261 - DNA, 574 bp, Homo sapiens
agttgttcaaaaatgcctgagtacaggactgttgaatgttctttgggcctaaagtatggttatcagtgaaataacatgagaagttatgagatgcatttgcattgtgttactatgggtttcaattttctagcctgctgctcagatttttagaattaggaataaaagttagacctcacttaagatgagtaatactaaaagtgcraaaccttatactttggtacatttcagctatcaggaattcagaatttctcatcaataaatagaatttaatgacacacaaatgcaagtccttttcccaaaaacctagagtattagaggtaatcctatttgaaatgtaaaaggacaaaaatttaggtcgattgattcaactaaagtgttaggcttatttcaaagctggttaataaaaacctgaaaattttgcccagagttttgcagtgctattcagagcacaaagtctctttaaaaagtcatgttgttctcatttcctgcaccattgaattatagatatattttgatgaacattaaagtatagatgatctttgttaaaaactgaaatagatggtcttaaaaaaaa

SEQ ID NO: 418262 - DNA, 567 bp, Homo sapiens
ctcatgccaaaaacaaaagtataaagattggaatctaggtcagtagtgattaatccgaggaacaggctggaatgaaacaacctaaggaccctacttggggaagcattaaatgtcataaataaaaatggccattagatgaatttacagcccaaattaggaaagtttttctatcagttacttgcatacagaacttaggaaatttatggaagacgtgacagtgacttccaaaatcgatagaaaaattagtacatgtttgaaaacagactttgggtcaaagtgtttcttttcaaaataggggtgggagttggggatgtgttaccctctaaaatcttccatagtaatttcctcctgagaaaagaaattcatttcattttagtgttcctatcatgtttttkagaatttccatcctcattttctgttctgagagcatggtttagtaaatagtcctcagacccaataaacatatcaacagagaattttttagcaagttaatcaaaatatgaggaaaacaatgggatatgcttgaaataacaagtcacttgattacttaattaggttaacaagact

SEQ ID NO: 418263 - DNA, 615 bp, Homo sapiens
cctttttctcaccattgcacttactgagtatctgtaggagttattaatgggaaatattaattttatcattacactcgtaaaactctagagactttcctctttgatttctactcaggaatagaaatttttggttttcagttagactatttctctttatcaaggtataggttataaaaaactgtataagacagatgtctagcttacaaagtatctctggatgactagacccagttagaaactttttcattataaaggaagtaagattccacttrcattttatatctgaagaattacatattctcaatgatatctgctctaacttttcatgccactgtccattaattgtagaaaattataattgtgtgaataaattgaagtcttagattgactttagttttatgattttaaagaaattgtttttccactttacatgagcaattttgttcatgattttagttttgctttcatctagcagtgttaagcattatttttaatgtcataatgagatgaaagatatcaaagaaagtgagaaaaaggagttcaaggaacagctttggaatctagaacaagtactgctaatcatagtaagctgttctgccggagacttggatttaa

SEQ ID NO: 418264 - DNA, 615 bp, Homo sapiens
cctttttctcaccattgcacttactgagtatctgtaggagttattaatgggaaatattaattttatcattacactcgtaaaactctagagactttcctctttgatttctactcaggaatagaaatttttggttttcagttagactatttctctttatcaaggtataggttataaaaaactgtataagacagatgtctagcttacaaagtatctctggatgactagacccagttagaaactttttcattataaaggaagtaagattccacttgcattttatatctgaagaattacatattctcaatgatatctgctctaacttttcatgccactgtccattaattgtagaaaattataattgtgtgaataaattgaagtcttagattgactttagttttatgattttaaagaaattgtttttccactttmcatgagcaattttgttcatgattttagttttgctttcatctagcagtgttaagcattatttttaatgtcataatgagatgaaagatatcaaagaaagtgagaaaaaggagttcaaggaacagctttggaatctagaacaagtactgctaatcatagtaagctgttctgccggagacttggatttaa

SEQ ID NO: 418265 - DNA, 587 bp, Homo sapiens
aaagtgagaaaaaggagttcaaggaacagctttggaatctagaacaagtactgctaatcatagtaagctgttctgccggagacttggatttaaagaggttaaatcaaacccactgacagccaactctgtgatgttaattaaatggagtaaggttttattgccagaaagttgacaactataagtcataagatgatgaagtaattgtgtaacttaaaggattatgtactattttagcgaccaaataatgtgcaagcaatttagaaagaaatgggaaggaacatggatagtgtaagagcctcatttggaagtgactaggcccatgtttaaaaggaagtgatgtggaagagataaggtgtaccaggaagagccacaacaaaagcacattgttcccactattcgattctatccccaggtggaaacatcactggtgaggtttccatttggcttgatcgtgttccgcaaatttacacaatcaaagccacctcactggtttccgttcacttgccggtttgttttttcagtgatgcayggtcgactactttcttcctccacttccccaccttctaatagatgaaggtggaatttga

SEQ ID NO: 418266 - DNA, 585 bp, Homo sapiens
gccccagctactcaggaggctgaggtgggaggattacttgggcccaaagaggtggaggttgcagtgggcagagatcgtgccactgtagtttagcctgggagacagagcgagaccctgtctcaataacaaaaacaaacaaaaagtgacagtaaagtacagtatagagtggtggaaagagcactggaccaccatgtgtattcattcactattttttggtataactgatatttattgggtacctcctctgtgccaggcactgttctaggcacttgggcacagtggtcagtaagacacgcaaagtcaacaaaataacagtaaaataaaaggcatgtttggtgaggtatgtgctgtggaaacatgtaaagtaggtggggaataaggatagcaatttgaaacaggaagttcagggaatgtctgtataagaaggatttgaaggaggtgaaatgtggtcaactgcttaaccatcgggatccaccttccttgtctttataaaacaggtctggataacacagtcctgaaggttcttctrgctgggaaatcatatatttccatgattttactttattagagctacctgtctagttt

SEQ ID NO: 418267 - DNA, 524 bp, Homo sapiens
tttctcagaaatcccactcagactttccttagatcttattaactggagagtcaaagggccacttttatctaaaagactaaatgagaactaatgggacaagatcatcatggctggcttttaagtacaagaatgacaggaaagtaatggtttaaaaaaattaatatggaaatgaaagaggagaaagggagtcagtaagaccaagtggagcattgctaatataattctgtcataagaacaagaaggtctaggtaatggatcctcttatgatggcttagtttgtaatacctttcatgaaagaaaaaacattatggacaggtggtcagatacttcctaaacaacagtcacaagttgcactscactgtggtgactggtatgtctgtagctgcaggttaagcactatctcaagcatagaggtgacccttggggcaagatagtgcctctgagcttctaagggttacatgttataggtctgatttccaccttattctatacactctctgaaacttccaaagattctgctacat

SEQ ID NO: 418268 - DNA, 584 bp, Homo sapiens
aaatttagtgtctgatgaagtccgcttactggctcatggtcttttcaccatrtcctcacatgtcagacggggcaaaggaattctctctggcctcttttacaaggactctcatcccattcaggaagactcagccctcatcacctaatcacctcccattggcctcacctcctaataccatcaccttgggagttaggatttcaatgtatgaattctgcggaggagacacacacattcacagcacagtgtacctattcagaaattcagatattccacctcagctactatgtcatcaagtaatcagggcttttttgcatttttacaaggttcactcatatctaaatctaaatctaaagagggtttttttgcatctttacaagattcagccactcaatgtctttaaaaaataatgaggcaaagtcaggaaaacgctttttagaaagggttattctactggcattaaactagcaagaaaaaaaatattggcatctttcatttatagaacaggtttaatttctcaacacttttatgttttgacttgtttattcctaccagctctttgttataaaagatagttacattattat

SEQ ID NO: 418269 - DNA, 586 bp, Homo sapiens
caggttatatggttggcgccatttttcacaatttagtttttatagtgttctagagatgaattcatcttgttagctcatcaaaataataaagagtgatttgcatcttttagaaaggcccaagtgctttacatgatgaagaactgaaatgcaatgtgaacattcttctgtagttttttattttcatgtgtctgtgagtaatctagggattcactccytataagatgaaagaatttgaaagctgtttcaacaacaaacaaatctaattaaattctgatcttccactgtgtgttttgtctaatactgtaaattctgcaagggacaacaacaaaatggacataaagggtagttagaaaagcaaaaggagattttcttttgttttgtttttaggaaaaaaacccactttttatttaagtaactatatcttgaatagccatctatactatataaacttattttgccattgtaccatattgaacagcatgaaaatattcatagttagggaggaagtggaaatacaagaatgttttggtcaaggatgaaccacatgttctatggtggtcctgtaagattataatgatgtgtttta

SEQ ID NO: 418270 - DNA, 586 bp, Homo sapiens
caggttatatggttggcgccatttttcacaatttagtttttatagtgttctagagatgaattcatcttgttagctcatcaaaataataaagagtgatttgcatcttttagaaaggcccaagtgctttacatgatgaagaactgaaatgcaatgtgaacattcttctgtagttttttattttcatgtgtctgtgagtaatctagggattcactccttataagatgaaagaatttgaaagctgtttcaacaacaaacaaatctaattaaattctgatcttccactgtgtgttttgtctaatactgtaaattctgcaagggacaacaacaaaatggacataaagggtagttagaaaagcaaaaggagattttcttttgttttgtttttaggaaaaaaacccactttttatttaartaactatatcttgaatagccatctatactatataaacttattttgccattgtaccatattgaacagcatgaaaatattcatagttagggaggaagtggaaatacaagaatgttttggtcaaggatgaaccacatgttctatggtggtcctgtaagattataatgatgtgtttta

SEQ ID NO: 418271 - DNA, 545 bp, Homo sapiens
ggaacaggggactcgtggtgatgaaggagtcaccatcactatatgtcacactgccagtgtgtggattagctactgtgacctaggcgagcaaaatttaccctgtccccctccctccacccacacacactctgttttctgraagatgccattttttaaatgttaatcatgggtttgtcttttctctagctccttttctactgtcctagaaatgtaatttgggaaatgcagccagatttaaatatttgagatcatttaggaaagagcaactcacccaacctcaggtaactactagattccaaggagaaaccatgaaccagcagaggtaggtcattccctcaggcgatatttatcaacatgtgatattttgcataaccccatcaaaatcacctagggtacttattaaaaactaagatttcaaggactaattcaaaccaagctgtgactgagtatctaggggtgggaactggaaattgccttttaaacaggtcctccccgtccatacacacatacccatgttatttttatgcatcttaaatttgacaact

SEQ ID NO: 418272 - DNA, 545 bp, Homo sapiens
ggaacaggggactcgtggtgatgaaggagtcaccatcactatatgtcacactgccagtgtgtggattagctactgtgacctaggcgagcaaaatttaccctgtccccctccctccacccacacacactctgttttctggaagatgccattttttaaatgttaatcatgggtttgtcttttctctagctccttttctactgtcctagaaatgtaatttgggaaatgcagccagatttaaatatttgagatcatttaggaaagagcaactcacccaacctcaggtaactactagattccaaggagaaaccatgaaccagcagaggtaggtcattccctcaggcgatatttatcaacatgtgatattttgcataaccccatcaaaatcacctagggtacttattaaaaactaagatttcaaggactaattcaaaccragctgtgactgagtatctaggggtgggaactggaaattgccttttaaacaggtcctccccgtccatacacacatacccatgttatttttatgcatcttaaatttgacaact

SEQ ID NO: 418273 - DNA, 578 bp, Homo sapiens
aattccagaaccaccatgttgtggtttgaaacatctattaatttggtgcaaatattaattaaaaatttatttctagccaagaatatgatggatcaagtgccatgtattaaaaaaggaaaatataattaatcttaaccaatttcacttggagcaaaaacaatgtaactggaaagttttctggtaactgccacacactcacagacttttttcaaaatttgaaaaaargtatgtctaaattttaaagtattgcagtatcagtttggtattatggtagaggatttataagccatgcaactgcacaaaatttttgatatcgttaataaggcaaagatatattacttcgctttgttctgcttgtgacctagagtgaattttattcatagcaaaattagaccttactagcttcttatacctgaatggcctagaggtagagaaatttccagaacagccttattagagagtggggtgcatgacaagaccataatctaaagccagttttcagttttattatttactttgctgccttgatcatttttctgcactcatttggcttgaaggcatagacattccctgttgat

SEQ ID NO: 418274 - DNA, 561 bp, Homo sapiens
agaacagccttattagagagtggggtgcatgacaagaccataatctaaagccagttttcagttttattatttactttgctgccttgatcatttttctgcactcatttggcttgaaggcatagacattccctgttgattatctcggcttggcagtgggtttctgctacacattttgattcctaatatggtagtaggagaggattttgtatgagttccagcgagtttctctgggcttgtggaatgcagcaaggaaagaatcctacagagatgaaaacatgaacatttgcattgattaaagagaaaaakgaaagaaagaaaaagtatcactctaaactgttttttttccttttcttactctgttcacttcacttctaataatgtcttacacttttgggggtgggaggaattaatgctgtgtgttcttttattgctcatatcttcatggccatttcaaaaattattttgaaatgctgagtgtgtttacagaggcagtgttaacaaaatagttttcatcatcatcaaggtttgaatccctgaagcaccctatccctctgttctaca

SEQ ID NO: 418275 - DNA, 561 bp, Homo sapiens
agaacagccttattagagagtggggtgcatgacaagaccataatctaaagccagttttcagttttattatttactttgctgccttgatcatttttctgcactcatttggcttgaaggcatagacattccctgttgattatctcggcttggcagtgggtttctgctacacattttgattcctaatatggtagtaggagaggattttgtatgagttccagcgagtttctctgggcttgtggaatgcagcaaggaaagaatcctacagagatgaaaacatgaacatttgcattgattaaagagaaaaaggaaagaaagaaaaagtatcactctaaactgttttttttccttttcttactctrttcacttcacttctaataatgtcttacacttttgggggtgggaggaattaatgctgtgtgttcttttattgctcatatcttcatggccatttcaaaaattattttgaaatgctgagtgtgtttacagaggcagtgttaacaaaatagttttcatcatcatcaaggtttgaatccctgaagcaccctatccctctgttctaca

SEQ ID NO: 418276 - DNA, 585 bp, Homo sapiens
tggagtggaggcagcaagtgggagcgtcctgagagaagaaactggagaggtagagcaggagccagatcattcaggctctatttgtctagctcagacatgtctgcatttaacttatggtataattactggattaaaaacaatataggagttatacaatgttttaatccttctttacacaatgtgtataatctaaggtgataatgcttatgaatgttgaataacaaagaatgttcaaagtcacaggacttctgtgataactaatattaactgtgtgactgtggagtgataacttttagtcttaagtacctcatctgtaaaatggaggtcatagtacctacctctcagggtagccactaagtcttcatagataaattggaaagactggatggtacagtgcctggtcaaagccttttaataattagaagaaatatgcagcacagcccttatacctgggaaagaatgaaccctatcctggaacccagagtttagagggccctattctggtyctcgcctagctacactctcaaagggtggagagtcttcaagtccaacagaatacactcacctggaggccacactgaactc

SEQ ID NO: 418277 - DNA, 581 bp, Homo sapiens
catagtacctacctctcagggtagccactaagtcttcatagataaattggaaagactggatggtacagtgcctggtcaaagccttttaataattagaagaaatatgcagcacagcccttatacctgggaaagaatgaaccctatcctggaacccagagtttagagggccctattctggttctcgcctagctacactctcaaagggtggagagtcttcaagtccaacagaatacactcacctggaggccacactgaactctgtattctagatgatgctctggatacctgagaccccaaagtttcctaccaaaatgatcccatgatgattcacgaggcctttaagtgtcttttccccaagcatgcaccatctgaagacagatgcataccccatgtctgaggggtggctagggagcagtggtgaatagcacttgtacatacaggcagagtgtcctcaaatgtatatgtgaaacttcttgcaatgcacrttgtagcttagtgtgagaagaggagggggacgggacagggccagaaataaactttacccacactaccaggttctattgtgggaccacagtctgaga

SEQ ID NO: 418278 - DNA, 600 bp, Homo sapiens
ttatgggcatagtgggaatatttctaacaggttaaactgaagtgaccatcatgggcatatatatatattttaaattcacatatatgaatactatacagtaaaaactaacttatgctacataccacatggatgaatctcaaaacccatgtaaagcaaaagaaaaccacaaaagaatcatgccatttgattacacttgggtggtttttaaaacaggcatatctaaacatagtgctttraagtgtaagcttgggtaggaaaaactataaagaaaagcaagaaaataattaccacagaagttatgtagaggttatctttggggaaggaagagggaataataagagagggacaaagaagagcttcttggttcttgaaatgtcctatttcttgacttggctggtgaatgcatgaatgttcactatgtgataagtcagggggctgttttcattttgttcacttttatatatgtgtggatttttccacagttgaaaaggtaaagttcaggtgtggtggctcacacctataatcccagccaacactttgcggggccaaggtgggaagaattacttgaggctaggagttggagagtaacccaggcaacag

SEQ ID NO: 418279 - DNA, 505 bp, Homo sapiens
aaaaatagatgtttctactctccttcagatatcattaaaacataaacttgtgcctgactgcataaatcccttttaaactaatatcacttattacgtttaactaagtctacctagggcttccttgtataaagaacaagagctttccattttttgtttacctagccctttctgatgccacgacagaatagctgtaaatcttcattatttatattctagagaaaataaaagcaaataaaaaggtcagtgtataaagtttattggttgttctctttactcaaaacccacatggtattaatgttagtctctatgaatatttcatggataaaatcagagcattaagtgcatactaaaaacaataagaatggaaagactttaaccttatgtttatatgaatttctaggttatcaagaagtttataggctataggctataaagtcttaggctatgatatagtaacctawtgtagacttcccttgatacatgaaaataatggtactaagtacaa

SEQ ID NO: 418280 - DNA, 595 bp, Homo sapiens
tgttgatatcctcttcctgtatttttagagaggccatttcttattttctctagacatagcttttcattccttcttgttaccaattgtgaattccttaaaatagagatgataaaatttatagccttttaaatacctaatttatgatttctaaaagatggtatagcttaatttcattaaaatattcaaataaatgatactagaatcaattaagttttaagcaaacattcatatatctttcttcacatgtrtaaatgggaaataaacatgcctttttattaaaaataatttgaagacaaaagataagtattaaacaatgttttataccatctctgtcaattggaagttgtcactctaacttagccagagcagatctatctcattttgcatgtgatatcatagcaaaagtctaatcagttgcatagggaaggaaaaactaagatagtatttaatcaataggattcagaggaaaattatgctaatgtgatttaatctattttctagtaatcctatcactaaactgtcattgaattgtactgcattagaaaggaactcaaatatgtgtgacggcaatggacatcttgtcacctttagttgg

SEQ ID NO: 418281 - DNA, 595 bp, Homo sapiens
tgttgatatcctcttcctgtatttttagagaggccatttcttattttctctagacatagcttttcattccttcttgttaccaattgtgaattccttaaaatagagatgataaaatttatagccttttaaatacctaatttatgatttctaaaagatggtatagcttaatttcattaaaatattcaaataaatgatactagaatcaattaagttttaagcaaacattcatatatctttcttcacatgtataaatgggaaataaacatgcctttttattaaaaataatttgaagacaaaagataagtattaaacaatgttttataccatctctgtcaattggaagttgtcactctaacttagccagagcagatctatctcattttgcatgtgatatcatagcaaaagtctaatcagttgcatagggaaggaaaaactaagatagtatttaatcaataggattcagaggaaaattatgctaatgtgatttaatctattttctagtaatcctatcactaaactgtcattgaattgtactgcattagaaaggaaytcaaatatgtgtgacggcaatggacatcttgtcacctttagttgg

SEQ ID NO: 418282 - DNA, 552 bp, Homo sapiens
attactggttcctcacaccaaactcttctatgcctttatgctctcactccccacattccttctgatttctcccaggctggatgtcaaaaagttgtatgctttctttaagaccctgcttaaatgctactgtgttttgaagtctttcctttatactcccaggtaggagtaactgtttctctttggtgcttctaaggcacattgtatagacatctattaagaggggcctttgtttacattactctctcttaccattaaactgaggaactttcacccatactgttttgttttatttttacccaaggtgctactatgatgacaggcacttaggaagtaatcatatatttgtttataaaatatttgtgattgttagcatagaatctagagtaagaacamtaataggagttaataaaggtcaaaaccacaatcatcctgcagtccccaaaaatgtaccctttaaacatagcccaacacaatgtataaaacccacatatttaactgccagctataaatgtatctgtgaagttgctggagagtctccaacatatctgcaag

SEQ ID NO: 418283 - DNA, 610 bp, Homo sapiens
ttattctgaaattctctaatatctgcaagtgggaattatgtggctaaaattaataaaatgtaagtgaaggtaaatcaaaatagaatctttggatttatccagttatctgaaagtacatttcattgccttaattcayactttataaatttttctacataaagtttttctgtaatatttgtctttatagctgaggacagattcagagaaacgctccaccacagacgagacctgggatagtcctgaggaactgaaaaaaccagaagaagattttgacagccatggggatgctggtggcaagtggaagactgtgtcctctggacttcctgaagaccccgagaaggcagggcagaaagcttccctgtctgtttcacagacaggttcctggagaagaggcatgtctgcccaaggaggggcgccatctaggcagaaagctggaacaagtgcactcaaaacacccggtaggcttgtcgtttgccagctgttatgcaaaagtgctttactttattgtttccattcaatctttgttttctctaacaatagcatttctaaaataccaaattcttatccatattaaacatggagtcaaatagttaaatagtttttctgtcta

SEQ ID NO: 418284 - DNA, 572 bp, Homo sapiens
catatatgaatgtttttatatttgtttgtattcacacatatagatgtatgttatacaaggaagaggaggaaggtgcagtgcaaaggagacaaatacacccagtcagtaggaaaaatgtgaatcattctaattacgccaagacctaaaataagttatagctattataatgtgctggaaaggaatgcttttcagctctttagtaaacataattataatgtggctatttaagtaaaagacctaaactgatttgaattatctgagcttgatcttcttgatctttataaacattcaaaaaaaaaarggcaatttcagtgatcatttacagagattgtaaatgtcagatatttcccacttttaatacaaagtctggtagtcagtaaaagcacatgtaaccattcgcttatccttctggttaacctaaattcttctatttctaaaatggtttcctgaattcaaccaataattttaatattacttttttacaaatgacatgccagctttattgatattgagccagtccagcacctatgaacatttttcagttgaatataaattccagataaaggttaaga

SEQ ID NO: 418285 - DNA, 474 bp, Homo sapiens
actgaataaaaatgtttttatttattctataagccaataagtggccatttatccattcaaatttattaattaaaaagttatgacgttagtattagctatttgttaggcaacatgttaaacaatccacaatgaatcaaaaatgacacttgctctcatgaaaaaatacaatttagaattcaaattcaaarcaggttaaatatagtttttaatatacagttaatcaaaaaacatctattgcagggatcaaaaatttaaatgcctaacaggacaaggctaataaagaataaatggacttgaagtatttaaatagtcacatgatcttccttggctgtctttcattttcccatttgacagcaatataaatagcaaagggtatttctttcccatgaggaaagcaacagcacaatgaaaactagccacccaaatttagcttcagtgtcaggaagaaaagcattggtggaggctgtggcttcc

SEQ ID NO: 418286 - DNA, 474 bp, Homo sapiens
actgaataaaaatgtttttatttattctataagccaataagtggccatttatccattcaaatttattaattaaaaagttatgacgttagtattagctatttgttaggcaacatgttaaacaatccacaatgaatcaaaaatgacacttgctctcatgaaaaaatacaatttagaattcaaattcaaaacaggttaaatatagtttttaatatacagttaatcaaaaaacatctattgcagggatcaaaaatttaaatgcctaacaggacaaggctaataaagaataaatggacttgaagtatttaaatagtcacaygatcttccttggctgtctttcattttcccatttgacagcaatataaatagcaaagggtatttctttcccatgaggaaagcaacagcacaatgaaaactagccacccaaatttagcttcagtgtcaggaagaaaagcattggtggaggctgtggcttcc

SEQ ID NO: 418287 - DNA, 474 bp, Homo sapiens
actgaataaaaatgtttttatttattctataagccaataagtggccatttatccattcaaatttattaattaaaaagttatgacgttagtattagctatttgttaggcaacatgttaaacaatccacaatgaatcaaaaatgacacttgctctcatgaaaaaatacaatttagaattcaaattcaaaacaggttaaatatagtttttaatatacagttaatcaaaaaacatctattgcagggatcaaaaatttaaatgcctaacaggacaaggctaataaagaataaatggacttgaagtatttaaatagtcacatgatcttccttggctgtctttcattttcccatttgacagcaatataaatagcaaagggtrtttctttcccatgaggaaagcaacagcacaatgaaaactagccacccaaatttagcttcagtgtcaggaagaaaagcattggtggaggctgtggcttcc

SEQ ID NO: 418288 - DNA, 536 bp, Homo sapiens
aaatggaaaatcgttgtgggaacacctcctaagagactcttacaatatagatgagggctcaaaccagaataatgacagtggaagttgagagtagagagaggacagaaaattaggaaatatgacttgctaactagttggacaatgggggtccaaaagtgggtagaattaaatataagctctggtattgagcttcagagtcaagaaacatgcatgtgtttgttttgttgggggaaaaagaaaagaaagtgaatttagttttggatatggtgaatttcagttgctaatgggtatatagttgaacaaatctagaagagagctttaaaaatccatttcattgttattttatattttcttactaagaatgctgaacatgtttacatgaacttagccattcatatcttctttgatttagtgtctaytaaaaatattttgctcatatttgtattgaattgtaagaagttttaaaatatatatattatggaaatgacttctatgtcattatatataatcattatatatatttatatattaattac

SEQ ID NO: 418289 - DNA, 609 bp, Homo sapiens
gctgcctgctgctgagggtgacctgaagcccaagacaactgataccaacccagtggcgatacataccagagatcgagtttgccatacgagcctgaagcctggggctttatggtccctcctggcaccagggcaagtttagaggctcagtcaccagtataggtcttgaatataaggccgtggtagtctgcctggtactgagttttactgtgcagttgcaatgctaggctccaaagcaaagtcctgtgctcgcttccctctctttcccccaagttgacagtatctctttctgcacctgtgctgcctggggctagggaaagagtgatgcaggtgttgtagaactgtccttcctatctcttcaatgcattttttcttagtattatgctactaccagttactgtgagctttcatgtggtttccttagctcttgtgaagttattttcatgcatggatagytgttcaaacttatgattttgtgggagatggtatctggagagtcctactcctccatcttactctgcctcagtccagttgcatataatttgaatcttaaactacaacttagtcttttttcttcaagtatgaatacttactatgtactaggcactttcc

SEQ ID NO: 418290 - DNA, 655 bp, Homo sapiens
tttgttagcattcatcctacttttttaacccactatatacagtaaggaattttcaccgccaaggccataacccagtatatcaaaggggatgtggacacaaacatccatttccaaaagtatatgaggttaatagtcagatgcttttctttctcggtttattcgcgcggtggctcacgcctgtaatcccagcactttgggaggccgaggcgagcggatcaccaggtcaagagatcgagatcatcctggctaacatggtgaaaccctgtctctactaaaaatacaaaaaatcagccgggsgttgtggcgggtgcctgtagtcccagctactcgggaggctgaggcaggagaatggcgtgaacccgggaggcggagcttgcagtgagcagagattgcgccactgcagtccgcagtccggcctgggcgacagagcgagactccgtctcaaaaacaaaaacaaaacaaaacaaaacaaaacaaaaaacagcaatgttacaatgggatgctgttaacagattcctggcttctttttgttctgcaccaaaagtgtgacctcactgtagtaccactggcaagatgataaatagatttagttaatattagctgtgcgacaaacatatcatttagcctcaatacatgactgctaatcatcaaaatg

SEQ ID NO: 418291 - DNA, 493 bp, Homo sapiens
taattctagttctcttgccattatcacatctgcatttamcttctccactgaagttctgaacctctcaaagtcatccataaggattggaatcaacttcttccaaactcctgttaatgttgatattttgacctcctatgaatcatgaatgttcttaatggcatctagaatgatgaatactttctagaagattttcagtttactttcctcagctgcattagaagaataactatatacagcagttacagtcttacaaaatgtatttctcaaataataaggcttgaaagttaaaattacttcttaatccatgggcttcagaaaggatgttgtgttaacaagcatgaaaacaacatcaatctcctcctgcgtcttcatcagagctcttgggtgactgtgtgtattgtcaatgggcagtaatattttgaaaataatcttttttttggctgagcagcaggtctcaacaatgggcttaaaatattcaataaaccatgctgta

SEQ ID NO: 418292 - DNA, 493 bp, Homo sapiens
taattctagttctcttgccattatcacatctgcatttaacttctccactgaagttctgaacctctcaaagtcatccataaggattggaatcaacttcttccaaactcctgttaatgttgatattttgacctcctatgaatcatgaatgttcttaatggcatctagaatgatgaatactttctagaagattttcagtttactttsctcagctgcattagaagaataactatatacagcagttacagtcttacaaaatgtatttctcaaataataaggcttgaaagttaaaattacttcttaatccatgggcttcagaaaggatgttgtgttaacaagcatgaaaacaacatcaatctcctcctgcgtcttcatcagagctcttgggtgactgtgtgtattgtcaatgggcagtaatattttgaaaataatcttttttttggctgagcagcaggtctcaacaatgggcttaaaatattcaataaaccatgctgta

SEQ ID NO: 418293 - DNA, 596 bp, Homo sapiens
taatccaaatcctttgttgtcatttcaataatgttcatagtatcttcaccaggagtaaatgccatctcaaggaaccactttctttgctcatccataagaagcaattctttatctgttaatgttttatcatgagattgcagcaattcagttacatcttcaggctccacttctaattctagttctcttgccattatcacatctgcatttaacttctccactgaagttctgaacctctcaaagtcatccataaggattggaatcaacttcttccaaactcctgttaatgttgatattttgacctcctatgaatcatgaatgttcttaatggcatctagaatgatgaatactttctagaagattttcagtttactttcctcagctgcattaraagaataactatatacagcagttacagtcttacaaaatgtatttctcaaataataaggcttgaaagttaaaattacttcttaatccatgggcttcagaaaggatgttgtgttaacaagcatgaaaacaacatcaatctcctcctgcgtcttcatcagagctcttgggtgactgtgtgtattgtcaatgggcagtaatattttgaaaat

SEQ ID NO: 418294 - DNA, 619 bp, Homo sapiens
aaactttgggtaagttaatttctctaaaatggaaataatgataatattcatcttatagaattgcatgaagattaattaagatgattcaagtaaagtgcttaataatcactatattaatgataatgatcatattacaggttccagacccaaccctattttttttttatttggtctggggactttaaggagttctagctttcttaatttgccttattctgatttggagattcacttctgatgttggggttcaaaactttgatactttacattctactctaatttctaaaacaggcttcattctcctaaactgctgttaacatgaaaaattttaaattccatttctccaggaatggtgacctaaccttctcttgttggttcattgataggagtaaagtcatcmccaaggctgggctgctgctattggctgccacattacctgcttggttatctgcaaatgacaagacccttgtttctacatccttcctgcaggtacttagcactaacttctggctcaaaatgctttgatgccatctccctaaagaaaaaccaataacttttggtctttctttaactacctgattgggctgctagtctagtccttccatagagttgtgtatgt

SEQ ID NO: 418295 - DNA, 614 bp, Homo sapiens
gatcttggctcactgaaacctcagcctcccaggttcaagtgattctcctgcctcagcctcccaagtagctgggattccaggcatgcaccaccatacctggctaattttgtatttttagtagagatgaggtttcaccatgttggccaggctggttttgaactctraacatcaggtgatccaccctcctcggccttccaaagtgctgggattacaggtgtgaccctccacacccggcccgctctgtactttctgaaccaaatttaaacagtttaaggaccaatagtgtgaaaataatcaaacaagaaatggctccaattattttaacattaaaattatttaaaatgtttcatcactttaacattgttgactgtggggatgctaccccccaacccccaggtcttagaagcaatattaatgtacagtttcttgggtggtttagatatgtttatgcctactgatagaggggtaaatcagggactttcatggttccacatgggtaaactctttagtgattccacatacaaatgatgataagatgatgaaattgtctctactcctgcctttgcttcacagaaaaataattacaatagctaactcataaagctaatttacca

SEQ ID NO: 418296 - DNA, 576 bp, Homo sapiens
actactttaaaatacctattatttyttctataagtatccacagccagaaagagcaaaacttgctgagtatgattggcaaaaagattttcttttgttttgattccaccgttccttatttttcaggccttgaataaagtcaaatacagaactcttatgaaaaaattcagtgtagaacctataatttagctgcgattgttctcttggttttattttattttgatcaatttcagtcaggttcccttgatttctctgaaactggagagtattgtattctaaacgaatgacttgtctttgctagttgaagtaaataagcaattagagcaaaaggctgtttcattgaacttcaaagaaaattgtttttaagattctgttgttgttctgtggcccctaataatgcagacggtctttatacaacagaaatctgtcagagaagaaatttttattggtagctaactttacacacacacaaacacatgcacacacaacttcagaagcagaagcacaaggtacttcctcagagaaccacaaatatcatcaaagtcttattttgacataatgctactttaacaagaaatt

SEQ ID NO: 418297 - DNA, 576 bp, Homo sapiens
actactttaaaatacctattattttttctataagtatccacagccagaaagagcaaaacttgctgagtatgattggcaaaaagattttcttttgttttgattccaccgttccttatttttcaggccttgaataaagtcaaatacagaactcttatgaaaaaattcagtgtagaacctataatttagctgcgattgttctcttggttttattttattttgatcaatttcagtcaggttcccttgatttctctgaaactggagagtattgtattctaaacgaatgacttgtctttgctagttgaagtaaataagcaattagagcaaaaggctrtttcattgaacttcaaagaaaattgtttttaagattctgttgttgttctgtggcccctaataatgcagacggtctttatacaacagaaatctgtcagagaagaaatttttattggtagctaactttacacacacacaaacacatgcacacacaacttcagaagcagaagcacaaggtacttcctcagagaaccacaaatatcatcaaagtcttattttgacataatgctactttaacaagaaatt

SEQ ID NO: 418298 - DNA, 598 bp, Homo sapiens
cacaaatatcatcaaagtcttattttgacataatgctactttaacaagaaattcagatttatggaatgaaaattgctgtagtaacaagtattttgaaatccaccctaatacccagaaagtgacagcaaatcccagtgcttcagtaactctgagccagttaaactgtaggacaaaattctgttgtgttctagtatyactgtctttctgaactaagactgtcttgtgctttggttgataggaagcagtgagggtcctgcctttcccaggtttgaactttctcaggtggttgagatcttccttgcagctcctaaatttcattatatttttctctactccacaatccccatccagtaataaaaatctattcaaaagttgaaattaggaattcttccatttacatctaagcgttagattatttttctaaggaaaaaattaagattctgtttttacagaaatctcatatttttttttttagtagacttgggtctcaagccattctgttaaaaggggaaaggagtaatatcattatattaaaatatccaaccatatcatgagatcaaaggataaaaacatcttgaggatcatttggtgagtccgt

SEQ ID NO: 418299 - DNA, 660 bp, Homo sapiens
aatctaaaatactcagagcgtgcatgttaataaagatgatgtcacaaaccactggggtgcaaattagatttccattcttttacttctactcctagatgtggattatagttattcatatttgacttggaaagagctgaaacataagagttttaaaacctacctaattctgaccatcttagatattctgaatgctgsatattatctcttaatatagtttacagtgattttcagttgtgctatagaagacacatgcaagataattatctgttggtgacaacagcaatggcaaaaatctttgtaatgcccatgctaatctcatctcattataatctctctgcacagtgggtggcttgctgatggtcacatggccagaaactgatgatgccaaattcaaacccaggattctcatgccagatactagctcaatttatttatttaacatattaccaaattgagcccttgaaaggttaagtgaggtatctaatgttacataactaataaaggcataagttccatttggagctcaactgttgccaagtaacttagttcatatctagtcatatagttctacaagtacaatgataacattacaacctatgtttttttcagcatttaaaataaagggaaaacatgagtgaattctggactaacaccaagatc

SEQ ID NO: 418300 - DNA, 648 bp, Homo sapiens
tttgtgtcccccaatcattcttttgatagagtaatatattacatgttttgtatctacaaagatgtgtccatgtccccaataatgagagcagctactcacaaaacaaggttcctgtttcttgaactaattatgcacagaaatttctacctctcacttaccaatgagataattaaaatgtgagtcttggagcagagaggattagaggtttagatgcttgtataatacatatattactggctagtaatttgtactgaaaaaaacataaatataaatatatatatatgtataaactctttgctccatttctcatgtatcttattatttgtttatttttgcagatgttattattcctaaattcaaattggtcacaggttcattcaagaaaaacactataccaaygtaactacataccaattataaaaataaggaatgtcttgatgaaacatagatatggggatagaatagatattcctgatctctaagtgtacatcaacagtagggttctttcctcattaagtttaacttaccaagaacatgtgtaaaaactctattttgctgttcaaagacattcacatgaaatttttttagtgaagtagcagatccaagtacatgaagagccttgggtaataaaactaggcaaagccttat

SEQ ID NO: 418301 - DNA, 491 bp, Homo sapiens
ataatacatatattactggctagtaatttgtactgaaaaaaacataaatataaatatatatatatgtataaactctttgctccatttctcatgtatcttattatttgtttatttttgcagatgttattattcctaaattcaaattggtcacaggttcattcaagaaaaacactataccaacgtaactacataccaattataaaaataaggaatrtcttgatgaaacatagatatggggatagaatagatattcctgatctctaagtgtacatcaacagtagggttctttcctcattaagtttaacttaccaagaacatgtgtaaaaactctattttgctgttcaaagacattcacatgaaatttttttagtgaagtagcagatccaagtacatgaagagccttgggtaataaaactaggcaaagccttataataatgattcctgctaatataaatatttataattacactatgacatcctgtttttagttg

SEQ ID NO: 418302 - DNA, 634 bp, Homo sapiens
tgcaaaattctacactcagaaagtctgaagtggggcttaataattttgttattattattattattattattgtagagacgggtctcactatgttgcccaggctagtcttgaactcctgtcctcaagcaatccccctgcctcgacctcccaaaattagaattacagacatgaaaggatttttatttttaatgagtaaccagtgatgccaacgctgctggtccaggggacccactttgagaacsactgtgtacacacacacacttgaaacacataaatatatatatcttaaattaatttgtgatcatgaagggtatgtgtgtgtgtgtttaaatgcctgtgtgattgtacatcattcaaccagctacattttttaatcattagtcatttcttattatgtggcagtgaatataaccacttctaacctatagaactgttttgatgttcaaaaccagttctcagctgctgggaatgccttaaacgctaaggtcaaattgtcaatagaatcctgcctgcgtagacttaataccagtaagatagatctaaaattggcatttcaataagctattttgctaaactttaataacacaaattctgttaaccttgaagccctgattaaaacacaaataagcgagaa

SEQ ID NO: 418303 - DNA, 634 bp, Homo sapiens
tgcaaaattctacactcagaaagtctgaagtggggcttaataattttgttattattattattattattattgtagagacgggtctcactatgttgcccaggctagtcttgaactcctgtcctcaagcaatccccctgcctcgacctcccaaaattagaattacagacatgaaaggatttttatttttaatgagtaaccagtgatgccaacgctgctggtccaggggacccactttgagaaccactgtgtacacacacacacttgaaacacataaatatatatatcttaaattaatttgtgatcatgaagggtatgtgtgtgtgtrtttaaatgcctgtgtgattgtacatcattcaaccagctacattttttaatcattagtcatttcttattatgtggcagtgaatataaccacttctaacctatagaactgttttgatgttcaaaaccagttctcagctgctgggaatgccttaaacgctaaggtcaaattgtcaatagaatcctgcctgcgtagacttaataccagtaagatagatctaaaattggcatttcaataagctattttgctaaactttaataacacaaattctgttaaccttgaagccctgattaaaacacaaataagcgagaa

SEQ ID NO: 418304 - DNA, 648 bp, Homo sapiens
tgtcatgtgtccgttggcttctcttggttgtgacagtttctcagactttctttattcttgatgaccttgacagttttgagaagtactggtcaagtattttcaaaatgtctctaaattgggatttgtctgatatttttctcatggttatactagggctattagttctgcagaggaatagcttgtggtaaacttttatgcagcaatagaaaactaagrtatctctacaagtcaattttttacacatatttataatagggaaacatagtatctaaaattatttcaaaccaaaagtaattatttagtgcctgctgtataggagcagtacatacaaaatatcaatttctgccaccacagaatataggataatttggaagaataaggcaaataactagaacatacaaataaaattggcaagtgctatatgcatgaggcttatggagaattccaaggacagggagactctgatcaaagaagcaggggaaatatcgcaaatttgttaatgaggtctcagcaacactttatagtcaaagcaaattagccatatgaatatatccaaaaggatttctcacattcaagattatcagttggattgccatcaacatttctgtcccaggttcacaagcaacttctgctgcaaatatatgaggg

SEQ ID NO: 418305 - DNA, 592 bp, Homo sapiens
tatattacacgtaggtgctggatgtcagtgtagtagcagcttacctacatttggagaaaatataaaaacctttgaaaaatgtttgctatcattctgtcattcctttcttaactctttttcctatatttgtccatcatctgttttcagagtccaaaaattttaactagttttttcactccaccaaaatgaaaattctaactatatttatttagctatttattttttaaagaaatgctgcattttgttgggttgagtggtatatagagtctaccaggtgctttgattaattcagagttatcctttgcacaatcatatatttgaaaaaagagaggtaaccctgaaaaaaaaaaaaaaaaagagaatacagtatgaatgagctggggttggagagtttgagaataccgaagttcagaaacatggggactatytggcacccaagaaaataaccacatagtcatcatcaggttttgggactgcttatggggaggaaagaggatgcccaaagtagtttaatgaaacactgaaagtaatgatttaggaacagattaaaagatgccagattcatcacttcatcacatgatctgcctttctt

SEQ ID NO: 418306 - DNA, 637 bp, Homo sapiens
tgataaagctatttctagggctcctactaatcttttatgaagcctcgtctgctatctcttttagaaactaaaaataaygtgaggtgatacatgaatatgcaatgaaatattaaagctgctcacccaaattggggaaggttctcactgttacaattgggaaattaccaaaattaatgtgaatgtatgaaatccggcaggaattaaatcccaggtgcttgtcagctgttgcaatttgagtgatagacataaaaactaaagatagacataaaaaccaaagtgaaaaagaaagtggaggtgctaggagcgttgctttctggacgatacctgtggcaagatgatgagagaattattccagtgctctctgagcagctgccgcttaagaccttcctattattcccactgttatgctcaatgacttttaaaaagctattttgggtgcagttcttgggctccatccaatatatatctttttattcttcgctggtgtattgccacttgaatgggctgagagagttatataaaacaagccagatggtagctgcttgaggtttgagataccttgtgctgtaagggggtgtagaagaaaataaagaaacaataaaaacctaaaagcaagtgtaaataaaataatgtttag

SEQ ID NO: 418307 - DNA, 637 bp, Homo sapiens
tgataaagctatttctagggctcctactaatcttttatgaagcctcgtctgctatctcttttagaaactaaaaataacgtgaggtgatacatgaatatgcaatgaaatattaaagctgctcacccaaattggggaaggttctcactgttacaattgggaaattaccaaaattaatgtgaatgtatgaaatccggcaggaattaaatcccaggtgcttgtcagctgttgcaatttgagtgatagacataaaaactaaagatagacataaaaaccaaagtgaaaaagaaagtggaggtgctaggagcgttgctttctggaygatacctgtggcaagatgatgagagaattattccagtgctctctgagcagctgccgcttaagaccttcctattattcccactgttatgctcaatgacttttaaaaagctattttgggtgcagttcttgggctccatccaatatatatctttttattcttcgctggtgtattgccacttgaatgggctgagagagttatataaaacaagccagatggtagctgcttgaggtttgagataccttgtgctgtaagggggtgtagaagaaaataaagaaacaataaaaacctaaaagcaagtgtaaataaaataatgtttag

SEQ ID NO: 418308 - DNA, 596 bp, Homo sapiens
taaaaccataaaactcttagaagaaaatataggaataaatctttgtgagcctgggttaggttagatatgacaccgaaagtgcaagcaaccaaagaaaaaataggtaaactggagttcatcaaaattaaaaacttttacacttcaaaggataccatcaagaaagtgaaaagacaatctatagaatkaaagaggatatttataaatcatatatctgataagggacttatatcaagaacatggaaataactcttacaactcaataatataaggacaaatacataaaataaaaataaagacaaataaataaaataaataaaaataggctaaggatttgaatagacatttctccaaagaagctgtacaaatggccagtaagcacatgacaagatgctcaacatcattagttgtcagggaaatgcaaatcaaaaccacaatgagataccacttcatatgaagacggctataatcaaaaagagataataacgaagtgttggtgagtatgtgggaagttggaaccctcatacactgctggcaggattataaaccggtgcagccactttggaaaatggtctagcagttcctcaaacgattaaatg

SEQ ID NO: 418309 - DNA, 596 bp, Homo sapiens
taaaaccataaaactcttagaagaaaatataggaataaatctttgtgagcctgggttaggttagatatgacaccgaaagtgcaagcaaccaaagaaaaaataggtaaactggagttcatcaaaattaaaaacttttacacttcaaaggataccatcaagaaagtgaaaagacaatctatagaattaaagaggatatttataaatcatatatctgataagggacttatatcaagaacatggaaataactcttacaactcaataatataaggacaaatacataaaataaaaataaagacaaataaataaaataaataaaaatrggctaaggatttgaatagacatttctccaaagaagctgtacaaatggccagtaagcacatgacaagatgctcaacatcattagttgtcagggaaatgcaaatcaaaaccacaatgagataccacttcatatgaagacggctataatcaaaaagagataataacgaagtgttggtgagtatgtgggaagttggaaccctcatacactgctggcaggattataaaccggtgcagccactttggaaaatggtctagcagttcctcaaacgattaaatg

SEQ ID NO: 418310 - DNA, 568 bp, Homo sapiens
gattatgtgacttggagttgatcttcttgtggagtatcttttactggagttctctgtatttcctgaatttgcatgttggcctgtcttgttaggttagggaagttctcctggatgatatcctgaagtgtgttttccaacttggttccattagccccatctctttcaggtactccaatcagtcataggttcagtctttttacatagtcccatagttctcagaggttttattcattcctttttattattctttctccagtcttttctgcctgccttatttcagcaagatagtcttcaagctctgatattctttcttccacttgattatttcagttactgatagttgtgctgtgtttttcagctccatcaggttatttatgttcctctctaaactggttattctagttagcagctcctgtaaacttttatcatggttcttagcatctttgcattgrgttaggacgtggtcctttacctcagccaagtgtattaagtttattactacccaccgtctgaagcctacttctgtcaattcgtccatctcatcctccttccagttctgtgcacttgc

SEQ ID NO: 418311 - DNA, 544 bp, Homo sapiens
tactcttctgaccttgatctaatcatgaatatctatgctacttaattataattaaaaaaaagcctacattgcactctagatggtagatgcacattttttcttctttggtcacctgccagttctcaaaattatagcagtgggaagaaatgcaaatgaattccgtgcttgacagctaaacataatgaaatgcatggtccacatttgaaaagttaccttaaaataaaaggtagcatataaaaaatcatttctttaaggtcacctgtggctttgaattacagctttgaggaatttccaatttagtcatcagaaagaagccaaaataaggattayacacctcactaaaggaaagacagagttttacttcatcatagttgggtgagcttagaaatagtaaacaaaacaagcaaaacaaagcacaaccctcaaatattcattttatagagccttgtgtaaagtcagccacttgagagcattttctatgctaattgttcctgtagctaataaagttttttcttgttaacatccaaaaataggttaccttatc

SEQ ID NO: 418312 - DNA, 580 bp, Homo sapiens
gactgaatcatgacaaaataaaaaatctgaaaagacctaaaactagtgaaaagacttaaacagtaatcaaaaaccccctaacaaagaaaagcccaggaccagatggatccactggagaacggtaccaaacatttaaagaagaattaacacctgtttttcttcaactcttccaaagactctaaaaagagaaaacattcccaactattctgaggccagcattactttgataccaaaaccagacaaagacataacaagaaaagtacagatcaatagttctgatgaatattgatataaaatagaaacaaaccaagttcaatagcacattaaatggatcatagaccacagacaagtggaatttatacctggaattcaaaaatagttcaacatacaaaaatcaatcaatgtattacatcaatgtattacatcacattaacaaaatgaaggacaaaaaccacatgatcatctcaatggatgcaggaaaaacatttgagaaaattcaacaccctttcatgataaaaacattagacaaactaagaatagcaggaaactaycttaacataataaaagtcatatatgaata

SEQ ID NO: 418313 - DNA, 539 bp, Homo sapiens
aacagtgatcaaaataaacaaaagatttgaataaatacttaaagaaaagaagaccatgatggccatgaaaagatgttcaacatcattaatcattagggaaattcaactggaaactggaatgaaatactacttcacacctactagaactatcaaaatgaaaaaagacygacaatatctatttggctgttgggaatgtaaaatagcataatcactttggaaaacagtttggcagtttcctataaagttaaatagacacttatcatataccccaaaattctatacctaggcatatatccaaaagaaaacatatgtccactaaaaggcttgtacacaaatgttcatagcagcttaaaaaaaaaaaaaaaagccccaaattggataaagctcaaatgtctgtcagcaggtgaatggataaattgtgttatggacatacaatgggatattatcactcagtaatgttgcaacactgaggaatctgaaacataatgctgagaaaaagaaaccaaacacaaaacagtatttactgcacaattccattt

SEQ ID NO: 418314 - DNA, 636 bp, Homo sapiens
ggatccttgcaattcatattaaaaagtcactaaactactattaaagtagacacggtgaccaatatgcagctcatagaagtacctgcatagaagtatgtgcgtaataagatgttgcaatttacaaaggtaaacaggcatcagtttgactaacagtgtgcttaagaaggatagatagaactgtttatgggaacttgctaaaggagacaggccctaaaacctgacttaaaacagtagaaggaatccatatggtgagtgggtggagggaggtgacaaatctacatgaaggcacaattggcatatttccagaaaagtaattgctcccacagaattactatgtagatggaccacgtttaaaataagtcagaaccactttcactactgttcyataaccaaatatatagacagtagactaatgtaatactatcagtggttatctacaaaatatctttaattaatgtctttgtccgttttatgctgctataacaaaatactgcagactgggtaatttataaagaaagtaaaattctcacagttctggaggctgagaagtcctaagtcaaggtgctggcatctggccttcttgctgtatcatctcatggcagaagggcaagagggagagagagcacaaggtataat

SEQ ID NO: 418315 - DNA, 641 bp, Homo sapiens
catttacaatgaaattagaggactacatttctttacaaacctcaaatatcagccagtgaggacaaaccaccaacagctgcaagaccagagtggtatcagtgtctgtgcagaggaaggcagaragaatcaaaaacaaagcactgtgtgcccatttggaaacagctactgaaactgggaggtttatccaatccaacaatgggcagcagtacaagggggctggtggtgggaaatggaggaatcttaggaatctaacacttatgagccttcctccaggatggagctcccttccaggaaagggccttgcactgaggtgaaactgctggaatggaatcaaaactgagcaaattaggcccaatagagacaaaggaaagaaatgatccagacaaaagtggaggaggaaaacagaaccaggaagtcttggaatacaacagaagagggaactctccaaagttagaaaagccagttagaagagccaggcctctaaaattttagaaaactgatctcacataaaaatgagcagcagaaaagtattgaagtcaagtcctgtgcaaagttattataagataaaagagaataaggagcagaataacatcactatagataataaaagcacatcagaaagacagggacagatcaaaact

SEQ ID NO: 418316 - DNA, 641 bp, Homo sapiens
catttacaatgaaattagaggactacatttctttacaaacctcaaatatcagccagtgaggacaaaccaccaacagctgcaagaccagagtggtatcagtgtctgtgcagaggaaggcagagagaatcaaaaacaaagcactgtgtgcccatttggaaacagctactgaaactgggaggtttatccaatccaacaatgggcagcagtacaagggggctggtggtgggaaatggaggaatcttaggaatctaacacttatgagccttcctccaggatggagctcccttccaggaaagggccttgcactgaggtgaaactgctggaatggaatcaaaactgagcaaattaggcccaatagagacaaaggaaagaaatgatccagayaaaagtggaggaggaaaacagaaccaggaagtcttggaatacaacagaagagggaactctccaaagttagaaaagccagttagaagagccaggcctctaaaattttagaaaactgatctcacataaaaatgagcagcagaaaagtattgaagtcaagtcctgtgcaaagttattataagataaaagagaataaggagcagaataacatcactatagataataaaagcacatcagaaagacagggacagatcaaaact

SEQ ID NO: 418317 - DNA, 595 bp, Homo sapiens
gcactgagcttgaaccaaggcccaaacccagttctccctgggatgttttagcttttagaagagctccctcttctttatttagaaataataagtgacatagaacatcgctggtcagrctccccagcacgccaactctgggacagagagctgcacgcatgaagcttattggggagtgctcatgggaccatctgtgaggaagtgaaggaagacggcttacgccagtgaaagaatgcaattgcgatgcagacagacctcagacagtcccatgaaagtcctggagctggaataagtattcagagttgtcccaccttgaggcaaggagcatgggactttattacacacaatttgtttggggccccaacaaccagtcatagatgagggctgctctagggaaaggagtgtgagctactttgggccaagtagatctcttcctttgagggtaattcccagacagtcattcaggtccatgctgtcaaccacctatttcccaggtgtttggaatgagtgcctccatcctgaaggaagatctagacagtgacccactaccaagagcaattcaaccattttgcttctcttcagtcaatctatgtgtcaa

SEQ ID NO: 418318 - DNA, 618 bp, Homo sapiens
atggacttcctgatgtctttgtaacaatcgggtttcatactcttgagacagttgaaaaaaaaaatcatacttcctgtgtttgcaatcattccacatcattcacttttttgcataaatacatagaacatgtgttgggatttaattctccaggggtgttttacatttctgcatgttaagacataatgcttggactgtggaacatacttctcactttataatgttgattattattgttayttttatcattctttagcttttttctcatcattgatttacatgctggtgtcctccacactattaggaactgcttccgagtaggggaccacattttatccacctttttgcctccaggcatagtgcagtcccttgaacatggaagagactcaataagtgtgttaaaataaattgaactcgagtacatcgaactgtgctgtgatttacgcgtaatattaaaactttgccctagcaaatgttaaagctgttgttttgcatttctacagaagttcaatagaactcttggaattcaaagttccaaatataaatttcactggctttaaataattgtttaataataaaatccagtattaagtaaaataagattttcttgtataaattgtt

SEQ ID NO: 418319 - DNA, 588 bp, Homo sapiens
acccagcatctctgtttctcacccagttcgctcccaacacctaaaagagtttatattccatgaaaatcaaacagccttcctgtgaatctttgtctctcccaacgagttcttatggagttcgtcggtttttgtgttttttaaggaaacaatttatattaccaaatacaaattcaagaaaacaaattaatatatggatcttaagggagggtagttaagaatttagtataaaacttctttgttattctttgttatctatcagtggatgtcaaacagatgtgagctacattgtccatttttagagtaaatagtgtctatatgtgtatgtataggcatatgtagctmtccgaggcagttcctcttttctctttctttctttttctttctcttgctccccttttttctttctccaattatattaatattacaaagcactcagccctattttggattaagtcctaatgtcagagaacaatgcagtcttaccaaaggtagaagggactctttacttccttgcagcaaattctgcctccttgacctgcccaaaggagaaagaaaaatccttcttttttattctattcggaggtttta

SEQ ID NO: 418320 - DNA, 588 bp, Homo sapiens
acccagcatctctgtttctcacccagttcgctcccaacacctaaaagagtttatattccatgaaaatcaaacagccttcctgtgaatctttgtctctcccaacgagttcttatggagttcgtcggtttttgtgttttttaaggaaacaatttatattaccaaatacaaattcaagaaaacaaattaatatatggatcttaagggagggtagttaagaatttagtataaaacttctttgttattctttgttatctatcagtggatgtcaaacagatgtgagctacattgtccatttttagagtaaatagtgtctatatgtgtatgtataggcatatgtagctatccgaggcagttcctcttttctctttctttctttttctttctcttgctccccttttttctttctccaattatattaatattacaaagcactcagccctattttggattaagtcctaatgtcagagaacaatgcagtcttrccaaaggtagaagggactctttacttccttgcagcaaattctgcctccttgacctgcccaaaggagaaagaaaaatccttcttttttattctattcggaggtttta

SEQ ID NO: 418321 - DNA, 642 bp, Homo sapiens
tgcatcctatctgcatatcacagtctgttgctaaggggttactagggtgaattatatacatgattaaaagcccaaatagaatattggtaaagttcttgaagaaagtctagagactgacttatttcaccccagaaatgttgactatctggtactcaaattgactctacatggtatctgaaatattctgattttaacacttactcaaattaaatatattttatcttagggaagcactagaggtaaaaatgtattatcccacagcatttttccagaatctattttaatattcacaagaacattgagaacaatgattgtcaatcctaggtgcatattaaagccacctgaggattcttttttaaaaagtacaaatgcctgggtcctgccaccaaagattctgattacattggttagaggtaggatccagggaccaggattttttaaagctgcccagttagagttgagaaccactgttccaacgcagtgttgctcattttaattatcacttgagaaccttgttgaaaatgtttcccaggtcccacctcgaayctcctggatcagaattttctgggaggacaggtgggaaatgcatattttaaacaagtactgtcttagtctattcaggctgcaataacaaatcagcag

SEQ ID NO: 418322 - DNA, 549 bp, Homo sapiens
ttgggtggcatttgttaaaatacatttagtacttcatgtaaaatctcttcctagacatacmtattcagtactataatttttggtttctaactacatttcacaagatttaagtcttggaatagttgtaattttccttgaccctctttagagcaatgcagtttacatcaccatgtggtatactgaagagtcacacggtgttccctgagattttctcaacaatgcttaactttttaaaaagagtttcctaaagactgaaagcactgtaacagtgcttttggctccagattctctgtgttgctacagccacaagtcaagtgtacagcttgcagcagcaagaaaggacaacctgtggcttagcctagggactccacccagttgtcctagaaaattataactttttgtacctcacctaccttatgataaatacatttagtggatcacagtaaatcagtttgctcaatgtggtcacgttccatgttctatcactttctaggccaattattgagaggttttagtttttttacgttgtgtttgtttgattaattgatt

SEQ ID NO: 418323 - DNA, 587 bp, Homo sapiens
attccaaactttcccacattttcctgtcttctgagccctccaaactgttccatcctctgcctgttacccagttccaaagtcacttgtgcatttgcaggtatcttttcagcagtgccccatgctactggtaccaatttactgtattattctgctttcacactgctgataaagacatacctgagactgggcaatttacaaaagaaagaggtttaactggacttacagttacacatggctggagagacctcacaatcatgggagaaggcaaggmggagcaagtcacatcttatatagatggcagcaggcaaagagggagctgtgcagagaaactcccatttttaaaaccatcatatcttgttagacccattcgctatcacgagagcatcacagaaaagacccgcccccatgattcaatcatctccaattgggtccctcccacaacatgtgggaattatgagagctacaagttgagatttggatggggacagagaactaaaccatatcactcactatgttccaacttcactgctatttttgttcctgaaatcagggttggagaaaaatgaacatttgatgatgacattggc

SEQ ID NO: 418324 - DNA, 587 bp, Homo sapiens
attccaaactttcccacattttcctgtcttctgagccctccaaactgttccatcctctgcctgttacccagttccaaagtcacttgtgcatttgcaggtatcttttcagcagtgccccatgctactggtaccaatttactgtattattctgctttcacactgctgataaagacatacctgagactgggcaatttacaaaagaaagaggtttaactggacttacagttacacatggctggagagacctcacaatcatgggagaaggcaaggcggagcaagtcacatcttatatagatggcagcaggcaaagagggagctgtgcagagaaactcccatttttaaaaccatcatatcttgttagacccattcgctatcacgagagcatcacagaaaagacccgcccccatgattcaatcatctccaattgggtccctcccacaacatgtgggaattatgagagctacaagttgagatttggatggggacagagarctaaaccatatcactcactatgttccaacttcactgctatttttgttcctgaaatcagggttggagaaaaatgaacatttgatgatgacattggc

SEQ ID NO: 418325 - DNA, 589 bp, Homo sapiens
atcttctcaataaatggtattgtaataactgaatatccatataggaaataattaccccatgacactctactaaaattaattcaaattagattattaactttatatgagatcaaaacccataaaagtgatctaaaaaaaaaaacgggaaaatactygtgacttaggtttagaaagtattctttacatgggacacaaaaagtatgaaccaataaagataaaaattgatagactaaaatttattaaaattttaaactttttcttatcaaaagatatcattgagaaaatgaaaaggaaaaccccagattataagaaaacatttgtagaacatgtatctgacagatgacatgcatccaaaatatatgaagacctttgacaaatcaatgataggaaaagaaactacccaataaaaaaaaaaaagaggatttccagtattagccaatatgagaagagccctatttctcccaagtacttcttacattgaaaaaacccgaacttaacacaacaaacgaacgtagggagattccaaaaggtggaaagaagacagtctcttcctaggggcttttgaacttgaggaaggacaataatgaat

SEQ ID NO: 418326 - DNA, 567 bp, Homo sapiens
tgtgtgatggaggaaataatcttagttaaaattcaactctccacwtattccattattgtactcacacagcaacaagtctgagaaaaatgcaaaattatactatgatcgcattaagttcatgaccaccaaactggttccttatcattgcctagcaagtatatgatgcccaatttctctccttctccttcagattacaacttctaaacattttctttcttctcaaaccttcaatattccctttccatagccagttctacctgttgtctgtacttctccttttacttagaggaaatagagggaaataagggaaggaaggagggaggaactgggggagggagggacgaaggaaggaaagaaggaaggaacaaggaaggaaggaaggagggaagagagggagggagtgagggaggaaaggagggaaggaaagaatgaaggaaaggaaaaagaaaaggggaggggagagaagaggagaggagagaggaatcagatgtgcagcctgggcaacacagtgagacctcatctctactaaaaataaaaaaaaaaattaccaggtatggtagtgcgtgc

SEQ ID NO: 418327 - DNA, 591 bp, Homo sapiens
tttaatgatagtgtaagtgtactaaggcttatctaaaattttaatgatagtgtaagtgtactaaggcttgcacaactgaaacacttaaaaaaactaatatgtatrtaagttatatatgtaaatgagtaaattttattgcatttaattttacgtcaattttttaagtaaaagttaagatctcttctttgcaatgggattctaatggcaagatttatacccagtgaaaggttgagaggtagagatgattttcccagaacttgcaaaccagactactggggtaggtacctctctgtgatactaatcattgggaagaaaaatggaaagttttattcaaatgtcactcatttcttcagttacatgctattctaagtataacccagatatttctgagtatttgtgttttcctatactttgaaaactggaatatacaggaaggattaactttttaatccttccagtttcattaggggtatttgaatgattaagtgttgtctatagcttctttagcaccacagtgctacagagactgtatggcctgcaaagcctaaaatatttactatctattcagccctttagagaaaaattttgcca

SEQ ID NO: 418328 - DNA, 583 bp, Homo sapiens
tggatagacatttgggtttttttttacatttgccatattaagtagattctaacaaatagcttggtgcatgtttctctttgcttttcttttttgccagtgtatctttaggatagattcctagaagtaatattgccaaatcaaaagtaagtccatatataatttttctayatgttgccaaattcctttctatagtggttgtggcactattttgtatttctaccaaaaatgtacaagaatgcctttttccccacagcctctcaaacaaagtatattgtcaaactttgggatttttgccaatttgagagtggaaaatggtatcttgctgtggtttaaatttgcatttttcttattttgagaagaggtgagcatcttttcattgccttagagcattttgaatttctttttcagtgaattacctgttcatgtttctagttcaacttttctatagggttgtggtatttattgtggtaaaaaaacacataatataaaatttaccatctttatcatttttttctgagtgtataagatgaacatgtaattttcagctcaggcattcagctatcaggactatttattgtagctt

SEQ ID NO: 418329 - DNA, 563 bp, Homo sapiens
aaccaccgcctttttatttgtcacatccctactagttctcaatacaaagttcacagtgagctcaaaggacaagtagtaattccatttgagaataatacttggcagagtatattgaatgtcatcatctttatcaacagacttgggcccttgagtaagacttatgcatactttagttttatgcaaacccctcccccattccaacccaggcttgttctctgtccctgcctcttctctctgttataaagtgatatttttctcctttatagaggcartgtatggaatgtacgtaagttggatacaatttggaaaacatctaaaaatagaagaaaaaccatggaagtttttgaagcattttgttggatgttttctccccatggcttgttctctttattagtagatttaacatatttaaattgtataattgtatacaattattgttcaataaattttctaccccatttgtaggtactgttaaaaagcattttaacctgccattatgaactctttgtaaacatagttttttatggttgcattaatggagacatagtttacttaactattct

SEQ ID NO: 418330 - DNA, 563 bp, Homo sapiens
aaccaccgcctttttatttgtcacatccctactagttctcaatacaaagttcacagtgagctcaaaggacaagtagtaattccatttgagaataatacttggcagagtatattgaatgtcatcatctttatcaacagacttgggcccttgagtaagacttatgcatactttagttttatgcaaacccctcccccattccaacccaggcttgttctctgtccctgcctcttctctctgttataaagtgatatttttctcctttatagaggcagtgtatggaatgtacgtaagttggatacaatttggaaaacatctaaaaatagaagaaaaaccatggaagtttttgaagcattttgttggatgttttctccccatggcttgttctctttattagtagatttaacatatttaaattgtataattgtatacaattattgttcaataaattttctaccccatttgtaggtactrttaaaaagcattttaacctgccattatgaactctttgtaaacatagttttttatggttgcattaatggagacatagtttacttaactattct

SEQ ID NO: 418331 - DNA, 642 bp, Homo sapiens
caagtaagtttatttaacaaggaaacttttattttaggtgcgggggtacatctgcaggtttgctacctggccatattgcatgatgctggggtttggggtacaaatgagcccatcaccttggtagtgagcatagtacscaatagtttttcaatccttgccttctccctcccactccccagtagtccccggtttctattgttgctatctttatatccatgagtacccagtgtttagctcccacttacaagcgagaacacacagtatatggttttctgtttctgtgttaatttgcttgggataatggcctctagctatatccatgttattgcaaaggacatgctctcattattattttttatttttattttttcccaagatgaagtcttgctgtgtcgcttgggctggagtgcagtggtgctatctcggctcactgcaacctcggcctcctgggctcaagcagttctcctgcctcagcctccctagtagctgggattataggcatgcaccaccacgcccagctaatttttgtatttttagtggagatggggtttcaccatgttggccagactggtcttaaactcctgacctcaagtgatccacctgcctcagcctcccaagctctcattctttattgtgatttca

SEQ ID NO: 418332 - DNA, 542 bp, Homo sapiens
gggaggagtagcagagctggggacaagagagatcattattccatgagcaatggtatgggcttcctgtcagtgctatgccagatgccaatggcaacttatcttggtgaatgtaggagatactcctaccagaaccctctttgggtcttcatgacttggtactacaggggyacactcttaccatgttgagtctcaccacttactctattcatagatcagatgtcaggctcactgaaaatttggatgtttgattcaaaagcagacacacttaaattctttttctgtagcatagactttatcaggggagacatttcctcacgtgggtaatgaggtccctataataattagcactaattgagatccaggtaggcagcttaagtagaaaggctgacaactaaatcactcatagtggtgacccaggggactagtctcataggtcctcatttagtcagaaagaaggaggcagaattcagtgacattagtaagttttcaggaaggattacatttgttataaacaattagcaaaatatttatttgagctaaat

SEQ ID NO: 418333 - DNA, 578 bp, Homo sapiens
gaaataacatcacagttgagttagtttttgaagcttttccactattctggtaaaaatgatacatatatgtacagatgcatgtatgagctatgaaatataaattcagcaattttagtgttctacacatgacttaagagctcttgtatttacatttaaaactgattttgcacaatatacggataaatggtaaaactcatgctgataactaaaaattttagtttttctttgtgtagaaacacttaagtagcaaaaccaaaatcatccctaaactccagaaaacccgcacaacaaaaccaccattacaagtaagagtgagaccacaggaggaaaaaagagccttatatttcagtatcgtgagtcacacttttctcctactttttgaagttggagaaccacattttcatttttcactggattctgcaaattttacagccagctctgcaagtgacttgtattgatttgctagggctgccakaaaaaaataccacagaataggtgacttaaacaacagaaatttactttttcacacttctggaggcttagaagtccaaggtttaaagttctggcagggttggttt

SEQ ID NO: 418334 - DNA, 578 bp, Homo sapiens
gaaataacatcacagttgagttagtttttgaagcttttccactattctggtaaaaatgatacatatatgtacagatgcatgtatgagctatgaaatataaattcagcaattttagtgttctacacatgacttaagagctcttgtatttacatttaaaactgattttgcacaatatacggataaatggtaaaactcatgctgataactaaaaattttagtttttctttgtgtagaaacacttaagtagcaaaaccaaaatcatccctaaactccagaaaacccgcacaacaaaaccaccattacaagtaagagtgagaccacaggaggaaaaaagagccttatatttcagtatcgtgagtcacacttttctcctactttttgaagttggagaaccacattttcatttttcactggattctgcaaattttacagccagctctgcaagtgacttgtattgatttgctagggctgccataaaaaaataccrcagaataggtgacttaaacaacagaaatttactttttcacacttctggaggcttagaagtccaaggtttaaagttctggcagggttggttt

SEQ ID NO: 418335 - DNA, 573 bp, Homo sapiens
tgtgggcttcagtactggagactacaaatcctggctctacttgcaggaaaattagagagcagcttgaattctctgtgtctcagattctttataaataaaatgcatacaataattccaagatataaatttattgtgaaaattacacaagagataatcacatgcataatggaaattcaataaatggttccttcctattattctatctttaaatctcttatgctyttcccctcttctccatccagagtaataccttcctaacccggacctcattatcttttactgatattgcaatagtcacctaattgggctgtctaactcttgtctagtccctcccactttatcctttgcatttttgactgggtgatctttttgaaacaaattctgtcatattactctgcccttgagtcttgtggtccagtgacagcaaatgacttgaagttccaagaagaagctgtgctacttcatgctttggtattttgctttgttacttcctaaggtgacccggagtgctcttaccactgccctttgtttggctagcagacatctattcatctttcaacttaaataatgttg

SEQ ID NO: 418336 - DNA, 543 bp, Homo sapiens
tccattaagcttaggcactgtcttccctggaattcagttcccctgggagtatagaaaaacatcctatagataacagctgtactgaaagacagttatgtagagaggaatggcccccagattttgtagacaaatgtcctgggtccaaaccttgactctgcccatactgtccgcataacccttggaaagttattagctcctgtatctttcatatttcttatctataaaataaaattaaccattgtattaactcatggggttactgtgattaaatgagcatatgccttgaaaacacttagaacaatggcttcaacttaacaagtactacagaagtcttcataatttttaatactacttttcagggtacatttgtttttctcaaattgacttttcttttcttttctttctttttttttttttgctctgtctcccagggtggagtgcagtgacgcgatcttggctcattgcaacctccgcctcccggrttcaagcgattcttctgcctcagcctccagagtagctgggactacaggcgtgcgccaccgt

SEQ ID NO: 418337 - DNA, 600 bp, Homo sapiens
tggtcttgacattgataacacctcccttgccgttgtgttcaatctgggtaggtcttttctgggaccgtttctgccatcctgaggtccatgtcaggaaactgtttggctccacagggagagctgagtgagggagaagagatgctaaaaagatgtttgctttttgttacccattttgtcagagtctgtaaccttgacataatctttcctcccattcttgttcccttktgaatgatgtagagagtgtttcacctaagtggctggggaatgatccagtgttggcgactttatgagtattgttgtagaaggagctagcactttagcgacacacagaccaaggttcaagtcctgtgtgtgccacctactgtctctgtgcctcttgataaatcaatgaaggtgtcaagagttgcaatttctcatttacaaaatgggcatgctaaaatgtgcctacctcccagagtggtggtgctaatcaaatgtgataatatgtgcgacagcaacttgtaaactataaaaggtgacatagatgtgagttgttactgttagtggttcttttaatttccctgctctctacaagcagacctgaattctagcagcacctgt

SEQ ID NO: 418338 - DNA, 600 bp, Homo sapiens
tggtcttgacattgataacacctcccttgccgttgtgttcaatctgggtaggtcttttctgggaccgtttctgccatcctgaggtccatgtcaggaaactgtttggctccacagggagagctgagtgagggagaagagatgctaaaaagatgtttgctttttgttacccattttgtcagagtctgtaaccttgacataatctttcctcccattcttgttcccttgtgaatgatgtagagagtgtttcacctaagtggctggggaatgatccagtgttggcgactttatgagtattgttgtagaaggagctagcactttagcgacacacagaccaaggttcaagtcctgtgtgtgccacctactrtctctgtgcctcttgataaatcaatgaaggtgtcaagagttgcaatttctcatttacaaaatgggcatgctaaaatgtgcctacctcccagagtggtggtgctaatcaaatgtgataatatgtgcgacagcaacttgtaaactataaaaggtgacatagatgtgagttgttactgttagtggttcttttaatttccctgctctctacaagcagacctgaattctagcagcacctgt

SEQ ID NO: 418339 - DNA, 600 bp, Homo sapiens
tggtcttgacattgataacacctcccttgccgttgtgttcaatctgggtaggtcttttctgggaccgtttctgccatcctgaggtccatgtcaggaaactgtttggctccacagggagagctgagtgagggagaagagatgctaaaaagatgtttgctttttgttacccattttgtcagagtctgtaaccttgacataatctttcctcccattcttgttcccttgtgaatgatgtagagagtgtttcacctaagtggctggggaatgatccagtgttggcgactttatgagtattgttgtagaaggagctagcactttagcgacacacagaccaaggttcaagtcctgtgtgtgccacctactgtctctgtgsctcttgataaatcaatgaaggtgtcaagagttgcaatttctcatttacaaaatgggcatgctaaaatgtgcctacctcccagagtggtggtgctaatcaaatgtgataatatgtgcgacagcaacttgtaaactataaaaggtgacatagatgtgagttgttactgttagtggttcttttaatttccctgctctctacaagcagacctgaattctagcagcacctgt

SEQ ID NO: 418340 - DNA, 600 bp, Homo sapiens
tggtcttgacattgataacacctcccttgccgttgtgttcaatctgggtaggtcttttctgggaccgtttctgccatcctgaggtccatgtcaggaaactgtttggctccacagggagagctgagtgagggagaagagatgctaaaaagatgtttgctttttgttacccattttgtcagagtctgtaaccttgacataatctttcctcccattcttgttcccttgtgaatgatgtagagagtgtttcacctaagtggctggggaatgatccagtgttggcgactttatgagtattgttgtagaaggagctagcactttagcgacacacagaccaaggttcaagtcctgtgtgtgccacctactgtctctgtgcctcttgataaatcamtgaaggtgtcaagagttgcaatttctcatttacaaaatgggcatgctaaaatgtgcctacctcccagagtggtggtgctaatcaaatgtgataatatgtgcgacagcaacttgtaaactataaaaggtgacatagatgtgagttgttactgttagtggttcttttaatttccctgctctctacaagcagacctgaattctagcagcacctgt

SEQ ID NO: 418341 - DNA, 610 bp, Homo sapiens
aaaatttcagagatttttcgtggaggagaagtgtttcttcaagattacttccacggatgttctgggcattaaaatgatttagattacaatatctaaaaaagaaagaaagaaagcttttcttaggaccagatgtagatgaattgataaatcatttgcttccctcctgcgcttgtctaccttttatgatgggctcatagatactggcacaacagtgacgattatttaagagcrctgctcaccaaaacagcctttttaaaaggacaaaaggagtttttgtgacttagtaaagtgtctcataaggacctttaggtggcgctttttaacaacctgctacgctgtcttcagtgctgacagagagatggtgagaaggctgaaagcctattgacttgacagatttcatggcggtcaggatgcataagaggtttactgggaatttgtaaattcagtgctgagattatgtggaaagcaccattgtcaaagaaggagtctatgaatatatttctagaatgtgcactctccatccccaacctccagaaaaacctgcctttccagtgtcttctaagtaccagccccatgcaagggtgggatagaatcatcccatttcacagat

SEQ ID NO: 418342 - DNA, 610 bp, Homo sapiens
aaaatttcagagatttttcgtggaggagaagtgtttcttcaagattacttccacggatgttctgggcattaaaatgatttagattacaatatctaaaaaagaaagaaagaaagcttttcttaggaccagatgtagatgaattgataaatcatttgcttccctcctgcgcttgtctaccttttatgatgggctcatagatactggcacaacagtgacgattatttaagagcactgctcaccaaaacagcctttttaaaaggacaaaaggagtttttgtgacttagtaaagtgtctcataaggacctttaggtggygctttttaacaacctgctacgctgtcttcagtgctgacagagagatggtgagaaggctgaaagcctattgacttgacagatttcatggcggtcaggatgcataagaggtttactgggaatttgtaaattcagtgctgagattatgtggaaagcaccattgtcaaagaaggagtctatgaatatatttctagaatgtgcactctccatccccaacctccagaaaaacctgcctttccagtgtcttctaagtaccagccccatgcaagggtgggatagaatcatcccatttcacagat

SEQ ID NO: 418343 - DNA, 610 bp, Homo sapiens
aaaatttcagagatttttcgtggaggagaagtgtttcttcaagattacttccacggatgttctgggcattaaaatgatttagattacaatatctaaaaaagaaagaaagaaagcttttcttaggaccagatgtagatgaattgataaatcatttgcttccctcctgcgcttgtctaccttttatgatgggctcatagatactggcacaacagtgacgattatttaagagcactgctcaccaaaacagcctttttaaaaggacaaaaggagtttttgtgacttagtaaagtgtctcataaggacctttaggtggcgctttttaacaacctgctacgctgtcttcagtgctgacagagagatggtgagaaggctgaaagcctattgacttgacagatttcatggcrgtcaggatgcataagaggtttactgggaatttgtaaattcagtgctgagattatgtggaaagcaccattgtcaaagaaggagtctatgaatatatttctagaatgtgcactctccatccccaacctccagaaaaacctgcctttccagtgtcttctaagtaccagccccatgcaagggtgggatagaatcatcccatttcacagat

SEQ ID NO: 418344 - DNA, 610 bp, Homo sapiens
aaaatttcagagatttttcgtggaggagaagtgtttcttcaagattacttccacggatgttctgggcattaaaatgatttagattacaatatctaaaaaagaaagaaagaaagcttttcttaggaccagatgtagatgaattgataaatcatttgcttccctcctgcgcttgtctaccttttatgatgggctcatagatactggcacaacagtgacgattatttaagagcactgctcaccaaaacagcctttttaaaaggacaaaaggagtttttgtgacttagtaaagtgtctcataaggacctttaggtggcgctttttaacaacctgctacgctgtcttcagtgctgacagagagatggtgagaaggctgaaagcctattgacttgacagatttcatggcggtcaggatgcataagaggtttactgggaatttgtaaattcagtgctgagattatgtggaaagcaccattgtcaaagaaggagtctatgaatatatttcyagaatgtgcactctccatccccaacctccagaaaaacctgcctttccagtgtcttctaagtaccagccccatgcaagggtgggatagaatcatcccatttcacagat

SEQ ID NO: 418345 - DNA, 603 bp, Homo sapiens
gaagaagctttctaaattgcctttgtttaatgtgtttggaaaccaattgcctgtttggaacaaatgtaattgttattcaactgcagagttgtaagtttctgtgaatattttatcattccacaattcatagagctttgttcgcttcagtaatatccacaaagcaaaaaagctcatctgaaacttgattgtcaaaatttatttaattctgtaattaatagtaaaatgataagcaaagcaccccaaatattttgaaggtcacaaaacactcttaatttgcatcgcacaaatataggtgtcagaagaactgggttgtaaaggtaatcctgactattccattaacttgcaggagccatgtgtgtatcttatttatccttatatttgtagtatttagaacagtgcctggcatgtggggattatttggcaaatatatagtgaatgaatgaaaagtattttctatgaccagagagtctgtttcatatgctaattgtaaggatagtgagatgwtgtatataggtgatagatgttagattattttcacaactttgataaatccagggctaccttatgataatatcacagacctcattggtcaaattacttgca

SEQ ID NO: 418346 - DNA, 605 bp, Homo sapiens
atttaatttaactgtagctagctctgaatgagttgaatttttttamtgttatgcattatgagaacatgaaattatcatctttgaagacaccaatgacaaggtttcatcatttccttgcctttttataggaacaactcctacaatggaaggtgaagagggtgtgggaccagagcaatcagtctgttgacccaataggactgggcttcagtaccatctttggcacatgggttgtagggttgtttcctgcagtagaaagtggttcttggcctctcccttgacaatgcatacttataaatgggatttaacttaaatattctgatcatagtcagcaagtgcataagtatgacaattgtgattaattgtgccacttcccatttaaagctgtttgtcttctgtcttttacctactcaatgactattactatggatcagcaatgaaaattagctgtgtctattatattcttggacctatatctgaaagctagcctaaataaattatagcacaaataaataaaacggtaaagtgcaacttacaaaataggtattattttgtcaaaagaactgggttgtaaaggtaatcctgattatgctattaatttgcagtag

SEQ ID NO: 418347 - DNA, 605 bp, Homo sapiens
atttaatttaactgtagctagctctgaatgagttgaatttttttactgttatgcattatgagaacatgaaattatcatctttgaagacaccaatgacaaggtttcatcatttccttgcctttttataggaayaactcctacaatggaaggtgaagagggtgtgggaccagagcaatcagtctgttgacccaataggactgggcttcagtaccatctttggcacatgggttgtagggttgtttcctgcagtagaaagtggttcttggcctctcccttgacaatgcatacttataaatgggatttaacttaaatattctgatcatagtcagcaagtgcataagtatgacaattgtgattaattgtgccacttcccatttaaagctgtttgtcttctgtcttttacctactcaatgactattactatggatcagcaatgaaaattagctgtgtctattatattcttggacctatatctgaaagctagcctaaataaattatagcacaaataaataaaacggtaaagtgcaacttacaaaataggtattattttgtcaaaagaactgggttgtaaaggtaatcctgattatgctattaatttgcagtag

SEQ ID NO: 418348 - DNA, 605 bp, Homo sapiens
atttaatttaactgtagctagctctgaatgagttgaatttttttactgttatgcattatgagaacatgaaattatcatctttgaagacaccaatgacaaggtttcatcatttccttgcctttttataggaacaactcctacaatggaaggtgaagagggtgtgggaccagagcaatcagtctgttgacccaataggactgggcttcagtaccatstttggcacatgggttgtagggttgtttcctgcagtagaaagtggttcttggcctctcccttgacaatgcatacttataaatgggatttaacttaaatattctgatcatagtcagcaagtgcataagtatgacaattgtgattaattgtgccacttcccatttaaagctgtttgtcttctgtcttttacctactcaatgactattactatggatcagcaatgaaaattagctgtgtctattatattcttggacctatatctgaaagctagcctaaataaattatagcacaaataaataaaacggtaaagtgcaacttacaaaataggtattattttgtcaaaagaactgggttgtaaaggtaatcctgattatgctattaatttgcagtag

SEQ ID NO: 418349 - DNA, 605 bp, Homo sapiens
atttaatttaactgtagctagctctgaatgagttgaatttttttactgttatgcattatgagaacatgaaattatcatctttgaagacaccaatgacaaggtttcatcatttccttgcctttttataggaacaactcctacaatggaaggtgaagagggtgtgggaccagagcaatcagtctgttgacccaataggactgggcttcagtaccatctttggcacatgggttgtagggttgtttcctgcagtagaaagtggttcttggcctctcccttgacaatgcatacttataaatgggatttaacttaaatattctgatcatagtcagcaagtgcataagtatgacaattgtgattaattgtgccacttcccatttaaagctgtttgtcttctgtcttttacctactcaatgactattactatggatcagcaatgaaaattagctgtgtctattatattcttggacctatatctgaaagctagcctaaataaattatagcacaaataaataaaayggtaaagtgcaacttacaaaataggtattattttgtcaaaagaactgggttgtaaaggtaatcctgattatgctattaatttgcagtag

SEQ ID NO: 418350 - DNA, 604 bp, Homo sapiens
tcattatggcaaataccagccttttgggagatactactagatccccctgggcacaccagagcactctcatcactggggatgctgtggaaaacagaaatgacaagtactrtgacttggtatttgggagtttgtgggtgacaggagagaaggacatttgtactagaaaagttagagaaagatagtataaatctgtggatatggacaaaacattttgtgagtgggattatcttaaaaaaaaaaagaaaagaaaaccccaaaccgaagattgccatattacgtattcaaactttctataatgctcctgtattcattcttaaatatcatttttagcatgtggctttctttctaatgctcatcttcattctagtcccacattttttccatatttagattcatttaacattctctgtatagctgatttacatggtaaagagaagcatcgcctgaattgatagcatgggacaaacacttgtatcaagtcagacagaaagattcttcaggacacctaaagtttactttatttatatggagatgatctgtctatgtgaagagacagaattgggtataaaaagatatagaaagggcatgggctttagtcaggtag

SEQ ID NO: 418351 - DNA, 604 bp, Homo sapiens
tcattatggcaaataccagccttttgggagatactactagatccccctgggcacaccagagcactctcatcactggggatgctgtggaaaacagaaatgacaagtactatgacttggtatttgggagtttgtgggtgacaggagagaaggacatttgtactagaaaagttagagaaagatagtataaatctgtggatatggacaaaacattttgtgagtgggattatcttaaaaaaaaaaagaaaagaaaaccccaaaccgaagattgccatattacgtattcaaactttctataatgctcctgtattcattcttaaatatcatttttagcatgtggctttctttctaatgctcatcttcattctagtcccacattttttccatatttagattcatttaacattctctgtatagctratttacatggtaaagagaagcatcgcctgaattgatagcatgggacaaacacttgtatcaagtcagacagaaagattcttcaggacacctaaagtttactttatttatatggagatgatctgtctatgtgaagagacagaattgggtataaaaagatatagaaagggcatgggctttagtcaggtag

SEQ ID NO: 418352 - DNA, 506 bp, Homo sapiens
tgtggctttctttctaatgctcatcttcattctagtcccacattttttccatatttagattcatttaacattctctgtatagctgatttacatggtaaagagaagcatcgcctgaattgatagcatgggacaaacacttgtatcaagtcagacagaaagattcttcaggacacctaaagtttactttatttatatggagatgatctgtctatgtgaagagacagaattgggtataaaaagatatagaaagggcatgggctttagtcaggtagacttttaaagttraatcttgccttaacagtgtagtcgttgggcaaataactggaccacttaagcctcagtttctcttctatgaaatgatgataacagaatctcccttactgagttgtcatgagaagttaaagagataatggttgtcaagggccggacacagaggaggcactccacaaaccttagattatcacctcctcctgccccctttccaggtagctcacacaccatcatgt

SEQ ID NO: 418353 - DNA, 506 bp, Homo sapiens
tgtggctttctttctaatgctcatcttcattctagtcccacattttttccatatttagattcatttaacattctctgtatagctgatttacatggtaaagagaagcatcgcctgaattgatagcatgggacaaacacttgtatcaagtcagacagaaagattcttcaggacacctaaagtttactttatttatatggagatgatctgtctatgtgaagagacagaattgggtataaaaagatatagaaagggcatgggctttagtcaggtagacttttaaagttgaatcttgccttaacagtgtagtcgttgggcaaataamtggaccacttaagcctcagtttctcttctatgaaatgatgataacagaatctcccttactgagttgtcatgagaagttaaagagataatggttgtcaagggccggacacagaggaggcactccacaaaccttagattatcacctcctcctgccccctttccaggtagctcacacaccatcatgt

SEQ ID NO: 418354 - DNA, 506 bp, Homo sapiens
tgtggctttctttctaatgctcatcttcattctagtcccacattttttccatatttagattcatttaacattctctgtatagctgatttacatggtaaagagaagcatcgcctgaattgatagcatgggacaaacacttgtatcaagtcagacagaaagattcttcaggacacctaaagtttactttatttatatggagatgatctgtctatgtgaagagacagaattgggtataaaaagatatagaaagggcatgggctttagtcaggtagacttttaaagttgaatcttgccttaacagtgtagtcgttgggcaaataactggaccacttaagcctcagtttctcttctatgaaatgatgataacagaatctcccttactgagttgtcatgagaagttaaagagataatggttgtcaagggcyggacacagaggaggcactccacaaaccttagattatcacctcctcctgccccctttccaggtagctcacacaccatcatgt

SEQ ID NO: 418355 - DNA, 635 bp, Homo sapiens
ctctataccagcccagaaaattttggctgactacttccaacacatttttgggaataacatcagagaagatcacaaatatttgtgtagtagcattgctttacacttcttttgtcttccttgcagtgttaaacagtgaggtccccagtttaaaatctcataaagtaatttatgtatgcaaaatatatgggatgaaatgatatacaattataaaaaaagaagtctgagacacacatatatatgcatatactccaacttaattttattttcattatttaatgaattgccttggtatcataagtatgtgtgtgtataaatacatatttattaaatatttattttaaggagtttggaaacaacttttaagataatagaatcattgaagattgtagacacagatggaatggttagaattgttatttaggatgattactctaaaatccatgtgccagttgatagaatgggagagataatggaggtcggaagatagttagaagttataaaaatattatccataaartataatgggagcttgagttacaatcaggactcctactacacgaaaatttaaggaggatagaaacataagatgtaatcaattacagagataaatagatgtacacacacattactgtatt

SEQ ID NO: 418356 - DNA, 600 bp, Homo sapiens
gattggttccaagaccccaaagacaccaaaattcctgctgctcaagtgtattatgtaaaacggctttgtatttatttgcacataacctatgctcctcttcctctattctttaaatcatttctaggttacttataatccctaatacaatgcaaatagtatgtaaacagttgttatactatattgtttagggaataatgacaagaaaaaaagtctrtacatgttcaatacagatgcaaccaactactttttattcaaggttggttgaatctgcagatgtggatcccttgaattagtagcaattattattgaagataaagcaatgttttaaaactttttttcccagaaaagagatatcatcctagataactttcataaaaaagatatatgagtcaaaaattatttggaggaagttcaaatataaaattatctttatatatagctttaattattattttaaacatgtttttgaaataaacttaaagtattattggtcctcagttgtctggcatttctctgattttcacagagaaggtaaaacagctattagagaaggactaaaactttcgtttagaaaaaaatttcttaaagagataaattagc

SEQ ID NO: 418357 - DNA, 602 bp, Homo sapiens
cgtagatttttgactgtgtggggcttgatgctcccaacccctgcgttgttcaagggtcaactgcgtattataaatcaatttgcttctatccatagccactgccatcattccaagccaagccattctcatttttaactcagatgatgtgcagtagcatattaactggtcttcttgtttccactcttgtccacctctaacctattaagcacccagcagccagattgagcttatgtaaatgtaaattgaatattactcttcagcttaattccttctatgggtgtccacacagttaagaagaaatccgtaacttttaacatggcctgtgtgatcttgcctatgcttgttacttcagtctaattgccttgctactttctactgtctgaccaggtttcagccacagtaatcttcatctttcttgaatatcttaaactctttcttttccatcttagggacttttatttgctcttcactctgtctgaaaccatcctgtctaatgcctctttgtcttttagatatgcactttataatctaaattagatmccataacatccatttttttcactatacttactacaatttgaaattaaatatttttagtgtgt

SEQ ID NO: 418358 - DNA, 591 bp, Homo sapiens
cctgcataatgcacattctgtataggagctgaaaaatgaagagagggagaagggtgaggaaaaatgttgtgtcttctacatggagctcactgtagcagccaccatttttttctttggcatggtctaactggcttgtcacgtctctgccaagatggcagtattgcrggtggcatgttttcagtgcactaaccaacaccccaacgcctgtcaggagagaacaacctgcaagtaatcggagatattatgtattagtataggaattgttctccagtttttcaagatgctgatcagaaagataacgattcaaggattcacggcagtgaagtgagaaagtttttagcacccaaggggtcggactcaaaggaccacgcttctgacagtgattctggcatcctgatgaccagcccatggtggcacctagcagttgatgtcaaaagtgtaaaaggtaagatcaatgaaaacatattaaaagggaaagaaaggtgacaaaataatacgccaaagttaaggacttcagaatctctcagaagtctctaactttaatgcattaatgaatacaataaactgaactttctttaacatccttaacac

SEQ ID NO: 418359 - DNA, 591 bp, Homo sapiens
cctgcataatgcacattctgtataggagctgaaaaatgaagagagggagaagggtgaggaaaaatgttgtgtcttctacatggagctcactgtagcagccaccatttttttctttggcatggtctaactggcttgtcacgtctctgccaagatggcagtattgcgggtggcatgttttcagtgcactaaccaacaccccaacgcctgtcaggagagaacaamctgcaagtaatcggagatattatgtattagtataggaattgttctccagtttttcaagatgctgatcagaaagataacgattcaaggattcacggcagtgaagtgagaaagtttttagcacccaaggggtcggactcaaaggaccacgcttctgacagtgattctggcatcctgatgaccagcccatggtggcacctagcagttgatgtcaaaagtgtaaaaggtaagatcaatgaaaacatattaaaagggaaagaaaggtgacaaaataatacgccaaagttaaggacttcagaatctctcagaagtctctaactttaatgcattaatgaatacaataaactgaactttctttaacatccttaacac

SEQ ID NO: 418360 - DNA, 591 bp, Homo sapiens
cctgcataatgcacattctgtataggagctgaaaaatgaagagagggagaagggtgaggaaaaatgttgtgtcttctacatggagctcactgtagcagccaccatttttttctttggcatggtctaactggcttgtcacgtctctgccaagatggcagtattgcgggtggcatgttttcagtgcactaaccaacaccccaacgcctgtcaggagagaacaacctgcaagtaatyggagatattatgtattagtataggaattgttctccagtttttcaagatgctgatcagaaagataacgattcaaggattcacggcagtgaagtgagaaagtttttagcacccaaggggtcggactcaaaggaccacgcttctgacagtgattctggcatcctgatgaccagcccatggtggcacctagcagttgatgtcaaaagtgtaaaaggtaagatcaatgaaaacatattaaaagggaaagaaaggtgacaaaataatacgccaaagttaaggacttcagaatctctcagaagtctctaactttaatgcattaatgaatacaataaactgaactttctttaacatccttaacac

SEQ ID NO: 418361 - DNA, 601 bp, Homo sapiens
gttttgggccctgaaaatatagcagtgaacggtacctacaaactcctgattcttctttgtggtgggggagaccctaaaagcaggaaaatattaggcaagttctatgatgaaaacacagtgggctgttatgatagagacccattgtggggtagaggagacctcctagagagttgacgtatgaactgaggattaaatgactagaaacaggcaaagagacgtaggaaacatatgccaggcttatcatgaagtagaaattagccaggaygggttcagaaagcataaaggccaataggcaggagctcagttagagggaagattgcggggagatgaggtctaggaggttgtcaggggggtcagatcatatagctcaaagtaaggaacttgacgtttatctacaatattatagaaaaccattaagaagttttaagtatactagagagatcttatgatgtatattttaaaatagttaccctggaaccctagtagctgcatggataatgaattttagggacctggggaacaggcaagagatagtggtgacccagactagtacagtagtagccatgaagagatatgaagagaataggatggtttttgaaca

SEQ ID NO: 418362 - DNA, 601 bp, Homo sapiens
gttttgggccctgaaaatatagcagtgaacggtacctacaaactcctgattcttctttgtggtgggggagaccctaaaagcaggaaaatattaggcaagttctatgatgaaaacacagtgggctgttatgatagagacccattgtggggtagaggagacctcctagagagttgacgtatgaactgaggattaaatgactagaaacaggcaaagagacgtaggaaacatatgccaggcttatcatgaagtagaaattagccaggacgggttcagaaagcataarggccaataggcaggagctcagttagagggaagattgcggggagatgaggtctaggaggttgtcaggggggtcagatcatatagctcaaagtaaggaacttgacgtttatctacaatattatagaaaaccattaagaagttttaagtatactagagagatcttatgatgtatattttaaaatagttaccctggaaccctagtagctgcatggataatgaattttagggacctggggaacaggcaagagatagtggtgacccagactagtacagtagtagccatgaagagatatgaagagaataggatggtttttgaaca

SEQ ID NO: 418363 - DNA, 601 bp, Homo sapiens
gttttgggccctgaaaatatagcagtgaacggtacctacaaactcctgattcttctttgtggtgggggagaccctaaaagcaggaaaatattaggcaagttctatgatgaaaacacagtgggctgttatgatagagacccattgtggggtagaggagacctcctagagagttgacgtatgaactgaggattaaatgactagaaacaggcaaagagacgtaggaaacatatgccaggcttatcatgaagtagaaattagccaggacgggttcagaaagcataaaggccaataggcaggagctcagttagagggaagattgcggggagatgaggtctaggaggttgtcaggggggtcagatcatatasctcaaagtaaggaacttgacgtttatctacaatattatagaaaaccattaagaagttttaagtatactagagagatcttatgatgtatattttaaaatagttaccctggaaccctagtagctgcatggataatgaattttagggacctggggaacaggcaagagatagtggtgacccagactagtacagtagtagccatgaagagatatgaagagaataggatggtttttgaaca

SEQ ID NO: 418364 - DNA, 475 bp, Homo sapiens
atgacttttttagtttggagaatgcccttcaccctatgactggcataccgcaacacactcattagccctttgttggctgacactttgaaaacatgcagcctcaaagaccattgttaagtcatccatggggtttgtttgaccatgaaggagacttcttcacsattgagttaccaggttcaacaggtcctgggcatctgctttgtgctgtttacctctgaagatcaaaagataaatcagaatctttgctctcaggatttagtctactgggaattctaaacacacataaattgacgatgtaagatatggtaccataaatgctcagagtgaaatgcaaacagaatacagtgggtgcttagaaaaggcaactatgaatgttggctgggtgtggtggctcacgcctgtaatcccagtactttgggaggccagcgtgggcagatcacttgaggtcaggagttcgaaaccagccctgccaaca

SEQ ID NO: 418365 - DNA, 542 bp, Homo sapiens
gagttttccatgaaatgcctttttaaaaaatacccaaagcatcaaatgagcttttcagcttgatgaagaacttaagaaatttcatcattccttttcttcctggctgaccttttaattttacgcaagatatacaggagtgatttgtcttgtctggtttgtaaggatttttaatcaccagccacacacattagtcactggcttttgtacstacaagcccaattttctttgttttgggggttttttaaataagtttgtttgttcatttatttggagacatggatcctgttctgtcccccaggctggagtgcagtggcatgatcatatcctcaaactcctggattcacgtgatccttccacctcagtctcccaagtagctgggactacaggtacacaccaccacacccagctagttttaaaaaaaattttatagagacagggtctcactgtgttgcccaagctgacacttacagtaacagtaggatcagactgagagctggaaaaggaacagcgcaatgggattggtagcataaaagatttaccac

SEQ ID NO: 418366 - DNA, 515 bp, Homo sapiens
ggaggctgaggcacgaggatcacttgagtccagaagtctgaggttgcagtgagccatgatcgtaccactgcactccagcctgagtgacaggctgacagagtgggacgctgtctcagaaaaaaaaagaaaagaaaaagaaaaaataaagaaatctcattctactttacttaccacacacatatgttcatatcatgtgttaaacattgtcttttaaaaaatagcttagggccagatgtgttgcctcaggcctgtaatcccagtactttgggaggccaaggtggaagaactgcttgaggtcaagagttagagaccagcctgggcaacatactgagactctgtctctatttcaaaacaagcaaacagcttagaaaatcattttctttaactcttacctctgatgcttttaattatgtgttctcttatggwgattggctggggttaaaatattctgtagcattgctttgcatcatagccccagagaaaatgaaaggggaagaaggagttagcttcccttt

SEQ ID NO: 418367 - DNA, 572 bp, Homo sapiens
tattgttcttcggctcagtaatgttaggacgaaacaaacccttgttattctaattgtttgaattatccagttgagatcctgggcagtcttgtcctgtttaatgactgacaattaggcttcaatggcgttcacgttgacgggtgctggatcgcccggcttggggcgtctcacgtggcttcagccctgccctccctgcggatctggctctggtacccaccgcgctgaaggagggagcgtgggaacacgtgagcctctctgcacagggaggtcccaggactgacaccgacacggaatctcctcaccttccacgggtccctcgggtccccaaatccaaactcacgccgggaagtacctcaacgcacttccgccctggcccaggctggacaaagcccaggtgctgctgagctggaaactcgctcttcaatgasgttcatctttttccgcgccaatgacatctttatgggggaggcattcagttatgcgcccgaggctcagcacctcatgtgcagttgtgggtctgagtcctggatagaagctggtggagggtctgggggttttgttcaccccacact
